United States Patent Application Publication US 2024/0327476 A1 - sequence listing, part 70

SEQ ID NO: 132107 - DNA, 981 bp, synthetic construct
  misc_feature 1..981: note = Description of Artificial Sequence: Synthetic coding sequence
  source 1..981: mol_type = other DNA
caggcggaagcacaggctaaagtggataaaaaacgtgataaaatcgagcggaagatacttgattcccaggagcgggccttttgggacgtgcaccgacccgtgccaggctgtgtcaacacaaccgaggtcgatattaaaaagtcctctagaatgcgtaacccacataagacacgtaaaagcgtgtacggtctgcaaaatgacattagatctcactcaccaactcacactcctaccccagagactaagcctcctaccgaggatgaactgcagcaacaaatcaaatactggcagatccagctggaccgccacaggttgaagatgagcaaagtcgctgattcgctgctgtcatacaccgagcaatacttggaatacgatccttttttattaccacccgatccctctaacccttggctctctgacgacactacgttctgggaacttgaggctagtaaggaaccatcacagcagagggtgaaacgttggggatttggcatggacgaggcactgaaagaccccgtggggcgagaacagttccttaagttcttagaatccgagttctcgtcagaaaatctgaggttctggttggctgtcgaggatctcaagaaacgcccgattaaggaagttcctagccgggtacaggaaatctggcaagaattcctagctcccggtgccccatcagcaatcaacttggactctaagagctatgacaagaccacccaaaacgtcaaggaacctggtcgttacacttttgaggacgctcaggaacatatttacaaactcatgaagagtgattcttatcctagatttattagatcttcagcataccaagaactgcttcaggcgaaaaaaaagagcggcaactccatggatcgtcggacctcatttgaaaagttcgctcagaacgtcgggaggaatatccccatcttcccttgtcataaaaattgtaccccaacactgagagcttcaactaatttgttatag

SEQ ID NO: 132108 - DNA, 1182 bp, synthetic construct
  misc_feature 1..1182: note = Description of Artificial Sequence: Synthetic coding sequence
  source 1..1182: mol_type = other DNA
atggcggcgcacggctatttcttcccaatttccgatcacgtcctgaccctgaaggatgacgggacgttttaccgattccagaccccgtacttctggccatcaaactgttgggaacccgagaacactgattatgcggtgtacctttgcaaacggaccatgcagaacaaggcaaggctcgagctggcggactatgaagccgagtcactcgccaggttgcagcgagctttcgcgagaaaatgggaatttatttttatgcaggcggaagcacaggccaaggtagataaaaaacgggacaagattgaacgcaagattctggacagtcaagagagagccttctgggacgttcacagacctgtgccagggtgcgtgaacactaccgaggtggacataaagaaaagcagtaggatgcgcaacccccacaagacccggaaaagcgtctatgggctgcagaacgatattcgctcgcactcgcctacccatacccccacccctgagaccaagcccccaacagaagacgaacttcagcaacagattaagtactggcagattcagctggaccggcatcgactgaagatgagtaaagtcgccgattcactgctgtcttataccgaacagtacctggagtacgacccttttctgttaccccccgacccaagcaatccctggctcagcgatgacacaacgttctgggaactcgaggccagcaaggaacccagccagcagcgggtgaagcgttggggtttcggcatggatgaagctctgaaggatccagttggacgcgagcagttccttaagttcctggaaagtgagttctcttccgaaaatctgagattttggctggcagtggaggaccttaaaaaacgccctataaaggaggtgccctcacgggtgcaggagatctggcaggaattccttgctccaggtgcaccctccgcgattaacttggattcaaagagttatgacaagactacgcagaatgtgaaagagcccggacgatacacttttgaagacgcccaagagcacatctataaactgatgaagagtgatagttacccccggtttatcagatcatccgcctaccaagaactgttacaggccaagaaaaaaggaagaaatatcccaatatttccctgtcacaaaaactgtaccccgaccttaagagcatcgaccaacctgctctag

SEQ ID NO: 132109 - DNA, 774 bp, synthetic construct
  misc_feature 1..774: note = Description of Artificial Sequence: Synthetic coding sequence
  source 1..774: mol_type = other DNA
atgagcagcgcccccaatggtcggaaaaaacgccccagccgcagcacaagaagtagcatttttcagatctcaaagccgccactccagtcaggggattgggaacggcgagggagcgggagtgagtcggcacataagactcagagagctctggacgactgtaaaatgctcgtgcaggaatttaacacacaggttgcactctatcgcgagttggtgatcagcatcggcgacgtgtctgtaagctgtccttccctgcgggcggaaatgcacaaaacaagaacaaagggttgtgagatggcgagacaggctcaccagaagctagctgcgatctccggacctgaagacggcgagatccatcctgagatttgtcggctctatattcagctccaatgttgtttggaaatgtataccaccgagatgctaaaatcaatctgtctattgggatcgctccaattccacaggaaaggtaaggaaccagggggcggcacgaaatcactggattgtaaaatcgaggaatcagcagagacaccagcactggaggatagttctagcagtcccgtggattcccagcaacacagttggcaagtgagcacagacatcgagaacactgagagagacatgcgggagatgaaaaacctcctatctaaacttagagagacaatgcctctgccgctcaaaaatcaagacgatagttcactgcttaacctgacaccatatccacttgttaggagacgcaagagaagattcttcggactttgttgtttgatttcttcatag

SEQ ID NO: 132110 - DNA, 2025 bp, synthetic construct
  misc_feature 1..2025: note = Description of Artificial Sequence: Synthetic coding sequence
  source 1..2025: mol_type = other DNA
atgacgattagacaccaaggacaacaatacagacccaggatggctttcctccagaaaattgaagcccttgtcaaggacatgcaaaacccggaaactggagtccggatgcagaatcagcgcgtactggtgacgtctgtgccccatgctatgactggtagtgatgtacttcagtggatcgtgcagcgactgtggatcagctctctggaggctcaaaatcttgggaatttcatcgtccgatacgggtatatctatcctcttcaggatccaaagaacctaattctcaaacccgatgggtccctctaccgcttccagactccttacttctggcctactcagcagtggccagccgaggatacagactacgcgatttatctggctaaacggaatatcaaaaagaagggaattctggaggagtacgaaaaggaaaactataactttctcaaccagaagatgaactataaatgggatttcgtgatcatgcaagctaaagagcagtatagggcaggcaaagagagaaacaaggccgatcgatatgccctggattgtcaggaaaaagcttactggttggtgcatcgatgcccccccggtatggacaacgtgctcgattatggtctcgatcgtgtaaccaaccctaatgaagtgaaagtgaaccagaaacagactgtggtggccgtcaaaaaggaaattatgtactatcagcaggccctcatgaggtcaaccgtaaagtctagcgtgagtttgggaggaatcgttaaatactccgaacagttctcttccaatgacgctattatgtctgggtgtttgccgtctaacccttggatcaccgatgacactcagttttgggacctgaacgccaaattagtggagatcccaactaaaatgcgcgtcgaacgatgggccttcaatttcagtgagctcatccgtgatccaaaaggccgccaatcctttcaatactttctcaaaaaagagttctccggtgagaacttagggttctgggaagcctgcgaagacctaaagtacggagatcagtccaaagtgaaagagaaagcggaagaaatatataagctctttctggctccaggggccaggagatggatcaacattgatgggaaaacaatggatataacagtcaaggggttgaaacatcctcaccgatatgtcctcgacgccgcacagacgcatatctacatgctcatgaaaaaggactcgtatgcccgatacctcaagtcacctatttacaaggacatgctcgcaaaggccattgagccacaggaaacgaccaagaaaagcagtaccctccccttcatgcgccgacacctgagaagctccccctctccggtgattctccgccagcttgaggaagaggccaaggcacgggaagccgcaaatacagtcgacatcacccagcctgggcagcatatggcccctagcccgcatctgactgtgtatactggtacttgtatgccgccgtcaccttcttcgcccttttcttcatcctgccgctcaccgaggaagccattcgcatctccaagtcgtttcataaggcggccgagtaccaccatttgtccctccccaatcagagtcgcccttgagtcttcctcaggtctggagcagaaaggtgagtgctccggtagtatggccccacgaggaccgagcgtgaccgaaagctcggaagccagtctggatacatcatggcccagaagccgaccacgcgcacctccgaaggcccgaatggccctgtcatttagtcgattcctcagaagagggtgcctcgcctctccggtctttgcccgcctctcaccaaagtgcccagctgtgtcccacggtcgagtgcagccgctcggagatgtgggacagcagctgccacgtctgaagtccaagagggtcgcaaatttcttccaaattaaaatggacgttcctactggttctggcacttgcctgatggattctgaagatgccggcactggggagtcaggagacagggcgaccgagaaagaggttatttgtccttgggagagtttatag

SEQ ID NO: 132111 - DNA, 2016 bp, synthetic construct
  misc_feature 1..2016: note = Description of Artificial Sequence: Synthetic coding sequence
  source 1..2016: mol_type = other DNA
atgaccattcgtcaccagggccagcaatatcgaccaaggatggcgttcctccagaaaatcgaagcactggtaaaggacatgcagaacccggaaaccggcgttcgcatgcagaaccagcgagtgctcgtgacctccgtgcctcacgccatgaccggcagcgatgtgcttcagtggatcgttcaaaggctatggatcagctctctcgaggctcagaaccttggtaatttcatcgtgcgctacggatacatttaccctctccaggaccctaagaatctcattctgaaacccgatggcagcttgtaccgctttcaaacaccctacttctggccgacccaacaatggcccgctgaagacacggattatgccatctacctagctaaacgtaatattaagaagaaagggatcctggaggagtatgaaaaagaaaattacaattttctgaaccagaagatgaactacaaatgggacttcgtgatcatgcaggcaaaggagcagtatcgggcaggcaaagagagaaacaaggccgaccgctatgctctggactgccaagaaaaagcttattggttggtgcacaggtgtcctcccggtatggacaatgtgctggattatggcctggaccgagttactaatcctaatgaagtgaagaaacagaccgtcgttgcggtaaaaaaagagatcatgtattaccagcaggcccttatgcgctccaccgttaagtcctccgtgtcgctcggaggaattgttaagtactctgagcaattctccagcaacgacgccataatgtccggctgtctcccgagcaacccatggatcaccgacgatacacagttctgggatcttaacgccaaactggtcgaaattccaaccaagatgcgcgtcgagaggtgggcgtttaatttcagcgagctcattagagaccccaaggggcgtcagagctttcaatacttcctgaagaaggaattttctggcgagaacctgggattctgggaggcctgtgaagacctgaagtacggcgaccagtctaaggttaaggagaaggccgaagagatatacaagctgtttctggcgccaggcgcgaggcggtggatcaacatcgatggaaaaactatggacataacagtcaagggcctgaagcaccctcataggtatgtgctggacgcagctcagacccacatttacatgcttatgaaaaaagattcatacgcaaggtatctgaagtctccaatctataaagatatgttggcaaaagccattgagccccaggagacaacaaagaaaagcagcacacttcctttcatgcgaaggcacctgcgatcctcaccctctcccgttatactccggcaattggaggaggaagccaaagcgagagaagccgccaatacggtagatataacacagccgggccagcacatggccccctctccacacctgactgtatacaccgggacgtgtatgccccccagcccatcaagcccattcagtagctcttgcagatctcccagaaagccattcgcttcgccaagcaggtttatcagacgcccctctaccaccatctgtccttcacctatcagggtcgcactggaaagtagctccgggctggaacagaaaggcgagtgctcaggctctatggccccgagagggccctcagttacagaaagctcagaggcctccctggacacatcatggccgcggtcccgccctcgcgcacctccaaaggctcggatggcgctgagcttttctcgttttctgcggagagggtgcctagcttcccccgtcttcgcaagactctcacccaaatgccccgccgttagtcatggcagagtgcaacccctgggagacgtcgggcagcagcttcctcgcctgaaatcgaaacgggtggccaattttttccagatcaagatggacgtccctacaggctctgggacttgtttgatggacagcgaagatgccggaactggtgaatccggggatcgggccacagagaaagaggttatttgtccgtgggagtcactctag

SEQ ID NO: 132112 - DNA, 4008 bp, synthetic construct
  misc_feature 1..4008: note = Description of Artificial Sequence: Synthetic coding sequence
  source 1..4008: mol_type = other DNA
atggaatccgagatgctgcaatcccccttgcttggactaggagaggaggatgaggcagatctcaccgactggaacctgcccctggcttttatgaagaagaggcactgcgagaaaatcgagggcagtaaatcgctggcccagtcttggcggatgaaggacagaatgaagaccgtttcagtcgcactcgtgctctgtctcaatgtcggggtggacccccctgacgtcgttaagactacaccttgtgctcggctggaatgttggatcgatccattgtctatgggaccccaaaaggcactggaaaccataggagccaacctacagaagcagtacgagaattggcagcctcgggctcgttacaagcagagccttgacccaaccgtggacgaagtcaaaaagctctgcacttcacttagacgcaatgccaaggaggaacgcgtgctgtttcactataacggccacggagttcctcgccccacagtgaatggtgaggtttgggtgtttaacaaaaattatacacagtacattcctttgtccatctatgatctgcagacctggatgggatcaccatcgatttttgtgtatgattgctccaacgccggcctgattgtcaaatccttcaagcagtttgcactccagagggagcaagaacttgaagtggcagccataaatcctaatcaccctctagcccagatgcctctacctccttcaatgaagaattgtatccagttggccgcatgcgaagcaactgaactgcttccaatgatccccgatctccctgcagatctattcacttcttgcctaaccacacctatcaagattgccctgaggtggttctgcatgcagaagtgcgtgtcactcgttcccggagtgacattagacttgattgagaaaataccgggcaggttgaatgataggcgaacacctcttggagaacttaattggattttcaccgctattactgacacgatagcttggaacgttctgccccgagacttgtttcagaagctgttcaggcaggatctgcttgtggcttctctctttcggaattttctgctggctgagagaatcatgagaagttataactgtacacctgtgtcatcccctagacttccgccaacatacatgcacgccatgtggcaggcgtgggatctcgcagtcgatatttgtctgagtcaactgccgactattattgaggaagggacagccttccgacattcacctttctttgcggaacagctgacggcctttcaagtctggctgacaatgggcgtggagaatcgcaacccacctgagcagctcccaattgtcctgcaagtgctgttgagccaggtccatcggcttagggctttggacctattgggtcgcttcctggacctcggaccatgggcggtaagtctcgcactgtccgtgggcatcttcccctacgttttgaagttgcttcagagctccgcaagagagctacgcccgctgctggtgttcatttgggctaaaatcttggccgtggacagcagttgccaggccgatctggtcaaagacaatgggcacaagtactttttgtcggtcttagctgacccatacatgccagcagaacaccgcacgatgactgcctttatcctcgccgtgattgtcaactcgtaccataccggacaagaggcatgtcttcaggggaacctgatcgctatttgtttggagcaactgaacgacccacacccactcctgcggcagtgggtagctatctgcctgggccgaatttggcagaactttgacagcgctagatggtgtggcgtgcgagattccgcccatgagaagctgtacagcctcttgtctgaccctatccccgaggtgaggtgcgccgctgtgtttgctctcggaacttttgttgggaacagcgccgaaaggactgatcattccaccactatagaccataatgtcgcgatgatgctggctcaactggtgagcgatggcagcccaatggttcgcaaggaactggtggttgccttaagtcacctcgtagtacaatacgagtctaatttttgcaccgttgccctgcaattcattgaagaggagaagaactacgcactgccgtcccccgcaaccacggagggagggagtctgacacccgtgcgagactctccatgcacccctcgactgaggtctgtgtcctcctacggcaatatccgcgccgtggccactgctcgctccctgaataaatctctccagaacttgagtttgacggaggaatctgggggcgcagtggcgtttagccccgggaacctctctactagctcctctgcatcttccactctgggatccccagagaacgaggagcacattctgagctttgaaactatcgataagatgcgacgcgcctcctcgtactcatctcttaacagtctgataggagtcagcttcaactcagtgtatactcagatttggcgtgttttgctgcatctcgctgccgatccataccctgaggtgagcgatgtggcaatgaaggtgctgaactccatcgcttacaaagcgaccgttaacgctagacctcagcgggtgcttgacacctcatccttaacccagagcgcacccgccagtccaacaaataagggagtgcatattcaccaggccggtggctccccccccgcaagctcgacatcctcatcaagtcttaccaatgatgtggcaaaacagcctgtgtcacgcgatctgcccagtgggagacccggtacaacagggcccgcgggcgctcagtatacacctcacagccaccaattcccacgtacaagaaagatgttcgacaagggcccagaacagaccgctgacgatgcggatgacgccgcaggtcataaatcgtttatcagcgctaccgtgcagacaggcttttgtgactggtctgcgcgttacttcgctcagcccgttatgaaaatccctgaggagcatgatttagagtctcagattcgaaaagaacgcgagtggcggttcctccgcaattcccgagtgcgccgccaagcgcagcaggtgatccagaaaggcatcactcggctggatgatcagatcttccttaacaggaaccctggcgttccatccgtggtgaaattccatcccttcactccatgcattgccgtggctgacaaggactctatttgcttctgggattgggaaaaaggcgaaaagctcgactatttccacaatgggaaccctcgctacacacgcgtcacagctatggagtatttaaacgggcaagactgcagtctgctacttaccgcaacagatgacggagcgattcgagtctggaaaaactttgccgacctcgagaagaaccctgagatggtcaccgcctggcaggggctgtccgatatgctccccactacccggggcgccggtatggtggtggactgggagcaggagactggcctcttaatgagctccggagacgtccgcattgttcgcatttgggatacagatagagagatgaaggtgcaagacatcccgaccggggctgactcgtgcgtcacttctctttcttgtgattcccaccgttccttaatcgttgcgggactcggagacggatccatccgtgtgtacgataggagaatggccctttctgaatgccgagtcatgacttatagagagcataccgcctgggtcgtaaaggcttccctccaaaaaaggcccgatggacacatcgtctcggtgtctgtgaatggagacgttagaatatttgatcccagaatgccagaaagcgtgaatgtgctccaaatcgtgaagggacttacagctcttgacatccacccgcaggccgacctcatcgcttgtgggtcggtgaatcagtttacagccatctacaattcttccggagagctcattaacaatataaaatactatgatggatttatgggtcagcgggttggggccatctcctgtctggcattccacccccactggccccatctggccgtggggagcaatgactactacatttccgtctatagcgtggagaagcgagtgagatag

SEQ ID NO: 132113 - DNA, 990 bp, synthetic construct
  misc_feature 1..990: note = Description of Artificial Sequence: Synthetic coding sequence
  source 1..990: mol_type = other DNA
atgggaagtcctagcatctttgtgtatgactgcagcaatgccggtctcatcgtgaagtcgtttaagcagtttgccctgcagcgggagcaggagctggaagtagccgcaatcaatcccaaccaccccctcgcccagatgcctctccctcctagcatgaaaaattgcattcagctggccgcctgcgaagccacggaactgctgcctatgattcccgacctgcctgcagacctctttacctcgtgtctcactacccccattaaaatcgctctccggtggttttgcatgcagaagtgtgtgtccttagtccctggcgtgaccctggacctaattgagaagattcccggcaggctcaacgatcgcaggacacctctgggtgaactcaattggatcttcacggccattactgatacaatcgcctggaatgtattgccaagagacctcttccagaagcttttccgacaggatctgcttgtggcctcattgttccggaatttcctgttggccgagcgtatcatgagatcgtataattgcacacccgtcagcagtcccagattgccaccgacctacatgcacgcaatgtggcaggcctgggacttggctgttgacatctgcctgagtcagctgccaacaattatcgaggagggcaccgcatttaggcatagtccattctttgctgagcaacttacggcttttcaggtatggctgaccatgggcgtcgaaaatcgtaatccacccgagcagctgcctatcgtgctgcaggtgctcctctcccaggtccatcggctgcgcgccctcgatttattggggcgattccttgatctgggcccatgggccgtcagcctggctctgagtgtcgggattttcccatacgtgctgaagctcctccagagttccgctagagaattgcggcctctcctcgtctttatctgggccaaaatcctggcagtggacagtgtttctattcctgctctgctccccagggtaatgtag

SEQ ID NO: 132114 - DNA, 3534 bp, synthetic construct
  misc_feature 1..3534: note = Description of Artificial Sequence: Synthetic coding sequence
  source 1..3534: mol_type = other DNA
atggaaagtgaaatgttacagtcaccactcctaggattgggggaggaagacgaagccgacctgaccgactggaacctgcctctcgccttcatgaagaagcgccattgtgaaaagattgagggatctaaaagcttggcccagagttggcgtatgaaggatcggatgaagaccgtgtccgtcgccctggttctgtgcctcaacgtgggcgtcgaccctcctgacgtcgttaaaaccacaccttgcgctcgactcgaatgttggatcgaccctctgagtatgggtcctcagaaagccctagagaccatcggtgctaacttgcaaaagcagtacgagaattggcagccgagagcacgatataagcagtcattggaccctacagtggacgaggtgaaaaagctctgtaccagcttgcgtcgaaatgcaaaagaggagagagtgttgtttcactacaacggtcacggtgtgccaaggcctaccgttaatggagaggtgtgggtgtttaataaaaactacactcaatatatccccttaagtatttatgacctccagacatggatgggcagccctagcatctttgtgtatgactgtagtaacgcggggcttatcgtgaaatccttcaagcagtttgctctccagagagagcaggagctagaagtggctgccatcaaccctaaccaccccttggcccagatgccactccccccatctatgaagaactgcatccagctggcagcctgtgaagctactgaactcttgcccatgatccctgacctccccgctgatctgttcaccagctgcctgacgaccccaatcaagatcgcgttaaggtggttttgtatgcagaaatgtgtttccctcgtacccggggtaactctcgacctgattgaaaaaattcctggtaggctgaacgatcgaagaacacctctgggagaactgaattggatatttaccgcaattacagataccatagcctggaatgttttacctagggacttgtttcagaagctgttccgacaggaccttctcgtggcgagtctatttcgcaacttccttttggcagaacgaataatgcggagctataattgtactccagtctcctcccccaggctcccgccaacatacatgcacgctatgtggcaggcgtgggacctagccgtcgatatctgcttatctcagttgcccactatcatcgaggaaggaaccgctttcaggcactctcccttcttcgctgaacagctcaccgcctttcaagtgtggctgaccatgggcgtggagaatagaaatccaccagagcaactgcctatagtgctccaagtgctgttaagccaggttcacaggctaagggcacttgacctgttgggaagattcctagatcttgggccttgggctgtgagcctcgctctttcagtcggcatctttccatacgtgcttaagcttctccagagcagcgctagggaacttcggcccctccttgtgttcatatgggccaagatcctggctgtcgatagtgagctggtcgtggcgttatcacacctggtggtccagtatgagtcgaacttttgtactgttgcgcttcagttcattgaagaggaaaagaattatgcactccccagccctgccactaccgaaggaggctcccttacacccgtgcgagattcgccttgcaccccccggctgcgaagcgtgtcatcctatgggaatataagagccgtagcaactgcgagatccctgaataagtcactgcagaatctgagcctgacggaggaatcagggggggccgtggcatttagcccaggtaatttgtccaccagttcttccgccagttccacacttggaagccctgaaaacgaggagcatatcctctcgtttgaaactattgacaagatgagacgtgcttcctcttactctagccttaacagcctgattggcgtgtcatttaacagcgtatatacccagatatggcgggtgcttctccatctcgcggctgacccctaccctgaagtgtctgatgtagcgatgaaggtgctcaattctatcgcttacaaggcaaccgtaaacgctagacctcaaagagtcctggacacaagctcactgactcagagcgcccctgcgtcgcccaccaataaaggcgtacatattcatcaggcaggggggagtcctcccgcctcatctactagctcctcttctctgacaaacgatgtagccaagcagccagtttcccgcgatctcccctcgggtcgaccaggtactacaggaccagccggtgcacagtacaccccacactcccaccagttccctcgaaccagaaaaatgttcgataaaggacccgagcaaacggccgacgatgcagatgatgcagcaggacataagtctttcatctctgccacagtccagaccgggttttgcgattggtctgcgcggtatttcgcacagcccgtcatgaagattcccgaggaacacgatctggagtctcaaatacgtaaagaacgggaatggcggtttctgcggaacagccgggtacgtcgccaggcccagcaggttatccagaagggcatcacaaggctcgacgatcaaattttcttaaaccgtaatcccggagtgccctctgtcgttaaatttcatccttttaccccttgtattgcagtagccgacaaggactctatatgcttttgggattgggaaaagggagagaagctagactattttcacaacggtaaccccagatatacccgggtaaccgccatggaatatctgaacggccaggattgttcgctgctcttaactgctacggacgacggtgccatcagagtgtggaagaactttgcggaccttgaaaaaaaccctgagatggtgactgcatggcagggcctatccgacatgctccctacgacgcgtggggctggtatggtggtggactgggagcaggagaccggccttctgatgagttccggggatgtgcgaatcgtgcggatctgggacaccgatagggaaatgaaggttcaggatatccctaccggagctgatagctgcgttacttccctgtcgtgtgatagccaccgctcactgatcgtggcgggcctcggggacgggtctatcagagtttacgaccggagaatggcactcagcgaatgtcgtgtaatgacctatcgagagcacaccgcctgggtggtgaaggcttccctccaaaagagaccggacggtcacatcgtcagtgtctccgtaaacggcgatgtcagaatcttcgatccacgcatgcctgaatccgttaacgtacttcaaatcgtgaaaggcttgaccgccttagatattcatccacaagctgatcttatcgcttgtggctccgtgaaccaatttaccgcaatatacaactcatccggtgaactgatcaataacattaagtactatgacggcttcatgggacagcgcgtgggggccatcagttgtctcgcattccaccctcattggccacatctcgctgtcggttccaatgactattacatctccgtatactctgtcgagaaacgcgtgcgatag

SEQ ID NO: 132115 - DNA, 2097 bp, synthetic construct
  misc_feature 1..2097: note = Description of Artificial Sequence: Synthetic coding sequence
  source 1..2097: mol_type = other DNA
atgcaaaacagcgaagggggcgccgattcccctgccagcgtggctctgcgcccttcagcagctgctccgcccgtccccgctagcccacaacgggtgctggtgcaggctgcttcatctaatcccaaaggagcccagatgcagccgatatctctccccagggtccagcaggtgccccagcaggtacagcctgtgcagcacgtctacccagcccaggtacagtatgtggaaggtggggacgctgtgtacactaacggcgcaatccgaacagcatacacttataaccccgagccgcaaatgtacgctccctccagcacggctagctacttcgaagctccaggtggcgctcaagtcacagtcgccgcgtcgtctccacccgccgtaccatcccatagcatggttgggatcaccatggatgttggcggtagtcccatcgtgtctagcgccggagcctacctcatacacgggggtatggactcaactcggcactctttggctcacacctctagatcatcaccggcaacacttcagtggctgttagataactacgaaactgccgaaggcgtctccctgcccagatcctccctatataatcactacctgagacattgccaggaacataagctggatccagtcaatgccgccagctttgggaagttgatcagatcagtgttcatgggcctcagaacaagacggcttggaacgcgtgggaattctaagtaccactactacggcatcagacttaagcctgattcccctctgaatcgcctgcaagaagacacgcagtacatggccatgaggcagcagcctatgcatcagaagccaaggtatagacccgctcagaagacagattccctcggggactctgggagccactctgggcttcattcaactccagagcaaactatggcagttcagtcacagcatcaccaacagtatattgacgtcagccacgtcttcccggagtttcctgctcctgatctcgggagttttctacttcaggatggcgtgactctccacgacgtgaaggcactgcagttggtgtatcgccgtcactgtgaggcaaccgtcgatgtggtcatgaacctgcaattccactatattgaaaagctgtggctgagcttctggaattcaaaagcctccagcagtgacgggcccaccagcctccctgcttctgacgaagatccagaaggagcagtcctccccaaggacaaactaatctccctgtgtcagtgcgacccaattctgaggtggatgagatcatgcgaccacatcttataccaagctttggtggagattctgatcccagatgtcctgaggccggtcccgtctactcttacccaagccattaggaattttgcaaagtcgctggaaggatggctgaccaacgctatgagcgattttcctcaacaagttatccagacaaaggtgggcgtggtatctgccttcgcccagactttacggcggtacacttccttaaatcacctcgcccaagctgccagggcggtcctgcagaatacctcccaaattaaccagatgctctctgacctcaaccgtgtggacttcgcaaacgtccaagaacaggcttcctgggtctgccagtgtgaagaaagcgtggtgcagcggctcgaacaggatttcaagctaacactgcagcagcaatccagcctagaccaatgggcctcgtggctggactctgtggttacacaggtgctgaagcagcatgctgggagtccttcttttccaaaggcagcacggcaatttttgttgaagtggtcattttatagcagtatggttatccgtgacctgacactgaggagtgccgctagtttcggatcatttcatcttatcagactgttgtatgacgagtacatgttttatctggtagagcaccgggtggctgaagccaccggtgagacaccgatcgccgttatgggtgaattcaatgacctcgcatctctcagcctgactttactagataaggacgacatgggtgatgagcagcgaggctcagaagccggacccgacgcccggagccttggggaaccgttggtgaagagagagagatccgacccaaaccactccctgcagggcatctag

SEQ ID NO: 132116 - DNA, 2940 bp, synthetic construct
  misc_feature 1..2940: note = Description of Artificial Sequence: Synthetic coding sequence
  source 1..2940: mol_type = other DNA
atggctacacaggcctacaccgaacttcaggctgctcccccaccttctcagccacctcaagctccaccccaggcgcagccccaaccaccccccccgcctccccctgccgcgccacagccccctcagcctccaactgctgccgctactccgcagccacaatacgtgactgagctgcagtctccccagccacaagctcagccgcccggggggcagaaacaatatgtgaccgagctgccagctgtccccgccccttcccagcccactggcgcacctacaccttcccccgctcctcagcagtacatcgtcgttacggtttcagaaggtgccatgagggcttctgagaccgtgagcgaggcaagccctggcagcaccgcttcccagacaggggtgcctacacaggtggtccaacaagtgcaggggacgcagcagaggctgctggtccagaccagtgttcaggctaaaccaggacacgtctccccactccagctgacgaatatccaggtgccacaacaggcccttcctacacagcgcctcgttgtccagtccgccgcccccggatccaaaggaggacaggtctccctgacggtgcacggcacacagcaggtccactctcccccggaacagtcccctgtgcaagctaattcttcttcttctaagactgccggcgctccaaccggcacggtgcctcagcagcttcaggtgcacggcgtccagcagtccgtgccagtgactcaggaacgctcggtggttcaggctacccctcaagcacctaagcccgggcccgtacagcctctgaccgtacaaggcttgcagcccgtccatgtggcccaggaagtccagcaactgcagcaagtgccagttccccacgtgtatagcagtcaggtgcagtatgtggagggtggtgatgctagttataccgcttccgccatacgatcttcaacatactcttatcctgaaacacccctgtatacacagacagccagtacatcgtactacgaggccgctggaactgccacccaggtgagtacccccgccaccagccaagccgttgcaagctctggcagtatgcccatgtacgtgtccggcagccaggtggtcgcgagctctacaagtacaggggctggcgcatctaactccagtggcggtggtggcagcggcggaggcgggggtggcggaggcgggggcggtggagggggctctggctctacgggcggcggtgggtccggtgctggcacatatgtaatccaaggaggttacatgttgggctccgctagccagtcttattcacatactacaagagccagtcccgccaccgtacaatggctgctggacaactatgagacagccgagggcgtcagtctccctcgttcaactctctattgccactatctgctgcactgccaggaacagaagttagagcctgtgaatgcagctagctttgggaaactgatccgatccgttttcatggggcttaggacacgcaggttggggacaaggggcaacagtaaataccattactacgggctgcggatcaaggcctcttccccactgttgcgactcatggaggatcagcagcacatggccatgcgtgggcagccattctcacagaagcaaagactcaaacccatacagaagatggagggcatgaccaatggggtggcagttggtcaacagccctcgaccggcttgtcagacatcagcgcccaagtccagcagtaccagcaatttctggacgcttctcggtcactccccgactttaccgagctggatcttcaaggaaaggtcttgccagaaggtgttgggccgggtgatatcaaagcatttcaggttctgtaccgggaacattgcgaggccattgtggacgtgatggtcaatcttcagtttaccctggtagaaaccctatggaaaactttctggcgatacaacctatctcaaccgtctgaggccccccccctcgcagtgcatgatgaagccgagaagcgcttgccaaaagccatcctggttctgcttagcaaattcgagcccgttctgcagtggaccaagcactgcgacaatgttctctaccaaggtcttgtggagatcctgatccctgacgtcctgcgccccatcccctctgccctcacccaggccattcgcaatttcgcaaaatccttagagagctggcttacccatgccatggtgaacattcccgaggagatgctgcgcgtgaaggtcgctgccgccggagcttttgcacagaccctgagacgctacacttcactcaatcaccttgcacaggcagcccgcgctgttttgcagaatactgctcagatcaatcagatgttgtccgatcttaacagggtagacttcgccaacgtccaggagcaggcttcttgggtgtgcagatgtgaggaccgtgtcgtgcagcgcttagagcaggattttaaagtaaccctccagcagcagaacagtctggagcagtgggcggcttggttggatggagttgtatctcaggtgctgaagccctatcagggcagcgctggcttccccaaggccgcaaaattgttccttcttaagtggtcattttacagttccatggtgatacgggatctgacactgcgctctgcagcctcctttgggtcctttcatctaattcgtctcctctacgatgaatatatgtattacctgatcgagcatagggtcgcacaggccaaaggcgagactcccatcgctgtcatgggcgagtttgctaatctcgcaacgagtctcaaccctcttgatcctgacaaggacgaggaagaggaggaggaagaagaatctgaagatgagctcccacaagatatatctctggctgccgggggagaatctccggcgttggggcctgagaccctggagcccccggcgaaactggcgcggacggacgctcgagggctcttcgttcaggccttgccttcttcctag

SEQ ID NO: 132117 - DNA, 2172 bp, synthetic construct
  misc_feature 1..2172: note = Description of Artificial Sequence: Synthetic coding sequence
  source 1..2172: mol_type = other DNA
atgcagaattctgaagggggagcagactcccccgcatctgtggccctgaggccgtcagccgcagctccacccgtccctgctagtccacagcgtgttctcgtccaggcagcctcctctaatcccaagggagcccagatgcaacccatctctctgcctcgggtgcagcaagttccacagcaggtacagcccgttcagcacgtctacccggcacaggtccagtatgtggaggggggagatgccgtctacactaacggagctataaggaccgcctacacctacaaccccgaacctcagatgtacgcaccatcctccaccgcaagctatttcgaggccccaggtggagcacaggttaccgtggcagcctcctctccacccgctgttccaagccactctatggtcgggataacaatggatgtcggcggatctcccattgtttcctcagccggggcatacctcatacacggtgggatggattccaccaggcactcccttgcacacacgagcaggtcgtctcccgccactttggagatggccatcgagaacctccagaagtccgaaggcatcacaagtcataagagcggtcttttgaactcgcatctgcagtggctcctggacaactacgagacggccgagggtgtttcattgcctagatcatcactgtataatcattatctgagacattgtcaggagcataaactggatccggtgaacgccgcttcctttggtaagctcattcgatccgtgttcatggggctgcgaactcggagactgggaacacgcggaaactcaaagtatcattattacgggatcagactgaagccggactcccccctgaataggcttcaggaagacacccagtatatggcgatgagacagcagcccatgcaccagaaacccagataccgccctgcccagaaaactgattcacttggtgattcggggagccattccgggctgcactccacccctgagcagaccatggccgtgcagagccagcatcatcagcagtacatcgatgtctcacatgtttttcctgagttcccagcccccgacctcggatctttcctcttgcaagatggtgtcaccctccatgacgtgaaagcactccaattagtgtaccgcaggcactgtgaagccacagtggatgtggtgatgaacctgcagttccactacatcgagaaactttggctcagcttttggaattctaaggccagctcatcagatggtccgacatccctgccagcaagtgacgaggatcctgagggcgccgtattgccgaaggacaaactgatttcattatgtcagtgtgaccccatcttaaggtggatgcgttcctgcgaccatatcctgtatcaagcactggtcgagattctgatacctgacgtgctgcgccccgtgccgtcaaccctgacacaggcaataaggaatttcgctaagtccctggaagggtggttgaccaacgccatgtctgatttccctcagcaagtgattcagactaaagtgggcgtcgtatccgcttttgcccagaccctccggaggtatacatcactgaatcacctggcacaggcagctagagccgtgctgcagaacacttcacagatcaaccagatgctatccgatttaaacagggtggacttcgccaatgtgcaggagcaagctagctgggtatgccagtgcgaagaaagtgttgtccagaggctcgaacaggactttaagctgaccctgcagcagcagtcctcccttgatcagtgggcttcatggttagactccgtggtgacccaagtgctgaagcagcacgccggctctcccagtttccccaaagccgcccggcaatttctgctcaagtggagtttctattcttccatggtgattagagacctgaccctccgctccgctgcaagcttcggctcctttcatctcatccgccttctgtatgacgagtacatgttttacctggtcgaacaccgcgtcgccgaagccactggagagactccaattgccgtaatgggagagttcaatgacctcgcatccctcagtcttacccttctggacaaggatgacatgggggatgaacagagagggtcagaggccggaccagacgctcgctcgctgggggaacctctggttaagcgcgagaggtctgatcccaatcatagcctccagggcatctag

SEQ ID NO: 132118 - DNA, 2097 bp, synthetic construct
  misc_feature 1..2097: note = Description of Artificial Sequence: Synthetic coding sequence
  source 1..2097: mol_type = other DNA
atgcagaactccgaaggtggggccgactctcccgcctccgtcgcccttcgaccttccgccgctgcgccccccgtccctgccagcccgcaaagagtccttgtccaggccgcctcaagtaaccctaagggggcccaaatgcaaccaatctctctccccagggtgcagcaagtgccgcagcaggtccagccagtgcaacatgtttatcccgctcaagtacaatatgtggaggggggagatgccgtgtacaccaacggggccatccggaccgcatacacatacaacccagagccacaaatgtacgctccctcctccaccgcctcttactttgaggcaccgggaggagctcaagtcaccgtagccgcctcctccccccctgccgtaccctcccattccatggttggcataacaatggacgtcggcggctcccccatagtatcttcagcaggagcatatctgatccatggaggaatggactcaacacggcactccctggctcacacctcacgcagtagcccagcaactttgcaatggctcttggataactatgagactgccgagggcgtgagcctgccacgcagcagcctttacaatcactacctgagacactgccaggaacataaacttgaccctgtgaatgcagcaagcttcggaaaattgatcaggagtgtgtttatgggactcaggaccagaaggcttggcacacgcgggaactctaagtaccactattatggaatacggttgaagcctgatagcccattgaaccgtctgcaggaggacacacagtacatggcgatgcgccagcagccaatgcaccagaagccccggtatcggcccgctcagaaaacggactctcttggggactccggatcacatagcggactccattcgacaccagagcagaccatggctgtccagagtcagcaccatcagcagtatatagacgtgtcccacgtgttcccggagttccccgcgcccgatttgggatcgttcctgctccaggacggggtcacgctgcacgatgtgaaggctctgcagcttgtttataggagacactgtgaagccacagtagacgttgtcatgaatctccagttccattatatcgagaaactttggttgtccttttggaattctaaggcaagcagctctgatgggcccacttcgctcccggcctccgatgaggaccccgagggtgctgtgctgccaaaagacaaactgatctcactttgccagtgcgacccgatcctacggtggatgcgatcttgtgatcatattctgtatcaggccttggtggaaatcctgattcccgacgtactgaggcccgtgccttccactctcactcaggccattcgcaacttcgccaaatcattggaagggtggctcaccaatgctatgagcgacttcccccagcaggtgattcagacaaaggttggtgtggtgtctgcttttgctcagaccctgcgccgttatactagtcttaaccacttggctcaagcagctagggccgtgctccagaatacctcacagattaaccagatgctatcagatctgaaccgcgtagatttcgcaaatgtacaggagcaagcttcctgggtttgccagtgcgaagagagtgtggttcagcggctggagcaggactttaagctgaccctccagcaacagtcgtcccttgaccaatgggcctcatggcttgactccgttgtgactcaggtgctgaagcaacatgccggcagtccatccttccccaaggctgctcgacaatttctgctgaagtggtctttttacagtagtatggttatccgggatttaaccctgagaagtgccgcttcttttgggtctttccacctgatccgcctgctgtatgacgaatacatgttctatttagtggagcacagggtggccgaggcaacaggagagacccccatcgctgtgatgggcgaatttaacgatctcgcttctctttctctgactctgttggataaagatgatatgggagacgagcaacgcggaagcgaagctggcccagatgctagatcactcggtgagccattagtgaagagggagagatctgaccctaatcacagtctccaggggatttag

SEQ ID NO: 132119 - DNA, 1851 bp, synthetic construct
  misc_feature 1..1851: note = Description of Artificial Sequence: Synthetic coding sequence
  source 1..1851: mol_type = other DNA
atggccgaggacgaaccagacgcaaagagcccaaagacaggtggaagagcacccccaggcggcgcggaggcgggggaacctacaacactactccagagactgcggggcaccatctccaaagctgtgcaaaacaaggtagaaggaattctgcaggatgtccagaaattctccgataacgacaagttatacttatatctacaacttcctagtgggcccaccacaggagataagagttctgagccaagtacactgtcgaacgaggaatacatgtacgcctacaggtggatcagaaaccatttggaggaacacacggatacttgtctgcccaagcagtctgtctatgatgcgtaccgcaaatattgtgaaagcctcgcctgttgtcgacctctgtcaacagcaaattttggaaagatcattcgtgagatcttccctgacatcaaggcacgccgccttggaggacggggtcagtccaagtactgctactccggtattagacgtaaaaccttggtctccatgccacctctgcccggcctggaccttaaggggagtgagagcccagagatgggaccggaggtcacacctgccccacgcgatgagcttgttgaggccgcatgcgcccttacctgtgactgggctgaacgaattcttaagagatctttctcttccatcgtggaagttgcgaggtttctgctgcaacagcacttgataagcgcccggtcagcccacgcacatgttctgaaagccatgggcctggccgaagaggacgaacacgctccacgcgagcggagtagcaagcctaagaatgggctagagaatcctgagggcggagcacataaaaagccagagaggttggcccaaccccctaaggacttggaagccaggactggggccggccctctagctaggggggaacgcaagaagagtgtagtagagtcaagcgcgcccggcgcgaacaacttgcaggtgaacgcattggtcgcacgactgcctctgcttctgccacgggccccccgatcattgatcccacctattcctgtcagcccccccatcctggcacccaggctgagctctggcgcattgaaggtggccacccttccactctcgagccgggctggtgccccccccgctgccgtaccaatcattaatatgatccttcccactgtaccagcccttccaggcccaggacctgggcctgggcgggctcctccaggcgggctgacacagccacgaggaaccgaaaacagagaagtcggcatcgggggcgaccagggtccacacgacaagggtgtgaagaggactgctgaggtgccagtgtctgaggccagcggtcaagctccccctgcgaaggccgcaaaacaggacattgaggacacagcttctgatgccaagagaaagcggggcagacctcggaagaaatctggcgggtccggagaaaggaacagcaccccactgaagtccgcagcggcaatggagtctgcacaaagctcccgactgccgtgggaaacttgggggtccgggggggaggggaattcagcaggcggcgccgagaggcccggccccatgggagaagccgagaaaggcgcagtcctcgcgcaaggtcagggggatggtaccgtgtcaaaggggggtcgaggacccggatctcaacatacgaaagaagccgaggataaaattccattagtgcccagcaaggtcagtgttataaagggtagcaggtcccagaaagaggcattcccattagcgaagggtgaagtggacaccgcccctcagggtaataaggatctgaaggagcatgtcctgcagtcttctttgtcccaggaacataaggatccgaaagctaccccaccatag

SEQ ID NO: 132120 - DNA, 1851 bp, synthetic construct
  misc_feature 1..1851: note = Description of Artificial Sequence: Synthetic coding sequence
  source 1..1851: mol_type = other DNA
atggcggaggacgagcctgacgccaagtcacctaagacaggtggtcgggctcctccaggaggagctgaggccggagagcccaccacacttttacaacgcttgcgaggaacaatcagtaaggcggttcagaataaggtggaaggcatcctgcaggatgtgcaaaagtttagtgacaacgataagttatacctgtacctgcaacttccctcaggacccactaccggcgataagagctctgagccgtcgacgctgagcaacgaggaatacatgtacgcctataggtggatccgcaatcatcttgaagagcataccgatacatgtcttccaaagcagtctgtgtatgacgcctacagaaagtattgtgaatccttggcttgttgtcggcccctgtccacagcaaacttcggaaaaatcatacgggaaatctttccagacattaaagctagacgactgggaggacgtgggcaaagcaagtattgctatagtgggataaggaggaaaacactcgtgtccatgccaccgctgccaggccttgatttgaaagggtcagagtctccagagatgggccccgaggtgactccagcaccacgcgatgaattggttgaggctgcttgcgcattaacctgcgattgggcagagagaattctgaagcggtcatttagctctattgttgaagtggcaagatttttactgcaacagcacctgatcagcgctcgcagtgctcacgcccacgtactcaaggccatggggctggctgaggaagacgaacacgctccgcgcgagcgctcgtccaagcccaaaaatggactggagaatcctgaaggcggcgcacacaagaagccagagagactggcccagcccccaaaagatctcgaggcaagaaccggcgcgggccctttggctcggggagagcgcaaaaaaagcgttgtcgaatcatcagcccctggggcaaacaatttgcaagtaaatgcactggttgcaagactgcccctgctactcccaagggctcccagatctctcattccgccaattcccgtctcgccacccatcctcgccccccggctgtcaagcggagccctgaaggttgcaaccctgccccttagcagtagggctggggcccctcccgctgctgtccctataatcaacatgattcttcccactgtgcccgccttgcctgggccgggccccgggcccggcagggctccccctgggggcctcacgcaacctcgaggcacagaaaaccgggaggtgggtattggcggtgatcagggcccgcacgacaagggagttaagcggactgccgaagtacccgtgtcagaggcttcaggacaagctccaccagccaaagccgccaagcaagatattgaggatacagcatcagatgccaagagaaaaagaggcaggcccagaaagaaaagcggagggtcaggagaaagaaattccactcctctgaagtctgcggcagccatggaatcagcacagtcctctcggctgccgtgggaaacctggggaagtggtggcgagggaaactctgcggggggcgccgagagacctggccccatgggagaggccgagaagggcgcagtactcgcccagggtcaaggggatgggacagtgtctaaggggggacgcgggcctggatcccagcacaccaaggaggccgaggataagatacccctggtgccctccaaggtgagtgtcattaagggcagccgcagccagaaagaggcctttcctctggccaaaggcgaggtagacaccgccccgcaggggaacaaagatctgaaagagcacgtattacaaagtagcctgtcccaggagcacaaggaccccaaggcgacacctccatag

SEQ ID NO: 132121 - DNA, 1791 bp, synthetic construct
  misc_feature 1..1791: note = Description of Artificial Sequence: Synthetic coding sequence
  source 1..1791: mol_type = other DNA
atggccgaagatgagccagatgccaaaagtccaaagaccggagggagagcgccacccggcggggccgaggcaggcgaaccaacgactcttcttcaacggttgcgaggcaccatcagcaaagccgttcagaacaaagtggaagggatccttcaggatgtgcagaagttttctgataacgacaagctgtacctgtatctccagttgccctcaggacctactactggcgataagtcctccgagccaagcaccctttccaatgaggagtacatgtatgcctatagatggattcgcaatcacctcgaggagcatactgatacctgtctgccgaagcagtcggtgtatgacgcttatagaaaatactgcgagtcactggcgtgctgccgtccactgagcactgctaattttggaaagatcattcgggaaatatttcccgatatcaaggctcgaagattgggaggaaggggccaaagcaagtactgttattccggaattcgtagaaaaacacttgtttccatgcctcccctcccaggcttggaccttaaaggcagtgagtcaccagagatggggccagaagttaccccagccccccgagacgagctggtggaggcggcctgtgcgctaacatgtgattgggccgaacgcatcctgaaacgcagcttttctagtatcgttgaggtcgcccggtttctgctgcaacagcacctgatttctgcaaggagtgctcacgcgcacgttctgaaggccatgggtcttgctgaggaggatgaacacgccccccgagagagatcttcaaaaccaaaaaatggcctggagaatcctgaaggcggggcccataagaagcccgaacgcctggcgcagccaccaaaagacctcgaggcccgtactggggcaggaccgctggcgcgcggcgagagaaagaaatctgttgtggagagtagtgcccctggcgcaaataatctacaggtgaatgcactcgtggctcgcctccccttgctcctgcctagggctccccgctcactgattccacccattcccgtgtcacctcccatactagccccccgacttagcagtggcgctctgaaagtggccacactgcccctgagcagcagagccggggcacccccggccgctgtgccaattatcaatatgatcctccctactgtccccgcacttccagggcccggcccagggcctggcagagctccccccggagggctgacccaaccaaggggcaccgagaaccgcgaggtaggcataggaggtgaccaggggcctcacgacaaaggggtcaaacggactgcagaagttccggtgtcagaggcatctggacaagccccccctgctaaagcagctaagcaggatatcgaggacacagccagtgacgcaaaacgtaagcggggacgacctcgtaaaaagagcggcggaagtggggaaagaaactctactcccctgaaaagtgctgcggccatggaaagtgcccagtcctcacggctgccatgggagacctggggttcaggaggagagggtaacagcgcagggggcgctgagagaccagggcccatgggtgaggccgagaaaggagcagtcttagcccaggggcagggcgatggcacagtgagtaaagggggtagggggccaggttcccagcatacaaaggaggccgaagacaagattcccctggtacctagtaaagtcagcgtgattaaagggtcacgatcccagaaagaggcctttcccttggcaaaaggggaagtggatacagccccccagggaaacaaagacttgaagtag

SEQ ID NO: 132122 - DNA, 357 bp, synthetic construct
  misc_feature 1..357: note = Description of Artificial Sequence: Synthetic coding sequence
  source 1..357: mol_type = other DNA
atggctgaggacgaaccagatgccaagtcccccaagaccggcggacgagcgcctcctggaggcgccgaggctggagaaccaaccactctgctgcagagattgcggggtaccatctctaaggcagtgcaaaacaaagttgagggcatactccaggacgtgcagaagttctccgataacgacaagctgtatttatatctgcagctccccagcgggcctaccaccggcgacaagagctcagagcctagtaccttgtcaaacgaggagtatatgtacgcctaccggtggattagaaaccacctcgaagaacacaccgatacgtgccttcctaaacaatcagtgtatgacgcctaccgatag

SEQ ID NO: 132123 - DNA, 693 bp, synthetic construct
  misc_feature 1..693: note = Description of Artificial Sequence: Synthetic coding sequence
  source 1..693: mol_type = other DNA
atggcggaggatgagcccgatgctaaatcacctaaaacaggggggcgcgcaccacctggtggcgctgaggccggtgaaccaaccaccctgctccagagacttagaggaaccataagcaaggcggttcagaataaggtcgaggggattctgcaggacgtccagaagttcagtgataatgataagctgtatttgtacctacagcttccatccggccctacaactggcgacaaaagcagtgaaccgtcgactctttccaacgaggagtacatgtatgcatataggtggattcggaatcacctggaagaacataccgatacttgtctgccaaagcagtctgtgtatgacgcttacaggaagtattgtgaaagcctagcctgctgccgacccctgagcacggccaattttgggaaaattataagggaaatattccctgacatcaaggcccggcgcttaggtggcagaggacagtctaagtactgctactccggcataagacggaaaactctcgtctcaatgcctcctttaccgggcctcgacctaaaaggcagcgaatcccccgagatgggacccgaagtcactccagctcctcgcgacgaactcgtggaggctgcctgcgcgcttacgtgtgactgggcagagcgaattttgaagaggtcattttcctctatcgttgaggttgcccgattcctctag

SEQ ID NO: 132124 - DNA, 372 bp, synthetic construct
  misc_feature 1..372: note = Description of Artificial Sequence: Synthetic coding sequence
  source 1..372: mol_type = other DNA
atggcggaagacgaacctgatgcaaagtcccctaaaacgggcggtcgggctccccccggaggggccgaggcgggggagcctaccactcttctccagcgcctccggggcacaatttctaaagccgtacaaaataaggtcgagggcattctgcaggatgttcagaaatttagcgacaatgacaagctgtacttgtatctacagcttcccagcggccccacaactggggataagagttcggaacccagcacgctgtcaaacgaagaatacatgtacgcttacagatggatccggaatcatttggaagagcacacagacacatgtctgccaaagcagtctgtatatgatgcatatcgcaagtattgcgagagctag

SEQ ID NO: 132125 - DNA, 291 bp, synthetic construct
  misc_feature 1..291: note = Description of Artificial Sequence: Synthetic coding sequence
  source 1..291: mol_type = other DNA
atggctgaagatgagcccgacgctaagtcaccaaaaactggcggccgcgcgccccctggcggcgccgaggccggagaacccaccaccctgcttcaacgcttgcggggaactatttctaaagcagtacagaataaggtggagggaatactgcaggatgtgcagaagttctctgataacgataaactttacttgtacctgcagctgccgtctggaccgactactggagacaaaagttcggagcctagcaccctgtctaatgaggagtacatgtacgcctacaggtggatttag

SEQ ID NO: 132126 - DNA, 321 bp, synthetic construct
  misc_feature 1..321: note = Description of Artificial Sequence: Synthetic coding sequence
  source 1..321: mol_type = other DNA
atggccgaggacgaacctgatgccaagtcacctaaaacaggcggccgcgccccaccagggggcgcagaggctggcgagccaactactctcctgcagcgtctccgaggcacaatctccaaagccgtgcagaataaggtggagggaatcttacaggacgttcagaaattcagcgacaacgacaagttatacttgtacctccagctgccctccgggccgacaacaggcgacaagagcagcgaaccttccactctgtccaacgaagaatatatgtacgcgtacaggtggatcaggaaccacctggaggaacacacagacacctag

SEQ ID NO: 132127 - DNA, 555 bp, synthetic construct
  misc_feature 1..555: note = Description of Artificial Sequence: Synthetic coding sequence
  source 1..555: mol_type = other DNA
atggccgaggatgaacccgatgctaaatcccccaaaactggcggtagagccccacccgggggcgcggaagccggcgagcctacaactctgttgcaacgcctgcgggggacaatttccaaagctgtccagaacaaagtagaggggatcctgcaggatgttcaaaagttcagcgacaatgataaactctacctgtacctgcagctgcctagtggacccactaccggcgataaatcttccgagccctccactctgtcaaacgaggaatacatgtacgcttatcggtggatcaggaatcatttggaagagcacactgacacctgcctgccaaagcagtccgtatacgacgcttatcggaagtactgtgagagtcttgcctgctgtaggcccctgtcgactgcgaacttcgggaagatcatccgggaaatatttccagacatcaaggctaggcgtctcggtggaaggggtcagtcgaagtactgttattccggtatccgccgtaaaacactggtctccatgcctcccctgcccggccttgatttgaagggtagcgagtag

SEQ ID NO: 132128 - DNA, 1731 bp, synthetic construct
  misc_feature 1..1731: note = Description of Artificial Sequence: Synthetic coding sequence
  source 1..1731: mol_type = other DNA
atggccgaagacgagcccgacgccaagagccctaaaactgggggcagagccccacccggaggcgcagaagcaggtgagcccacaactcttctgcagagattacggggcacgatcagtaaagctgttcagaataaggtggagggaatactccaggacgttcagaaattttccgacaacgacaaactgtacctgtatcttcagttaccctccggcccaacaacaggggataagagaaaatattgtgagtcactcgcatgctgccgacccctgagcacagcgaacttcggcaagattatcagggaaatctttcctgacatcaaggctaggaggctgggcgggcggggtcagtcaaaatactgctattccggaatcaggcgaaaaaccttggtaagcatgccccctcttccaggcctggatctaaaagggtcagagtctcccgaaatgggccccgaagtgactccggcaccccgggacgaactggttgaggcagcatgtgctttaacatgtgactgggctgaacgcatactgaaacgatccttctccagtattgtcgaagtagcccgattcctccttcagcagcatctgatatccgcaagatccgcgcacgctcacgtgcttaaggcgatgggcctggctgaggaggatgagcatgccccgcgggagcgctcctctaaacccaagaatgggctggagaaccccgagggcggagctcacaagaaacctgagaggctggctcagcccccaaaggatctggaggctagaactggcgcgggccctctggccagaggcgagcgcaaaaaatccgtggtagagtcaagtgcacccggcgctaataaccttcaagtgaacgctctggtggcccggctgccccttcttctcccccgcgctcctcgatccttgattcccccgatacccgtcagtccacctattctagcgccgcgcctgtcctcaggtgctttgaaagtggccacacttccgctgtctagcagggccggggccccaccagctgctgttcccatcatcaacatgattctgcctaccgtgcccgccctcccggggccgggtcccggcccaggacgggctccacccggcggcctcactcagcccagggggacggaaaatagagaggtcggaatcggcggtgatcaggggcctcacgacaaaggagtcaagagaacggctgaggttccagtcagcgaggctagcggccaggcccccccagctaaggcagctaagcaggacatcgaggacacagcctcagacgcaaagagaaagagaggcaggccccgtaaaaaatccgggggctctggcgagagaaatagtacacctttgaagtctgccgccgccatggagagtgcccagagcagcaggctcccctgggaaacgtggggcagcggaggtgaggggaattccgccgggggcgctgaaaggccggggcctatgggcgaggcggagaagggagccgtgctcgcccaaggccagggcgatgggaccgtctctaaagggggccgaggccctggttcccagcataccaaagaagctgaagacaaaatccccctggtgccatcaaaagtgtctgttatcaagggaagtcggagtcagaaggaagcttttcctctcgctaaaggggaggtggataccgcaccgcagggcaataaagatctcaaggagcatgtgctacaaagctctttaagccaggaacataaggacccaaaagcaacacctccatag

SEQ ID NO: 132129 - DNA, 1851 bp, synthetic construct
  misc_feature 1..1851: note = Description of Artificial Sequence: Synthetic coding sequence
  source 1..1851: mol_type = other DNA
atggccgaggatgagccagatgcaaagagcccaaaaactgggggccgcgctcctccgggcggcgctgaggcaggagaaccaacaactctgctgcaacgcttgcgtggaacgatttccaaggccgtccagaataaagtggagggaattctccaggacgtccagaagttcagtgataatgataaactttacctgtatcttcagcttccatccggaccgactacgggcgataagtcgtccgagcccagcaccctcagcaatgaggaatacatgtacgcttaccgatggatccggaatcacctcgaggagcataccgacacgtgtcttccaaagcaatccgtttatgacgcttatagaaagtattgcgagtctttggcctgctgcagacctctatccacagccaacttcgggaaaattatccgcgaaatcttccctgacattaaagctcgccggctcggcggcaggggacagagtaagtattgctacagcggaattcgcagaaagacattagtgtcaatgcccccactgcccggactcgacctcaagggctccgagagccctgagatgggcccagaagttacccctgcccctcgcgacgagcttgtggaagcagcatgcgctctgacatgtgactgggccgaacgtatcctgaaacgatctttcagtagcatcgttgaagtcgctaggttcctgcttcaacaacacctgatcagcgctaggtcagctcatgcacatgtgttaaaagctatgggattggctgaggaggatgaacacgcacctcgcgaaaggtcctccaaacccaagaacggtttggaaaaccccgaaggaggggcccacaaaaagcctgagagactagcacagcccccaaaggacctggaggctaggaccggagccggaccactagcccgtggggagagaaagaaatcggttgtggaatcctcagcacctggggccaataacttgcaggtaaacgccctggtggccaggctccctctcctactccctagagcacctagatctcttattcccccaatccccgttagcccgcctatcctggctccgcgactcagttctggggccctgaaggtagctaccctcccactctcatcacgggctggagccccaccagccgctgtgccaattatcaatatgatactgccaacagtgcctgcactgcccggacctggccccggtccaggaagggccccccctggcggactcactcagccccggggcacagaaaacagggaagtgggcatagggggcgaccagggccctcatgataagggtgtgaaacgcactgcagaggtgcctgtgtcggaagcgagcggacaagcccctcctgcgaaggcagcaaaacaagatatcgaggatacggccagcgacgctaaaagaaaaaggggtcggcccagaaagaaatccggggggtctggagaacggaacagtacacctcttaagagcgctgctgccatggagtccgctcagtcaagtcgattgccgtgggagacatggggctccggcggcgagggtaactccgcgggcggcgctgaacgccccggcccgatgggcgaggccgagaagggtgctgtactggcccagggacagggagatggcaccgtgtcgaaggggggccgtggccctggttctcaacacacgaaggaagccgaggataagatccccttggtacccagtaaagtctctgttatcaagggctctcgcagccagaaggaagccttcccacttgcaaagggcgaagtcgataccgcccctcagggcaacaaggaccttaaagaacatgtgctacagagttcactatcacaggaacataaggaccccaaggctacacccccttag

SEQ ID NO: 132130 - DNA, 498 bp, synthetic construct
  misc_feature 1..498: note = Description of Artificial Sequence: Synthetic coding sequence
  source 1..498: mol_type = other DNA
atggccgaggacgaacccgacgcgaagagccctaagactggtgggcgagcaccgcccgggggggccgaagcgggcgagccgaccaccttgcttcagcgtcttcgaggcacgatctccaaagcagtgcagaataaggtcgaggggatattacaggacgtgcaaaaatttagcgataacgacaaactttacctgtatctgcagttgcctagcgggccaaccaccggtgataaaagttcagagccaagcaccctctctaatgaggagtacatgtatgcctatcgttggattcggaatcaccttgaggagcacaccgacacatgcctgcctaaacagagtgtgtacgacgcgtataggaagtattgcgagagtttggcgtgttgtcggccactgtccaccgccaactttgggaagattattcgtgagattttccccgacattaaggctagacgtttaggggggaggggccaatccaagtattgctatagcgggatccggtag

SEQ ID NO: 132131 - DNA, 2787 bp, synthetic construct
  misc_feature 1..2787: note = Description of Artificial Sequence: Synthetic coding sequence
  source 1..2787: mol_type = other DNA
atggccaaggtgcctgagctggaagatactttcctgcaggctcagcctgctccacagctttcaccagggatccaggaagattgctgtgtccaacttctgggtaagggattgctcgtataccctgaggaaacggtctatctggccgccgagggccagccaggcggtgagcaaggagggggtgagaagggagaggatccagaattgccgggagccgtgaaatcagagatgcatctgaacaacggtaatttttcttcggaggaggaggatgctgacaatcacgactccaagactaaagcagcagatcaatacttaagtcagaaaaagacaatcactcagatcgtgaaagacaagaagaagcaaactcagctcaccttacagtggctcgaggagaattatatcgtgtgcgagggcgtctgtctcccccggtgtatactgtacgcccactacctggatttttgcaggaaagaaaagctcgagcccgcatgcgcggccacttttggtaaaacaatccggcagaagtttccgttattaacaacccggcggctgggaacccgcgggcacagcaaataccactactacggcatcggaatcaaagaaagcagtgcctactaccattccgtctatagcggcaagggtctcacacggttctcgggttctaaattaaagaacgagggggggtttaccagaaagtactccttatcctcaaagactggcacgctccttcctgagttcccaagcgctcagcacctggtgtaccaggggtgtatttcaaaagacaaggtcgacaccctcattatgatgtataagactcactgtcagtgcatcctcgataatgccattaacggaaactttgaggagatccaacacttcctgctccatttctggcagggcatgcctgaccacctcttgcccctgttggagaaccccgtgattattgacatattttgtgtgtgtgactctatcctttacaaggtgctgaccgacgttctgattcctgccactatgcaagaaatgcctgagagcttgcttgccgatattcggaactttgccaagaactgggagcagtgggtggtcagttcgctcgagaatctgcccgaggcacttaccgacaagaagattccaatcgtgaggcgatttgtgtcttctctgaaacgccaaacttctttccttcacctcgcccagattgcccggccagcactgttcgaccagcacgtggtgaattctatggtttccgatattgagagggttgacctgaactctataggttctcaggcactgttaaccatttcagggagcactgacacagagtcgggcatctacacagagcatgactctatcaccgtcttccaagagctgaaagacctgttgaaaaagaatgcaaccgttgaggccttcatcgaatggctcgacaccgtggtagaacaacgcgttataaagactagtaagcagaacggcaggagtttaaagaaaagagctcaggactttctcttgaaatggtccttttttggggcgagggttatgcacaacctcacacttaataacgcctcctcgttcgggtctttccatctcatcagaatgctgttggatgaatacatcctgctcgcaatggagacacagtttaacaacgacaaagagcaggaactccagaacctcctggataaatacatgaagaacagcgatgctagcaaagctgctttcactgccagccctagctcatgttttctggccaaccgcaacaagggatctatggtgtcatcggatgcagttaagaatgagtcccacgtggagaccacctacctgcccctcccatcttctcagcccggtgggttagggccagcactacatcagttccctgcgggcaacactgacaacatgccgctgactgggcagatggagctgtctcagatcgccggtcacttaatgaccccacctatttcccccgctatggcctcacgcggcagcgtcattaaccaggggccaatggcagggaggcccccttccgtgggcccagtactgtcagcgccatctcattgtagtacctaccctgagccaatctaccccaccctgcctcaagctaatcacgacttctacagcaccagctcaaactatcagactgtgtttcgggctcaacctcactctacaagcggactgtatccccatcatactgaacatgggaggtgcatggcttggacagagcagcagctgagccgagactttttcagtggaagctgtgccggatccccatacaatagtaggccccccagtagctacggtccatcactccaggcccaggacagtcacaacatgcagttcttgaatacagggtcttttaattttttgtctaacacgggggctgcttcatgccagggagccaccctcccaccgaattcccctaacggttattatggcagcaacataaattatcctgagtcacataggctggggagcatggtcaaccagcacgtgagtgtgatatcctccattagaagcctaccaccatatagcgacattcatgaccccttgaacatcctcgatgacagcggcagaaagcagactagctcattctatactgatactagctctcccgtggcctgccggacgcccgtcctggctagctctctgcaaacaccaatcccgtcctccagtagccagtgcatgtatggcaccagcaatcagtacccagcccaggaaaccctcgactctcatgggacgtcctcacgagagatggtctcatcactgcctcctattaacaccgtgtttatgggaaccgctgccggaggcacctag

SEQ ID NO: 132132 - DNA, 4122 bp, synthetic construct
  misc_feature 1..4122: note = Description of Artificial Sequence: Synthetic coding sequence
  source 1..4122: mol_type = other DNA
atggcggaggaacaacagcagccgcccccccagcagccggacgctcatcagcagctccctccgtctgcgcccaacagcggagtggctcttcccgccctggttccgggtctgccgggtaccgaggccagcgcgctccagcataaaatcaagaactcaatctgtaagaccgtgcagtccaaagtggattgcattctgcaggaagtggagaagttcaccgatctcgagaaactctacctctacctccaactacctagcgggctttccaacggggaaaagtccgaccagaacgcaatgtcgagcagccgagctcagcagatgcacgccttctcatggatcaggaatacacttgaggagcatcccgaaacctccctacccaaacaggaggtttacgatgagtacaagtcatactgcgataacctggggtaccacccccttagcgcggcagacttcggcaagattatgaagaacgtgttccccaatatgaaagcaaggcgactgggtacacgcggaaagtccaagtattgctactccggactacggaaaaaagcctttgtgcacatgccaactctccccaatcttgacttccataagaccggcgatggtcttgagggagcagagccaagcgggcaattgcagaatatagatgaagaagttatatccagcgcatgcaggcttgtttgtgagtgggctcagaaggtcctgagccagcccttcgataccgtgctggagttggcccgatttctggtgaaatctcattatattggcacaaaatcaatggccgccctcaccgttatggcagcggcacctgcagggatgaagggtattactcaaccttccgcctttatcccaacagccgagtccaattcttttcagccgcaggtgaagacgctgccttctccaatcgatgcaaaacagcagctccagcggaagatacaaaagaagcagcaagaacagaagctgcagtcccccctacccggagagtctgcggctaaaaaatccgagagtgcaacctctaatggagtcacaaatttaccaaacggaaacccgtccattctgtctccgcagcctataggcatagtggttgccgcagtgccaagcccgattcccgtccagaggacgagacagctggtgacaagtccctcacccatgtcctcctccgatgggaaggtgcttccgctcaatgtacaggttgtgacccagcacatgcagagcgtgaagcaggctcccaaaacaccacagaatgtccccgcctccccaggaggtgatagatccgctcgccacaggtacccccagattctgcccaagccagccaatacctccgcactcaccatccggtcgcccaccacggtcttgtttacttcatcgccaattaagacggccgtggtccccgcctcccatatgtcttcccttaacgtcgtaaagatgacaaccatttctctgactccatcaaactctaatacccctcttaagcacagcgccagcgtcagctcagcaacaggcactaccgaggaatcccgttctgtacctcagattaaaaatgggagcgttgtttcgctgcagtcacctgggagtcgctccagctctgccggcggcacgtccgctgtcgaagttaaagttgagccagaaacttcatcggatgagcatcctgttcagtgtcaggagaattcagatgaggccaaagcccctcagacaccatccgctctccttggccagaagagcaatacagacggggcactgcagaaaccctccaacgaaggggtgatcgaaattaaggccacgaaggtctgtgatcagaggactaagtgtaagtctcggtgcaatgagatgttgcccggtacctctactggcaacaaccaatcaacgatcactctttccgtcgcttcccagaatctcaccttcactagtagctcttccccccctaatggcgactcgatcaacaaagaccccaaattgtgtactaaatcacctcggaaaagactttccagcaccctccaagaaacccaggtccccccagtgaaaaaaccaatcgtggagcaactcagcgccgcaacaatcgaggggcagaagcaggggtccgttaaaaaggatcaaaaggtaccccacagcggcaagactgagggtagcaccgccggagctcagattcccagtaaggtgtcagtgaacgtatcgtcccatattggagccaatcagcccctgaattcatctgcactcgtcatcagcgactctgccctcgaacagcagactactcccagttcttcaccagacattaaggtgaaactcgagggcagtgtcttcctcctggacagcgacagtaagtctgtcgggagctttaatcctaacggctggcagcagataacgaaagattctgagttcataagcgcctcttgcgagcagcagcaggatatctcagtgatgacaatcccagaacactccgatattaatgacctggaaaagtccgtctgggaactggagggcatgccacaggacacatactctcagcagctgcattctcagatccaggaatctagcctgaatcagatacaagcccattccagtgaccagctccctctgcagtccgagcttaaagagtttgaaccgtccgtaagccagacaaacgagtcctacttcccgtttgacgacgagttaacacaggacagcattgtggaggagctcgttttgatggagcaacaaatgtctatgaataattctcattcttatggaaattgtctgggaatgaccctgcagtctcagtccgttacacccggagcaccgatgagctcccacacaagtagtacccacttctaccatccaattcacagcaatgggacaccaatccatactccaaccccgacaccaacacctacccctactcctacccctacacccacgccgacgagcgagatgatagcaggaagccagagcctgtcccgtgagagtccctgtagccggctggcccagaccactcccgttgactcagccctgggtagttctaggcacacccctattggaaccccccactcgaattgtagcagttccgtgccgcccagtcccgtcgagtgcagaaatcccttcgctttcacccccatatcgagttcaatggcatatcacgacgccagtatcgtgtcttcttccccagttaagccgatgcagaggcccatggccacgcatccagataagaccaaactcgaatggatgaacaatgggtatagtggcgtcggcaacagctccgtctctgggcatggtatcctcccaagctaccaggaactggtagaagacagattccgcaaaccccatgcattcgccgtgcccggtcagagttatcagtcacagtcacgacaccatgataccaactttggacgtctcactccagtgtctcctgtacaacatcagggtgccacagtaaacaacacaaacaagcaggaggggtttgcggtgcctgctcctctcgacaacaagggaactaatagctcagcttcttcgaacttcaggtgccgtagcgtttcaccggcggtgcaccgccagaggaatctgtccgggagcaccctctaccctgtcagcaatattcccaggtccaacgttactccctttgggtcccccgtaacacccgaggtccacgtgttcacaaacgtgcacaccgacgcctgtgcaaataatatagcacagaggtcacagtctgtacccttgactgtgatgatgcagacagcgttcccaaacgcactccaaaagcaggccaattccaaaaagatcacaaacgtgctgctctctaaacttgactctgataacgacgatgctgtgcgcggcttaggcatgaacaacctaccttcgaactacaccgcacgaatgaatctgacccaaatcctggaaccctctaccgtgtttccgtcagccaatccgcagaacatgatcgattcctccacgagtgtgtacgaatttcaaactcccagctacctgactaagagcaattccactggacagattaacttcagccccggcgataaccaggctcagagtgagattggcgagcaacaactcgattttaattccacagtgaaggatttgttgagcggcgattctctgcagactaaccagcagctgaaataccctgacgtcctcggggagtag

SEQ ID NO: 132133 - DNA, 3846 bp, synthetic construct
  misc_feature 1..3846: note = Description of Artificial Sequence: Synthetic coding sequence
  source 1..3846: mol_type = other DNA
atgtcctcgagtcgggcccagcagatgcacgccttctcttggattaggaacacacttgaggagcatcccgaaacctcattgcctaagcaagaggtctacgacgaatataaaagctactgcgacaatctgggctaccatcccctctccgctgcagactttggcaagatcatgaaaaatgtcttccccaatatgaaggctcgcaggctgggaacccgagggaaatctaaatattgttatagtgggcttcggaaaaaagcgtttgtgcacatgcctactcttcctaatctagactttcataaaaccggggacggtctcgaaggcgcagagccctcgggacagctgcaaaatattgacgaggaagtaatctccagtgcttgccgactcgtttgcgagtgggcccagaaagtgctgtcgcagcccttcgataccgtgcttgaactcgcccgttttctcgtgaaatctcattacataggtactaaatctatggccgccctgaccgtgatggccgccgcgcccgccggaatgaaggggattacacagccgtctgcctttattcccacagctgagtccaatagcttccagcctcaggtaaagactctgccgagccctatcgatgctaaacagcaattgcagagaaagatacaaaaaaaacagcaagagcagaaactgcagtcacctcttccaggggagtcagcggctaagaagtccgagagcgcgacatcaaatggagtgaccaacttgccaaatggaaacccttcaatcctctcaccacagcctattggaatcgtagttgctgcagtgccaagtcctattccagttcagcgtactcggcagttggttactagtccctctcccatgagtagttcagacggtaaggtgctgccactaaatgtccaggtcgtgacgcaacatatgcagtctgtaaaacaggcacccaagactccccaaaatgtccccgcatctcctggcggggataggtccgcgcggcatcgctatccgcagattctccccaaaccagcgaataccagcgccttaactatccgctcccccaccacagttctcttcacctcttcgccaattaagactgctgtggtccctgccagccacatgtcctcattgaacgtggtgaagatgaccaccatttctctcacaccttcaaattctaacacccccttaaagcatagcgcatcagtctcctcggccacaggaaccactgaagagagtagaagcgtgcctcagataaagaacgggtcggtcgtatccctacaatcaccagggagccgctcttcatcggctggaggaacctctgcagtcgaagtcaaagtggaaccagaaaccagtagcgacgagcacccagtacagtgccaagagaactccgacgaggccaaggctccccagaccccctccgccctattggggcagaagagcaacacagacggagccttacagaaaccctccaatgagggggtgatagagataaaggccaccaaggtctgcgaccagagaacaaagtgtaaaagccggtgtaatgaaatgctgccaggtacctccaccggaaacaaccagtctaccatcaccctgagtgttgccagtcaaaacctgacctttacctccagctcctctcctccaaacggcgatagcataaacaaagatcctaaactgtgtaccaagtcccccagaaagcggctgagcagcaccctacaggaaacccaggtacccccagtcaaaaagcctatcgttgagcagctgtccgccgctaccatagaagggcagaagcaagggagtgtgaagaaagatcagaaggtgcctcattccggaaagacggaaggctccactgctggcgcacagatccccagcaaagtgtctgtgaatgttagctcccacattggagcaaaccagccgctgaactcgtccgcattagtcatttccgatagcgccctagagcagcagactaccccgtcttcttccccagacataaaggtgaagctggaagggtctgtttttttactggacagtgactctaagtctgtcggttccttcaacccgaatggctggcagcagattaccaaggacagtgagtttatcagcgcttcttgtgagcagcagcaggatatctctgtgatgacaattcccgaacattcagatataaacgatctcgagaagtcagtttgggaattggaggggatgccacaagacacctactctcagcagctccatagtcagattcaagagagcagcctaaatcagatccaggctcattcaagcgaccagctccctctgcagtccgagctgaaggagttcgagccttctgtgtcccagactaatgaaagctacttcccgtttgatgatgagctcactcaagactcaatcgtagaggagctcgtgctcatggaacagcagatgagcatgaacaatagtcacagctatggaaattgcttaggcatgactctccaaagtcagagcgttacacctggggcgcctatgtcatcacatacttcttcgacacacttttaccacccaattcacagtaacggaacccccatccatacacctactccgactccaaccccaacccctacacccactccaacacccacaccgacaagtgaaatgatcgccggaagccaaagcctgtctagggagtccccgtgcagtagacttgcacagaccactcctgtcgacagcgccctgggctctagccggcatacccctatcggtacaccacactccaattgttcctcttctgtccccccttcacccgtagagtgccgcaacccatttgctttcacacctatttcaagctcaatggcctaccacgacgcttcaatcgtaagctccagccccgtgaagccaatgcagcggccgatggcaacacacccggacaaaacaaagctcgagtggatgaataacggctatagcggcgttggaaattcatctgtgtcaggccacgggattctcccctcctaccaggaactcgttgaagatcggtttcggaaaccacacgccttcgctgttcccggtcagagctatcagtcgcagagtagacaccacgatactaactttgggaggttaacccctgtctcgcccgtacagcaccagggcgctacagtgaataacacaaacaagcaggaagggttcgccgtcccagcccccttggataataaggggaccaacagctccgcctcctctaacttccgttgcaggagcgtttcaccagccgtgcatcgccaacgaaacttaagcgggtctaccctgtatccggtgagcaacatcccacgatccaatgtgacaccctttggaagccccgtaactcccgaagtgcatgtctttacaaacgtccataccgacgcctgcgcaaacaacatcgcccagcgcagccagtctgtgccacttactgtgatgatgcagaccgctttccccaatgcattgcagaagcaggcaaatagtaagaaaataactaatgtcctattgagtaaactggactctgataatgatgacgccgtcagaggattgggaatgaacaacctccctagtaactatacagcccgcatgaacctcacgcagattctagagccatcaactgtctttcccagcgcaaacccacaaaacatgattgatagtagcacttctgtgtatgaattccaaacgcctagctatttaacaaaaagtaatagcaccgggcagatcaatttctctcctggcgataaccaagcccagagcgagatcggcgagcagcagctggattttaactcaactgtgaaagatctgctcagtggtgactctttgcagactaatcagcagttatgctcatgtcctagctcgcttcttgccggaatgcagatgtag

SEQ ID NO: 132134 - DNA, 4383 bp, synthetic construct
  misc_feature 1..4383: note = Description of Artificial Sequence: Synthetic coding sequence
  source 1..4383: mol_type = other DNA
atggctgaggaacaacagcaacctccaccgcagcagccagacgcccaccaacagttaccaccatcagctcccaactccggtgtagccctcccagcccttgtgcctggtttgcccggtaccgaagcaagcgcccttcaacacaaaatcaagaattcaatctgcaagacagtacagagcaaggtcgactgcatactccaggaggtggagaagttcacagacctcgaaaagctgtacctgtacctgcagctgccctctggtctgtctaacggtgaaaagagcgatcagaatgctatgagcagctcccgagctcagcagatgcacgcattctcgtggattcggaacacgctcgaggaacaccccgaaacttcactacctaaacaggaagtgtatgacgagtacaagagctattgcgataacctcgggtatcacccgctgtctgctgctgatttcggtaaaataatgaagaacgtctttcctaacatgaaagccagacgcctcggcacaaggggaaaatccaagtattgctactccggtctacggaagaaagcctttgtgcatatgcccacactcccaaacctcgacttccacaaaaccggcgatggactagaaggagccgaaccgagcggtcagctgcagaatattgacgaggaggtaatatctagcgcctgtcgcctcgtctgcgagtgggcgcaaaaagtcctgtcgcaaccatttgacaccgtcttggaactcgccagatttttggtgaaatcccactatatcgggacaaagagtatggcagcattgaccgttatggcagccgctccagccggaatgaaaggtataacccaaccaagcgccttcatcccaacagccgaaagtaactccttccaaccacaggtcaaaacccttccctcaccgattgatgctaagcaacagctgcagagaaagatccagaaaaagcaacaggaacagaagctgcagagcccccttccaggagaatcagccgctaagaaatccgagagtgccacatctaatggggtgacgaatctcccaaacggcaaccccagtatactgagtccgcagcctatcggcatcgtcgtcgctgcagtgcccagtcctatccctgtacagcgcactagacaattggtgacctcaccttcacctatgagctctagtgacggcaaagtcctccctcttaatgtgcaagtcgtcacgcaacatatgcaatcagtcaaacaggctcccaagacccctcaaaatgttccagcatctccgggtggcgatcgatcagcacgccataggtacccccaaatcctgccaaaacccgctaacacaagtgcactgaccatccgtagcccaactacggtcctgtttacctcgtctcctatcaaaaccgccgtggtgcccgcctcccacatgtcaagccttaatgtagtgaaaatgacgactatatccctgactccctctaattcgaacactccactaaagcatagtgcctccgtttcttctgccactggtacaacggaggagagtaggtccgtaccgcagatcaaaaatggaagtgttgtgagtctgcaatctcccgggagtcgcagttcatctgccggtggcacctccgctgtggaggtgaaggtagaacccgagactagtagcgatgagcaccctgtccagtgtcaggaaaatagcgatgaggcaaaagcccctcagactccgagcgcactcctggggcagaagagcaacacagacggagccctgcagaagccctctaatgaaggagttatcgagattaaagccacgaaagtgtgtgaccagcgtactaaatgcaagtctcgttgtaatgagatgttgcccggcacctctaccgggaataatcaatccaccataaccctgagcgtagcatctcaaaacctgacctttacatcctctagttcacctccaaacggagattctatcaacaaagacccgaaattgtgtaccaaaagtcccagaaagcgcctcagctcaacactgcaagagactcaggttcctcctgttaaaaagccaatcgtcgaacaacttagcgccgccacaatagagggccagaagcagggtagtgtcaaaaaagaccagaaagtaccccacagcggcaaaacagaaggttccacagcaggggctcaaattccttcaaaagtctcagttaatgtctcctcccatattggcgcaaatcagccgttaaactcatctgctctcgtgatcagtgattctgcactggagcagcagacaactccttcaagtagtcccgatatcaaggtaaagttggaagggtcagtgtttcttctcgatagtgacagcaagagcgttggatcgtttaatcccaacggttggcagcagattaccaaagactcagagtttatctctgccagctgcgaacaacagcaggacatttcagttatgactatcccagagcatagcgacattaatgacctcgaaaagagcgtgtgggaacttgaaggcatgccccaggacacatattcccagcagctgcactcccagatccaagagtcaagtctcaaccaaatccaggcccatagctctgaccagttgcccctgcagagcgagctaaaagagttcgaaccatcggtgagccagactaacgaatcttatttccccttcgatgacgagctgacgcaggattccattgtagaagagttagtcttgatggaacagcagatgagcatgaataactcacattcttacgggaattgcctgggtatgacgctgcagtcacagtctgtcacccctggtgctcctatgagttcccacacctctagcacccacttctatcatcccattcactccaacggtacacccatccacacccccacgcccacccccactccaacacctactcccaccccaacccccacacctactagcgagatgattgccggtagccaaagcttgagtcgcgaatcaccatgttcccggctggcgcaaactactcccgtagatagtgcattggggtccagccggcataccccaatcgggacccctcattcaaattgcagctcatcagtgccaccctccccagtggagtgtagaaatccctttgcctttactcctataagctcctcgatggcttaccacgatgccagcatcgtatccagcagtccagtgaagcctatgcaaaggcctatggcaactcatcctgacaaaactaagctggagtggatgaacaatggttacagtggagttggtaacagctccgtgtccggacacgggatccttcctagttaccaagagttggttgaggaccggtttcggaagccgcacgcttttgccgttcctggacagtcataccagtcccagagtcggcaccacgacacaaacttcgggagattaaccccagtaagccctgtgcagcatcaaggcgccactgtcaacaatactaataagcaggaaggcttcgccgtgccagccccgctggacaacaagggtaccaacagctccgctagtagcaacttccgctgcaggagtgtgtcaccagcggtccataggcagcggaatctttcaggttctacactgtaccctgtatcgaatattccccgttcaaacgtaacaccattcggcagccccgtcacacccgaggtgcacgtgttcacgaatgtccacacagacgcctgcgctaacaatatagcccagcggtcccaaagtgtcccattgaccgtgatgatgcagaccgcgttccctaacgctttacagaagcaggccaattcaaagaagattaccaatgtactgctgtcaaagctcgactccgacaatgatgatgcggtgcgagggctgggcatgaacaacctcccctctaactacaccgcaaggatgaacctgacacagatcctcgagccttcaaccgtattcccctccgctaacccacaaaatatgatagactcctccacttccgtgtacgagttccagactcccagctacctcaccaaatccaactctacagggcagattaacttttctccaggggataatcaggctcagtctgaaatcggcgagcaacagctggacttcaacagtacagtcaaggacctgctttcaggcgacagccttcagacgaatcagcagctagttggacagggagcctccgaccttacgaacaccgcctctgactttagcagtgacatacgcctgtcgagcgaattatcagggtctatcaatgacctgaacacccttgatcccaacctgctcttcgaccccggccgccagcaaggccaggatgatgaggccaccttagaagagctgaagaatgatccactcttccagcagatctgttccgaaagcatgaattcaatgacttcaagcgggtttgagtggatcgaatctaaggatcatcccacagtggaaatgttaggttag

SEQ ID NO: 132135 - DNA, 4092 bp, synthetic construct
  misc_feature 1..4092: note = Description of Artificial Sequence: Synthetic coding sequence
  source 1..4092: mol_type = other DNA
atgtcctctagtcgggcacagcaaatgcacgccttttcatggatccgtaatacacttgaagaacaccctgaaacatccctgcctaaacaggaagtgtacgacgaatacaaatcctactgtgacaatcttggttatcatcctctgagtgctgccgactttggtaagattatgaaaaatgtctttcccaacatgaaagctcgtcgactcggaacgagagggaagtctaaatattgctactcgggcctgcggaaaaaggcattcgtgcacatgccaaccttaccaaacctggactttcataaaaccggagacggccttgaaggagctgaaccaagcggccagctccagaacatcgatgaggaagttatcagcagtgcctgcagattagtgtgtgaatgggcacagaaagtcctgtcccagccctttgatactgtgttggaactggcccggttcctggtgaagtcacactatattggtacgaagagtatggccgccttgactgtgatggcagccgcaccagctggcatgaagggaattactcagccttcagcatttattccaacagccgagtccaacagttttcagcctcaggtgaaaacacttccaagtcccattgatgctaaacagcagctgcagcgcaagattcaaaaaaaacagcaggagcagaagctccagtctcctttaccaggagagtccgcagccaagaagagcgagtcagcaaccagcaacggggtgacaaaccttcccaacggaaatccttccattctctcacctcaacctatcgggatagtggtcgcagctgtgccctcacctatccccgtgcaacgcaccagacagctcgtgactagccctagccctatgtccagttctgatggaaaagtgctgcccctgaacgtgcaagtggtgacccagcacatgcagagcgtgaagcaggcgccgaagacaccccaaaatgtcccagcttcccctggtggtgacagatctgcccggcatcggtatcctcaaatcctgcccaaacccgccaatacctctgccctcaccattaggtccccaactacagttctctttacgtcgtctccgattaagactgccgtcgtaccggcttcccatatgagtagcctgaatgtggtcaaaatgacgactattagcctaacgccgagcaactccaatacacctctaaaacattcagcctccgtgtcgagtgccacaggaactacagaggagagtaggtcagttccgcaaatcaagaacggaagcgtagtatcgctccagtccccgggtagcagaagctctagcgccggcggaacctcagccgtcgaagtgaaggtcgaacctgagacctctagcgacgagcatcccgtgcagtgccaggagaacagtgacgaagccaaggccccccaaactccttcagccctgctaggccagaagtccaatacagatggtgcattacagaagccaagtaatgagggtgtgatcgagattaaagccaccaaggtgtgcgaccaacgcactaaatgcaaatcgcgctgcaatgagatgctaccaggcaccagtaccggaaacaatcagtccacaatcacattatctgtggcttcccagaatctgacatttaccagcagtagtagcccacccaacggcgactccatcaataaagacccaaaactctgcacaaagtcgcccaggaaacgtctgtcttctacacttcaggagactcaggtgcctccggtgaagaaacccatcgtcgaacaattgagcgctgcaacaatagagggacagaaacaagggtcagtgaaaaaagaccaaaaagttccacactcaggcaaaaccgagggctctaccgctggcgcgcagatccccagtaaggtgagtgtgaacgtttcttcccacatcggtgcgaatcaaccgctaaacagcagtgcccttgtgattagcgatagtgccctggaacagcagactacgcccagcagctctcccgacatcaaggtgaagcttgaaggctctgtgtttctgttggattccgatagcaagtcggtggggtcgtttaatccaaacggatggcagcagataacaaaggactccgaattcatctcagctagctgtgaacaacagcaggacataagtgtcatgaccataccagagcacagcgatatcaacgatctggagaaaagcgtgtgggagcttgagggaatgcctcaggacacttattcgcagcaactacattcacagattcaagagtcaagtctcaaccagattcaggcccacagttccgatcagctccctttgcagtcggagcttaaggaatttgaaccaagcgtgagtcagacaaacgaaagttattttccctttgacgacgagctgacacaggactcaattgtcgaggaactagtacttatggagcagcagatgtcgatgaataattcacacagttatgggaattgcctgggtatgacactccaatcccagtccgtaactcctggagccccaatgtcttctcacactagctcgactcacttctatcatcctatacattccaacggcacgcccatccataccccgacgcctactcccaccccaactccaacaccaacccccactcccactccaacttctgaaatgattgctggcagccaatctttaagcagagagtctccatgttcccggctagcccagacaactcctgtggatagtgccctcggatcttcgagacacactcctattgggacaccccactctaactgttcatcctcagtgccccccagcccagtagagtgcaggaatccattcgctttcacacccatttcgtcctcaatggcctaccacgatgccagcattgtgtcaagcagtcctgtgaagcccatgcagagacccatggccacacacccagacaaaacaaagttagaatggatgaacaatggatactctggcgtcggtaactcatcagtgtcgggtcatggtatactgccgtcctaccaggagctggtagaggatagatttaggaaaccccacgcctttgctgtccctgggcagtcctatcagtcacagagtagacaccatgacaccaacttcggcagactgactccagtgtccccagttcagcatcaaggcgcgacagtgaacaatacgaacaagcaggagggatttgctgtgccagccccgcttgacaacaaaggaaccaacagtagcgcttcctcaaacttccgatgccggtcggtgtctccagccgttcataggcagagaaacttgtccggatcaaccttatacccagtatccaacatacctcgctctaacgtgactccttttggaagccctgtgactcctgaagtgcatgtcttcaccaacgtgcatacggacgcatgcgccaacaacatcgctcaacggtctcagtccgtgcccctgactgtgatgatgcagactgcattcccgaacgcactgcaaaaacaggccaatagtaaaaagatcacgaatgtgctgctcagtaaattagatagtgacaatgacgacgccgtgagagggctcggtatgaacaacctgcccagcaattatacggcacgcatgaatctgacccagatcctggaaccctccaccgtgtttccatccgcgaacccacagaacatgattgatagttctactagtgtgtacgagtttcagactccatcctacctgactaagagcaattctacgggccagatcaatttcagccctggggacaaccaagcacaaagtgaaatcggagagcaacagctggatttcaactctaccgttaaggatctgctcagcggggactctcttcagacaaaccagcagctcgtgggtcagggagcttctgacctcacaaacactgcctctgatttttcatctgacatccgtttgtcgtctgaactgtccggaagtattaacgatctcaacactctggatccgaatcttttgtttgaccccggcaggcagcagggccaggatgatgaggccacattggaagaactcaaaaacgaccctttatttcagcagatctgctctgaatctatgaatagcatgacatcctcaggatttgaatggatcgaaagtaaagatcatcctacagtggagatgctcggatag

SEQ ID NO: 132136 - DNA, 783 bp, synthetic construct
  misc_feature 1..783: note = Description of Artificial Sequence: Synthetic coding sequence
  source 1..783: mol_type = other DNA
atggagttgacgcagcccgcggaagacctaatccagacccagcagacacctgcttccgagttaggcgatcctgaggatccaggggaggaagctgccgatggttccgataccgtggtgctctccctctttccctgtactccagagccagtgaatcctgagcccgatgcgtccgtgagtagtccacaagctggatccagtctgaagcatagcaccacactcaccaacagacagaggggtaacgaggtgagtgccctcccggccaccctggatagtctgtctatccaccagcttgcagcgcagggggagcttgatcagttaaaggagcatttgcgcaagggagataatctcgtgaataaaccagacgagcgcggcttcactcccctgatttgggcctccgcctttggagaaatcgaaactgtacgcttcctcctcgagtggggtgccgatccgcacatactcgccaaggagcgtgaatctgcattgagcttggcctctactggaggttacacagacatcgtcggcctgctattagaaagagatgtggatattaatatctacgactggaacgggggaacgccactcctgtacgctgttcgcggcaatcacgtcaaatgtgtggaggctctgttggcacggggcgctgacctgacgactgaagccgacagtggctatacccccatggatttagcagttgctctggggtataggaaggtgcagcaggtgattgagaaccacattctaaagcttttccagagcaacctggttccggccgatccggagtag

SEQ ID NO: 132137 - DNA, 714 bp, synthetic construct
  misc_feature 1..714: note = Description of Artificial Sequence: Synthetic coding sequence
  source 1..714: mol_type = other DNA
atggagctcacccagccagctgaagaccttatccaaacccagcagacgccagcctcagagctgggcgatccagaggatcccggagaagaggccgcggatgggtcagatacagtggtgctctccctattcccatgtaccccagaacctgtgaacccggagcctgacgctagcgtctctagcccccagggcagtagcctaaaacactcaaccacactgacaaacaggcaaagaggcaacgaggtcagtgcattacccgctacattagactgcgataaccttgtgaataagcctgatgaaaggggcttcacccccctgatttgggcgtccgcctttggggagatagagaccgtgaggttcttgctggagtggggagccgatccacatattctcgccaaagagagggaaagcgcgttgtcactagcatctacgggtggctatactgatatcgttggattgttgctggaaagggatgttgacattaacatctacgattggaatggaggcactcccttattgtacgcagtccgcggtaatcacgtgaagtgcgtggaggctttactcgctcgaggagccgatttaaccactgaggcagactccggttataccccgatggatctcgcggtagctctgggataccgcaaggtgcaacaggtgatcgaaaaccacatcctcaagctatttcagtccaacctggttccagccgatcctgaatag

SEQ ID NO: 132138 - DNA, 192 bp, synthetic construct
  misc_feature 1..192: note = Description of Artificial Sequence: Synthetic coding sequence
  source 1..192: mol_type = other DNA
atggaactgacgcagcccgctgaggatctgatccagactcagcaaactcctgcttccgagctgggagatcccgaagatccgggagaagaggccgcggatgggtcagacaccgtcgtcctttctttgtttccttgtacaccagagccagtgaatccagagcctgatgcctccgtgtcttcccctcaggcgtag

SEQ ID NO: 132139 - DNA, 717 bp, synthetic construct
  misc_feature 1..717: note = Description of Artificial Sequence: Synthetic coding sequence
  source 1..717: mol_type = other DNA
atggagctgacccagccagcagaagatctaatccaaacacagcagacccctgcatctgagctgggggatccggaagaccccggcgaagaagcagcagatgggtccgacaccgttgtgttgtcattattcccatgtacacccgagcccgtgaaccctgaacctgatgcttccgtgagcagcccccaagctggttcatccctgaaacactctacaacactgacaaatagacagagaggaaacgaagtctcagcactgcccgcgacccttgattgcgacaatctcgtgaataagccagacgagaggggcttcactccactgatttgggcctcagcctttggagagattgagacggtccgctttttactggaatggggcgccgaccctcacatcttagccaaggaaagggagtcagcactgtctcttgcaagtacagggggatacacagatatcgtggggctcctactggagcgcgacgttgatattaatatttacgattggaacggcggtactcccctgctctacgcagtccgcggcaaccacgtgaagtgtgtggaggctctgctggccagaggagccgatctcaccactgaagctgactctggatatacacctatggacctggctgtcgcactcggctatcggaaggtgcaacaggtgattgaaaatcatatccttaagctgttccaatctaatctcgttcccgccgacccagaatag

SEQ ID NO: 132140 - DNA, 819 bp, synthetic construct
  misc_feature 1..819: note = Description of Artificial Sequence: Synthetic coding sequence
  source 1..819: mol_type = other DNA
atggaagcccagggcgttgctgagggtgccggtccaggggcggcaagcggagtgccccatcccgccgctttggcccctgccgcggcccctaccctcgccccggctagtgtcgccgccgctgcctcccagttcactctcctggtgatgcagccgtgtgccggccaggacgaggcagcagcgcctggagggagcgtgggggcaggcaaacctgtaaggtatctgtgtgaaggagccggcgatggcgaagaagaagctggcgaggatgaagcggatttgctggatacgtccgaccctccagggggtggcgaatctgccgcctctcttgaagatttggaggacgaggagactcactctgggggcgagggatccagcggtggggcacggaggcgcggatcgggaggggggtcaatgtccaagacgtgtacctacgaagggtgcagcgagaccactagtcaggttgctaagcaacgcaaaccatggatgtgcaagaagcaccgtaacaaaatgtacaaggacaagtataaaaagaagaaatccgatcaggctctaaattgcggcggcactgccagcaccgggtccgcggggaatgtcaagctcgaggaaagcgcagacaacatcttatccatcgtgaagcagaggacagggagcttcggagaccggcctgccaggcccaccctcctcgagcaagtcttgaaccaaaagaggctctctctgcttcgatcccctgaggtggtccagttcctgcagaagcagcagcagctcttgaaccagcaagtactagagcagcggcagcagcagtttcctggaacatcaatgtag

SEQ ID NO: 132141 - DNA, 1854 bp, synthetic construct
  misc_feature 1..1854: note = Description of Artificial Sequence: Synthetic coding sequence
  source 1..1854: mol_type = other DNA
atgagtagcttgccaacatctgacggctttaatcatcccgccagaagcagtggccagtcccctgacgttgggaaccctatgtcccttgcaagatcagtctctgccagcgtttgccctatcaagccttcagactccgatagaatcgaacccaaggcagtcaaagcattgaaagctagtgctgagtttcaactcaattctgagaagaaggagcatctgtccttgcaggatttgtccgatcatgcgagttcagcagaccacgctccaaccgaccagtcgcctgcaatgcccatgcagaacagtagcgaggagatcacggtggccgggaacctagaaaaaagcgcggaaaggtcaacacaggggctgaagtttcatttacacacccgccaggaagcctcattgagcgttacctccaccagaatgcacgagcctcaaatgttcctgggcgaaaaggattggcaccccgagaatcagaatttgtctcaggtcagtgacccccagcaacacgaagaacccgggaatgagcagtatgaggtagctcaacagaaagcctcccatgaccaagaatacctgtgcaatatcggagacctggagctcccagaagaacgacagcagaatcagcacaagatcgttgatctggaggccacaatgaaaggtaatggcttgcctcagaacgtggacccaccttcggctaagaaatccattccctctagtgagtgttctgggtgcagcaacagcgagacttttatggagatcgacaccgcacagcagtctctcgtgaccctgttaaactctacgggacggcagaacgcaaatgtaaagaacataggagcacttgatttgactttggacaacccacttatggaggttgaaacaagtaagtgtaatcctagtagcgaaattctgaatgattccatttctactcaagacctgcaaccgcctgagactaatgtcgagatccctggcaccaacaaggagtacggccactatagcagtcccagtctctgcggcagttgccagccaagtgtcgagtcagcagaggaatcttgtccatctattactgcagcattgaaagagcttcatgagcttctggtggtcagttctaaacccgcttcagaaaatacctccgaggaggtcatctgtcagagcgagacaatagccgagggccaaacgtctattaaggatctgagcgagcggtggactcagaatgagcaccttacacagaatgagcaatgcccccaggtttcttttcatcaggctattagcgtcagcgtcgaaacggagaaactgaccggaacttcttctgacaccgggcgcgaggccgtggaaaatgtaaattttaggtctctgggagatggtttatccaccgataaagagggggtaccgaagtcacgggagtcaatcaacaaaaaccgctctgtaactgtcacgagcgccaagactagtaatcaattacactgtactcttggggtggaaatctcgccaaaactgctggcaggcgaagaggacgctttaaaccaaacgtccgagcagacaaaatccctgagttccaacttcatactggtcaaagatcttggccaagggattcagaactctgtgaccgatagacccgagacccgcgaaaatgtgtgccctgatgcttctagacctctgctggaatacgaacctccgacctcacatccttcttccagccctgccatcctgcctcccctgatcttcccggctacggatattgatagaatattacgagcaggatttacactgcaggaagctctgggggctttgcaccgagtgggggggaacgctgacctggccctgttagttctcttggcaaaaaacatcgtggtgccaacttag

SEQ ID NO: 132142 - DNA, 657 bp, synthetic construct
  misc_feature 1..657: note = Description of Artificial Sequence: Synthetic coding sequence
  source 1..657: mol_type = other DNA
atgtctagtggggccgcttctggtactggacgagggcgaccccgtggtggcggacctggaccaggagacccacccccatcagagacccataagctggtggttgtgggaggcggtggcgtcggaaagtcggctttaaccatccaatttatccagtcttacttcgtttcagactatgatccaactatcgaggattcctacactaaaatttgttcagtggatgggattcccgcacgcctagatatcctggataccgctggccaggaagagttcggcgccatgcgtgagcagtatatgagggcgggtcacgggtttttgttggtatttgctattaacgaccgccaaagctttaacgaagtaggtaaactgtttactcagatcttacgggttaaagacagagatgattttccggtagttcttgttgggaataaggcagacctggagtctcagagacaggttccacgcagtgaagcatctgccttcggggcctcacaccatgtggcttactttgaggcctccgccaagctgcggctgaatgtggatgaagcgtttgaacaactggtgcgcgcagttcgcaagtatcaggagcaggaattgcctccgagcccgcccagtgccccccgaaaaaagggagggggctgcccatgcgtcctcctttag

SEQ ID NO: 132143 - DNA, 615 bp, synthetic construct
  misc_feature 1..615: note = Description of Artificial Sequence: Synthetic coding sequence
  source 1..615: mol_type = other DNA
atggccgcggcgggatggcgagatgggagcggacaggagaaatacaggctggtcgtcgtcgggggaggtggcgttggaaagtcagccttaacgatccagttcatccagtcttattttgtcactgactacgaccccaccatcgaggattcctacacaaagcagtgcgtgatcgacgatcgcgcggcaagattggatattttggacaccgctggccaagaggaattcggcgcaatgagggagcagtacatgcggaccggggaaggctttctgctggtcttctctgtgaccgatcgaggctcgtttgaggaaatctataagtttcaacgccagatcctgagggtgaaagatagggatgagtttccaatgattttaattggcaataaggcagaccttgatcatcaaagacaagtaacacaggaagagggccagcagctggcaaggcagctcaaggtgacatacatggaggcttcggccaagatacgcatgaacgttgaccaggcttttcacgaattggtgagagttatccgtaagttccaagaacaggagtgtcccccatctccagaacccacccgcaaagagaaggataagaaaggatgccattgtgtgatcttctag

SEQ ID NO: 132144 - DNA, 384 bp, synthetic construct
  misc_feature 1..384: note = Description of Artificial Sequence: Synthetic coding sequence
  source 1..384: mol_type = other DNA
atgcgggaacagtatatgcgcacaggcgaggggtttctacttgtgttttccgtgacagaccggggctcttttgaagaaatctacaagtttcaaaggcagatcttgagagtgaaagatcgggatgagttccccatgattctgatcggtaataaagccgacctggaccatcagaggcaggtgacccaagaagagggtcagcagctagctagacagttgaaggtgacgtacatggaggctagtgctaagatacgcatgaacgtggaccaggcattccatgagttggtgagggtaattagaaaattccaggagcaggagtgccccccttcccctgagcctacacggaaggagaaagacaagaaaggctgccattgcgtcatcttctag

SEQ ID NO: 132145 - DNA, 384 bp, synthetic construct
  misc_feature 1..384: note = Description of Artificial Sequence: Synthetic coding sequence
  source 1..384: mol_type = other DNA
atgcgcgagcagtacatgcgaacaggagaaggattcttgctggtgtttagcgtgactgaccgcggtagcttcgaagaaatttacaaattccagcgacagatcctgagggtcaaggaccgcgacgagttccccatgatacttatcggcaacaaggcagatctcgaccaccagcgacaggtgactcaagaggagggccaacagctggcaaggcagctcaaagtgacctatatggaggcttccgccaagatccgcatgaacgtggatcaggccttccacgagcttgtgcgggtgattcgaaaattccaggagcaagagtgtcccccctctcccgagcctacgcgcaaagagaaggacaaaaaaggatgccattgcgtgattttctag

SEQ ID NO: 132146 - DNA, 384 bp, synthetic construct
  misc_feature 1..384: note = Description of Artificial Sequence: Synthetic coding sequence
  source 1..384: mol_type = other DNA
atgagagaacagtacatgagaaccggggagggttttctactcgtattcagtgtcaccgaccggggaagttttgaagaaatttataaattccagcgccagatcctgcgcgttaaggatcgggatgagttccctatgattttaatcggaaacaaggccgatctggaccaccagcgccaggtcacccaagaagagggtcaacagttggcaaggcagctcaaggtgacatatatggaggcatcggctaagattcgcatgaatgtggaccaggcatttcacgaacttgtgcgagtgattaggaaattccaggaacaagaatgccctcctagtcccgaacccactaggaaggagaaagataagaagggttgtcattgcgtgattttttag

SEQ ID NO: 132147 - DNA, 210 bp, synthetic construct
  misc_feature 1..210: note = Description of Artificial Sequence: Synthetic coding sequence
  source 1..210: mol_type = other DNA
atgcgggagcagtatatgagaaccggcgagggtttcctccttgtgttcagtgtcacggatagaggttcattcgaagaaatttacaagttccaacgtcaaatactgcgggtgaaggaccgcgatgagtttccaatgatcctgattggtaacaaagccgatctggatcatcaaaggcaggtcacacaggaggaagggcagcaactggcttag

SEQ ID NO: 132148 - DNA, 384 bp, synthetic construct
  misc_feature 1..384: note = Description of Artificial Sequence: Synthetic coding sequence
  source 1..384: mol_type = other DNA
atgcgggaacagtatatgcgcacaggcgagggattcctgctggtgtttagcgtcaccgaccggggttcattcgaggagatatacaaatttcagaggcagattctccgagtaaaagacagagatgaattccctatgattctaatcggaaataaggccgacctcgatcaccagcgacaggtaactcaggaggagggccaacagctggcccgacagttgaaagtcacatatatggaggccagcgccaaaatccgcatgaacgtggaccaagcttttcatgagctggttcgagtcataagaaagtttcaagaacaggaatgtcctccatcccctgaaccaacccggaaggagaaagataaaaagggttgccactgtgtgatcttctag

SEQ ID NO: 132149 - DNA, 384 bp, synthetic construct
  misc_feature 1..384: note = Description of Artificial Sequence: Synthetic coding sequence
  source 1..384: mol_type = other DNA
atgagagagcagtatatgcggacaggagaaggctttctcttggtgttttccgttaccgaccgaggcagctttgaagaaatttacaagtttcaacggcagatcctcagagtgaaggacagagatgaatttcctatgattctgattggcaacaaggccgatctggatcaccaaaggcaggtcacccaagaggaaggacaacagctggccagacagctgaaggtgacctacatggaagcttcagctaaaatccgcatgaacgtagaccaagcattccatgaactggtaagagtgatcagaaaattccaggagcaggagtgtccgcccagccccgagcctactaggaaagaaaaagacaaaaagggctgccattgcgttatattctag

SEQ ID NO: 132150 - DNA, 510 bp, synthetic construct
  misc_feature 1..510: note = Description of Artificial Sequence: Synthetic coding sequence
  source 1..510: mol_type = other DNA
atgtcttacttcgtcactgattatgaccctacaattgaggacagttacacaaagcagtgtgtgattgatgatagagcagcccggctcgatatacttgacaccgccggtcaggaggagttcggcgctatgcgtgagcagtacatgagaacaggtgagggatttctgcttgtgttctcagtgacggaccgtggatcattcgaagagatttacaagtttcaacgccagattctgagggttaaagaccgcgacgagttccctatgattttgatcggaaacaaggcggacctcgatcaccagcggcaggtcactcaggaggaggggcagcagttggctcggcagctcaaagtgacatacatggaggccagcgctaagatccggatgaacgtcgatcaggcgttccacgagcttgtgagggttatccgcaaatttcaggagcaggaatgtccacccagccccgagcctaccagaaaagagaaagacaaaaagggttgtcactgtgtcatcttctag

SEQ ID NO: 132151 - DNA, 633 bp, synthetic construct
  misc_feature 1..633: note = Description of Artificial Sequence: Synthetic coding sequence
  source 1..633: mol_type = other DNA
atggctgcagcagggtggcgcgacggaagcgggcaggaaaagtaccgcctggtggtggtcggcggcggaggggtgggaaagagcgctcttaccatccaattcatccagttcttccttttcctgcaatcatactttgtgacagattatgacccgactatcgaggacagctacactaagcagtgtgtaatcgatgacagagccgcaagactcgatatcctggatacggccggacaggaggagttcggagccatgagagagcaatacatgcggaccggcgaaggtttcctcctggttttctctgtcaccgataggggctcatttgaagagatctacaaattccagcgacagatcctgagggttaaagacagggacgagttccccatgatactgatcgggaacaaggccgatcttgatcaccagagacaggtcacacaggaagagggccagcagctcgcccggcagctaaaagtcacgtacatggaagcttctgccaagatccggatgaacgtcgatcaggcgttccatgaattggtcagggtaattagaaagttccaggagcaggaatgcccccctagcccagagccaaccaggaaagaaaaagataaaaagggatgtcactgcgtaattttttag

SEQ ID NO: 132152 - DNA, 633 bp, synthetic construct
  misc_feature 1..633: note = Description of Artificial Sequence: Synthetic coding sequence
  source 1..633: mol_type = other DNA
atgggttgctgctcttcctccgacccgagacgcgaggacgacctgagggctcgagaaaagctcaaaaaaaccaagattatttttgtggtgggagggccaggttccgggaaagggacccagtgcgaaaagattgtccagaagtacgggtacacccacttatccacaggcgacctgctacggtccgaagtgtcttctggctctgcacgggggaaaaaactcagcgagataatggagaaagggcagttggtaccgctcgagacagtgctggacatgttaagggacgccatggtagcgaaagtcaacactagcaagggattcctaattgacggctacccccgagaggttcagcaaggggaggagttcgaacgccgaatcggtcaaccaaccctattgttgtacgtggatgcaggtcctgagacaatgacgcagcggctactgaaacgcggggaaacctctggcagagtagacgacaacgaagaaaccattaaaaagcgcctggaaacctattacaaggctacagaacccgtgatcgctttttatgagaagcggggcattgttcggaaagtgaacgctgagggctccgtcgatagtgtgttcagtcaggtgtgcactcacttggatgccctcaaatag

SEQ ID NO: 132153 - DNA, 354 bp, synthetic construct
  misc_feature 1..354: note = Description of Artificial Sequence: Synthetic coding sequence
  source 1..354: mol_type = other DNA
atgccccgcctgttcctcttccatttgctggaattctgcctgctactcaatcagttttctcgtgctgtagctgccaagtggaaggatgatgtgatcaagctttgcggacgcgaactcgtaagagcccaaatcgccatctgtggaatgagtacctggagtaagcggagccttagccaggaagatgctcctcaaactccccgccccgtggctggagattttatacagacagttagcttaggtatcagccccgacgggggtaaagctttgcgtacaggcagttgttttactcgcgagttcctgggtgccctctcaaaactgtatcacccaagtagcacaaagatccaaaaactgtag

SEQ ID NO: 132154 - DNA, 429 bp, synthetic construct
  misc_feature 1..429: note = Description of Artificial Sequence: Synthetic coding sequence
  source 1..429: mol_type = other DNA
atggctaggtacatgcttctcctccttctcgcagtctgggtgctgacaggtgagctgtggcctggggccgaagctcgagcggcaccgtacggagtccggctttgtggtcgcgaattcattcgcgcagtgatcttcacctgtggaggctcacggtggcgcagatccgacattctggctcacgaggctatgggcgatacttttccagatgccgacgcagacgaggacagccttgccggtgaactggatgaagccatggggtcttccgaatggctcgcgttgactaaaagcccccaggccttctaccgggggaggccctcatggcaaggtacccctggtgtgcttcgagggtctcgagacgtccttgctggattgtcatcctcctgttgcaagtggggatgcagtaaaagtgagatctccagcctgtgctag

SEQ ID NO: 132155 - DNA, 1293 bp, synthetic construct
  misc_feature 1..1293: note = Description of Artificial Sequence: Synthetic coding sequence
  source 1..1293: mol_type = other DNA
atgaagccgtcactgctttgccgccccctcagttgctttctgatgctcctgccttggccactggcaaccctcacgagcactacgttatggcagtgccctccaggggaagaaccggacctggacccgggtcaagggacactgtgccgaccttgccctcctggcaccttttccgcggcctgggggtcctcaccctgccaaccgcacgctaggtgttcgctctggagaagactggaggctcaggtcgggatggccacacgggacactttgtgtggcgactgttggcctgggtggttcggaccgtggggagtgcctcgggtcccttgtcaaccttgctcatgggcacccctgggaacacacgggtgcgacgagtggggacgaagggctcgacgtggagtggaggtggctgccggggctagtagcggcggagagacacgtcaaccagggaacggcactagggcggggggtcccgaagagaccgctgcacaatacgccgttatagcgatcgtgcctgtcttttgccttatgggcctcctcggaatcctcgtctgcaacctcctgaagagaaaaggataccactgtactgcacacaaagaagtgggtccaggtcccggtgggggcggtagcgggatcaacccagcatacaggactgaggacgctaatgaagacaccataggggtgttggtacggcttattactgagaagaaggaaaacgctgccgccctggaagaactcctaaaagaataccactccaagcagctggttcagacctcccacagacccgtgtccaagctccccccggcccctcccaacgtccctcatatttgcccacataggcatcacctgcatacggttcagggtttagcaagcctctcaggtccatgttgttctaggtgctctcagaagaaatggcccgaggtgctcctgtcgcctgaagcagttgccgccaccactccggtccccagtctgttgcctaatcctacacgcgtccccaaagcgggggccaaggcaggtcggcagggcgaaattacaatactgagcgtgggaagattccgagtagcccggattccagaacagaggaccagtagtatggtgagcgaagttaagacaatcaccgaagccggtccgtcctggggagaccttccagacagtccgcagcccggccttccccccgagcagcaggccctgctgggtagtgggggatcacgaacaaagtggctgaaaccccccgcggaaaacaaggcagaagagaatcggtatgtggttcgcctgtctgaatcaaacctggttatatag

SEQ ID NO: 132156 - DNA, 1293 bp, synthetic construct
  misc_feature 1..1293: note = Description of Artificial Sequence: Synthetic coding sequence
  source 1..1293: mol_type = other DNA
atgaagcctagccttctgtgtaggccactttcctgtttcttaatgctgctcccgtggcccctggcgacacttacttccacaaccttgtggcagtgtcctcccggagaggagcccgacctggatccagggcaagggacactctgtagaccatgtcccccgggcaccttctcggcagcgtggggtagcagtccttgtcagccacacgccaggtgttccctgtggagacgcttagaggcccaagtcggcatggctaccagagataccctctgcggagattgttggccagggtggtttggcccctggggagtgccccgggtgccctgccagccttgttcatgggcacctctgggaacccacgggtgcgacgaatggggccgcagggccaggagaggagttgaggtcgcagcgggagcaagctctgggggcgagacaaggcagccaggtaatggtacgcgggccggcggccccgaggagacagcagcccagtatgccgttattgcaatagtaccggtgttttgtctgatgggccttcttggaatactggtatgcaatttactgaagagaaaagggtatcattgtaccgcccacaaggaagtaggtcctggccccggcggaggagggagcggcatcaatcccgcttaccgcaccgaggatgctaatgaagatacaatcggagtgttggttaggctgataacagaaaaaaaagaaaacgcagccgcactggaggaacttctcaaagaataccactcaaaacagctggtccaaacctctcaccggccagtgtccaaactgcccccagcacctccaaacgttcctcacatttgcccccacagacatcacctgcataccgtgcagggtctcgcctcactgagcggaccctgctgcagtagatgcagccagaagaagtggcccgaagtgctactgtcacccgaggcggtggcagcaacaacccccgtgccctcccttctccccaaccccacgcgtgttcctaaggccggtgctaaggcggggaggcagggcgaaataaccattctgagcgtgggacgttttcgcgtcgccagaatccccgagcagaggacttcttctatggtgtcagaggtcaagacgataactgaggcgggaccctcttggggagaccttccagacagccctcagcccggattgcctcctgagcagcaagccctcttggggagcgggggttccagaaccaaatggcttaagccaccagctgagaataaagcagaggagaatagatacgttgtccgcctcagtgaaagtaacctggtcatatag

SEQ ID NO: 132157 - DNA, 897 bp, synthetic construct
  misc_feature 1..897: note = Description of Artificial Sequence: Synthetic coding sequence
  source 1..897: mol_type = other DNA
atgcatcccgggtgctgggtgcaggaggctctagtgttaaatcacgagggtgacatgggcttctccgagcctggttcgcacatttgtcgagccctaggtggcctttctcctaagtgtacttgttctggccctcttaggagacctgggctgccctcagccggccggtcttggttcagctctggcgtgcgattacccccgagtcctggcagcggcccctttagcagtccaggaataaaccccgcttatcgaacagaagacgcaaatgaggacaccatcggggtgctcgtcagactaattaccgaaaaaaaagagaatgcagccgctctagaagaactgctgaaagagtatcactccaagcagctcgtccagacctctcacagaccagtatctaaactgccaccggcccccccaaacgtgccacacatttgcccccataggcaccatcttcataccgtccagggcttggcctcactaagtgggccttgctgctcgagatgctctcaaaagaaatggcccgaagtgttgttgtccccagaagccgtggctgctactacccccgtgccgtctcttctccccaatcccacaagagtccccaaggccggtgcaaaagcaggccggcagggagaaatcacgatcctttccgtgggtaggtttcgcgttgccagaatccccgaacagcgcacgtctagtatggtcagcgaagtaaaaaccattactgaggcaggcccttcctggggtgacctccctgactcccctcagcccggcctgccacccgagcagcaggcactgcttgggtctggcggaagcagaacgaaatggctaaaaccgccagctgaaaataaggctgaggaaaatcggtatgtggtgcgcctgtccgaatctaacttggtaatttag

SEQ ID NO: 132158 - DNA, 306 bp, synthetic construct
  misc_feature 1..306: note = Description of Artificial Sequence: Synthetic coding sequence
  source 1..306: mol_type = other DNA
atgaagcccagcctgctgtgtcgccccctctcttgcttcctgatgctgctcccatggccactcgcgacactgacatcgacgacgctgtggcagtgcccccctggcgaggagccagatctggatcccggccaaggcaccctgtgccgaccttgtccacccgggacctttagcgcagcttgggggtcatcaccctgccagcctcatgctagatgttccttatggagaaggcttgaagctcaagtgggaatggcaacccgagataccttgtgtggagactgctggccaggctggttcggaccatggtag

SEQ ID NO: 132159 - DNA, 4326 bp, synthetic construct
  misc_feature 1..4326: note = Description of Artificial Sequence: Synthetic coding sequence
  source 1..4326: mol_type = other DNA
atggccacagctgctgccgcagccgccgtcatggcaccacctgggtgtccaggttcctgcccaaacttcgccgtcgtatgcagcttccttgaacgatatggccctcttttggaccttcccgaactcccctttccagagttggagcgtgttctccaggctccccctccggacgttggtaatggggaagtgccgaaggaactagtggagttacatcttaagctgatgagaaagatcggcaagagcgtgaccgcagaccgctgggagaaatacctaattaagatttgccaggagttcaactctacatgggcttgggagatggaaaagaaggggtatttggaaatgtcagttgaatgcaaactggctttattgaagtacttatgcgaatgtcagtttgatgacaaccttaagtttaaaaatatcataaacgaagaggatgccgatactatgcgactgcagcccattggcagagacaaagacggcctgatgtactggtaccagctcgatcaagaccacaatgtccgtatgtatattgaggagcaggatgatcaagatggttctagctggaagtgtatcgtcagaaaccgcaatgaactcgctgagacactcgcattgttgaaagctcaaatcgaccccgtgttgctgaagaacagctcccagcaagataactccagccgagagagcccaagtttggaggatgaagaaaccaaaaaagaagaggaaactccgaagcaggaagagcagaaagagagcgaaaaaatgaaaagcgaagagcagccgatggacttagagaaccgaagtactgcgaatgtcctcgaagagacaaccgtgaaaaaagaaaaagaggacgagaaagagctggttaaacttccggtcatagtgaagttggaaaaaccattacctgagaacgaggaaaaaaaaattatcaaagaggaatccgatagtttcaaagaaaacgtgaaacccataaaggtggaagtgaaggagtgtcgggcagaccctaaagacaccaagagttccatggaaaagccagtggcgcaagagccggaaagaatcgagtttggcggtaacatcaaatccagccacgagatcactgaaaagtctactgaagagaccgagaagctgaagaacgaccaacaggcgaaaatacccttgaagaagcgggaaataaaactcagcgacgacttcgacagccccgtgaagggacccctgtgtaagagtgtgaccccaacaaaagaattcctgaaggacgagattaagcaagaggaagaaacttgcaagagaatctcaactataactgcattggggcacgaagggaagcagctcgtaaacggcgaagtttcggatgaacgagtggcccccaattttaaaacagagcctatcgagactaaattttacgaaacaaaggaagaaagctactctccatctaaggatcggaatattatcaccgagggaaacggcacggagagtctgaactctgtcattacctcaatgaaaacgggcgagttggaaaaggaaaccgcacctctccgaaaggacgccgactcttcaatcagcgtgctagagatacattcacagaaagcgcagatagaagagcccgacccacctgaaatggagacatcacttgattcatccgagatggctaaggatctgtcgagcaaaacggccctatcctcaacagaatcatgtaccatgaaaggcgaggaaaaatcgcccaaaaccaagaaggacaagcggccgcccatactcgagtgtctggagaaactcgagaaaagcaaaaagacctttctcgacaaggacgctcagcgtctatctcctatccctgaagaggtgccgaagtccacactggaatccgagaagccaggttcaccagaggctgctgagacctccccaccctccaatatcattgaccattgcgagaaactggcctcagagaaggaggtcgtggagtgccaaagcaccagtacagtgggcggccagtcagtgaaaaaagttgacttagagaccctcaaggaggactccgagttcactaaggtcgagatggacaatctggacaatgcgcagaccagtgggattgaagagccctctgaaaccaagggatccatgcagaagagtaagtttaaatacaagctggtgcctgaagaagagactaccgcctcagagaataccgaaatcacctctgaacggcaaaaggaggggatcaaactgaccatcagaatctcttcaagaaagaaaaagcccgattctcctcctaaagttctggagcccgagaataaacaggagaagacagagaaggaagaagagaagacgaacgtgggcaggactttgagacgatcgccacggattagccgccccacagccaaggtcgcggaaataagggatcagaaggctgacaagaagaggggagaaggtgaggatgaggttgaggaagagtccaccgctcttcaaaaaacagataagaaggaaatccttaagaaatccgagaaggacaccaacagcaaagtcagcaaagtgaagcccaagggcaaggtgagatggaccggctctaggactcgcggaaggtggaaatacagttctaatgatgaaagtgaaggctcaggaagcgaaaaaagctccgcagcgtccgaggaggaggaagagaaggaatccgaggaggctatcttggccgacgatgacgagccatgcaaaaagtgtgggttgcctaatcaccctgaattaattctgttatgcgactcttgcgacagcgggtaccacaccgcctgcttgagacctcccttgatgatcatacccgacggggagtggttttgtcctccctgtcagcacaagctgctctgcgagaaattggaagagcagctgcaggatcttgatgtcgccttgaaaaagaaagagagggccgagcgccgcaaggagagattagtgtatgtgggaatctctatagagaatatcattccaccacaggagcctgatttttcagaagatcaggaggaaaaaaaaaaagattctaaaaagtcaaaagccaatctcctcgagcggcgatctacaagaaccagaaaatgcatcagttaccggtttgacgagttcgacgaggccattgacgaggctatcgaagacgatattaaggaggccgatggaggcggagtggggaggggcaaagacatatccacaatcaccggtcatagaggaaaagacatttctaccatcctcgatgaagaaaggaaagagaacaaacggccccaacgcgccgctgcggcccgccggaaaaaacgcaggcgccttaacgacctcgactctgactccaatcttgatgaggaagaaagcgaggatgaattcaagattagcgacggctcacaggatgaattcgtagtgagcgatgagaacccagacgaatccgaggaggaccccccgtcaaacgacgacagcgacaccgacttctgctcccgaagacttagacgccatccctctagaccgatgagacagtcgaggcgcttgaggagaaagaccccgaaaaagaagtattccgacgacgacgaggaggaagaatcagaagagaactctagagattccgagagcgatttctctgacgatttctctgacgacttcgttgagacaagaaggcgcagatcaaggagaaatcaaaagaggcagattaactataaagaagactctgagtccgacggatcacagaaatccttgcgccgtggcaaggagataaggagggtgcacaaacgccggctgagttcctcggaatccgaggagtcatacctttcgaagaactctgaggacgatgagcttgcgaaagaatcaaaaagatccgtccgtaagcgcggccggagcactgacgaatattccgaagcagacgaggaggaggaggaagaggagggcaagccgtccaggaagcggctacacaggatagagaccgatgaggaggaatcctgtgacaatgctcacggagatgccaaccagcctgcacgtgacagccagccgcgggttttacccagtgaacaggaatccacgaagaagccctatcgcattgagtcggacgaagaagaggattttgagaatgtcggcaaagtgggatccccactagactattcactggtagacctgccaagtacgaatggacagtcacctggaaaggcgattgagaacctcatcggcaagcccacggaaaaaagccaaaccccgaaagacaattcgacggccagcgcatctctggctagcaatggcacttctggcggccaggaagctggggccccagaggaggaagaagacgagctgcttagggttacagatctcgtcgactatgtttgcaattctgagcagctgtag

SEQ ID NO: 132160 - DNA, 4233 bp, synthetic construct
  misc_feature 1..4233: note = Description of Artificial Sequence: Synthetic coding sequence
  source 1..4233: mol_type = other DNA
atggcaaccgctgcagctgccgcagccgtgatggcaccccctgggtgcccaggatcatgtccaaatttcgccgtcgtgtgcagctttctagagaggtatggccctttgctagacctgcctgagcttccattccctgagttggagcgcgtgctgcaggccccaccaccggatgttgggaacggtgaagtgcctaaagaattagtggaactgcatctaaaattaatgcggaaaatcgggaaatccgtgaccgcagatcgctgggagaagtacctgattaaatacctttgtgagtgccagttcgacgataacctgaaatttaaaaacatcatcaatgaagaagacgccgataccatgaggctacagcctatcggcagagataaggatggtcttatgtattggtaccagcttgatcaggatcacaatgtgcgcatgtacatcgaggaacaagatgatcaggacgggagcagctggaagtgtatcgtgcgaaatagaaacgaattggcagaaaccctggccctgttgaaggcacagatcgaccccgttttactgaagaactcttcacagcaggacaactcctctcgcgaaagccccagcctggaagacgaagagaccaagaaagaggaagagactcccaagcaggaagagcaaaaggagagtgaaaagatgaaatcagaggagcagccgatggacctggagaaccgctcaacagccaatgtgctagaggagactacagtgaaaaaagaaaaggaagatgaaaaagagcttgtgaaactgcctgtcatcgttaagctagagaagcctctgcctgagaacgaggaaaaaaagatcatcaaggaagagtctgattcttttaaagagaacgtgaagccaatcaaggtggaagttaaggaatgtagagcagaccccaaagacactaaatctagcatggaaaagcccgtcgcccaagaaccggagcgtatcgagttcggcggcaatatcaaatcctctcatgagatcactgagaaaagcactgaggagactgagaaactcaaaaatgaccagcaggcgaagatcccactgaaaaagagggagatcaagcttagcgacgattttgatagccccgtgaagggaccactttgtaagagcgtcacacccaccaaagagtttttaaaggatgagataaaacaggaagaagagacttgtaaaaggatcagcactatcacggccctaggacacgagggtaagcagcttgttaacggtgaggtgagcgatgagcgggtggccccaaactttaagacggagccgattgaaaccaagttttatgagaccaaggaggaatcctattcccctagcaaagaccggaatattattactgagggtaacggtacagagtctctaaactccgttatcaccagcatgaagaccggagagttggagaaagaaactgccccgctgcgtaaagacgcggatagcagcatctcagtgctggagattcattcccaaaaagcccagatcgaagagccagatccgcctgaaatggaaacatcgctcgatagttcagaaatggcaaaggacctgtcttccaaaactgcactaagttccacagagtcctgtaccatgaagggggaagaaaagtctcccaagaccaaaaaggacaagcgcccaccaattctcgagtgtttggaaaaactggaaaaatccaagaaaacatttctggataaggacgcccagagactctcacccataccagaggaagtgccaaagagtaccttggagagtgagaaacctggaagtcctgaggccgcagaaaccagtcccccttcaaacatcattgatcactgtgaaaaactggcatcagaaaaagaagtggtggaatgccagagcaccagtactgtgggaggccaaagcgtgaaaaaagtagatctggaaaccctaaaggaagattcagagtttactaaggtcgagatggataatctggacaacgcccaaacgtccggtatcgaggagccctcagagacgaagggcagtatgcagaagtctaaattcaagtacaagctagttcctgaagaggagactacagcgtcagaaaatacagagattacctccgagcgtcaaaaagagggaattaaactgacgatccgaataagctcaaggaaaaagaagccagactcaccacctaaggttttggagcctgagaacaaacaggaaaagacagagaaggaggaggagaagaccaacgtggggcgtaccttgcgtaggtctccaagaataagtagaccaacagccaaggtggcggagatccgtgaccagaaagccgataagaagcggggagagggcgaggacgaagtggaagaggagagcactgcgcttcagaagaccgataaaaaggagattctgaagaaaagcgagaaagatacgaattccaaggtgtcaaaagtaaaaccgaagggtaaagttaggtggacgggatcccgtaccagaggcagatggaagtattcatcgaatgacgagtccgagggttctggtagcgaaaagtcatcagccgcgtcagaagaggaggaggagaaggagtccgaggaggccatcctggcggacgatgatgagccttgtaaaaagtgtggcctgccaaaccatcctgaactgatccttctgtgtgattcttgtgattccggctatcacacagcatgcctgaggcctcccctgatgatcatccccgatggagaatggttttgccctccctgccagcacaagctcctgtgcgagaagctagaagaacagctgcaggatcttgacgtggccctgaagaagaaggaacgcgctgagaggcgcaaggaacgcctggtatacgtaggaatctccattgaaaatatcatcccaccacaagaacctgatttcagtgaggaccaggaggagaagaagaaggatagcaagaaaagcaaggctaacctgctagaacgccgcagcactcgaactcggaaatgcatatcttatcggtttgatgagtttgatgaggccattgatgaagctattgaggacgatattaaggaagccgatggcggtggagttggccggggaaaagacatcagcacaatcacaggccacaggggaaaggacatctcaactatactggatgaggaacgcaaagaaaacaagcgcccccaaagggctgcggccgcccgtcgaaagaaaaggagacgcctgaacgacctcgattctgactcaaacctggacgaggaggagagtgaggacgaattcaagattagcgatggttcacaggacgagttcgtagtttcggacgaaaaccccgacgagtctgaggaggatccaccgagtaatgacgactctgacaccgatttttgcagcaggcgcttaagacggcacccctctcggcctatgcgccagagcaggagactcaggcgaaagactcccaagaagaagtattctgacgatgatgaagaggaagaatccgaagagaatagcagggactccgagtcggactttagtgatgacttcagtgatgacttcgtggagacccgccgtcgacggtcacgaagaaaccagaaaaggcaaattaattataaggaagactccgaatctgacggctctcagaagtccttacgcaggggaaaagagatccggagagtgcataaaaggcggctgagctctagtgaaagtgaggaatcttacctatccaagaattccgaagacgacgaactggccaaagagtctaaaagatcagtccggaagcggggcagatctacggacgaatatagtgaggctgatgaggaggaagaggaggaggagggaaaaccttctagaaaaagattacatagaatcgaaactgacgaggaagaatcctgtgacaacgcccatggtgacgctaaccaacctgctagagattctcagccacgcgtgttgccttcggaacaggagtctactaaaaaaccttaccgcattgaaagcgatgaggaagaagattttgagaacgtgggtaaggttggttcccccctggactacagtctagttgacctgcccagtaccaatggccagtcaccaggtaaagccattgaaaacctgattggcaaacccaccgagaagtctcagacgcccaaggacaactcaactgcatcagcttctctggcctctaacgggacatctggaggacaagaagccggcgcaccagaagaggaagaagatgagctactacgggtgacggaccttgttgattacgtatgtaattcagaacagctttag

SEQ ID NO: 132161 - DNA, 3570 bp, synthetic construct
  misc_feature 1..3570: note = Description of Artificial Sequence: Synthetic coding sequence
  source 1..3570: mol_type = other DNA
atgaagtcagaagagcaacctatggacctggagaaccgcagtaccgccaatgtgctggaagaaactacggtgaagaaagagaaagaagatgaaaaagaactggtcaagcttcccgttattgtcaaattagaaaagcctcttcccgagaatgaagaaaaaaaaataatcaaagaggaatctgattcatttaaggaaaatgtgaagcctataaaggtggaggtaaaggagtgcagggcggatccaaaggacactaagtcctcaatggagaaacccgtcgcccaggaaccagaaaggatcgaattcggggggaatatcaaatcaagccacgagattaccgagaagagcacggaggaaacagagaaattgaagaatgatcagcaggctaagattcccctgaagaagagggaaattaagttaagcgacgattttgatagtcccgtaaaagggcctttgtgcaagtcagtgacaccaactaaagaatttctgaaggacgaaattaagcaggaggaggagacatgcaaacggatcagcaccattactgctctgggccacgaaggcaagcagcttgtgaatggggaagtgagcgacgaacgcgtcgcgccaaacttcaaaacagagccaatcgagactaagttctacgagacaaaggaagaatcgtatagcccatccaaggatcgcaatattatcacagagggtaacggaacggagtcccttaacagcgtgatcacttcaatgaaaacgggcgagcttgagaaggagaccgcaccattgcgaaaagatgccgattcctccattagtgttttagagatccactcacagaaggctcagatcgaggagcctgaccctcccgaaatggagacatcgctcgacagctctgaaatggccaaggatctaagttccaagaccgcattgtctagcactgaatcttgtacaatgaaaggagaggagaagagtcctaagactaaaaaggacaaaaggcctccgatactcgaatgcctggagaagctagagaaatcaaagaaaactttcttagacaaagacgcgcagagactgtcccccatccctgaggaagttccaaagagcacgctcgaaagcgagaagccagggagtcctgaagctgcagagactagtcccccaagtaacatcatcgaccattgtgaaaagctggcatctgagaaggaggtggtagaatgccagagcacctccaccgtgggcggacaaagcgttaaaaaagtggatctggaaacccttaaagaagattccgagtttactaaagtggaaatggataacctggataacgcgcagaccagtggtattgaggaacccagtgagactaaggggtccatgcaaaaaagtaagtttaaatataaactcgtgcctgaggaagagaccaccgctagcgaaaacaccgagattacatctgaacggcagaaagaaggcatcaaactgactatacggatcagcagtcgcaaaaaaaaacctgacagtcccccaaaggtgctggagccggaaaacaagcaggaaaaaacagaaaaagaagaggagaaaactaacgtggggaggacattacgcaggagtcccaggatcagccgaccgactgccaaagtggccgaaataagggatcagaaggctgataaaaaaagaggcgagggtgaggacgaggtggaagaggagagtacagcactgcagaagaccgacaagaaagaaatcctcaagaagtccgagaaagacacgaactctaaagtttcaaaggtgaagcccaagggaaaggtgcgttggacgggctcgcgcacccgaggcaggtggaaatactcttctaatgatgagagcgagggtagtggttccgaaaaaagcagcgctgcctcagaggaggaggaggaaaaagagtccgaggaagccatactggccgatgacgatgaaccgtgcaagaaatgtggcctgccgaatcatccagaactgatcctgttgtgtgacagttgtgatagcggctatcacaccgcgtgtctaagaccacctctgatgatcatccctgacggcgagtggttttgccctccatgtcagcacaagctgctgtgcgaaaaactggaagagcaacttcaggacttagatgttgctcttaagaagaaggaacgggccgaacggcgaaaggagaggctcgtctatgttggcatatcaattgaaaacattatcccccctcaggagcctgacttcagtgaggaccaggaggaaaaaaagaaggactccaagaagtccaaggcaaatctcctggagcgacggtccacgaggacccggaaatgcataagttataggtttgatgaattcgacgaggctatcgatgaggctatagaggacgacattaaggaagccgacggcggcggcgttggcagaggtaaggatatctcaaccatcaccgggcatagaggcaaagatatatcaacgatactggatgaggagagaaaggagaataaacgaccgcagcgggccgctgcggcacgcaggaaaaaacgaagaagacttaacgatctcgattccgatagcaatctggacgaggaagagagcgaggacgaatttaaaatctcagatgggtctcaagacgagtttgtcgtgtctgacgaaaacccagatgaatcagaagaggaccctccatccaacgacgatagtgatacggacttctgttctagaagattgcggagacacccttctcgcccaatgaggcaatctagaaggcttcgtcgtaagacccctaagaagaagtacagcgacgatgatgaggaagaggagagcgaggaaaacagtagggacagcgagagtgacttttcagatgacttctcggacgatttcgtggagacgagaagacgaaggtccaggcgaaaccagaaaaggcaaattaattacaaagaagatagtgagtccgatgggtcgcaaaagagtctgagaagagggaaggagataaggcgggtccataaacgacgtctttcgtcatcggaaagcgaggagtcgtacctttccaagaacagtgaagacgatgagctggccaaagaatccaagcggtccgtaaggaagagaggaagatccactgacgagtattcggaggctgatgaagaagaggaagaggaagaggggaagcccagccggaagcggttacacaggatcgagactgacgaggaggagtcatgtgacaacgctcacggtgatgccaatcaacctgctcgcgattcccagcctagggtgcttcctagcgaacaagaaagcacaaaaaagccctatcgtatcgaatcagatgaagaggaggactttgagaatgtggggaaggtggggtcgccactggactacagtctcgtggaccttcccagcactaatggacagagcccaggaaaggcaatcgaaaatctcatcggaaaacccactgaaaaatcacagacacccaaggacaacagcacagctagcgcgagcctggcaagtaacgggacttccggcggacaagaagctggagccccagaagaagaggaagatgagctcctccgggtgacagatctggtggactatgtgtgtaattctgaacagctgtag

SEQ ID NO: 132162 - DNA, 2412 bp, synthetic construct
  misc_feature 1..2412: note = Description of Artificial Sequence: Synthetic coding sequence
  source 1..2412: mol_type = other DNA
gaaacccttgctttgttgaaggcacagattgacccagtacttcttaaaaattcctcccagcaggataacagtagcagggaatcaccatccctggaagatgaggagaccaagaaagaggaggaaaccccgaaacaggaggagcagaaagaaagcgagaagatgaagagcgaggagcagccaatggacctggagaacaggtctacagccaacgtgttagaagaaacaaccgtcaaaaaggaaaaagaagatgagaaagaactcgtcaaactgccagtaattgtgaagctagagaaacctctgcctgagaacgaggagaagaagattatcaaggaggaatccgattcctttaaggaaaacgtcaagcctattaaagtggaggtcaaagaatgtagagccgatccaaaagacaccaagagctcaatggagaagcccgtagcccaagaacccgagaggattgagtttggaggaaatatcaaaagctcacatgaaatcactgaaaaatccaccgaggaaaccgaaaagcttaaaaacgaccaacaggctaagattccgcttaagaaaagggaaatcaagttgagcgacgacttcgactcaccagtcaagggcccgctttgcaagagcgtcaccccaaccaaagagtttctaaaggacgagatcaaacaagaagaagagacatgcaagagaatatctaccattacggcattgggacacgagggaaagcaactggttaatggcgaagtgtctgatgagcgcgtcgcacctaatttcaagactgagcctattgagacaaaattctatgagaccaaggaagaatcttattctccatcaaaggataggaatataatcaccgaaggcaatgggactgagtccttgaattccgtcattacgagcatgaaaacaggtgaactagaaaaagaaaccgcaccactcagaaaagacgcagacagctcgatctctgtcctggaaattcattcccagaaggctcaaattgaggagccagacccgcccgaaatggagacatccctggactccagcgaaatggccaaagatctgtctagcaagacagcgctatcttccacggagtcttgcaccatgaagggcgaggagaagagcccaaaaacgaaaaaggacaagaggccacctattctagagtgtttggagaaactggaaaaaagcaagaagactttcctcgacaaagatgcccaaagattgtctcccatacctgaggaggtccccaaatctacactggagtccgaaaaaccagggagcccagaagctgccgagactagtccaccttccaatattatcgatcactgcgaaaaactggctagcgagaaagaagtggtcgagtgccagtccaccagtaccgtcggcggccagtctgtaaagaaggtggaccttgaaacactcaaagaggactcagagttcaccaaagtggagatggacaacctcgataacgcacagactagcggaattgaagagccttctgagacaaaaggatcaatgcagaaatcgaagttcaaatataagcttgttcccgaagaagagaccacagcgagtgaaaacactgagatcacatccgaacggcagaaggaaggcattaaactgactattagaatctcctcccggaagaaaaagcctgacagtccccctaaggtactcgaaccagagaacaagcaggaaaagacagaaaaggaggaagagaagactaatgtcggtcgtacgctacggcgctctcctcggattagcaggcccacagccaaggtggccgagatccgggatcagaaagccgacaaaaaacggggagaaggtgaggatgaagtagaggaggagtccacggccttgcagaaaactgacaagaaggagattttgaagaaatccgagaaggacacaaacagtaaggtttccaaggtgaaacccaagggcaaagtacggtggaccggctcacgaacacgtggaaggtggaagtactcttccaacgatgagtccgaagggagcggttctgagaaatcaagtgccgcttctgaagaggaggaagagaaagaatcagaggaggctattctcgccgacgacgacgagccttgcaaaaaatgcggactgcctaaccatcccgaactcattctcttatgtgactcctgcgattctggttaccacaccgcttgtctccgccctccactgatgattatcccagacggggagtggttctgtcccccatgccagcacaagctcctttgcgagaagctagaggagcaactgcaggacctggatgtggctcttaaaaagaaggagcgagctgaacgccgaaaggagcgtctggtctatgtggggattagcatcgagaatatcattccccctcaggaacccgatttcagtgaagaccaggaggagaaaaagaaggactctaagaaatag

SEQ ID NO: 132163 - DNA, 2109 bp, synthetic construct
  misc_feature 1..2109: note = Description of Artificial Sequence: Synthetic coding sequence
  source 1..2109: mol_type = other DNA
gcaaccgcagcagcagccgccgctgtgatggccccaccaggctgtcccggctcttgtcctaatttcgcagtggtctgttctttcttggaaaggtacggccctcttctcgacctgcccgagctgccttttccagagctcgaacgcgttctccaggcaccgccaccggacgttgggaatggtgaggtcccgaaggaactggtagagttgcacctaaagctgatgcgcaaaattggtaaatcggtgactgctgaccggtgggagaaatatctgattaaaatctgccaagaattcaacagcacctgggcatgggaaatggagaagaagggatatctggagatgagcgtggaatgcaagcttgccttactgaaatacttgtgtgaatgccaattcgacgacaacctgaaattcaagaatatcattaacgaggaggatgccgatacaatgaggctgcagcctataggacgtgacaaggacgggctgatgtattggtatcagctcgaccaggaccataatgtgcgcatgtatattgaggaacaagatgatcaggatggctctagctggaagtgtattgtgagaaatcgaaacgagctggctgagactctggccctactcaaagcacagattgaccccgtcttactgaagaactcgagtcaacaggacaactcctcccgagaatcaccatccctcgaggatgaagagacaaaaaaagaggaggagacccccaagcaggaggagcagaaagagagcgaaaagatgaagagcgaggagcaaccaatggaccttgaaaaccgatcaacggctaacgttctcgaggagacaacggtaaagaaagaaaaggaagacgagaaagagttggtgaagttgccagtcattgttaagttagaaaaacctctgccagagaacgaggagaagaaaatcatcaaggaagagtccgacagctttaaggagaacgtgaagccaattaaagttgaggtgaaggaatgcagagcggatcctaaagacaccaagagctctatggaaaagcctgtcgcccaggagcccgagaggatagaattcgggggcaatattaagtcaagtcacgaaataacagaaaagtctaccgaagagaccgaaaaacttaaaaatgaccaacaggctaaaattcctctgaagaaacgtgagattaagctgtcagatgattttgactctcccgtaaagggcccattgtgcaaatcggtcactcctaccaaagaattcctgaaggatgagattaaacaagaagaggagacttgcaagcgcatctctacaattaccgcactggggcatgaaggaaagcagcttgttaatggagaggtctcagatgagagagtggcccccaacttcaagacagaaccaattgagactaaattttatgaaactaaggaggagtcttacagcccaagtaaggataggaatattattacggaaggcaacggaaccgaaagcctcaattcggtcataacatctatgaaaaccggggaactggaaaaggagaccgctccactacgtaaagacgcagacagctcaatcagcgtgctcgaaatccacagtcagaaagcccagatagaggagcccgaccccccggaaatggagacctcccttgacagttcagagatggccaaggatctgtcatcgaagacagccctcagctctaccgagtcctgtaccatgaagggcgaggagaagagccctaagaccaagaaggacaagcggccacccattctcgaatgcctggaaaaacttgagaaatcaaaaaaaacatttctggacaaagatgctcagagactctcccccatccccgaggaggtcccaaaatccaccttggagagtgagaagccaggctcaccagaggcggccgaaaccagcccccctagtaatattattgatcactgcgagaagctggccagcgaaaaggaggtcgtggaatgtcaaagcaccagtaccgtgggtggacagagcgtcaaaaaggttgacctggaaaccctgaaggaggacagtgaattcaccaaggtcgagatggataacttagataatgcgcagacctctggcattgaggagccaagcgagaccaagggctcgatgcaaaagtag

SEQ ID NO: 132164 - DNA, 831 bp, synthetic construct
  misc_feature 1..831: note = Description of Artificial Sequence: Synthetic coding sequence
  source 1..831: mol_type = other DNA
gaaccctgcaagaagtgcggcttgccaaaccaccccgagcttatactcttatgcgactcctgcgattccggctaccacacagcctgtctccgccctccactcatgattatcccagatggcgagtggttctgcccaccgtgccagcataaactgctgtgtgaaaaacttgaggagcagcttcaggacctggacgtggctctgaaaaaaaaggagcgagcagagaggcgcaaagagcggctggtgtacgtggggatcagcattgaaaacatcattcccccccaagagcctgacttttccgaagaccaggaggagaagaagaaagattccaagaaaagcaaagccaacctgctcgaacgaagatcaaccagaacacgcaagtgtatttcctaccggttcgacgaattcgacgaagccatcgacgaggcgatcgaagacgatataaaagaagctgatggcggaggggtggggcgaggcaaagacatatccacgatcactgggcacagggggaaggacatttcaactattctggacgaggagaggaaagagaataagcggcctcagcgcgcagctgcagcgcgccggaaaaaaaggagaagattgaacgaccttgactccgactcaaacctcgacgaggaggaaagtgaagatgaattcaagatttccgatggttcacaggatgagttcgtagttagcgacgagaatcctgacgagtccgaggaggatcctccctctaacgacgatagcgatacagatttctgttcccgtcgcctgcggagacaccccagcaggcctatgcgccagtctaggaggctgcgccggaaaacaccatag

SEQ ID NO: 132165 - DNA, 1029 bp, synthetic construct
  misc_feature 1..1029: note = Description of Artificial Sequence: Synthetic coding sequence
  source 1..1029: mol_type = other DNA
atggcacaggtgttgatcgtgggtgccggaatgacaggatccctctgcgcagccctactccggcgccagacttccggacctctctatctcgccgtatgggacaaggcagaggactcagggggcagaatgaccacagcatgtagcccacataacccgcagtgtaccgctgacctcggggctcagtatatcacttgtacgccacattacgccaaaaagcatcagaggttctatgatgagctgttggcatacggcgtgttgagaccgctctcgagtcctatcgaaggcatggtgatgaaggaaggagactgcaacttcgtggccccacaggggatcagcagcatcataaaacattatctgaaggagtccggagccgaggtttactttaggcatagagtaacgcagattaacctgagggacgataaatgggaagtgagtaaacagacaggaagtcctgagcagttcgacctgatagtgctgacgatgcctgtcccagagatcctgcagctccagggcgacatcacaactctcatctcggagtgccagagacagcagctcgaagctgtgagctatagtagtcgctacgccctgggattattctacgaagctggaactaaaatcgacgtgccgtgggccggccaatatataacctcaaacccatgtattcgtttcgtgtcgatcgacaacaaaaagcgcaacatcgaatcatcagaaattggaccgtctttggtgatccatacaacggtaccttttggggtcacctatttggagcatagcatagaggacgtgcaggagctggtgtttcagcaactggagaatatcctgcccggattgccccagccaatcgccactaaatgccagaaatggcgccattctcaggttactaacgctgcggccaactgccctggccaaatgacactgcatcacaaacctttcctggcctgtggaggagatggctttacgcagtccaatttcgatggatgtataacttctgccctgtgcgtgttggaggcattgaagaattacatttag

SEQ ID NO: 132166 - DNA, 948 bp, synthetic construct
  misc_feature 1..948: note = Description of Artificial Sequence: Synthetic coding sequence
  source 1..948: mol_type = other DNA
atggcccaagtgctaatcgtaggagccgggatgacgggaagcctgtgcgctgccctcctgcgcaggcagacgtctggaccactgtaccttgccgtttgggataaggcagaggactccggcggccggatgacaaccgcctgctctccacataacccccagtgcacagccgacctgggggcccaatacattacttgcacccctcactacgctaagaaacaccagagattctacgacgagttattagcttatggcgtgctcaggccattgtcaagtccaattgaagggatggttatgaaggagggagattgtaacttcgttgccccacagggcatctcatctataataaagcattacttgaaagagtctggagctgaggtctacttccgacaccgggtgacacagatcaatctccgggacgacaaatgggaggtgagtaagcagaccggctcccctgaacagtttgatctgatagtgctcacaatgcccgtcccagaaatactgcagcttcagggcgacatcaccactctcatcagtgagtgccagcggcagcagctcgaggcagtatcctacagctctagatatgcccttggactattctacgaggccggtacaaagatcgacgtcccttgggcaggacagtatatcacgagcaacccctgcatccggtttgtgtccattgataataagaaacgcaacatcgaaagtagtgagatcggccctagtctggtcatccacaccaccgtaccctttggggtaacttatctggaacactctatcgaagacgtgcaagaacttgtcttccagcagctggagaacattctcccaggattaccacagcctatcgcaacgaagtgtcaaaagtggaggcactctcaggttcccagtgcgggagtcattctagggtgtgctaagtccccatggatgatggccattggcttccccatttag

SEQ ID NO: 132167 - DNA, 699 bp, synthetic construct
  misc_feature 1..699: note = Description of Artificial Sequence: Synthetic coding sequence
  source 1..699: mol_type = other DNA
atggcccaggtgcttatcgtaggtgccgggatgacgggctcactctgtgcagctctcctgcgccggcagacatccggcccactctacctggctgtttgggacaaggcagaggactctggtgcggaggtctacttccgccatagggtaacccagatcaacctgcgcgatgataagtgggaggtatcaaagcagaccgggagccctgaacagtttgacttaattgtcctaacgatgccagttccggagatactccagctgcagggggatatcaccaccctcatcagcgagtgccagagacagcagctggaggcggtctcctatagcagtaggtatgccttgggactcttttacgaggcaggaaccaagatcgatgtcccctgggctggacagtacataacaagtaatccctgtatcaggtttgtctctattgacaacaagaaaaggaatatagagagtagcgaaattgggccctcactggtaatccacactacagtaccctttggagtgacctatttagagcactctattgaagatgtgcaagaattggtatttcagcaactcgagaatatcctgccaggcttgccccagcccattgccaccaaatgccagaaatggagacatagccaggtaccctccgctggagtaatcctcggatgcgccaaaagtccatggatgatggcgatcggcttcccaatatag

SEQ ID NO: 132168 - DNA, 1221 bp, synthetic construct
  misc_feature 1..1221: note = Description of Artificial Sequence: Synthetic coding sequence
  source 1..1221: mol_type = other DNA
atggatggatggcgcagaatgccgaggtggggtctgcttctgttgctttggggatcctgtactttcggtctcccgacagacacaaccaccttcaagaggatctttctgaaaagaatgccaagtattcgagaatccctgaaggaaaggggcgtggacatggcccgccttggacctgagtggagccagcctatgaagcggctcacactgggaaacacaacatcgtccgtcatattgactaactatatggatacacagtactacggggagataggaattgggaccccaccacagacattcaaggtcgtgttcgatactgggtctagtaacgtctgggtaccatcctctaagtgttcaaggttgtatactgcttgcgtgtaccacaagctttttgacgcctctgattcaagttcttataaacacaacgggaccgagctgacactacgctacagtactggaaccgtgagcggcttcctgtcacaagatattataacagtgggcggcattactgtgacccaaatgttcggggaagtgacggagatgccagctctgcccttcatgctcgctgaattcgatggggtagtgggtatgggcttcattgagcaggccattggcagagtcacacctatctttgacaacattattagtcaaggggtgctgaaggaggacgtcttcagtttctattataaccgcgattccgagaactctcagtctctcggcggtcagatagtcttgggcggttcagatccacagcactacgagggcaattttcactacatcaatttaattaaaacgggagtctggcagattcagatgaagggagttagtgtaggttctagtactctgttatgtgaggatggctgcctggcccttgtcgatacaggcgcctcatacatcagcggcagcacaagctcaattgaaaagctgatggaagcattgggcgccaagaaaagattgttcgactacgtcgtcaagtgtaacgaagggcccaccctgccagatattagctttcatttgggaggaaaggaatacaccctcacgtcagcggactatgtgtttcaggaaagttatagctccaaaaagttgtgcacgctggctatccatgccatggatatcccccctcccactggccccacatgggcgcttggcgccacatttatccggaagttttatacagagtttgatagacggaataacagaatcggtttcgctcttgcaaggtag

SEQ ID NO: 132169 - DNA, 1212 bp, synthetic construct
  misc_feature 1..1212: note = Description of Artificial Sequence: Synthetic coding sequence
  source 1..1212: mol_type = other DNA
atggacgggtggcggcgaatgcctaggtgggggctgctgctcttactgtggggtagttgcacattcggcttacccacggacacaacgactttcaagaggatttttcttaagcgcatgccgtctattagagaatctctaaaagagagaggtgttgatatggctcggcttggtcccgaatggtcccagcctatgaagagattgacacttgggaacaccacaagtagcgtgattctgaccaattacatggatactcagtattatggggaaatcggcatcggcacccccccccagacgttcaaggtcgtgtttgatactggctcttcaaacgtttgggtgccaagtagcaagtgcagccgcttgtacactgcttgcgtgtatcacaagctgttcgacgcgtcggactctagcagctataagcacaatggtacagagctgacccttcggtatagcaccggaacagtgtccggttttctttcacaggatatcatcactgtgggtggtattactgtgacacagatgtttggcgaggtaactgaaatgcccgccctgcccttcatgctggctgagttcgacggagtagtgggtatggggttcatcgagcaggctataggaagggtcacccccatatttgataatattatctcccagggggttctcaaggaggacgttttttccttttactacaacaggaattctcaatctctggggggccagatagtgctgggaggaagcgacccccagcattatgagggtaactttcactatattaatctgattaagactggtgtgtggcagatccagatgaaaggcgtgagtgtgggtagttccacgctgctgtgcgaggatgggtgtttagccctggtcgacacaggtgcatcctacattagtggaagtacctcgtcaatagaaaaattgatggaggccctgggcgcaaaaaaaagacttttcgactatgtcgtcaagtgtaacgaaggtccaactctgccagatattagcttccaccttggtggcaaagaatatacactgacgagcgccgattacgtcttccaggaaagctattctagtaaaaaactgtgcacgttagcaatccacgcgatggacataccacctccaaccgggcccacctgggctctcggagccacttttattcgtaaattctacacagagtttgaccggcgaaataatcggatcgggtttgcgctggccagatag

SEQ ID NO: 132170 - DNA, 978 bp, synthetic construct
  misc_feature 1..978: note = Description of Artificial Sequence: Synthetic coding sequence
  source 1..978: mol_type = other DNA
atggacacccagtattatggggagattggaatcggaacccccccgcagactttcaaagtagtcttcgacaccgggagctctaacgtttgggttcccagttcaaaatgttccaggctctatactgcatgcgtgtaccacaaactctttgacgcttctgactcttccagttataagcacaacgggacagagctcactctgagatattcaacagggaccgtgtctggcttcctgtctcaggacatcatcaccgtggggggaatcaccgtaacccaaatgttcggagaggtgactgaaatgcccgccctgccctttatgttggccgaattcgacggcgtggttggcatgggatttatcgaacaggctatcgggagggtgacccccatatttgataatatcattagccagggcgtcctgaaagaggacgtgttcagcttctactataaccgggacggtgagaatagtcagtcacttggaggacagatcgtgctgggaggcagtgacccccaacactatgagggtaacttccactatataaatctgatcaaaactggtgtatggcagatacagatgaagggggtctccgtgggctcctcgactctgctctgcgaagacgggtgcctcgctctcgtggacaccggagcctcctatatttccggaagcacaagctccatcgaaaagctgatggaggcgttaggtgcgaaaaagcggctgtttgactacgtggtcaaatgcaacgaaggtccgacattgcccgacatcagttttcatctaggggggaaggaatacacgcttactagcgcggattatgtgttccaggagagttacagcagcaagaagctgtgtacactggcgattcacgcgatggacattccgccccccaccggcccgacttgggccttgggggcaactttcattcgcaaattttatacagagttcgataggcggaataataggattggatttgctctggccagatag

SEQ ID NO: 132171 - DNA, 1284 bp, synthetic construct
  misc_feature 1..1284: note = Description of Artificial Sequence: Synthetic coding sequence
  source 1..1284: mol_type = other DNA
atgtctaaagggctcccagccaggcaggatatggagaaggagcgcgaaactctgcaggcttggaaggaacgagtaggccaggagttagatagggttgtggccttttggatggagcattcacatgatcaggaacatgggggcttctttacatgtctcggcagggagggcagggtttatgacgatcttaaatacgtctggcttcaaggacgacaggtttggatgtactgccgcctgtacagaactttcgaacgctttaggcacgctcagctcctagatgctgcaaaagcagggggcgagttcttgctccggtatgcccgggtagcaccaccgggcaagaaatgtgcgttcgttctgacaagagacggccggcccgtaaaagttcaaaggacgattttctccgagtgcttttacactatggctatgaacgaactgtggcgagcaacaggagaggtaagatatcagacagaagccgtggaaatgatggaccagatcgtgcattgggttcaggaggacgcatctgggctgggaagaccgcagttgcagggtgcacctgcagctgagccaatggcagtgccaatgatgttgcttaacttggtggagcagctgggtgaagcagatgaggaattggctggtaagtacgcggagctcggcgactggtgtgcgcggcgtatcctccagcacgtccaaagagacgggcaggctgttcttgaaaatgtctccgaagggggaaaggagctgccaggatgtctcgggcgccagcagaatcctggacataccctggaagccggctggtttctgctgagacactgcattcgtaaaggggatccggagctgagggcccatgtgatagataaattcctgctgctcccttttcatagcggctgggatccagatcacggtgggcttttctacttccaggatgcagataacttttgcccaacccaactggagtgggcaatgaagctttggtggccccatagtgaggccatgattgcctttttaatgggatattcagattcaggagatcccgtgctgctgcggttattttaccaggtggcagagtacacatttagacaattcagagatcctgaatacggcgagtggttcggctacctttctcgagagggcaaagtggccttaagcataaaaggcggaccatttaaaggctgcttccacgtcccccgatgcctggccatgtgtgaggagatgctgggtgcgctgttgtcacgtcctgctccagcacctagcccagcgcccacccccgcttgccgtggcgcggagtag

SEQ ID NO: 132172 - DNA, 765 bp, synthetic construct
  misc_feature 1..765: note = Description of Artificial Sequence: Synthetic coding sequence
  source 1..765: mol_type = other DNA
atgagcaaaggcctgccggccaggcaggatatggaaaaagagagagagactctgcaggcttggaaagaacgtgtgggtcaagagctcgatcgggtggtcgcgttctggatggagcattcccacgaccaagaacatggagggttcttcacatgtctggggcgggaggggcgcgtgtatgatgatctcaagtacgtttggctgcaggggagacaggtttggatgtactgccgtttgtaccgcacgttcgagaggtttagacacgcacaactacttgatgctgcaaaggcaggaggagaatttctcctgagatacgccagggtagcgcctcctggtaaaaagtgtgctttcgtactcacacgcgatggtaggcccgttaaagttcagagaacaatattcagcgaatgcttctacacaatggccatgaatgagctgtggcgggccacgggcgaagttcgataccagactgaagccgttgagatgatggaccagattgtccactgggtacaggaagatgcctccgggctggggagaccacaactgcaaggagctcccgccgctgagcccatggcggtccccatgatgttattgaatttggtggaacaattgggggaagctgatgaggagcttgccggcaagtacgccgaattgggagactggtgcgcaagacgcattctgcagcacgtccaggccaccaggtggaagccggccggattttgcagtgttatagccttcgggaaggccaccccaaacttcgaacctacatag

SEQ ID NO: 132173 - DNA, 2355 bp, synthetic construct
  misc_feature 1..2355: note = Description of Artificial Sequence: Synthetic coding sequence
  source 1..2355: mol_type = other DNA
atggcacagttgctgaacagcatcctgtccgttattgatgtttttcataaatatgctaagggcaatggagactgtgcactgctgtgcaaggaggagctcaagcagctgctgctcgccgagtttggcgacattctgcagcgacccaacgaccctgagaccgtcgagaccatcttgaatctcttggaccaggatagagacggacacatcgattttcacgagtatctgctcctggtctttcagttggtgcaggcctgctatcacaagttagataataaatctcacggaggccgcactagtcaacaagagagaggacaagagggggcccaggattgtaaatttccgggcaatacaggaagacagcacaggcagcggcacgaagaagagagacagaactcacaccactcacagcctgagcgccaagatggcgattcacatcatggtcaacctgagcgccaagatagagattcgcaccacggccagtcagagaaacaggatagggattctcaccactctcaaccagaacgccaggacagggacagtcatcataaccaaagcgagcgacaggataaggacttcagcttcgatcagagcgaaaggcaatctcaagattcttctagcgggaagaaggtgtcacacaaatccacgtctggccaggccaaatggcagggacacatctttgccctgaatcgttgtgagaagccgatccaagacagccattatggacagtcagaaagacatacacagcagagcgaaacacttggccaggcatcgcacttcaaccagactaaccaacaaaaatccggcagctactgtggtcagtcagagagactggggcaagaactcggctgcgggcagacagatagacaggggcagtcctctcattatgggcagactgatagacaggaccagtcatatcactacggtcagacagatcggcagggacagtcctcccactactctcagacagacaggcagggacagtcaagccactattcccaaccagatagacagggtcagagctcccactacgggcaaatggataggaagggccaatgttatcattacgaccagactaatagacagggtcaggggtcccactattcccaacccaatcgacaggggcagagctcccactacggacaacccgatacacaggaccaatccagtcattacggccagaccgataggcaggatcagtctagtcactatggtcaaacagagagacagggccaatcttcgcattactctcagatggaccgacagggtcaggggagtcattacggccagacagatcgtcagggacaaagctcccactatggacagcccgaccgtcaaggacaaaactcccactatgggcagactgatagacagggccagtcttcacactacggtcaaaccgaccggcaagggcagtcctcccactattcgcaaccagataaacaggggcagtcttctcattacggcaagattgacaggcaggatcagtcctatcattatggtcagcctgacggacaaggacagagtagtcactatggacagactgaccggcaaggacaaagctttcattacggccagccagaccgccaggggcagtcaagtcattatagccagatggatcggcaaggacaaagctcccactacggccagacagataggcagggccagtcatcccactatgggcagacagatagacagggtcagtcttatcactatggccaaacagaccggcagggccaatcatcccattacatccagtcgcagaccggggaaatccagggccaaaacaaatatttccaaggtacggaagggacaaggaaggcgtcttatgtcgagcagtcagggagatccggaaggttatcccagcagaccccaggccaggaggggtaccagaaccaaggccagggcttccaaagtagagattcacagcagaatggccaccaagtgtgggagccagaagaagatagtcagcatcaccagcataagctgctcgcacaaattcagcaggaacgcccgttgtgccacaagggacgagactggcagtcctgctcgtccgagcaaggtcatcggcaggctcagacccggcagtcacatggggagggcctgtcccactgggcagaagaggagcagggacatcagacatgggacagacactcccatgagagccaagagggcccctgtggaacccaggacaggaggacacataaggatgaacagaatcatcagagacgtgacaggcagactcacgagcacgaacagtcccaccagcgaagggacaggcaaacccacgaggacaagcagaacagacagagaagggacagacaaacacatgaggatgaacagaatcaccaacggtag

SEQ ID NO: 132174 - DNA, 1320 bp, synthetic construct
  misc_feature 1..1320: note = Description of Artificial Sequence: Synthetic coding sequence
  source 1..1320: mol_type = other DNA
atggatagaaaggggcagtgttatcactatgaccagacaaaccgacagggacaggggtcacattattcacagcctaaccgccaaggccagagtagtcactacggacaacccgatacgcaggaccagtcctctcattacggtcagaccgaccgccaggaccagagttctcactacggccagacggaacggcagggccagagttcacactacagtcaaatggacaggcagggccagggctcgcattatggacaaactgataggcagggacaatctagccactatgggcagcctgacagacagggccagaattcgcactacgggcaaactgaccgccagggccagtcaagccactatggccagaccgatcgtcagggacagagttcacattattcccagccagacaagcaggggcaatcctcgcattacgggaagattgatagacaggaccagtcttaccactacgggcagccggacggccagggtcagtcatcgcactacggccaaaccgaccggcaaggtcaaagcttccactacggacaacccgaccggcaggggcaatcttctcattacagtcagatggacagacaaggccaatctagccactacggccagaccgatagacaaggacagtcaagtcactatggccagactgatcgtcaaggccagtcttaccattacggccagacagaccgccaaggacagtcatctcattatatccagagccagacaggcgaaatccagggtcagaacaagtactttcagggcacggaggggactcggaaagcatcttacgtggagcaatcaggaaggagtggccgtctgtcacaacagacccccggccaggagggttatcaaaatcagggccagggattccagtcgcgcgactcccagcagaacggccaccaggtttgggagccagaagaggacagccagcaccatcaacacaagttgctggcccagatacagcaggagaggcccttgtgtcataaaggccgcgactggcagagctgctcgtctgagcagggccaccggcaggcccagactcgccagtcccatggagagggccttagtcattgggccgaggaagagcaaggccaccagacatgggaccgccactctcacgaaagccaggaaggaccatgcgggactcaggaccgaagaacacataaggatgaacagaaccaccaacgccgggaccgccagactcacgaacatgagcaatcccaccagaggcgcgatagacagacacacgaggataagcagaaccgccagcgtcgagataggcagacccatgaagacgagcaaaaccaccaacgctag

SEQ ID NO: 132175 - DNA, 1065 bp, synthetic construct
  misc_feature 1..1065: note = Description of Artificial Sequence: Synthetic coding sequence
  source 1..1065: mol_type = other DNA
atggaggtagaggcagtgtgtgggggggctggcgaggttgaagcccaggactctgaccctgccccagcatttagcaaggctccagggtctgccgggcactatgagctgccctgggtggaaaagtaccggcctgtgaaactgaatgagatagtcggcaacgaagacactgtcagccgacttgaggtattcgctcgggaggggaacgtgccaaatatcataattgcagggccccctggaaccggtaagacaacgagcatactgtgccttgctcgagccttactcggccccgctttgaaggatgccatgctcgaactgaatgccagcaacgaccgggggatcgatgtcgtcagaaacaagataaaaatgtttgctcagcagaaggtgaccctccctaagggcaggcataaaatcattatactcgatgaagcagatagtatgaccgacggagctcagcaagcgctgcgccgcaccatggagatttattcaaagactacccgctttgccctcgcctgcaacgcctccgacaagattatcgagcctatccagagtcgatgtgctgtgcttcggtacaccaaactgaccgacgcgcaaatcctgactagactgatgaacgtgattgaaaaggaacgggtgccttataccgacgatggtctggaggccatcattttcacagcccagggtgatatgcgccaggctttaaacaatctgcaatctaccttctccgggtttggattcattaattccgaaaacgtgtttaaagtttgcgacgaaccacacccgctgctagtcaaggagatgattcagcactgtgtgaacgccaacattgatgaggcctacaaaattctggctcatttgtggcacctgggatactcccccgaggacatcatcggtaacatcttccgggtttgtaaaacattccaaatggcggaatacttgaaactggaatttattaaggagatcggatacacccatatgaaaatcgcagagggggtcaactcgctgctacagatggcaggactgctggcacgactctgccaaaagacgatggctcctgtggccagctag

SEQ ID NO: 132176 - DNA, 963 bp, synthetic construct
  misc_feature 1..963: note = Description of Artificial Sequence: Synthetic coding sequence
  source 1..963: mol_type = other DNA
atggaagtcgaggctgtgtgcgggggggctggggaggtggaggcccaggactctgaccctgcacccgccttctccaaagcccccgggagtgctgggcactacgagttgccttgggttgagaaatacagacctgttaaattgaacgaaattgttggtaatgaagataccgtgtcccgcctcgaggtttttgcacgtgaagggaacgtgccgaacattattatcgccggtccccccggaaccggcaaaacaactagcattttgtgtttggctcgggccctgctgggtccagctctgaaggatgctatgcttgaactgaacgccagtaacgacagtatgaccgacggcgcccaacaggccctacgaagaaccatggagatttactcaaaaaccacccggtttgcattggcctgtaatgcctctgacaaaattatagagcctattcagtcgagatgtgcggtactgagatacaccaagctcaccgacgctcagatcctaacacgcctgatgaacgtgatcgaaaaggagcgcgttccctatacagacgacggtctagaggctattatctttaccgcccagggagacatgcgccaggcacttaataacctgcaatctacattctccggctttgggtttatcaacagcgagaatgtttttaaggtgtgtgacgagccacaccctctcctagtgaaggagatgattcagcactgtgtgaatgcaaatatagacgaggcctataagatccttgcccacctgtggcatctcgggtattcacccgaggacataatcgggaatatcttcagggtgtgcaagacctttcagatggctgagtacctcaagctggagtttattaaagagatcggctacacacatatgaagatcgcagaaggcgtaaattctctgcttcagatggccggcctgctggccaggctttgccagaaaaccatggcacccgtggccagctag

SEQ ID NO: 132177 - DNA, 1071 bp, synthetic construct
  misc_feature 1..1071: note = Description of Artificial Sequence: Synthetic coding sequence
  source 1..1071: mol_type = other DNA
atgtctttgtgggtggataagtacaggccctgctccctgggaaggctagactatcataaggaacaggctgctcagctacgtaacctggtacagtgtggcgatttcccccatttgctggtgtacgggccaagcggcgcaggtaagaaaacacgcatcatgtgtatcctgagagagttatacggcgttggggtggagaagttgcgaattgaacatcaaacaattactacgccctccaagaagaagatcgaaatctccactatcgcatcgaattaccatttggaggtgaacccttctgacgccgggaactctgaccgagtcgttatccaggagatgctaaagacagtggcccagtctcagcagttggaaactaattctcagagggatttcaaggtcgtactcctgactgaagtggacaagctaacaaaggatgcgcagcacgccttgcgtcggacaatggaaaagtatatgtctacgtgtcgtctcattttatgttgcaacagcacatcgaaggtgataccccccattcgctccaggtgtctggccgtccgagtccccgcgccaagcatagaagatatctgtcacgtgctgtctaccgtgtgcaaaaaagaagggctgaacctgccctctcagctagcacaccggcttgccgagaagtcctgtagaaatctgagaaaggccctgctgatgtgcgaagcctgccgcgttcagcagtacccgttcaccgccgatcaggaaataccggagacagattgggaggtgtatctccgagagactgctaacgcaattgtgtctcagcaaacaccccagaggttgctggaggtgagagggcgcctgtatgagctgctgacgcactgtattcctcctgagataattatgaaaggactcctgtcggaactgctccataactgcgatggacagttaaagggtgaggtagcccagatggccgcgtactacgaacaccggcttcagctgggcagcaaagcaatctaccacttggaggcatttgtggctaagtttatggctttatataagaaattcatggaggatgggcttgaagggatgatgttctag

SEQ ID NO: 132178 - DNA, 918 bp, synthetic construct
  misc_feature 1..918: note = Description of Artificial Sequence: Synthetic coding sequence
  source 1..918: mol_type = other DNA
atgagtctgtgggtggacaagtatcgaccgtgttccctgggcagactcgattaccataaagagcaggcagcccagctgagaaacttagtacagtgcggcgatttcccccacctcctcgtgtacggtccatcgggcgcgggcaagaagactcgaattatgtgcatccttcgcgaactctacggggtcggagtggaaaaacttagaattgagcaccagacaataactaccccatccaagaaaaaaattgaaatctctactattgccagcaattaccacttagaggttaacccttctgacgccggcaattctgacagggtcgtgatccaggagatgctcaaaacagttgcccagtctcagcaattggagacaaacagccagcgggattttaaagtggtgctcctgacagaagtcgataaactcaccaaagacgcacaacacgcactccgacggacaatggagaaatatatgtctacgtgtaggctcatcctgtgctgcaactcgacgtcaaaagtaattccccccatacgcagcagatgtctcgctgtacgagtccctgcaccctccatcgaggacatttgtcacgtcttgtccaccgtctgcaagaaagagggcctaaaccttccctctcagttggcacacaggctggcggaaaaaagctgccggaacctgagaaaggccttattgatgtgtgaggcttgccgtgtgcagcaatatccattcacagcagatcaggaaatccctgagactgattgggaggtgtatctgcgtgagactgcaaatgccatcgtatcccagcagacacctcaaaggctattagaagttagaggcagactctacgagctgttgacacactgtatcccgccggaaataatcatgaaggcctgcaaagaggaatctcggtcttgtgatatcttttag

SEQ ID NO: 132179 - DNA, 1092 bp, synthetic construct
  misc_feature 1..1092: note = Description of Artificial Sequence: Synthetic coding sequence
  source 1..1092: mol_type = other DNA
atgcaggcattccttaagggaacttccatctccactaaacctccgttgacgaaagatcggggagttgcagcctcagctgggtcctcgggagagaataaaaaggctaagcctgtcccttgggtggagaaatacaggcccaagtgcgtcgatgaggtggcgttccaggaagaagtggtagctgtgctgaaaaaaagcttggagggtgcggatctgccgaacctactcttctacgggccacctggtaccggcaagacctcgaccattctggctgctgcccgtgagttgtttggaccagagctgttccgcctccgtgtgttagaactgaatgcatcagatgagagggggatacaagtggtgcgcgaaaaggttaagaactttgcccaactaactgtgtctgggtcgaggtcagacggtaaaccctgccccccatttaagatagtgatacttgacgaagccgacagcatgacttcggccgcacaggccgccctgcggcggaccatggagaaggagagcaagacaactcggttctgcctgatttgcaattatgtctcacggatcattgaaccactcacctccaggtgttccaaatttcggtttaagcctctttcagataagattcaacagcaacgactcctggatatcgcaaaaaaagagaacgtgaaaatcagcgatgagggcattgcttaccttgttaaagtgtccgagggggatcttcgcaaggcaatcacattcttacagtccgccacgcggttaacgggcgggaaagagatcaccgagaaagtaatcaccgatatcgccggcgtgattccagccgagaagatcgatggggttttcgccgcttgtcagtcagggtctttcgacaaacttgaggctgtcgtgaaagacttgattgatgaaggccatgctgccactcagcttgtgaaccaactgcacgatgtggttgtggagaacaatctgtctgacaagcagaaaagcattattacagagaaattggccgaggtggacaagtgtctggccgacggggccgatgagcacctgcagctgattagcttgtgcgccacagttatgcagcagctcagtcagaactgctag

SEQ ID NO: 132180 - DNA, 1092 bp, synthetic construct
  misc_feature 1..1092: note = Description of Artificial Sequence: Synthetic coding sequence
  source 1..1092: mol_type = other DNA
atgcaagcatttcttaagggtacttcgatctccacgaagccaccgttaactaaagatagaggggtggccgcaagcgccggcagcagcggggaaaataaaaaagcaaagccagttccatgggttgagaagtatcggcctaagtgtgtcgatgaggtagccttccaagaggaggtggttgccgtcctgaagaagagtctggaaggtgctgatctgcctaacctgcttttttatggccctccgggcacaggaaagacctcaactatcctggccgctgcccgtgagctcttcggacccgagcttttcaggctgagagtgcttgaactgaatgctagcgacgaaagaggaatacaggtcgtgcgcgagaaagtaaagaattttgcccagcttactgtcagcggcagcagaagtgacggcaaaccctgtcctccgtttaagattgtgatcctggacgaggccgattccatgacatctgccgcacaagccgccctccgacgtaccatggaaaaggaaagcaaaactacacggttttgcttgatttgtaattacgtttcgagaatcatcgaaccactcacatcccggtgttcaaagtttcggttcaagcccctcagcgataagatccagcagcaaagactgcttgacatagcaaaaaaagagaacgtcaaaatctcagacgagggaatcgcttacctggtaaaagtcagtgagggggatctgcgtaaggccataacgtttcttcagtccgcaactagactgactgggggcaaagagattaccgaaaaagtgattaccgatatcgccggtgtgatccctgccgagaagattgatggggtctttgccgcctgtcagagcggttccttcgacaaactggaggcagtagtgaaggaccttattgatgaagggcacgcagcaacccaactcgttaaccaactgcacgacgttgtggtagagaacaatctctcggacaaacagaaatcaattatcaccgaaaagctggccgaggtggacaaatgcttggctgacggtgccgacgagcaccttcaactgatctctctctgtgctacagtcatgcagcaactctcacagaattgttag

SEQ ID NO: 132181 - DNA, 132 bp, synthetic construct
  misc_feature 1..132: note = Description of Artificial Sequence: Synthetic coding sequence
  source 1..132: mol_type = other DNA
atgcaggcgttccttaaggggacctcaattagtactaagcccccgctgaccaaggataggggcgtcgccgctagcgccgggtccagcggcgagaataagaaggctaagcccgtaccctgggtggagaaatag

SEQ ID NO: 132182 - DNA, 645 bp, synthetic construct
  misc_feature 1..645: note = Description of Artificial Sequence: Synthetic coding sequence
  source 1..645: mol_type = other DNA
atgcaagcctttttaaaggggacttctatctctaccaaacccccgctgactaaagacaggggtgtggcagctagcgccggaagtagcggcgagaataaaaaggccaagcctgtaccctgggtggagaagtacaggcctaagtgtgtggatgaggttgcatttcaggaggaagttgtagctgtgttgaaaaaaagcttagagggcgcagacctgccaaacctccttttctacggcccccctggaactggtaaaacttctaccattttggccgctgctagggagctatttgggcccgaattgttccggctgagagttctcgaactgaatgcgtccgacgagcgaggcatacaggtggttagggaaaaagtcaagaacttcgcacagttaactgtgagcggatctaggagtgatggcaagccatgtccgcctttcaagattgtaatactggacgaggctgacagcatgaccagcgccgctcaggccgccctgcgtaggacgatggagaaagagagcaaaaccacgcgcttttgcctcatttgcaactatgtttccagaatcatagaaccattgacatctcgatgcagtaaattcaggttcaagccactgagcgataaaattcagcagcagagacttcttgacatttag

SEQ ID NO: 132183 - DNA, 372 bp, synthetic construct
  misc_feature 1..372: note = Description of Artificial Sequence: Synthetic coding sequence
  source 1..372: mol_type = other DNA
atgcaggccttccttaagggtactagtatttctacaaagcctccccttacaaaggatcggggggtggcagctagcgccgggagctccggcgaaaacaagaaggctaaacccgtcccttgggtggaaaagtacagaccaaagtgtgtcgacgaggtggcatttcaggaggaagtggtggctgtgctgaagaaatctctagagggagcagatctgcctaatctgctcttttacgggccacctggaactgggaagacgtctacaattctggctgcagccagagagctgttcggaccagagttgttcagacttcgggtgctcgagctgaacgcgtccgacgagcgcgggattcaggtggttcgcgaaaaggtctag

SEQ ID NO: 132184 - DNA, 504 bp, synthetic construct
  misc_feature 1..504: note = Description of Artificial Sequence: Synthetic coding sequence
  source 1..504: mol_type = other DNA
atgcaggcatttttgaaaggcactagcattagtaccaaaccgccactcaccaaagatcgcggggtggccgcgtctgctgggtcaagcggtgagaataagaaggccaagcccgttccctgggtcgagaagtacagacccaagtgtgtggacgaagtggcattccaagaggaggttgtcgcggtcctcaagaagtccctggagggcgccgacctgcccaatctgctattttacgggcctcccgggactggtaaaacatctacgatccttgcagcagctagggagctgttcggtcccgagctcttccgcctgagggtgttggagttgaatgcgagcgacgagagaggcatccaggtggttcgggagaaggtcaagaactttgctcagctgactgtcagtggatccagatctgatgggaaaccatgcccacccttcaagatcgtaattctggacgaggccgacagcatgacatcagcagcccaagccgcacttcggcgaaccatgtag

SEQ ID NO: 132185 - DNA, 288 bp, synthetic construct
  misc_feature 1..288: note = Description of Artificial Sequence: Synthetic coding sequence
  source 1..288: mol_type = other DNA
atgcaagccttcctcaaaggcacgtctatctccacaaaacctcctctcactaaggatagaggagtcgccgcatcggctggatcttcgggggaaaacaagaaggctaagccagttccttgggtggagaagtatagacctaagtgcgtcgatgaagtcgccttccaggaagaagtggtcgccgtgctgaaaaaaagtctcgagggcgcagatcttccgaacctcctgttttatggacctcccggcaccggtaaaacatcgacgattcttgctgcggcccgggagctgtag

SEQ ID NO: 132186 - DNA, 1746 bp, synthetic construct
  misc_feature 1..1746: note = Description of Artificial Sequence: Synthetic coding sequence
  source 1..1746: mol_type = other DNA
atgcaaaggcctggtcctaggctgtggctcgtgctccaggttatgggaagctgcgctgctatcagcagcatggatatggaacggccaggagacgggaaatgtcagcccatcgagattccaatgtgcaaggatataggatacaatatgacacggatgcctaatctgatgggacacgagaatcaaagggaggctgccattcagctgcacgagtttgcaccactagtggagtatggttgccatggccacctgcgcttttttctctgttcactgtacgctcctatgtgtacggaacaggtgtcaacacctattcccgcgtgcagagtgatgtgtgagcaggccaggctgaagtgtagccccatcatggagcaattcaactttaaatggcccgactccttggattgccgcaagctacctaacaaaaatgaccccaattatctgtgtatggaagcacctaataacggttccgatgagcccacccggggtagcggcctgttcccacccttgtttcggcctcaacgcccacattctgcgcaagaacatccattgaaggacggaggccctgggaggggtgggtgtgataatcctgggaaatttcatcacgtcgagaaaagcgccagctgtgcccccctctgcactcccggggtggacgtgtactggagccgagaggacaaacggtttgcagttgtgtggctcgccatctgggccgtgctttgcttttttagctcagctttcacggttcttacctttctaatagaccccgcacgtttccgttaccccgaaaggccaatcatctttctgtcaatgtgctactgcgtgtattcagttggttatttgatccgcctgtttgccggcgcagaaagcatcgcctgtgaccgagacagcggacaactctatgtcattcaggaaggcttagagtccactggctgcacgctggttttcctagtactttactacttcgggatggctagtagcttatggtgggtcgtactgaccctgacgtggtttttggcagctggcaagaagtggggccacgaggcaattgaggccaatagctcctattttcatctcgctgcttgggccataccagcagtaaaaactattttaatcctggtaatgaggagggtcgctggggacgagctgaccggagtatgttacgtgggcagtatggacgttaacgcgttgaccggatttgtcctcatcccattggcctgctacctcgtcattggaacgagtttcatcctgtccggcttcgtcgctcttttccacatccgaagggtgatgaaaaccgggggcgagaatacagacaaacttgagaagctcatggttcgcatcggcctgttttccgtgttgtacaccgtacctgcgacctgtgtgattgcttgttacttctacgagcggctcaatatggactactggaagattctcgccgcgcagcacaagtgcaagatgaataatcaaaccaagactctggattgtctgatggccgcgagcatccctgctgtagagatttttatggtcaagatcttcatgcttctggtagtcgggatcacttccgggatgtggatctggacttccaagacattgcagagttggcagcaggtgtgtagtcggagattgaaaaaaaagagccggcgaaaaccagcgagtgttatcacctcaggcggaatctataaaaaagcccaacatccacagaaaacccatcacgggaaatacgagatcccggcacaatctccaacctgtgtgtag

SEQ ID NO: 132187 - DNA, 960 bp, synthetic construct
  misc_feature 1..960: note = Description of Artificial Sequence: Synthetic coding sequence
  source 1..960: mol_type = other DNA
atggtggagaagtatcgccctcagaccctgaatgacttaatctcccaccaggatattctgagcaccatccaaaagtttattaacgaggatagattaccacaccttctgctctatgggccccctggaacagggaagaccagcactattctggcctgtgcaaagcagctgtataaggacaaggagttcgggagtatggtgctcgagttgaatgcttcagatgaccgaggcatcgacatcattcgaggtccaatcttgagttttgcttctactcggacaatctttaaaaagggctttaagttggttattttggacgaggccgacgccatgactcaggatgcgcagaatgccttgcgccgggtgatcgagaagtttactgaaaacacgcgattttgcctcatatgtaattacctgagcaaaatcattcctgccctgcaaagcagatgcaccagattcagattcggacctctgacacccgagctcatggtcccaagacttgagcacgtcgttgaggaggagaaggtggacatttctgaggacggcatgaaagccctggttacattgtcttccggagatatgcggcgtgctttgaatatacttcagtctaccaacatggcgtttggcaaggtgaccgaggaaactgtctatacctgcaccggccatcccctgaagtccgatatcgcaaacattctggattggatgctgaatcaggactttaccacggcttatcggaacattaccgaactgaagacactcaaaggcttagccctgcatgatattttgactgagatccatctgtttgtgcaccgcgtagacttccccagctccgtgcgtatccatttgttgacaaagatggcggacatagaatacaggttaagcgttggtaccaacgaaaagatccagctgagctctctgatcgccgctttccaagtgactcgagatctgatcgtcgccgaggcgtag

SEQ ID NO: 132188 - DNA, 315 bp, synthetic construct
  misc_feature 1..315: note = Description of Artificial Sequence: Synthetic coding sequence
  source 1..315: mol_type = other DNA
atggtggagaaatataggccgcaaacccttaacgatctgatttcccaccaggacattctctccacaatccagaagttcataaatgaagaccggctgccgcatctactgctctacggccccccaggcaccggaaaaacatccacaattctcgcctgcgctaaacagctttataaagacaaggagtttggctccatggtgctggaattgaatgccagcgatgaccggggaatcgatatcatccgtgggccaatcctgagctttgcttctacgcgcacaattttcaagaagggatttaagctggtaatactggattag

SEQ ID NO: 132189 - DNA, 1023 bp, synthetic construct
  misc_feature 1..1023: note = Description of Artificial Sequence: Synthetic coding sequence
  source 1..1023: mol_type = other DNA
atggagactagcgctttaaaacaacaggagcaacccgccgcaactaaaatacgcaaccttccctgggttgaaaagtataggccccaaacgctgaacgatcttatcagtcaccaggatatattgtcaaccatccagaaatttatcaacgaggatagactgccccatctcttgttgtacggcccccccggaacaggcaaaacttcaaccatactggcttgcgctaagcagctctacaaagataaggagtttggctccatggtgctggaactcaatgcatctgacgaccggggtatagatataatccgcggacccatattgtcgtttgcaagcacacggactatctttaaaaagggcttcaagctggtgatcctggacgaagccgatgccatgactcaagatgcacagaatgcgcttcggcgagtcatcgagaagtttaccgaaaacacccgattctgtctgatctgtaattatctgagtaagatcatccccgctctacagtcccgctgtactcgtttccgattcggccctttgactccggaactcatggtgcctaggctggagcacgtcgtcgaagaggagaaggtcgatattagcgaggacggcatgaaggcccttgtcactctgagctccggtgatatgagaagggccctaaacatccttcaatctaccaacatggcatttgggaaggtgacagaagagacagtgtatacttgtaccgggcaccccctaaaatccgacattgctaatattcttgactggatgctgaatcaagattttaccacagcttaccggaacatcacagagctgaagactttgaagggccttgccctccacgacattctgaccgagattcatctttttgtccacagggtcgacttcccctcttctgtacgcatccacttgcttacaaaaatggccgacatcgaatacaggctctccgtcggcaccaacgagaagatccagctctcatccctcatcgccgcatttcaggtgacgagagatctaatcgtggctgaagcctag

SEQ ID NO: 132190 - DNA, 192 bp, synthetic construct
  misc_feature 1..192: note = Description of Artificial Sequence: Synthetic coding sequence
  source 1..192: mol_type = other DNA
atggtcgagaaatatcggcctcagacccttaacgatctaatttcccaccaagacattcttagcactattcagaaattcattaacgaggatagactgccacatctactgctgtatggtcctccggggacaggcaagacaagtacaattctcgcgtgcgccaaacagctgtacaaagacaaggaattcggttag

SEQ ID NO: 132191 - DNA, 1077 bp, synthetic construct
  misc_feature 1..1077: note = Description of Artificial Sequence: Synthetic coding sequence
  source 1..1077: mol_type = other DNA
atgtggaacagtaacgacggaggggcgggatggagacgcaagcggatcgcaggcggtttttcaaagagagcatcactcgggtctgaaagaagagtggtagccggagaagaggggcgggaacgctcctggggcgtgtgggggtcccccgccggtcgccgacgagggaggctgggaagactgggacagtgcctgaaagggaggtcactgagagagcccgctggtttttctgaagcatgggatgtggctcaggcccttattttactcttcaaaacagggggcttcgagtcctacggcagctccagctacggcggcgctggcggctatacccagtctcctggaggcttcggctctcctgccccatctcaggcggaaaaaaaatctcgagctcgtgctcagcatatagtgccatgtaccatcagccagctgctaagtgcaacgctggtggacgaggtcttccggattggcaacgtggagatatctcaggtaactattgtgggcatcatccggcacgccgagaaggctcccacgaacatagtctataaaatagacgatatgaccgcggctccaatggatgtgagacagtgggtggacacagacgacaccagctccgagaatacggtcgtgccccctgagacttatgtgaaagttgccggccaccttaggagttttcaaaacaaaaaaagtctcgtagcctttaagataatgccgctggaggacatgaacgagttcaccacccacattctcgaggttattaacgcccatatggtactgagcaaagcaaacagccaaccctctgccggtcgcgcccccatctcaaaccctggaatgtccgaggccggtaatttcggtggtaactcttttatgcccgccaatggtctcacggtggctcagaatcaagtcctcaatctgattaaggcttgtcccaggcctgagggcttgaacttccaggacttgaagaatcaactcaagcacatgagtgtgagcagcattaaacaggccgttgactttttaagtaatgaggggcacatctacagcaccgtggatgacgaccactttaaatcaacggatgccgaatag

SEQ ID NO: 132192 - DNA, 837 bp, synthetic construct
  misc_feature 1..837: note = Description of Artificial Sequence: Synthetic coding sequence
  source 1..837: mol_type = other DNA
atgggaaggggtgacaggaataagagaagcattcgcggctttgaatcttacggctcatccagctacggaggtgccggtggatacactcaatcacccggcgggtttggttccccggcaccatcacaggccgagaagaagtccagagcccgcgctcagcacattgtgccttgcactatttcccagctcctgagcgccactctcgtggatgaagtgttcaggatagggaacgtagagatatcacaagtgaccatcgtgggtatcatccgccacgctgagaaggcacccactaacattgtgtacaaaatcgacgacatgaccgcagcccctatggatgtgcgacaatgggtggacacagatgacaccagcagcgagaatacagtggtgcccccggaaacctatgtcaaggtggccggacatcttagatcattccagaataaaaaaagcttggtggccttcaagattatgcccttggaggacatgaatgagttcaccactcatattttggaggttatcaatgcccacatggtgcttagcaaagcaaacagtcagccctccgccggtagggctcctatcagtaacccgggcatgagcgaggctggaaacttcggtggcaactcatttatgcctgcaaacggcttaacagttgctcagaaccaggtgttaaatcttatcaaggcatgccctagacccgaggggctgaattttcaggacctcaagaatcagttaaaacacatgagcgtgtcttcaattaaacaggccgtggattttctgtccaatgaggggcacatttattctaccgtggacgatgaccactttaagagcacggacgctgagtag

SEQ ID NO: 132193 - DNA, 813 bp, synthetic construct
  misc_feature 1..813: note = Description of Artificial Sequence: Synthetic coding sequence
  source 1..813: mol_type = other DNA
atgtggaattctgggtttgaatcctacggttcttcatcctatggaggcgcaggggggtacacgcagtcaccaggtgggtttggaagtcccgctccctcgcaggcagagaagaagtccagggctagagctcagcacatcgtgccctgtaccatcagccagttgctgtcggctactctggtggatgaagtcttcagaatcgggaatgtggaaatcagccaggtgactatagttgggatcatccggcatgctgaaaaggcccctacaaatatcgtttataaaattgatgacatgaccgccgctcccatggacgtccgccagtgggtcgacactgatgataccagttcggaaaacacagtggtgcctccagaaacctatgtaaaagtcgccggccacctgagatctttccaaaacaaaaagtctctcgtggcatttaaaataatgccgctggaggatatgaacgagtttacgacccacatactggaagtgataaacgcacacatggtactttctaaggcaaattctcagccttccgccggccgggctccaattagcaacccaggcatgagtgaagccgggaacttcggaggcaactcctttatgccggccaatggtctgacagttgctcagaatcaagtgttaaacctaatcaaagcttgtcccagaccagaaggcttgaactttcaagacctgaagaaccagcttaaacacatgtctgttagctcgattaaacaggcagtggattttctgtctaacgaagggcacatttacagtacagtggatgacgatcacttcaagagcacagatgcagagtag

SEQ ID NO: 132194 - DNA, 369 bp, synthetic construct
  misc_feature 1..369: note = Description of Artificial Sequence: Synthetic coding sequence
  source 1..369: mol_type = other DNA
ctcgaagacatgaacgagttcactacacacatcctggaagtgataaacgcgcacatggtgctttcaaaggccaactcccaaccctcagctggtcgagccccaatatctaatcctggcatgtccgaagctgggaacttcggaggcaattcgtttatgcccgctaatgggcttacagtggcccaaaaccaagtgctcaatctgattaaggcctgcccccgcccggagggactcaacttccaagaccttaaaaaccagctcaagcatatgtcggtgtcctccatcaagcaagccgttgacttcctatcgaatgagggtcacatatactctacggtggacgatgaccatttcaagagcaccgacgcagaatag

SEQ ID NO: 132195 - DNA, 540 bp, synthetic construct
  misc_feature 1..540: note = Description of Artificial Sequence: Synthetic coding sequence
  source 1..540: mol_type = other DNA
atgtggaattcaaacgacggcggtggcttcgagagctacgggagcagctcctatggaggggccggaggttacactcaatcccccggcggctttggcagtcccgcgccaagtcaagccgagaagaagagtagagcccgagcacagcacattgtaccatgcaccattagccagctgcttagcgccacacttgttgacgaagtgtttagaatcggaaacgtggagatatcgcaggtgacaattgtcggaataataaggcatgctgaaaaggctccaaccaacatcgtgtacaagatcgacgacatgacggccgcccctatggacgttagacaatgggtggacactgatgacactagcagcgaaaatacagtggtgcccccagagacgtacgtgaaggtagcaggtcacctgaggagcttccagaacaaaaaaagcctggtggcttttaaaataatgcctctcgaggatatgaacgaattcaccacacacatcctcgaagttatcaacgcacacatggtgctatccaaggctaacagtcaatag

SEQ ID NO: 132196 - DNA, 786 bp, synthetic construct
  misc_feature 1..786: note = Description of Artificial Sequence: Synthetic coding sequence
  source 1..786: mol_type = other DNA
atgtctaagtccgggtttggcagttacggtagcatcagcgcggccgacggcgcctccggaggcagcgatcagctttgtgagagggatgctactccagctatcaaaactcaacgcccgaaagtgcgcattcaggatgttgtaccgtgtaacgtgaaccagctccttagctcaacagtctttgaccctgtgtttaaagtgcgcggcataattgtgtcccaagtgagcattgtaggagtgatccgcggcgcggagaaagcgtccaaccacatctgctataagatcgacgatatgaccgctaaacccattgaagcccgccaatggtttgggagggaaaaggtgaaacaagtgactcccctgagcgtgggcgtttacgtaaaagtcttcgggatcctaaagtgccccactggaactaagagtctagaggtacttaagattcatgtgttagaggacatgaatgagtttaccgtacatattctggaaaccgtgaatgcacatatgatgctggataaggctagacgagataccacggttgagtccgtgccagtgagcccttcagaagtcaatgacgcaggggacaatgacgagtcacacaggaactttattcaagacgaagtgctgagactgatacacgagtgccctcaccaggaggggaagtctattcatgagttaagagcccagctgtgtgacctcagcgtgaaggcaataaaggaggccatcgattatttgacagttgaagggcatatctatcctactgtggaccgcgaacactttaaatccgcggactag

SEQ ID NO: 132197 - DNA, 330 bp, synthetic construct
  misc_feature 1..330: note = Description of Artificial Sequence: Synthetic coding sequence
  source 1..330: mol_type = other DNA
atgaatcctgccctcggcaatcagactgatgtcgcagggctgtttctggctaattcttctgaagctttggaaagagcggttcggtgttgtacccaagctagcgtcgtcacagatgatggttttgccgaaggcgggcccgacgaacggtctctgtatattatgcgggtcgtgcagatcgcggttatgtgtgtgctgtcactaacagtggtttttggaattttcttcctgggctgtaatctgctcatcaaaagcgaaggaatgattaattttctggtgaaggaccgccgcccatccaaggaggtcgaggcagtggtagtcgggccctactag

SEQ ID NO: 132198 - DNA, 1893 bp, synthetic construct
  misc_feature 1..1893: note = Description of Artificial Sequence: Synthetic coding sequence
  source 1..1893: mol_type = other DNA
atgcagggaagctcactgtggctctccttaacctttaggtctgctcgtgtgctaagtagagcccggtttttcgaatggcagtctcccggcctgccaaacaccgctgccatggaaaacggaacaggtccatacggagaggaacggcctagggaagttcaggagacaacagtaactgagggcgctgcaaaaattgctttcccatctgctaacgaggtattttacaatcccgtgcaagagtttaatagggacctgacatgtgccgtgataaccgaattcgccagaattcaactcggagccaaaggaattcagattaaagtgcctggtgaaaaagacacacagaaagtcgtggtggacttatccgagcaggaagaggaaaaggtagaattaaaagagagcgagaacctggcttccggggatcagcccagaacggccgctgtgggcgaaatttgcgaagaaggattacacgttctggagggcctcgctgcctcaggcttaaggagtattcgcttcgcattagaggtacctggactaagatccgttgtggccaacgacgcctcaacaagggccgtcgatttgattaggcgtaatgtgcagttgaatgatgtcgctcatcttgtgcagccatcccaggctgatgccagaatgttaatgtaccagcatcagcgggtcagtgagcgattcgatgtcatcgatctggacccttacgggtcccccgcgacctttctggatgcggcagtgcaggctgtgtctgagggcggcttattgtgcgtgacatgtaccgacatggcggtgctggcagggaactccggtgagacatgctacagcaaatatggcgcaatggctctaaagagtcgcgcgtgtcacgagatggctctgcgcatcgtcctccactcgcttgatttacgtgctaattgttaccagcggttcgtagttcctctgctgtccatctctgcagacttctacgtccgcgtttttgttcgtgtgtttactgggcaggcaaaggtgaaggcgagcgccagagccaagttctcggctgcgtgcggtccacccgtgacaccagaatgcgagcattgcggccagcgtcatcagctgggcgggccaatgtgggctgagccgatacatgacttggactttgtaggccgggtcttggaggcagtgtctgccaaccccggaagattccatacctccgagaggattcgcggtgtactatccgtgatcacagaagaattaccagatgtccccttgtattatactttggaccagctatccagcactatccattgtaatacaccttccctgctccaactgcggtccgctctgctgcacgctgattttagagtgtccctgtcccatgcctgtaaaaatgcagtgaagaccgatgcaccagcaagcgccctgtgggacatcatgaggtgttgggagaaagaatgccccgtaaagcgggaaaggctgtctgaaacttcacccgcctttagaattctctccgtggagccaagattacaagctaacttcactatcagggaagacgctaatcctagttcccggcagcggggcttaaagcgtttccaggctaatccggaggccaactgggggcctcgtcctcgcgctcggccaggcggcaaggcagccgacgaggccatggaagagcgtcggcggttgcttcaaaataaaaggaaggaaccacccgaggacgttgctcagcgggcagcccgtttaaaaaccttcccttgcaaaaggtttaaagagggcacctgtcagaggggcgaccaatgctgctactcccactcacccccgacccctcgtgtgagtgctgatgctgccccggattgtccggaaaccagtaatcagaccccccctggccctggggctgctgccgggccggggattgactag

SEQ ID NO: 132199 - DNA, 249 bp, synthetic construct
  misc_feature 1..249: note = Description of Artificial Sequence: Synthetic coding sequence
  source 1..249: mol_type = other DNA
atgaaagctctgtgtctgctgctgcttcccgtgctgggcctcttggttagcagcaagacattatgctcaatggaggaagctatcaacgaaagaattcaggaggtggctggtagcctgagctttgctgttacagggtgcacgtgtgggagcgcatgtggcagttgggacgtaagggccgagaccacttgtcattgccagtgtgcggggatggattggactggtgcccgatgctgtcgtgttcagccctag

SEQ ID NO: 132200 - DNA, 954 bp, synthetic construct
  misc_feature 1..954: note = Description of Artificial Sequence: Synthetic coding sequence
  source 1..954: mol_type = other DNA
atgaaaagactgagcctcgtgactactaatagactcagtccacatggcaacttccttccgctctgtactttcccgttagccgtcgatatggccgccctgttccaggaggcatcaagctgccctgtctgtagtgactacctcgagaaaccaatgagcctagaatgcggttgcgccgtttgctttaaatgtataaattccctgcagaaagaaccacacggcgaggatctgctctgctgctgttgttccatggtttcacagaagaacaaaattcgacctagttggcagttggaacgtttagcctctcatattaaggagctcgagcctaagctcaaaaagatccttcagatgaatccccggatgcggaaatttcaggtggatatgactctcgacgccgacacagcgaacaactttctactgatctccgacgatctccgctccgttagatctgggtgtataacgcagaaccgtcaggacctggcagaacgattcgatgtgtctatttgtattcttggatccccacggttcacatgcgggcgccattattgggaagtcgacgtcgggacgagtactgagtgggatttgggagtgtgtcgggaaagtgtccatcgcaaggggcgaatacatctgacaacagagcgcggtttttggacagtgtcactacgagatggatccagactgtccgctagcacggtgcccctgaccttcctgttcgttgatcgcaagcttcagcgcgtgggcatcttcctggatatggggatgcagaacgtgtcattctttgacgccgaaggtggtagccatgtttacactttcagatctgtgtcagcggaggaaccactgcatcttttcttcgcccctccctcacctccgaacggggacaagagcgtgctatcgatttgtccagtgattaatcctggaaccactgatgcccccgttcaccccggtgaggcgaagtag

SEQ ID NO: 132201 - DNA, 954 bp, synthetic construct
  misc_feature 1..954: note = Description of Artificial Sequence: Synthetic coding sequence
  source 1..954: mol_type = other DNA
atgaagaggctctctctggttactactaatagattaagcccccatggcaactttttcacactttgtacgttcccccttgcggtggacatggcagcgctgtttcaagaagccagttcctgtcccgtctgcagcgactacttagagaaacccatgagtctagagtgtggctgcgccgtgtgtctgaagtgtatcaatagcctccagaaggagccacatggcgaggacctgctctgttgctgctccagtatggtcagtcgaaagaacaaaattagaaggaatcgccagctggaaaggctcgcttcccacattaaggaattggagcctaagctgaagaagattctgcagatgaatcctcgtatgcgcaagtttcaggttgatatgacactagacgccaacaccgccaataatttcctgttaatctcagacgatctccgatctgtgaggtctggcaggattagacaaaataggcaggatctggctgagcgattcgatgtgtcagtctgtatacttggcagtccccgtttcacgtgcggcaggcactgctgggaggtcgacgtggggacaagtactgagtgggatttaggggtgtgtagagagagcgtacacagaaaggggagaattcagcttaccaccgagctgggcttttggacagtgagcttaagagatggaggtcggctcagtgccaccaccgtgccactgaccttcttatttgtggaccgcaagcttcagcgcgttggtatcttcttggatatgggcatgcaaaatgtgtcattcttcgacgccgaatctggctcacacgtgtatacattccggtcggtctccgccgaggaacctctcaggccattcttggcacctagcgttccgccaaatggcgatcagggagtcctctctatctgccccctgatgaattccggtacaactgacgcccctgtccgaccaggagaggccaaatag

SEQ ID NO: 132202 - DNA, 867 bp, synthetic construct
  misc_feature 1..867: note = Description of Artificial Sequence: Synthetic coding sequence
  source 1..867: mol_type = other DNA
atggctgcattattccaggaagcctcctcctgtcctgtgtgtagcgattatctggagaaacctatgtcgctggagtgtggctgtgctgtatgcttgaagtgcataaattcacttcagaaggagccccacggcgaggatctgttatgctgttgctcaagcatggtgagcaggaagaacaaaatccggagaaacagacaactagagagactcgcgagtcatattaaggagcttgaaccaaaactcaaaaaaatcctacaaatgaatcctcgcatgagaaagtttcaagtggacatgaccctggatgctaacacagctaacaactttcttctaatcagcgacgaccttaggtcggttcgcagcgggcgaatccggcaaaatcgccaggacttggcagagagattcgatgtctccgtatgcattctgggctcaccaaggttcacctgcggaaggcactgttgggaggtcgacgttgggacatcgaccgagtgggatttaggtgtttgtagagagtccgtgcaccggaaagggcggatacagctgaccactgagctaggattctggactgtgtcactccgagatggcggtaggctgagcgccaccaccgtcccactgaccttcctcttcgtggatcggaaactgcagagggtgggtatatttcttgatatgggcatgcaaaacgtgtctttctttgatgcagagtcaggctctcatgtgtacacatttcgcagcgtgagtgccgaggagccccttcgaccctttctcgctccaagtgtgccacccaacggcgatcaaggagtattatctatttgtcccctcatgaattctggcactaccgatgccccagtcaggcccggcgaggcaaagtag

SEQ ID NO: 132203 - DNA, 867 bp, synthetic construct
  misc_feature 1..867: note = Description of Artificial Sequence: Synthetic coding sequence
  source 1..867: mol_type = other DNA
atggctgccctgtttcaggaggctagctcctgtccggtctgttcagactacctggagaagcctatgagccttgaatgtggctgcgcggtgtgcctgaagtgtattaactccctgcagaaagagccacacggggaagatctgttatgctgctgttcctccatggtgtctaggaaaaataaaattagacggaaccggcagctggaaagactggcatcccatattaaggaacttgaaccaaaactaaagaaaatccttcagatgaatccgcgaatgcgaaagttccaggtggacatgacactggacgctaacacagcgaacaattttctgctaatttctgacgacttgaggtccgtgcgatctggcagaatccggcagaatcgccaggatcttgccgaacggttcgatgtttccgtgtgtatcttaggatccccacggttcacttgcgggcggcactgttgggaagttgacgtcggaacttctacagagtgggacttaggtgtctgccgcgaatctgtgcatcgaaaggggcgaatccagctcaccaccgaactcggcttctggactgtgagcctccgagatggcggtagactaagtgccacaacggtccccctcacattccttttcgttgacaggaagctccagagggtgggtatttttttagatatgggcatgcagaatgtaagtttctttgatgcagagtccggctcacatgtgtatacttttagaagcgtctccgccgaggagcccctacgcccttttctggcccctagcgtcccccccaatggcgatcagggtgtcttatccatatgcccactgatgaacagcgggaccacggacgcaccggttcgccccggggaggctaagtag

SEQ ID NO: 132204 - DNA, 1137 bp, synthetic construct
  misc_feature 1..1137: note = Description of Artificial Sequence: Synthetic coding sequence
  source 1..1137: mol_type = other DNA
atggaggtcgccgaactgggattcccggagacagccgtgtcccagtcccggatctgcctatgtgcagtgctgtgtggccattgggactttgccgatatgatggttattagatctttatcactcatcaggttggagggagtcgagggccgggatcccgttggaggcggcaatttgactaacaagcgaccatcatgcgcaccctctcctcaggacctcagcgctcagtggaagcagttagaggaccgtggggcttcgagcaggcgcgtagacatggcagccctcttccaggaagcatcctcatgtcccgtttgctccgactatctggagaaacctatgtctttggaatgtggatgtgccgtgtgcctgaaatgtatcaacagcctccaaaaagagccacacggggaagatctgttatgctgctgttccagcatggtttcaaggaaaaataagataaggagaaaccgccagctggagcgcctggcatcccacataaaagaacttgagccaaagcttaagaagattctgcagatgaatcctcggatgcggaagtttcaggtggacatgacactcgatgccaacacggctaacaattttctcctgatatcagatgatctgcggagtgtgcgaagtggacggatcaggcagaatagacaggatctggccgaacggttcgatgtgagcgtgtgcatcctgggctcccccagattcacctgtggccgtcattgctgggaagtggatgtcggtaccagtaccgagtgggacctcggggtctgcagagagtctgttcaccgaaagggccgtatccaactgacaaccgaattgggattctggaccgtcagtctacgggacggaggacggctgtccgcaaccaccgtgcccctgacttttctgttcgtcgaccggaaacttcagcgagttggcatctttctggacatgggcatgcagaacgtgagctttttcgacgcggagtccgggagccatgtatacacatttagaagcgtctccgcagaagagcccctgcgtccattcttggcacctagcgtgccacccaatggtgaccagggagtcctctcgatctgccccttgatgaatagcggcaccaccgatgcccctgtacgccctggcgaggcgaaatag

SEQ ID NO: 132205 - DNA, 954 bp, synthetic construct
  misc_feature 1..954: note = Description of Artificial Sequence: Synthetic coding sequence
  source 1..954: mol_type = other DNA
atgaaacggctctcccttgttaccacaaaccggctaagtccacagggaaatttcctgcctctgtgtaccttcccgctcgccgttgacatggcagccctgtttcaggaggctagctcctgccccgtgtgcagtgactacctcgagaaacctatgtcactggaatgtgggtgtacagtgtgtctgaaatgcataaactcattgcaaaaggaaccgcatggtgaagatctgctatgctgttgctgctcaatggtgagccagcgcaacaagattaggccgaaccgtcagctggaaagactcgtgtctcatatcaaggaattggagcctaaactaaaaaaaattttgcagatgaatcctcgcatgcggaagttccaggtggacatgaccctcgacgcagacacggcaaataactttctgttaatctctgacgacctgagatctgtaaggagtggactcatcacacagaatagacaggaccttgccgagcgcttcgatgtgtcagtgtgcatactggggagcccacgatttacatgcggcagacactactgggaagtggatgtcggcacaagtaccgaatgggacctgggcgtatgcagagagtcagtgcactgcaaagggaaaatccagctcaccacagagttaggtttttggacagtttcccttcgcgacgggagtagactctctgcatccacagtgccactgaccttccttttagtggaccgcaagctacagcgggtaggtattttcctggatatggggatgcaaaacgtaagtttctttgacgcagagtctggaagtcacgtatacacatttaggtctgtgagcgctgaggagccgctcaggccattcttggcacctagtattcctccaaacggcgatcagggtgtgctttcaatctgccccctgatgaacagcggcacaacagacgccccagttcgccccggtgaggccaagtag

SEQ ID NO: 132206 - DNA, 867 bp, synthetic construct
  misc_feature 1..867: note = Description of Artificial Sequence: Synthetic coding sequence
  source 1..867: mol_type = other DNA
atggctgctctgtttcaggaggcaagttcctgccctgtgtgctccgattatctggagaagcccatgtccttggagtgcgggtgcacagtgtgcctgaagtgcatcaattcactgcagaaagaaccacatggtgaagacttgttatgctgctgttgctccatggtgtctcagaggaacaaaatcagacccaataggcaactggagaggctcgttagtcacatcaaggagctcgaacccaagctgaagaagattctgcagatgaaccccaggatgaggaaattccaggtggacatgaccctcgacgcagatacggccaacaactttttgctgatatctgacgacctgcgcagtgttcggagcggactaatcacccagaaccggcaggatctggctgaacggttcgatgtttcggtttgcattcttggatccccgcgattcacctgcggacgccattattgggaggttgacgttgggacatcaaccgaatgggaccttggcgtgtgccgggagtctgttcattgcaaggggaaaatccaattaaccaccgagcttgggttttggacagttagcctgagagacggatccagactgagcgcgtcaactgttcccttaaccttccttttggtggacagaaaacttcaaagggtgggtatattcctcgacatgggaatgcagaatgtgtcattttttgacgcagagtctgggtctcacgtatatacgttcagaagcgtgtcagccgaagaaccgctcagacccttccttgctccaagtattcctcccaatggtgatcagggcgtcctgagcatttgtcctctgatgaattctgggacaaccgacgcacccgtgcgccccggcgaagccaaatag

SEQ ID NO: 132207 - DNA, 867 bp, synthetic construct
  misc_feature 1..867: note = Description of Artificial Sequence: Synthetic coding sequence
  source 1..867: mol_type = other DNA
atggctgctctttttcaagaggcctccagttgccctgtgtgttccgactatctcgaaaagcctatgtctcttgaatgcgggtgtaccgtgtgtctgaagtgtattaactccctgcagaaagagccccatggggaagatctgctctgctgctgctgttcaatggtttcacaaagaaacaagatacggcccaataggcagcttgaaaggctcgtatcacacatcaaggagctggaacccaagctcaaaaaaatcctccagatgaatcctcgcatgcgaaagttccaggtggatatgacgctggacgccgatacggctaacaattttttgctcatttcagacgatcttcggagcgtgaggagcgggctcattacacaaaacaggcaggatctggccgagaggttcgatgtgtctgtttgcatcctgggaagtccaagattcacttgcggaaggcattactgggaagtggacgttggtaccagcactgaatgggatctgggggtctgcagggaatcagtccactgcaaagggaagatccagctgacaactgaactcggtttctggaccgtgagcctgcgggatggaagcagactctccgcctcgacagtgcctttgacatttctccttgtggatagaaaactacagcgcgtggggatattccttgacatgggcatgcaaaacgtgagcttctttgacgcagagtccggcagccatgtctatacctttagaagtgtttctgctgaagagcctctacgtccctttctggcacccagcataccccctaacggcgatcagggggtgctctcaatctgtccccttatgaatagcggaactaccgatgcacccgtccggccaggcgaagccaagtag

SEQ ID NO: 132208 - DNA, 3219 bp, synthetic construct
  misc_feature 1..3219: note = Description of Artificial Sequence: Synthetic coding sequence
  source 1..3219: mol_type = other DNA
atggctaaggctacgtctggagcggccggcttacggttgctgctgctgctgctgctgccacttctgggcaaggttgccctgggactttatttttcacgggatgcctactgggagaagttgtacgtcgatcaggcagccggaacaccacttttgtatgtccatgctctgagagacgctcctgaagaagtgcccagttttcggctagggcagcatctctacggcacctaccggaccaggctgcacgagaacaactggatctgtatacaagaggatacaggactgttataccttaatcgatccctagatcatagtagctgggagaaattgagcgtgcggaatcgtggatttcctctcctgacagtgtatctgaaggttttcttgtcgcccacctcattgcgggaaggcgaatgccaatggcctggctgcgctagagtttatttttccttctttaacacctccttccccgcctgtagcagcctaaaacctcgggaactttgcttcccagagacgcggccttccttcaggatcagagaaaaccgaccccccggcactttccatcagtttcggttgttgcctgtgcagttcctgtgcccgaatatttccgttgcgtatcgtcttctggaaggcgagggccttccattccgatgcgcaccagacagccttgaggtttcaacccggtgggccttggaccgcgagcagagagagaaatacgagctagtcgccgtctgtacggtccacgcgggggcacgtgaagaggtggtgatggtccctttccctgtcacagtgtacgatgaggacgattctgctccaacattcccggcaggcgtggacactgcatcagccgtagtcgagttcaaaaggaaggaagataccgtggtggcgaccctgcgcgtctttgacgctgatgtggtgcccgccagtggtgagctcgtgcgcagatacacaagtacgctactccctggtgatacttgggctcagcagaccttcagagttgaacattggcccaacgaaacttccgtgcaggccaacgggtccttcgttcgggcaaccgtgcatgactacaggttggtcctgaatcggaacctttcaattagcgaaaatcgcaccatgcagctggcagttcttgtgaatgactctgattttcagggaccgggtgccggagtcctcttactccactttaatgtatcagtgctaccagtatccctccacctaccgtccacttactccctttctgtgagtaggagggctagacggtttgcacagattggcaaagtgtgtgtagagaactgccaggccttttccggtatcaatgttcagtacaaattgcacagctcaggagcgaactgtagcactctgggggtcgtgacttctgccgaagacacaagtggaatccttttcgtaaacgacacaaaagcattacgacgtcccaaatgtgcagaacttcactacatggtcgtagcgacagatcagcagacctctcggcaggcacaagcgcagctgctggtcacagttgagggtagttatgtcgctgaagaagcaggctgtccactcagctgcgcagtgtccaagcgtaggctggaatgtgaggagtgtggcggtcttgggtcgccaacgggcaggtgcgagtggagacagggagacggcaagggcattacccgaaatttctctacctgcagcccaagtacgaagacatgccccgatggacactgtgacgtcgtcgaaacgcaggatatcaatatctgcccccaagactgcctgcgaggatcaattgttggagggcacgaaccaggggaaccaagagggatcaaagccgggtacggtacttgcaattgctttcctgaagaagagaagtgtttctgtgagcccgaggacatccaggaccctctgtgtgacgagttatgccgtacagtaatcgcggcagccgttctctttagtttcattgtgtctgtgcttctgagcgcattctgcatacactgctaccataaatttgcccataagcctccaatcagctcagccgaaatgacctttcggcgccctgcccaagctttcccagtgtcctatagtagctccggggcgagacgtccttctttagatagcatggaaaaccaggtgtccgtcgacgctttcaagatcttggaagacccgaaatgggagtttcctcggaagaacctggtgctgggtaaaaccctgggcgaaggagagtttggtaaggtggtcaaggcaactgcatttcatctgaaagggagggctggatacactactgtcgcagtgaagatgctcaaagaaaatgcgtccccctcggagttaagggatcttttgagcgaatttaatgtgctcaaacaggtcaatcaccctcacgttattaaactttatggagcttgttctcaggatggtccccttctgcttattgtggagtacgcgaaatacggctctctgcgtggttttttacgcgaatctcgcaaggtgggacccggttacttgggttcggggggatctcgaaatagttcctccctggaccacccagatgaaagagccttaaccatgggggatttgatcagctttgcctggcagatttctcaggggatgcagtatctcgccgagatgaagctggttcatcgggacctggccgctcggaacatccttgttgccgagggaagaaagatgaaaatcagcgacttcggtttatctcgggacgtgtatgaagaggattcctacgtcaaaagaagtcagggacggatccccgtgaagtggatggcaatcgagtccttgtttgaccatatctatactacccagtccgacgtgtggagcttcggggtcctgctttgggagatcgtcactctggggggcaacccttatccagggatcccgcccgagagattattcaatctgctgaagacaggccatcggatggaaaggcccgacaattgtagtgaggaaatgtacagacttatgttgcaatgctggaagcaagagcccgacaaacgaccagtgtttgcggatatctccaaggacctggagaaaatgatggtgaaaaggcgagattacttggacctggctgccagcaccccatccgattcgctcatttacgacgatgggctgagcgaagaggagacacctctggtcgactgtaacaacgccccactgcctagagcccttccaagtacctggatcgaaaacaagctgtacggccgcatcagccacgcctttacgcgtttttag

SEQ ID NO: 132209 - DNA, 3345 bp, synthetic construct
  misc_feature 1..3345: note = Description of Artificial Sequence: Synthetic coding sequence
  source 1..3345: mol_type = other DNA
atggctaaagctacctccggagccgcgggtctgagactgctcctgcttctgctgctcccgttgctgggcaaagtggcattgggcctatacttcagtagggacgcatattgggaaaaactgtacgtcgaccaggcggccgggaccccacttctgtatgtgcatgccttaagagatgcccctgaggaggtccccagcttcaggttggggcagcatctctacggaacgtaccgaacaagactccacgagaacaactggatatgtatccaagaggacaccggcctgctgtacctaaatcggtcactggaccattcatcctgggaaaaactcagcgttaggaatcggggatttcctctcctcaccgtgtatctgaaagtcttcctgagtcccaccagcctgagagagggcgagtgccagtggccgggctgtgcccgcgtgtacttttcgtttttcaatacctctttccctgcttgtagttctttgaagccgagggaactctgctttcccgaaaccagacccagtttccgaatccgtgagaaccgacccccaggcacattccaccagttccggctgctgcctgtccaatttctgtgtcctaatatttcagtagcataccgtctgctcgaaggggaggggttgccattccgatgcgcccctgattctctcgaggtatccacaagatgggctctggatcgagagcagcgcgaaaagtacgagttagtcgccgtctgcacagtccacgctggtgccagagaagaggtggtcatggttcctttccccgtcactgtctacgatgaagatgatagcgccccgacgtttcccgcgggggtggacacagcctcagctgttgtagaatttaagcgcaaggaggacacagtggtggccaccctgcgagtgttcgatgcagatgtcgtccccgcaagcggcgagctggtgcgccgctacacgagcacactcctccccggcgacacctgggcccagcaaacgttccgcgtggagcactggccaaacgaaaccagcgtccaggcaaatgggtctttcgttagagctactgttcacgactaccgcctggtcttaaaccggaacctctccatctcagaaaatcgcacaatgcagctcgctgtcttggtcaatgattctgactttcagggtccaggagccggcgtgctcctattacactttaacgtctcggtgctgcctgtgtcactgcacctgcctagcacatacagcctttctgtcagcaggagagcgcgtagatttgctcaaataggcaaggtatgcgtagaaaattgtcaagccttttccggcattaacgtgcaatataaattgcactcctccggagccaactgtagcacactgggcgtggttacatctgcagaggatacatccggtattctttttgtgaatgatacaaaggctcttcggaggcccaagtgtgcagaactgcactatatggtggttgccactgatcagcagacatcacgacaggcccaggctcaactgcttgtgaccgtcgaaggcagctatgttgcagaagaagccggctgcccgctatcttgcgcagtttccaaaagaagattggagtgtgaggaatgcgggggtcttggctctccaacgggacgttgtgagtggcgccagggagatggaaaggggatcacccgtaacttctccacatgttcaccttcaacgaagacatgccctgacgggcactgtgatgtggtggaaactcaagacatcaacatatgtcctcaggactgcctgcgcggttccattgtcggcggtcacgaaccaggagagccacggggcatcaaagcagggtacggcacatgcaattgtttccctgaggaggaaaaatgtttctgcgagccggaggatatacaggacccactttgtgatgaactctgccggaccgtcatcgcagcagccgtgcttttttccttcattgtgagcgtcctcctgagtgccttttgtatccactgttatcataagttcgctcataaaccccccatttcaagtgcagagatgacgttcaggagaccagcccaggccttccctgtgtcctacagcagctccggcgcccgtaggcctagtcttgacagtatggaaaaccaggtcagcgtagatgcctttaaaatcctcgaagatcccaagtgggaatttccaaggaaaaacctggtgctgggcaaaactcttggcgagggagaattcggtaaggtggtgaaggctaccgcctttcatctgaaagggagagcaggctacactaccgtcgccgtgaaaatgctgaaagagaatgcgagtcctagcgagctccgcgacctcctctccgaatttaacgtgttgaaacaagttaaccatccccacgtaattaagctttacggggcctgtagccaggatggacctctcctgctgatcgttgaatatgccaaatacggaagcttgagggggttcttgcgggaaagccggaaagtcggacccggttacctggggtcgggtggaagcaggaacagttccagcctggaccaccctgatgagcgggcattaactatgggcgacctgatctccttcgcctggcaaatttcccaaggcatgcagtatcttgcagaaatgaaactcgtccatcgtgatttggctgctcggaacattcttgtagctgaggggcgtaaaatgaaaatcagcgatttcggattgtcaagggatgtgtacgaggaggattcttacgtgaagaggtcacaggggcgtatccccgtgaaatggatggccatcgaatcattattcgatcacatatataccacccagtccgacgtgtggtctttcggggtcctgctctgggagattgtgacactgggcggcaacccctaccctggaataccccccgaacgattgtttaatcttctaaaaaccggccacagaatggagcgcccagacaactgtagtgaagagatgtataggttgatgctgcaatgttggaagcaggagccagacaaaaggccagtgttcgccgacatcagtaaagatcttgagaagatgatggtcaagaggagggattacctcgacctggcagcgtccacaccgtcggactccctgatctacgatgacggactgagcgaggaggagacccctctagtggactgtaacaacgccccactgccgagggccctgccttccacgtggatcgagaacaaactgtatggcatgtctgatccaaattggcctggcgaatcgcccgttccactaacaagggcggacgggactaacaccggattccctaggtatcccaatgactcggtgtacgctaattggatgttatctccctctgccgcaaagctgatggacacgttcgattcctag

SEQ ID NO: 132210 - DNA, 1377 bp, synthetic construct
  misc_feature 1..1377: note = Description of Artificial Sequence: Synthetic coding sequence
  source 1..1377: mol_type = other DNA
atggctaaggccacttctggggcagcggggttaaggttgttgctgttgctgctccttcctctgcttggcaaagtcgcactcggtctgtatttcagccgggacgcctactgggagaaactgtacgtggatcaggcagccgggactccactcctatacgtccatgccctgcgcgacgcccctgaggaggtgccttcattccggttaggacagcacctgtatggaacttaccgaactcgcctgcacgagaataactggatttgcatccaggaagacacagggctgctttatttaaatcggtcattggaccactccagctgggagaaactgtccgttaggaaccgcggcttccctctgttgaccgtgtacctcaaggtttttctgtcccccacgagtctgagggaaggagaatgtcagtggccaggatgtgcccgcgtttatttctctttcttcaacacatctttccctgcatgttccagtctgaagccacgagaactgtgttttcccgaaactcggccctcgttcaggattcgggaaaacaggcctcctggaactttccaccaatttagactgctgcctgttcagtttctctgccccaacatttccgtggcttacaggctgctcgagggcgaaggcttaccctttcgctgcgctcccgactccttagaagtttccactcgatgggctttggaccgtgaacagagggagaagtacgaattagtggccgtctgtaccgttcacgcaggggcccgtgaagaggtagtgatggtcccgttccccgtcacagtgtacgacgaagacgactcggctcccacttttcccgccggtgtggataccgcttcagctgtggtggagttcaagcggaaggaagacactgtagtggcgaccctgagggtttttgatgccgacgtggtccccgcctccggcgagctggtgaggcgatataccagcacactgttgcccggcgatacctgggcccagcagacattccgggtagagcactggcctaacgagacatccgtccaggcgaatgggtcatttgtgagagctaccgtgcacgactacaggttagtgctgaatcgaaacctgtccatatctgagaaccgcaccatgcagttagccgtgttggttaacgatagtgactttcaagggcccggtgccggggttttactccttcactttaacgtgtctgtgttgccggtctctctgcatctgcccagcacttactccctttctgtctctcggcgagcccggcgcttcgcccagatcggaaaggtctgcgttgagaattgcctggctgacctgactggagatgctgtgtctggtcgcgatgaggcacgcagctccggactcggatctcagaagcaccctggctcgtag

SEQ ID NO: 132211 - DNA, 786 bp, synthetic construct
  misc_feature 1..786: note = Description of Artificial Sequence: Synthetic coding sequence
  source 1..786: mol_type = other DNA
atggacgaggcgctggaaactcagctgaaaacgagcaggggcaggtttagcgccacagaatcactgcctacattggagctgctcagtcaagtggatatggattgtagggtgcacatgcgcccaatcggactcacctgggtgctccagctcacattggcgtggattcttttagaagcatgtggcggcagtagacccttacaagctcggagtcagcaacaccacggcttggcagcggacctgggcaagggaaagctgcaccttgctggtccatgttgtccatccgaaatggacactaccgagactagtggccccgggaatcaccctgagcgctgcggggtcccatctcccgagtgtgagtcatttctggaacatctgcagagggccctgcgaagccgatttagattaagactgctgggtgtccgacaggcccagcccctctgcgaagaattatgtcaggcttggttcgccaactgtgaggatgatattacatgtggccccacatggctgcctctctccgaaaaacgcggttgcgaaccaagttgcctcacctacggtcagacgtttgccgacggtactgacctgtgtaggagcgctctgggccatgcactgccagtggccgcccccggcgcccggcattgctttaatatctccatttctgccgttccccgtcctcgtcccggaaggagggggcgagaagcccccagccggcggagtagaagcccacgcacgtctatacttgatgccgctggttccggatccggatctgggtccggctctggaccttag

SEQ ID NO: 132212 - DNA, 675 bp, synthetic construct
  misc_feature 1..675: note = Description of Artificial Sequence: Synthetic coding sequence
  source 1..675: mol_type = other DNA
atgggctggcagctcatttgggcaaaagcatcatgcacttggcaagatttggtcgtgcctcagcgctggacacagcagcgacatcgcgcactagagaccatccaaaacgccgtggagtgtcgggccctgaatgctaacccaagctggaacacatcgaatgtcccttttgctgtcgcgagtgcatgcggatattggggctatgctcggcactcccgctcagctcggagctcagcaagaccagggtctccaacggctaaaatgatttctccagcggctcgccttggatctcatagccagaaaaaaggcgccgtgtcccccgctgctcttcctatggataggcttgagtgcagcggcgctatctctgccagatgtaacctgcgcttaagggggagcagcgactcacctgcagctacatctcgcatcgccgggatttctggcgcgtgccaccatgcccagcttatttttgttttcctcgtagagagtgcatttcaccatgtgggccaggccggattcgagctgttgacaagtggcgacccacccacatccgccagtcagtctgtgggcatcacaggggtaagtcacaggcctagacctccaccatcatccttcctaccctgtctagatccccgtgacaggatcggcactcctcaggtcccagcgcctacgttaccgtag

SEQ ID NO: 132213 - DNA, 690 bp, synthetic construct
  misc_feature 1..690: note = Description of Artificial Sequence: Synthetic coding sequence
  source 1..690: mol_type = other DNA
atggactgccgggtgcacatgagaccaatcggcctcacctgggtgcttcaactgacattagcatggatactgttagaagcatgcggcgggtctagaccactgcaggctagaagtcaacagcatcatgggttggcagctgacctggggaaggggaagctacacttagctgggccttgctgtcccagcgaaatggacacgacagagacatccggccccggtaaccaccccgaacgatgtggagtgccatctcctgagtgtgagagctttttggaacacctccagcgcgcgctgcgttcacggtttcgcctgcgtcttctgggtgtccgtcaggctcaacctctttgcgaagagttgtgccaggcctggttcgctaattgcgaggacgacattacgtgcggccccacctggctccctttgtctgaaaagcgtggatgcgagccatcgtgtcttacatatggccaaacattcgctgacggaaccgatctctgcaggagcgcactcggccacgccctgcctgtcgccgctcctggcgcgcgtcactgcttcaacatatcgataagtgccgtcccccgcccacgtccggggcgcaggggtagagaagcccctagcaggcggtctcgcagccccagaacatctattttggacgctgccggctccggctcagggagcggttccggctcaggtccatag

SEQ ID NO: 132214 - DNA, 618 bp, synthetic construct
  misc_feature 1..618: note = Description of Artificial Sequence: Synthetic coding sequence
  source 1..618: mol_type = other DNA
atggatgaagctctagaaacccagctgaaaacctcacgcggacggttcagcgctacagaatcccttcccacactcgagctcttgagccaggtggatatggactgtcgggtccacatgcgacctatcggtctgacctgggttctgcaactgacacttgcatggatattactggaggcttgcggaggcagccgccctcttcaggccaggagtcagcagcaccatgggcttgccgccgaccttggcaaaggcaagctgcacctggccggaccatgttgtcccagcgaaatggatacaacagagacttctggtccaggaaaccaccctgagagatgcggggtcccctccccagagtgcgaatctttcttggagcaccttcagagggcgctgcgctcacggtttagactgcgcctgctaggtgtgagacaagctcagcctctgtgtgaggaactttgtcaagcctggtttgctaattgtgaagacgacatcacttgtggacccacctggctgcctctgtccgagaaaagggggtgtgagcccagctgcctgacctacggacaggccggagtgcagtggcgtgacctgagcagtatgcagcctcccccacccggattcaagtag

SEQ ID NO: 132215 - DNA, 720 bp, synthetic construct
  misc_feature 1..720: note = Description of Artificial Sequence: Synthetic coding sequence
  source 1..720: mol_type = other DNA
atggcgcgccagctcctgtcacaggtagacatggactgccgtgtccatatgagacccatcggcctcacctgggtgctgcagctgaccctcgcctggatcctgctggaagcatgcggagggtcacggcctctccaggcacgatctcaacagcaccatggcctagcggccgaccttgggaagggcaaactacacttggcaggtccttgttgtccatctgaaatggacaccactgagacatctgggcctggaaaccacccagagcggtgcggcgtgcccagtcccgagtgcgagagcttcttagagcacttgcagcgggccctgaggagtcgttttagactgaggttactgggggtgcggcaggcgcagccactatgcgaggaattgtgtcaggcctggttcgcaaactgcgaggatgacatcacatgtggccctacctggctaccattaagcgaaaagaggggctgtgaaccaagttgtcttacatatggtcagacattcgctgatggaaccgatctgtgtcgatctgctctagggcacgccctgcctgtcgctgcaccaggagcaaggcactgttttaacatttctatttccgccgtcccccgtccgcgccctggacgccggggccgagaggccccatctcgccgcagcagaagtcctcggacttctatactcgatgctgccggctccgggtcaggctctgggtcaggcagcgggccatag

SEQ ID NO: 132216 - DNA, 996 bp, synthetic construct
  misc_feature 1..996: note = Description of Artificial Sequence: Synthetic coding sequence
  source 1..996: mol_type = other DNA
atggctcgcggaggacggggacgacgtctggggcttgcattgggccttctcttagccctggttttggcccccagggttctgcgggctaagcctaccgtccggaaggaacgcgttgtacgcccagacagcgaactgggcgagcgccctccagaggacaaccaatcttttcaatatgaccacgaggcatttctcggcaaagaagacagtaaaactttcgatcagctcacaccagacgaatccaaggagagactcggaaaaattgtggaccggatcgataacgacggcgatggcttcgtgaccacagaagagctgaaaacttggatcaaacgggtgcagaaacgctacatttttgataatgtggccaaggtatggaaggactacgaccgcgacaaggatgacaaaatcagctgggaagaatacaaacaggcaacatacggatactatctcgggaatcctgccgagtttcatgactcctcagatcatcacactttcaagaagatgttaccgcgggacgagagacggtttaaggctgctgatcttaacggcgatctgacagccacacgggaggaattcaccgcttttctgcacccagaagaattcgaacacatgaaagagatcgtggttctggaaactctggaggatatcgacaaaaacggcgatggatttgtggatcaggacgagtacattgctgacatgttttctcacgaagaaaatggccctgagcctgactgggtcctgtctgagagggaacagttcaacgaattcagagacttaaataaggatgggaagcttgataaggatgagattaggcactggattctgccccaggactatgaccatgcacaggcggaggccagacacctggtgtacgagtccgacaagaataaggacgaaaaactaacaaaagaggagattctggaaaattggaatatgtttgtgggatctcaggccactaattacggtgaggacctgactaaaaatcacgatgagctgtag

SEQ ID NO: 132217 - DNA, 87 bp, synthetic construct
  misc_feature 1..87: note = Description of Artificial Sequence: Synthetic coding sequence
  source 1..87: mol_type = other DNA
gagatactggagaactggaacatgtttgtcgggtcacaggccaccaactatggcgaggatctcactaaaaaccatgatgaactgtag

SEQ ID NO: 132218 - DNA, 954 bp, synthetic construct
  misc_feature 1..954: note = Description of Artificial Sequence: Synthetic coding sequence
  source 1..954: mol_type = other DNA
atgaggctcggacccagaaccgctgctctaggcctgctgctcctttgcgctgcggcggctggagcaggcaaggcggaggagctccattatccactgggggagagacgaagcgactacgatagagaggcgctgctgggagtacaagaggacgtcgacgagtacgtgaaactggggcatgaggaacagcagaaacgtctccaggccattatcaaaaagattgacctggacagtgatggcttcctgacagagtctgagctctccagttggatccagatgtcgtttaagcactacgctatgcaggaagccaaacagcagtttgtagagtatgataagaactctgatgatacagtgacatgggatgagtataacattcaaatgtatgatagagtgatcgatttcgatgagaatacagccctggatgacgccgaggaagagagctttcgcaagttgcatcttaaagataaaaagcgatttgagaaagcaaaccaagactccggtccaggcctcagcttggaagaattcattgcctttgagcaccccgaagaagtcgactacatgacggaatttgtgatccaagaggcactggaggagcacgacaagaacggagatggcttcgtcagcctcgaggaatttctgggcgactatcgctgggatcctaccgctaacgaagacccagagtggattcttgttgaaaaggacaggtttgtgaacgattatgataaagataacgatggcagactcgacccacaggagctgctgccctgggtggtgcctaacaaccagggaatcgcacaggaggaggccctgcatcttatcgatgagatggatttgaatggcgataagaagttgagcgaagaagagattctggaaaaccccgatctctttctcacttccgaggccacagattacggaaggcaactgcacgacgattatttttaccacgatgaactctag

SEQ ID NO: 132219 - DNA, 2331 bp, synthetic construct
  misc_feature 1..2331: note = Description of Artificial Sequence: Synthetic coding sequence
  source 1..2331: mol_type = other DNA
atggccgcccccggtgacccccaagatgaactgctgcctctggctggtccaggatcccaatggctgcggcataggggcgaaggagaaaatgaagctgtgacaccaaagggagcaacccccgctccacaggctggtgagccatcgcctggacttggagcacgcgccagagaagccgcaagcagggaggccggtagcggacccgctcgtcaatccccagtggccatggagaccgcttcaaccggcgtcgctggagtctcaagtgcgatggaccacaccttttcaaccacatcaaaggacggggagggatcctgctacacttctctcatctccgatatttgctaccctccgcaagaggattccacatattttacaggaattctgcagaaggaaaacggtcatgtgacaatttctgaaagtcccgaggagctggggacgcctggtccatctctgccggatgtccctggaattgaatccaggggcctgtttagctccgatagcgggattgaaatgacccccgctgaaagcactgaagtcaataagattctcgccgacccactggatcaaatgaaagccgaagcttataaatatatcgatataacacggcctgaggaggttaagcaccaggagcagcatcacccggagcttgaggacaaagacttggacttcaagaataaggacaccgacataagcataaagcctgagggtgtcagagaaccggataaaccggcacccgttgagggcaagatcatcaaagaccacctcctagaagagagtacttttgccccatatatcgatgacctgagcgaggagcagcgccgggcgccacaaattactacacccgttaaaattactctgaccgaaattgagccgagtgttgaaacaactacccaggaaaaaactcccgagaagcaggatatatgtctcaagccctcccctgacaccgtgcccactgtgaccgtgtcagagccagaggacgatagtcctggctcaattacacctccatctagtgggaccgaaccgagcgcagccgagtctcaaggcaagggtagcatctcagaagatgagctcataaccgccatcaaagaagccaaaggtttatcttatgagaccgcggaaaatcccaggcccgtaggccagctcgccgatcggcccgaggttaaggcccgtagcggtcccccaaccattccatctcccttggaccacgaggccagtagtgcggagtctggggactcagagatcgagttagtcagtgaggacccaatggccgccgaagatgccttgccttctggatacgtgagtttcggccacgtgggaggtcctcctcctagtccagccagtcctagcattcagtacagcattctgcgtgaggagagggaagccgaactggacagcgaactaatcatcgaatcttgtgatgcaagttcggcaagtgaagaatcaccaaagcgtgagcaggattctcctccaatgaagccaagcgctctggatgccatacgcgaagaaaccggagtgagggccgaagagagggctccctcgcgcagaggcctggccgagcctggttcctttctggactatccgagtacagagccccagccaggcccagagctgccacccggtgacggggcattggagcctgagacaccgatgcttccccgtaagccggaggaagatagctcaagtaaccagagccctgcagccaccaaggggccaggccccttggggccaggtgctccaccaccgctgctctttctcaacaaacaaaaagctattgatctgctttactggagggatattaaacagactgggatagtatttggaagctttctcctgttattgttctcattgacccagtttagcgtggtgtctgttgtggcttatctagccctggccgctctatcggctacaatctctttccgtatctacaagtctgtcttgcaggctgtgcagaaaacagacgaaggccacccatttaaggcttatctggaactagaaattacactctcccaggaacaaatccagaagtacactgactgtctccagttctatgttaacagcacacttaaagagctgcgacggttgttcctggttcaggatctggttgactccctcaaattcgcagttttgatgtggctgctcacctatgtgggcgccctgtttaacggattgaccttgctgctcatggccgtcgtgtccatgttcactctgcctgttgtttacgtcaagcaccaggctcagatcgaccagtacctgggcctcgtccggacacacatcaacgcagttgtggcgaaaatccaggccaaaattcctggggccaaacgccacgccgagtag

SEQ ID NO: 132220 - DNA, 627 bp, synthetic construct
  misc_feature 1..627: note = Description of Artificial Sequence: Synthetic coding sequence
  source 1..627: mol_type = other DNA
atgcaagctacagcggattccactaagatggattgcgtgtggagtaactggaaatcccaggccattgacctcctgtattggcgtgatatcaagcaaacaggcattgtctttgggtcttttctgctgttgctgttcagcctgacacagttctctgtggtttcagtggtcgcttacttagctttggctgctttgtccgccacgatatctttccgcatttacaagtctgtcctgcaagctgtccaaaaaacagatgaggggcaccccttcaaagcctacctagagctggagatcactttgtctcaggaacagatacaaaaatacaccgactgccttcagttttacgttaactctaccctcaaagaactgcgccggcttttcctggttcaggacctggttgactccctgaaatttgctgtacttatgtggctcctaacctacgtaggagccctttttaatggcctgaccctgttactgatggctgtggtcagcatgttcacactgcccgtggtatacgtcaagcaccaggcacagatagatcaatacctgggattggtgagaacacatataaatgccgtggttgctaagatccaggcaaaaattcccggagctaaaaggcacgccgaatag

SEQ ID NO: 132221 - DNA, 1071 bp, synthetic construct
  misc_feature 1..1071: note = Description of Artificial Sequence: Synthetic coding sequence
  source 1..1071: mol_type = other DNA
atggccgcggaggatgccttacccagcgggtacgtgtcttttggccatgttggtgggccacctccctccccagcctctccctccatccagtactctatcctacgagaggaacgcgaggccgagttagatagtgaactaatcatcgagtcatgtgacgcctcatctgcctcagaagaatccccaaaaagagagcaggatagccctccgatgaagcccagtgccttggacgccataagagaagaaaccggcgtgcgggctgaggaacgcgcccccagtagacggggcctggcagaacctggctcatttctggattacccgagtaccgagccacaacccggcccggagctacctcctggtgacggagctctcgagcctgagacacccatgctcccaaggaagcctgaagaagattcatcttccaatcagtcccctgcggctacgaagggtcctggcccccttggaccaggggccccccccccactgctgttcctgaataagcagaaggctatcgacctactttattggagggacattaagcagaccggaatcgtgttcgggagttttctgctactactgttctcacttacccagttctcagtagtgtctgttgtggcctatctggccctggcagcacttagcgcgacaataagcttcaggatttacaagagcgtgttgcaggccgttcagaagaccgatgagggacaccccttcaaggcttatttagagcttgagataactctttctcaagagcagatacaaaagtatacagactgcctgcagttttatgtaaactccacactgaaggaactcaggaggctatttctcgtacaggatctggtggatagtttgaagtttgctgtactcatgtggttattgacatacgtgggcgccctatttaacggcctcactttactgcttatggcagtggtctccatgttcactctgccagttgtctacgtgaagcatcaagcccaaatagaccagtatctgggtcttgtgcggacacacatcaacgcagtggtggctaagatacaggccaaaatacccggagccaagcgccatgcggaatag

SEQ ID NO: 132222 - DNA, 2109 bp, synthetic construct
  misc_feature 1..2109: note = Description of Artificial Sequence: Synthetic coding sequence
  source 1..2109: mol_type = other DNA
atggaaactgcctctacgggcgtggctggagtcagctcggctatggaccatacattttcaacgacatccaaggacggagaaggctcatgctacacatcccttatatccgatatctgctaccctccgcaggaagattctacctattttaccgggatactgcagaaggagaacggccacgtgacaatctctgagtcccctgaggagttgggcacacctggaccatcattgccagatgtgcctggcattgagagcaggggactgttttcaagtgatagtgggatcgaaatgacccctgctgagtctactgaagtaaataagatattagcagaccccctggaccagatgaaggctgaagcgtacaagtacattgatattacccggccagaggaagtaaaacatcaggagcaacatcaccccgaactagaggataaggacttagatttcaaaaataaggatactgatattagtattaaacccgaaggagtgagagaacccgataagccagcaccagtcgaagggaagataataaaggatcatttactggaagaatctacatttgccccctacattgacgacctcagcgaggagcagcgacgtgctcctcagatcacgacgccggtgaaaatcacactaacggaaatcgagccttcagtcgaaactaccacccaggaaaaaactcctgagaaacaagacatttgtcttaaacccagccctgatacggtgcctacagtaacagtgagtgagcctgaggacgacagccccggaagtattacacctccatcttcaggtaccgaaccatctgcggctgagtctcaggggaagggcagtatctcagaggatgaactgatcacagccatcaaagaagccaaaggactgtcatatgagactgccgagaaccctaggccagtgggacagctagcagaccgcccagaggtcaaagcacggagcggtcctccaaccatacctagtccactggatcacgaggcttcttcagcagagtcaggagacagcgagattgagctggtaagtgaagaccctatggccgcagaggatgctttgccctctggctacgtgtcgttcggccacgtggggggtccccctccctccccagcttctccgtctattcagtattctatactgagggaagaacgcgaggccgagctcgattcagagctaattatagagtcctgcgatgccagttctgcctccgaagagtcccccaagagagagcaggattcccctcccatgaaacccagcgccctagatgcgattcgggaagaaaccggggtgagagcagaggagcgcgctccatcacgtagagggcttgccgagccaggaagttttctggactatcccagcaccgagcctcagcctgggccagaactgcccccaggggatggtgccctggaaccagaaacacccatgctccctagaaagcctgaagaagatagctcatcaaaccagtcacccgctgccaccaaagggcccggaccactgggccccggagccccgccgcccctgctgtttctgaataaacagaaggccatagatctgttgtattggcgcgatattaagcagaccggcatcgtgttcggctccttcttgctgcttttgttcagcctcacgcagttcagcgtagtgtctgtcgttgcctatctggcgctggcagccctgagtgccacgatctccttccgcatctacaaatcagtcttgcaagcggtccaaaagacggacgagggacacccgtttaaggcctacttagagcttgaaatcaccttatctcaagagcaaatccagaagtataccgactgcttgcagttctacgtgaacagcaccctgaaggagctgcgccgcctttttctcgttcaggacctagtcgactccctgaaatttgcggtacttatgtggctgctgacctacgtgggcgcactcttcaatggcctgacgttgctcctgatggcggttgtgtctatgtttactctgcccgtggtgtacgtaaagcaccaggcccaaattgaccagtacctgggccttgttagaactcacatcaatgccgtggtggcgaagattcaggccaagattccaggggcaaaacggcatgcagaatag

SEQ ID NO: 132223 - DNA, 1638 bp, synthetic construct
  misc_feature 1..1638: note = Description of Artificial Sequence: Synthetic coding sequence
  source 1..1638: mol_type = other DNA
atgggccaagtcctccccgtgtttgctcattgtaaagaggcccccagcactgcttcatcaaccccggacagtacggaaggaggtaatgacgactcagacttccgcgagctccacaccgcccgcgaatttagcgaagaagatgaagaggaaaccaccagccaggattggggcactccaagggagctgaccttttcttatatcgctttcgacggcgttgttggttccggaggaagaagagacagcactgctcgccgtcccaggccacagggacgttcagtctctgagccccgcgaccagcacccacagccctccttaggggactccctggagagcattccatccctatcacaatcaccggaaccggggaggagaggggatccagacactgctccaccatccgaacgtccattggaggatctgaggttgcgacttgaccatctgggctgggtggcaagggggacaggctcaggcgaagattcaagtacatccagctctactcctctggaggatgaggagccacaagaaccaaaccgcctagagaccggggaggcaggagaagagctggacttaagactgaggttggcacagcctagctcccctgaagttttgacaccacagttgtctcctggctctgggacacctcaagcgggtaccccctccccgtctcggtctagggattcaaacagcggtcctgaggagcccctcctggaggaggaagagaaacagtggggcccccttgagcgagaacctgtacggggccagtgcctggacagcaccgaccagctggagttcacagttgaacctagactgcttggaaccgccatggagtggctgaaaacctcccttttactggctgtctataaaacggtcccaattcttgagctcagcccacctttgtggacggctattgggtgggtccagcgcgggccaacccctcctactcctgtcttgcgggtcctgctgaagtgggccaagagcccacgatcaagcggagtgcctagcctctccctgggcgcagacatgggctctaaagtggccgatctgctgtactggaaagacaccaggacctcaggagtggtgtttacaggcctgatggtgtcccttctctgcctgttacacttctcaattgtttcagtggccgctcatttggccctgctgctcctctgcgggactataagcctgcgtgtgtacagaaaagtgttgcaggctgtgcataggggggacggtgccaaccctttccaagcctatctcgacgttgatctgacgctgactcgcgagcaaaccgaaaggctctcccaccagattacgtctcgtgttgtgtccgctgcgacgcagcttaggcacttctttctggtggaagacctggtggactccctgaagctggccttgcttttttatatcctgacttttgtgggggccattttcaatggcttaacactccttattctcggcgtaattggcttgtttacaatcccccttttataccgacaacatcaagcacagattgatcaatatgtagggctggtgactaaccagctgtcccacatcaaagccaaaattagggccaagatccctgggaccggggctctggctagcgccgctgcagccgtttccggctcgaaggccaaagctgagtag

SEQ ID NO: 132224 - DNA, 1419 bp, synthetic construct
  misc_feature 1..1419: note = Description of Artificial Sequence: Synthetic coding sequence
  source 1..1419: mol_type = other DNA
atgggtcaagttctccctgtgttcgcacactgtaaagaggcccccagcactgcttcctctacccccgacagtactgagggtggaaacgacgactccgattttcgcgaattacatacggccagggaattcagtgaagaagatgaggaagaaacaaccagtcaggattgggggaccccaagggaacttacattctcgtacattgccttcgacggggtcgtgggaagtgggggccgtagagactccactgctcgacggccacgcccccaaggacgatctgtgtccgaaccgagagatcagcacccccaaccctccctcggtgactccctggaatcaattccaagcctctcacaatcacctgagcctggcagaagaggggaccccgacactgctccacctagtgaaagaccactcgaagacctgcgcttgcgcctcgatcatcttgggtgggttgcgcggggaacgggctcaggcgaagattccagcacgtcttcctccacgcctctggaagacgaggagcctcaggagcccaatcgattagagacaggcgaggctggagaggaattagatttgcgtctccgccttgctcaaccgtcatcccccgaggttttgacccctcagttatctcccggatcgggaacgccgcaagctggtacaccctccccaagtcgcagccgcgactcgaacagcggaccagaggagcctctgctggaggaggaggagaagcagtgggggccgcttgagcgagagccagtaaggggccaatgcctcgactcaaccgaccagctggaattcaccgtcgaaccccgcctattggtcgcagacctcttgtattggaaagacacacgcacctccggagttgtgttcacaggcctgatggtatctcttctctgtctgctgcacttctccatcgtgtccgttgctgcccatcttgcgctgctgctgttgtgtggcacgatttccctgcgagtgtaccgcaaagtgctgcaggcagtccacaggggggacggcgctaacccctttcaggcttacctcgatgtagatctaaccctgacacgggaacaaacagaacgactgtctcaccagatcacctcgagggtggtttctgctgccacccagctcaggcattttttcctcgtggaggacctcgtggattccctcaagctggccctgctgttttatattttgaccttcgtgggggccattttcaatggcctgacgctgttgatcctgggcgttattgggctgtttacgatcccactgctttaccggcagcatcaggcccagatcgaccagtatgtcggcctggttaccaatcagctttcccacatcaaagcaaaaatcagggcgaaaatccctggaactggcgcgttggcaagtgccgctgccgctgtgtccgggtcaaaggcaaaggccgagtag

SEQ ID NO: 132225 - DNA, 618 bp, synthetic construct
  misc_feature 1..618: note = Description of Artificial Sequence: Synthetic coding sequence
  source 1..618: mol_type = other DNA
atggggtcgaaggtcgctgatcttctgtattggaaggatacgaggacctccggggttgtgtttactgggctgatggtgtccctgctttgtctgctgcatttttcaatcgtgagtgtcgcagcacatctggcgctgctactgctgtgcggcacaatttctttacgggtatatcgcaaggtgcttcaagccgtccatcggggagatggcgcaaacccattccaggcctatttggatgtcgatctcacattgacccgcgaacagacggagaggctgagccaccagataaccagcagagtggtgagtgctgccacccagctccgccatttctttctcgtggaggacttggtggacagcttgaagttagcccttcttttttatattttaaccttcgttggagctatctttaatggactgacgttgctaattctgggggtgattggtctgttcaccatccctctgctttatcgccagcatcaggctcagattgatcagtacgtgggactggttacaaaccagctgagccatatcaaagctaagattagggccaaaattccaggaacaggagccttagccagcgcagcagccgccgtctccgggtccaaagccaaggccgagtag

SEQ ID NO: 132226 - DNA, 3042 bp, synthetic construct
  misc_feature 1..3042: note = Description of Artificial Sequence: Synthetic coding sequence
  source 1..3042: mol_type = other DNA
atggcagaacccagcgcagccacgcagtcccattcaataagcagcagttccttcggtgcggaaccgagcgctcccgggggcggcggtagcccgggagcttgtcccgcactcgggactaagagctgctcttcatcatgcgcagagggcctcagttccctgtgctctgatgagccttcctccgaaattatgacaagctctttcttgagctccagtgaaattcacaacacgggtttgacaatcctgcatggagagaagtcccacgtccttggcagccagcccattctggctaaggaaggaaaggaccacttggacctcttggatatgaagaagatggaaaagccccagggcacgagtaataatgtgtcagacagctccgtctccctggctgcaggggtgcactgtgaccggccttccattcccgctagcttccctgaacaccccgcctttctgagtaagaagatcggccaggttgaagaacagatagacaaggagactaagaaccccaacggcgtgtccagcagggaggccaagaccgcgctcgatgcagacgatcgattcactctgttgaccgcacagaagccccctacagagtattccaaggtggaaggaatctacacttactctctgagccctagtaaggtatcaggggatgatgtgatcgagaaggattcccccgaatcacccttcgaggtcattatcgataaagcggcattcgataaggagtttaaagattcctataaggaatcgactgacgatttcgggagctggagcgtgcataccgataaggagtcctctgaagatatctcggaaactaacgataaactgttccccctcaggaacaaggaggccggcaggtaccctatgagtgctctgctcagccggcaattttcacacacaaacgcggcactggaagaagtctcccgttgcgttaacgatatgcataacttcactaatgagattctgacatgggatctggtgccacaggtaaagcagcaaaccgataaaagctcagattgtataactaaaacaaccggactggatatgtcggaatacaactcggaaatcccggtagtgaacttaaaaactagcacccaccagaagacacccgtgtgtagcattgatgggtctacccctatcaccaagtctacaggagattgggctgaggcctctctgcaacaagagaacgctattaccgggaagccggtgccagacagcctgaattcaaccaaggagttctcaataaagggagtgcaaggcaacatgcaaaaacaggatgacacattggctgagctcccgggttccccgcctgaaaaatgcgacagtctcgggagtggagtggcaacagtgaaggtcgtgcttcccgatgaccatctgaaagatgagatggactggcagtccagcgccctgggcgaaatcaccgaggccgactcctcaggagagtcagacgacacagtgatagaggacattaccgctgacactagtttcgaaaataataagattcaggcagagaagccggtgagcattccatctgccgtcgtgaagacaggcgagagagaaataaaagaaattccatcctgtgagcgggaagaaaagacaagcaagaactttgaggagctggtctcagactctgaactccaccaggaccagcccgatatcttgggaaggagtccagcttctgaagccgcatgtagcaaggtaccagacacgaatgtctctctagaggacgtgtccgaagtggccccagagaagcccataacaactgaaaatcctaaactgcccagcaccgtctctccgaacgtcttcaatgagacagaatttagcctgaatgttactacctccgcttatctggagtctctccacggtaagaatgtgaaacacattgacgattcatcgcctgaagatctgattgccgctttcacggagactcgggacaagggtatagtcgatagtgagcgcaacgcgttcaaagcgatctccgagaagatgacggatttcaaaacaactcctcccgtggaggtcttacacgagaacgagagtggcggctcagaaatcaaagacatcgggtccaaatactccgagcagagcaaagagacaaatggctccgagcccctcggggtttttccaacacaaggaacaccggtggccagccttgatctagagcaggagcagctcactattaaagccctgaaggagctcggggagaggcaagttgagaagtctacctcagctcagagggatgccgaactcccaagcgaggaggtcttaaagcagacctttaccttcgccccagagagttggcctcagcggtcttacgatatcttggagcggaatgttaaaaatgggtcagacctgggcatctcacagaagcctataaccatcagggagactacacgcgttgatgcagtgtcttccctgtcaaaaacagaactcgtgaaaaaacatgttctggccaggctcctcactgactttagcgtccatgacctgattttttggcgggacgtgaagaagactgggtttgtatttgggaccacgctgattatgctcttgtccctggccgcattctcagtgatcagcgtagtttcctacctgatactcgctctgttatctgtgactatatcttttcggatttacaagtccgttatccaggccgtgcagaagagcgaggagggccacccatttaaagcttatctggatgtcgacatcaccctcagtagcgaggcctttcacaactatatgaatgcagccatggttcacattaatagggcactcaagctcattatacggctgtttctcgtagaagatcttgtggatagtctcaaacttgcagttttcatgtggctgatgacatacgtgggtgctgtgttcaacggcataacattgctgatcctagccgagctcttgattttctcggtgcctattgtgtacgagaaatacaagacccagatcgaccactatgtggggatcgcacgtgaccagaccaagagcatcgtggaaaaaattcaggcaaaacttcctgggattgcgaagaaaaaagccgaatag

SEQ ID NO: 132227 - DNA, 726 bp, synthetic construct
  misc_feature 1..726: note = Description of Artificial Sequence: Synthetic coding sequence
  source 1..726: mol_type = other DNA
atggcagaaccatctgctgctacccagtcacactctattagcagcagctctttcggggctgagccatcagctcccggcggaggaggctcccctggtgcatgcccagctcttgggaccaagagttgtagcagctcctgtgctgtgcatgacctgattttctggagagatgtaaagaagactgggttcgttttcggcaccacactaatcatgctgctgtcactggctgctttctctgtgatctcagtggtgtcttatttgatcctggctctgctgagcgttacgatcagtttccggatttataagtccgtgatccaggccgtacagaagtcggaagaaggccacccctttaaggcctacttggatgtcgatattacactgagttctgaggccttccacaactatatgaatgccgccatggttcatataaatcgggctctgaagcttattataagactattcttggtagaggacttggtagattccctcaaattagccgtcttcatgtggttaatgacttatgtaggtgcagtctttaatggaattacactgctgattctcgctgaactgctgatattttccgtgcctattgtgtacgagaagtataaggaccccagcaaaaccccttggaacaggcaaaaaaaaggccgcatatccacctggaaacccgaaatgcagcagctgcttaagcaccatctcattgtcatcactagtctcctggttctgtag

SEQ ID NO: 132228 - DNA, 645 bp, synthetic construct
  misc_feature 1..645: note = Description of Artificial Sequence: Synthetic coding sequence
  source 1..645: mol_type = other DNA
atggcagaaccaagcgcagcaacccagagccatagcatttcttcgtctagctttggtgccgagccttccgccccagggggaggtggctctcctggcgcttgtccagctctcggaactaaatcttgcagttctagctgtgctgtgcacgacctgatcttctggagggatgttaagaagaccggatttgtctttgggacaacattgatcatgcttctctcactcgcggctttttcagtgatttcagtagtgtcctatctcatcttagcacttctctctgtgaccatttccttccgcatatacaaatctgtcatccaagcagtacagaaaagcgaggagggccatcccttcaaaccccggttaataaccatgctggcctccccagagatacggccgagccaactgctgaaaaggagcaaacaaaatagcttggagtcccctaagaagcggcaaaacaaatatatggagactaggaatgccactgttaccaaaacgccttttaatagctataatgtcgtaacctgcactatgaaggaaaacactcaatgtcagctggagcccgcattccaggccttctttctgatctggtgtttccttccttctttccccttcaaccctcaataccaagcccagaagcttatggattag

SEQ ID NO: 132229 - DNA, 768 bp, synthetic construct
  misc_feature 1..768: note = Description of Artificial Sequence: Synthetic coding sequence
  source 1..768: mol_type = other DNA
atggctgaacccagcgctgccacacaatcacacagtatcagttcttccagtttcggcgccgaaccaagcgcccccggcggcggcgggtccccaggagcttgcccggcattgggcactaagagctgtagttcgagttgtgctgacagttttgtgtcaagtagttcaagccaacctgtgagcttatttagtacaagccaggtgcacgatcttatcttttggagggacgtcaaaaaaactggctttgtcttcggaaccactcttatcatgctactgtcattggcagccttctctgtgataagcgtcgttagctatttaatactggcgctgctgtccgttaccatcagttttaggatttacaaaagcgtgatccaggctgtacaaaaatcagaagaagggcaccctttcaaggcctatctggatgtagatattacactctctagcgaggctttccataattatatgaacgctgccatggttcatattaaccgagctctaaagcttattatcaggttgttcctggtggaggacttggtggactccctaaaactagccgtcttcatgtggctcatgacatacgtcggcgcggtattcaacggtatcacgctcttgattctggccgagctcctcatcttcagtgtcccaatcgtctacgaaaaatataaaacccagatcgatcactatgtgggcatagcacgagaccagaccaagagcatcgttgaaaaaattcaggcaaagctacctggcattgctaagaagaaagccgaatag

SEQ ID NO: 132230 - DNA, 3099 bp, synthetic construct
  misc_feature 1..3099: note = Description of Artificial Sequence: Synthetic coding sequence
  source 1..3099: mol_type = other DNA
atggcggagcccagcgctgcaacccaatcacacagcatatcttcaagcagcttcggagcagaaccgtcagcgccaggtggaggcggctcaccaggcgcatgcccggccctcggtactaaaagctgttcttctagttgcgcagattcgttcgtttcttcctcctcatcccagcccgtgtcactcttctcgacctcccaagaaggcctgtccagcctgtgctcagacgaaccatcgagcgagattatgacatcgtccttcctgagctcctccgaaattcataacacaggattaacaatcttacacggggagaagtctcacgtgctcgggtcgcagcctattttggcaaaagagggcaaggatcatcttgatctgctcgatatgaagaaaatggagaaaccacaggggacgtccaacaatgtttcagacagttcggtgtctctggcagccggcgttcattgcgaccggccttctattcctgccagcttcccagagcatcctgcttttctatctaaaaaaatcggtcaagttgaggagcaaattgacaaggagacgaaaaacccaaatggagtgtcaagccgcgaggccaagactgcactggacgctgatgacagatttactctactaacagcccagaagccacctactgaatactcgaaagtcgagggaatatacacctatagcttgagcccaagtaaggtttcaggagatgatgtgatcgagaaagatagccctgagtcaccctttgaggttatcattgataaggcagcttttgataaggaatttaaggattcctacaaagaaagtacagacgactttggatcttggtctgtacacacagataaagaatcgtccgaagacatttcagaaaccaatgataaactgtttcccctccgcaataaggaggccggcagatacccaatgagtgccctgctttccagacagttttctcacaccaacgccgcacttgaggaggtgtcccggtgcgttaatgatatgcataacttcaccaatgagatcttaacctgggacctggttcctcaggtcaagcagcagaccgacaagtccagtgactgtattacgaagacgaccggtttggatatgagcgaatataattccgagattcctgtggtgaatcttaaaaccagcactcaccagaaaaccccagtctgcagtattgacggctccaccccgatcacaaaaagcaccggcgattgggccgaggcatcactgcagcaggagaatgcaatcaccggaaagcccgtccctgatagtttgaacagtactaaggagtttagcattaagggcgtccagggaaatatgcagaagcaggacgacaccttggccgaacttcctgggagtcctcccgagaaatgtgatagtcttgggtctggagtggctaccgtgaaagtagtgttacctgatgaccatctaaaggatgaaatggactggcagtcctccgctctcggcgagatcacggaagcagattcctccggcgagtccgacgacaccgttatagaagacattactgccgatactagcttcgaaaacaataagatacaagcagagaagccagtcagtattccttctgctgtggttaagacaggggaaagagagattaaagaaataccatcctgcgagagagaagaaaagacctcaaaaaatttcgaggagctggtgtctgactctgagctgcatcaggatcaacctgatatattgggacggagtcccgcctctgaggcggcttgctccaaagtgccggacactaacgtgagcctggaggacgtttccgaagtcgctcctgaaaagcccattacaactgagaaccctaagcttcctagcactgttagtccgaacgtctttaatgagaccgagttctccttgaacgtaacgacttctgcatacttggaaagtcttcacggaaaaaatgtgaagcatattgatgattcctctcctgaggatcttatcgctgccttcaccgaaacaagagataaagggattgtcgacagtgagagaaatgcttttaaagccatttccgaaaaaatgacagatttcaaaaccacaccacctgtggaagttctccacgaaaatgaatctgggggctccgaaatcaaggatattggatccaagtactcagaacagagtaaggagaccaacggctctgagcctctcggagtgtttccaactcaggggactcctgtagcgtccctggacctggaacaggagcaactgactattaaagcccttaaggagctgggggagcgacaagtcgaaaagtcgacttctgcacagagagatgccgaacttccttcagaagaggtgctcaagcaaacattcacgttcgcacctgagtcttggccacagagaagctacgatatcctggaacggaacgtgaagaatggatctgatctgggtatatcccaaaagccgatcaccattcgggaaactacgagggttgacgcagtgagcagcctctcgaagactgaacttgttaaaaagcacgttctcgcccgcctcctgactgatttcagcgtgcacgatttaatattctggcgagatgtcaagaaaactggctttgtcttcggaaccactctaattatgctcttgtcccttgccgccttctccgttatctcagtcgtgtcttacctgatcctggcgctgctgtctgtaacgatctcattccgaatctacaaatccgtgatccaggcagtccaaaagagtgaggagggccacccatttaaagcctacctggacgtggacatcactttgtcctctgaggcatttcacaactacatgaacgctgccatggtccatatcaatagagctctgaaattgataatcagattatttctagtagaggatctggtagattcgctgaagctagccgtttttatgtggttaatgacttacgtcggggctgtgttcaacgggataaccctgcttattctggctgagctcctcattttttcagtgcccattgtctacgagaagtacaagactcagattgatcactacgttggcatagcacgagatcagaccaaatctatcgtggagaagatacaggcgaaactgccagggattgctaaaaaaaaggctgagtag

SEQ ID NO: 132231 - DNA, 372 bp, synthetic construct
  misc_feature 1..372: note = Description of Artificial Sequence: Synthetic coding sequence
  source 1..372: mol_type = other DNA
atggcagaaccatctgccgccactcagtcgcactccatttcgagcagttctttcggtgcagagccaagcgcacccggcggagggggctcccccggtgcgtgcccggccctgggaactaagtcatgttccagttcatgtgccgtccacgatctgatattctggcgcgacgtgaagaaaacaggttttgtattcggcaccaccctaataatgctgctatcactcgctgccttttcagtgatttcagtggtatcatatctgatccttgccctgttatccgtgacgatctcctttaggatttataagagcgtgatccaggcggtgcagaagagcgaggaaggacacccatttaactggctgagttcctgcgggtag

SEQ ID NO: 132232 - DNA, 711 bp, synthetic construct
  misc_feature 1..711: note = Description of Artificial Sequence: Synthetic coding sequence
  source 1..711: mol_type = other DNA
atggccgagcctagtgccgccacccagagccactccatttcttcctctagcttcggggctgaacctagcgccccgggtggcgggggcagccccggggcttgcccagcgctaggcacaaaatcatgcagcagctcttgtgcggtgcatgacctgatcttttggcgggacgtgaagaagaccggcttcgtattcggaacaaccctgattatgttgctgtccttagctgcattctcagtcatcagtgttgtctcatacctgattctagctctgctgagtgtgactatcagctttaggatttacaagagtgtgatacaggccgttcaaaaatccgaggagggacacccatttaaggcttatctcgacgtggacattactctaagttctgaagcttttcacaactatatgaatgccgcgatggtgcatattaacagggccctgaagctgatcatccgcctgtttctggtggaagacctggtggatagccttaaactcgcagtgttcatgtggctaatgacttacgtgggcgcagtgttcaacggtatcactttgctcatcctagctgagctcttgatcttcagtgtgcctattgtgtacgagaagtacaagacccagattgatcactacgtcggtattgcccgagaccagacgaaatcgatcgttgaaaagatccaagcaaagctccccgggatcgccaaaaagaaagctgagtag

SEQ ID NO: 132233 - DNA, 1122 bp, synthetic construct
  misc_feature 1..1122: note = Description of Artificial Sequence: Synthetic coding sequence
  source 1..1122: mol_type = other DNA
atggaggacctagaccagtctcccctggtgtcttcctctgatagccctccccgccctcagcctgcctttaaatatcagtttgttcgcgaacctgaggacgaggaagaggaagaagaggaagaagaagaagacgaagatgaggacctggaagagctggaagtactagagaggaagcctgctgctggcctttcagccgcacctgttcccactgccccggcagccggggcccctctgatggacttcggcaatgacttcgtgccccctgccccaaggggtcctcttcctgccgccccccccgtggctcctgaacgacagccctcctgggatccaagccctgtgagttcaaccgtcccagcccccagcccactgtcagccgcggctgtctccccctcaaaactaccagaggacgatgagcctccagcccggcctccacccccacccccagctagtgtgtccccgcaggctgagcctgtgtggacacctccagcacctgcacctgctgcgcccccctccactccggcagccccaaaacgtcgtgggtcctcaggatctgttgtggttgatctcctatactggcgcgacataaagaaaacgggagtggtttttggtgcctccttattcctgcttttatcgctcactgtgttcagcatcgtgtccgtgacggcctatatcgctttagcattgctgtccgtgacaatctcattccggatctataagggcgtgatccaggccatccaaaagtctgacgagggccaccccttccgcgcctacctggaaagcgaggttgcaatctccgaggaactggtccaaaaatacagcaattctgcccttggccacgtgaattgcaccatcaaggagctccgtcggcttttcttagtcgacgaccttgtcgactcactgaagttcgcagtgcttatgtgggtatttacgtacgttggcgccttatttaatgggctcactctgcttattctggccctcattagtttattcagcgtccccgtgatctacgagcgccatcaggctcaaatcgaccattacctcgggctagcgaacaagaacgtgaaggacgccatggccaagatccaagcgaaaatccccggtcttaaacgcaaggctgaatag

SEQ ID NO: 132234 - DNA, 3579 bp, synthetic construct
  misc_feature 1..3579: note = Description of Artificial Sequence: Synthetic coding sequence
  source 1..3579: mol_type = other DNA
atggaggatcttgatcaatcacccttggtcagttcctcagacagcccgccgcgtccacaacccgcttttaaatatcagttcgtgcgcgaaccggaggatgaggaggaagaggaggaggaggaggaggaggatgaggacgaagacctggaggaactggaagtccttgagagaaaacccgccgccgggttatccgcagcacctgttccgactgctcctgcggccggcgcaccacttatggatttcggtaatgattttgtcccacccgcgcctagagggccattaccggccgcccctcctgtagccccggaaaggcagccttcatgggacccatctcccgtttctagtacggtccctgccccctcccccctgtcagcagctgccgtgtccccttctaaactgccggaggatgatgagccccctgcccgacctccacctcccccacccgcaagtgtaagtccacaggccgaacccgtgtggaccccaccagcccctgcacccgccgcaccaccgtcaactccggctgctcccaagaggcgtgggtcttctgggagtgtggatgaaaccctgttcgccttgcccgcagcatcggagccagttataaggagcagcgctgagaatatggatcttaaggagcagccaggaaataccatctctgccggccaggaggatttcccgagcgtcctgcttgaaaccgctgccagccttccgagcttaagtcctttatccgcagctagcttcaaggaacacgagtacttgggcaacttgtctacagtgctacccacagaagggaccctccaggagaacgtcagcgaggcctcaaaagaggtcagcgagaaggccaaaacgctcctgatcgatagagatcttaccgaattctctgaactggaatactctgaaatgggtagttccttttctgtgagcccaaaagcagaatctgccgttattgttgctaaccccagggaggagatcatcgtgaaaaacaaagatgaggaagaaaagctggtctctaataatattctgcataaccagcaagaattgccaactgcactgacaaagctcgttaaagaggatgaagtggtctcctcggagaaagccaaagactcctttaatgaaaagagggtcgcggtggaagcccctatgcgcgaagagtacgccgatttcaagcctttcgaacgtgtgtgggaggtgaaggatagtaaggaagacagcgacatgctggctgcggggggaaaaatcgagagtaacctggagagcaaggtggataaaaagtgtttcgctgactccctagagcaaacaaaccacgagaaagatagcgaatcctctaatgacgacaccagttttccttcaactcccgagggtatcaaggatcgaagcggcgcctatattacatgtgcccccttcaaccccgccgctactgaaagcatcgccacaaatatctttcctctgctcggcgacccaacgagtgagaataagaccgatgagaagaaaattgaggaaaagaaagcccaaattgtgactgagaaaaatacttctacaaagacatcaaacccttttctggtcgcagctcaggatagcgaaactgactatgttacaacagacaatcttacaaaagttacagaggaagtcgtagcaaatatgccggaagggctgacacccgatctggtgcaggaagcctgtgaatccgagctgaatgaggtgaccggcactaagattgcatacgaaactaagatggatcttgtccaaaccagtgaagttatgcaggagagtctgtaccctgccgctcagctctgccctagttttgaagaaagtgaagcaactccatcacccgtgttgccagatatcgtcatggaagccccactgaactcagccgtgccaagcgctggagcaagtgtcatacagccttcctcatctcctcttgaagcttccagtgtgaactacgaatccatcaagcacgagcccgagaatcctcccccctacgaagaggcaatgtcagtgtcactgaagaaggtttctggtatcaaggaggagataaaggaacctgagaatataaacgcggctctgcaggagaccgaagcaccatatattagcatagcatgtgacctcataaaagaaacaaaactgagcgccgagcccgcccctgatttttcggattactctgagatggcaaaggtggagcagcccgtccctgaccactcagaactggtagaggatagctcaccagattccgagcctgtggaccttttctctgacgattctattccagatgtaccgcagaaacaggacgagactgtgatgctggtgaaggagagcctcacggaaaccagttttgagtccatgatcgagtatgagaataaggaaaagttgagcgcattgccccccgagggaggcaagccttatctggagtcttttaagctgagcctggataacactaaggataccctcctgcccgacgaagtatcaaccctctccaaaaaagagaagatccccctgcagatggaggagctctccaccgcggtctactctaacgacgacctgttcattagtaaggaagcgcagatcagagaaaccgagacattcagcgattccagtcccatagagatcatcgatgaatttccaactctgattagttctaaaacagatagtttctctaaactggcccgagaatataccgacctggaagtctcccacaaaagtgaaatcgctaatgcgccggatggcgcaggcagtctgccgtgcactgagctgccccacgatctctcactgaagaacatccaacccaaagttgaggaaaagatcagcttttcagacgacttttctaagaatggttccgccacatcaaaggtgctcctgttgccccccgacgtctccgcactggcaacccaagctgaaatcgagagcatagttaaacctaaggtactagtaaaagaagccgagaagaagcttccttcagacacagaaaaagaggataggtcaccttcagccatcttttccgctgagctgagcaagacaagcgttgtggacctcctgtattggagggatatcaagaaaactggtgttgtcttcggggcttccctgttcctgctcttgtctctgactgtctttagcatcgtgagcgtcaccgcctacattgccctcgctctactgagtgtaactatctcctttaggatctataagggggtcattcaggccattcaaaagtcagacgaaggtcatccatttagagcgtatttagagtccgaggtagccatctcggaggagctggttcagaaatatagcaattctgccctaggccacgtgaattgcaccatcaaggagttaagacgactgttcctcgtggacgatctcgtcgattcattgaagttcgctgtactcatgtgggtcttcacttacgttggagccttgttcaacggcttaacactgctaatattggcgctgatctcactcttcagcgtgccggtgatctatgagcggcatcaggctcagatcgaccactacttggggctggccaacaagaatgtcaaggatgcaatggccaagatccaggccaagatccccggcctcaaaagaaaggccgagtag

SEQ ID NO: 132235 - DNA, 2883 bp, synthetic construct
  misc_feature 1..2883: note = Description of Artificial Sequence: Synthetic coding sequence
  source 1..2883: mol_type = other DNA
atggaggacctcgaccagtctcccctggtgtcctcatccgattcgccacccagaccccagcccgcttttaagtaccagtttgtacgcgagcccgaggatgaggaggaggaggaggaggaggaggaggaagacgaagacgaggatctggaagagcttgaagtgttggaacgcaagcagttctctgaacttgagtactcagagatggggtcttctttttcggtttcccccaaagccgaatcggccgtcatcgtggcaaatcctagagaggagattatagtgaaaaataaagatgaggaagaaaaactcgtgtccaataacattctccataatcagcaggaattaccaaccgcgttgaccaaacttgtgaaggaggacgaagtggtctcgtcagagaaagctaaggactcctttaatgagaaaagggttgctgtggaggctcccatgcgggaggagtatgcggactttaaacctttcgagagagtttgggaggttaaagactcaaaggaggatagtgacatgcttgcagcaggaggtaagatcgagagtaacttggaaagcaaggttgataagaaatgtttcgccgactcgctggagcagacaaatcacgagaaggattctgaatctagtaatgatgacacctcctttccgtctacccctgaagggataaaagatcgctcgggtgcatacattacttgcgccccatttaatcccgcagcaacggagtctatagccaccaacatatttcctttgttgggtgacccaacgagtgagaataaaactgatgagaagaagatcgaagagaagaaagcccagatcgttacagaaaagaacacctcaacaaaaacaagcaatcctttcctggtggccgctcaagattccgaaaccgattatgtgaccaccgataatctgaccaaagtgaccgaagaggtcgtggcaaacatgccagaagggctcacccccgatctagtccaggaagcctgcgagagcgagctgaacgaggttacagggactaaaatcgcatacgagacgaaaatggatcttgtacagacatctgaagtcatgcaagagtcattatacccagccgcccagttatgtcctagcttcgaggaatcagaggccaccccctctccggttctcccggacatcgtcatggaggcaccccttaatagcgccgttcctagcgccggggcttccgtaatccaacccagctccagtcccctggaggcgagtagcgtgaactacgagtcaataaagcacgagcccgagaatcctcccccatatgaagaagctatgtcagtgagcttaaaaaaagtatcaggtataaaagaagagattaaagagccagaaaatataaacgccgcgttgcaggagacggaggccccatacataagcatcgcttgcgatttaatcaaagaaaccaagctctcagcggaaccggccccagacttttctgattatagcgaaatggcaaaagtggagcagcccgttccagatcactctgagctggtggaggacagttctcccgacagcgagcctgtcgacttgttctctgacgatagtattccagatgtccctcaaaaacaggatgaaaccgtcatgctagtcaaggagtcactcactgagaccagctttgaaagcatgatcgaatacgagaacaaggaaaaactttcggccctccccccagaaggcgggaaaccctatctcgagtcttttaagttgtccctagataatacaaaggacaccctcctgcccgacgaagtctctaccctcagcaaaaaggagaaaatacccctgcagatggaagaactgagcaccgccgtttactccaatgacgacctgtttatatccaaagaagcacaaattagggagaccgaaacttttagcgattcctctcccattgagataatcgatgaatttcccacattgatttctagtaagaccgacagcttcagcaagctagcgcgcgagtacacagacctggaggtgagccataaatccgagattgccaatgcacctgatggtgcaggaagcctgccctgcactgaactcccccacgatctttctctcaaaaacatacagcccaaagtggaggagaaaatcagtttttccgatgacttctccaagaatgggtccgccacaagcaaagttttgctgcttccccccgacgtttctgcgctggcaacacaagccgaaatcgaatccatcgtaaagcctaaagtgctggttaaggaggccgaaaagaaacttccaagtgatacagaaaaggaagatcggagtccttctgccattttttccgcggagttatctaaaacctccgtcgtcgacttactgtattggagggatataaaaaagaccggcgtagtcttcggcgcctccctatttttgctgctttcactgacggttttcagcatcgtgtccgtgaccgcatatatcgcactagcccttctcagcgttacgatcagctttcggatctacaaaggagtgattcaggccatccaaaagagcgacgaaggtcatcccttccgggcttaccttgagagcgaagtggccatctccgaagagttagtgcagaaatactccaatagtgcactgggacatgtgaactgtacgataaaagagctgcgcagacttttcctggttgatgatcttgttgatagcctgaaattcgctgtcttaatgtgggtattcacatatgtgggcgccttattcaacggccttacattgctgatactcgctctgattagtctgttctcagtgcccgttatctacgaacgccatcaggcacagatcgatcactaccttgggctggcaaataagaatgtgaaggacgctatggctaaaattcaagccaagataccgggtctgaagaggaaggccgagtag

SEQ ID NO: 132236 - DNA, 2961 bp, synthetic construct
  misc_feature 1..2961: note = Description of Artificial Sequence: Synthetic coding sequence
  source 1..2961: mol_type = other DNA
atggacctcaaagagcagcccggtaacactataagtgcagggcaggaagattttccaagcgtgttactagaaactgccgccagccttccatctctgtcacccttatcagccgcctcatttaaggaacacgagtacttgggcaacctgtcgacagtcctgccaaccgaagggacactccaggagaacgtaagtgaagcctccaaagaggtttcagaaaaagctaagactttgctgatagaccgggacctgaccgagtttagcgaacttgagtactccgaaatgggatccagcttcagcgtgtctcccaaagccgaaagcgcagttattgtggccaacccccgcgaagagattattgtgaaaaataaagacgaagaagagaagttagtctcaaataacatattgcataatcagcaagagctgcccacagcactaacgaaactggtgaaagaagacgaggttgtcagcagcgagaaggctaaggattctttcaacgaaaagagagttgccgtcgaggctcctatgagagaagaatacgccgacttcaaaccctttgaacgggtgtgggaagttaaggatagtaaagaagatagcgatatgctggccgcaggaggcaagatcgagtccaatctggaaagcaaggtggacaagaagtgctttgcagatagcttggagcagacgaaccatgagaaagatagtgagagctccaacgacgatacctcatttccgagcaccccagaaggcattaaggatagatctggcgcatacattacctgcgctccttttaacccagcggccacagagtcaatcgccaccaatatcttccccttgctcggggatcccacaagtgagaacaaaacagacgagaaaaagatagaagaaaagaaagcccaaatcgtgactgaaaaaaatacctctacgaagacttcaaacccctttttggtagcagcccaagacagtgaaacagattacgtaacaacggacaatctgacaaaggtcacagaagaggtggtggccaacatgcctgaaggtctgaccccagatttggtacaggaggcatgcgaatctgagctgaatgaagtcaccgggacaaagatcgcgtacgaaacgaaaatggacctggtacagactagtgaggtgatgcaagagagcctctatccagccgcccagctctgtccaagcttcgaagaaagtgaagctaccccaagtcctgtgctgcctgacatagtcatggaagccccactgaatagtgccgttccctctgctggcgccagcgtgatccagccctcctcttccccgttggaagcctcatccgtgaattacgagagcatcaagcacgagcctgagaatccgccgccttatgaggaagctatgtcagtgtcactgaaaaaggtgtctggcattaaggaagagatcaaagaacctgagaacatcaacgcggcgttgcaggagaccgaagccccatacataagtatcgcttgcgacctaatcaaggaaacaaaactgagcgccgagcccgcaccagatttcagtgactactccgagatggcaaaagtcgaacagcccgtaccagaccatagcgagctggtggaagactctagtccagatagcgagcccgttgatctcttctccgatgactcgatccctgacgtcccccagaaacaggacgagacagtgatgcttgttaaagaaagtctcacagaaactagcttcgaatctatgattgagtacgaaaacaaagagaagctgtctgcccttccgccagaaggcggcaaaccttacttagaatcattcaaactgagcttagacaacacaaaagacaccttgctccctgatgaagtcagtactttgtcaaagaaggagaaaattcccctgcagatggaggaactgtccaccgcagtctactccaatgatgatctcttcatatctaaggaggctcagattagggagactgaaacctttagcgactcttcacctatcgaaattattgacgaatttcccacactgatatcttcgaaaaccgacagcttctctaaactggcacgggaatacacggatctggaagtaagccacaaaagtgagatcgctaacgctccagacggcgccgggtccctgccctgcactgagttaccccatgacctgagtcttaaaaacattcagcctaaagtggaggaaaaaatatctttttcggacgatttcagcaaaaacgggtcagccacttctaaggtgcttcttctgcccccagatgtttccgcattggcaacacaggcagaaatcgagtccattgtgaaacctaaggtgcttgtgaaggaagccgaaaaaaagctgccctcagatacagagaaggaggaccggtccccaagtgccatcttcagtgccgagctgagtaaaacgagtgtggtggacctcctttactggcgagacattaaaaaaactggggtggtgttcggagcctcactgttcctgctgctctccctgactgtgttttccattgttagtgttaccgcgtatattgctctcgctctcctctctgtgacaataagtttccggatctacaagggggtgatccaagctattcagaagtccgatgaaggccacccttttcgcgcatatttggagagtgaggtggccatctctgaagaattagttcagaaatatagcaactccgctctcgggcacgtaaattgcaccatcaaggaacttcgaagactcttcctggttgatgatctcgttgattcattaaagttcgccgtactaatgtgggtgtttacttatgtaggagcgcttttcaacggcctgaccctcttgatcctcgccctgatcagcctgtttagcgtgcctgtaatatatgagcgacatcaggcacagatcgatcactatctggggcttgccaacaagaacgtcaaagatgccatggcaaagatacaggcgaaaattccggggctgaagcggaaagccgaatag

SEQ ID NO: 132237 - DNA, 1179 bp, synthetic construct
  misc_feature 1..1179: note = Description of Artificial Sequence: Synthetic coding sequence
  source 1..1179: mol_type = other DNA
atggaagacctggaccagtcgcccctggtctcctcctccgactccccacctcgcccccagcctgccttcaaataccagtttgtcagggagcccgaggacgaggaagaggaggaggaagaggaggaagaggatgaagacgaagacctggaggagctagaggtcctggaacgcaaacctgctgctggcctgagtgccgcaccagtaccgactgcgcctgcggccggcgcaccactgatggatttcggcaatgactttgtacctcccgcgccgcgaggccctttacccgccgcaccaccggttgccccggagaggcaaccatcttgggatccctctccagtatcatcaaccgttcccgccccgtcccctctatccgccgcagctgtgagcccctctaagctgccagaggatgacgaaccgcccgcacgccccccccccccaccaccagctagcgtgtctcctcaagccgagccagtgtggaccccgcctgctccggctccagccgcccctccaagcacgcccgccgcgcctaagcgtcgcggcagtagcggctcagtggatgagaccctctttgccctgccagcagcatccgagcctgttattaggtcaagtgcagttgtggatttgctttactggcgggacattaagaagacgggagtcgtgttcggagcaagcctgttcctgctcctgagcttgaccgtcttcagcattgtgtctgtgacggcctatatcgcattggcactcctttccgtgactatttcgttcaggatctataagggcgtaatacaggccatccagaaatctgacgaggggcatcccttccgcgcatatttggaatctgaggttgcaatttctgaagagctagttcagaagtattcgaacagcgcccttggacacgtgaactgtaccatcaaggagctgcggcgcctgtttctagtggacgatctggtagactcattaaaatttgcagtactcatgtgggtttttacttacgtgggggcccttttcaacggtctgactctcctgattcttgcattgatcagtttattcagcgtgcccgtaatctatgaacgccatcaggcgcagatcgatcactacctcggccttgccaataagaatgtcaaggatgcaatggctaaaatccaggccaaaattccagggttaaagcggaaagctgagtag

SEQ ID NO: 132238 - DNA, 600 bp, synthetic construct
  misc_feature 1..600: note = Description of Artificial Sequence: Synthetic coding sequence
  source 1..600: mol_type = other DNA
atggacgggcagaaaaagaattggaaagataaagtggtggatttactatattggagagatattaagaagacaggtgttgtctttggagctagcctctttctgttgttaagtcttactgtgtttagcatagtatctgtgaccgcctatattgcattagctctgttatcggtcactatctccttcagaatttataagggtgttattcaggcgattcaaaaaagcgatgagggccatccttttagggcttacttagagagtgaggtggcaatctctgaagaactcgtgcagaaatattcaaatagcgccctgggtcatgtcaattgcaccataaaggaattacgtaggctgtttctggtcgatgatttggttgattcactgaaattcgcagtgctcatgtgggtttttacctatgttggcgcactgttcaacggcctgacgctcctcatcctggcactaatctccctgttctccgtgccagtcatctacgagaggcatcaagcacagatcgatcactacctgggcctcgcaaacaagaatgtaaaagacgctatggccaaaattcaggccaagattcctggacttaaaaggaaagcagagtag

SEQ ID NO: 132239 - DNA, 2961 bp, synthetic construct
  misc_feature 1..2961: note = Description of Artificial Sequence: Synthetic coding sequence
  source 1..2961: mol_type = other DNA
atggacctaaaggagcaacctggaaacaccataagcgccggccaagaagattttccaagcgtactactagaaactgccgcaagtctgccctcactgtcccctctgagcgcagcttcatttaaagagcacgaatatctcggcaatctctcaacagtgctgcccaccgagggcacactccaggagaacgtgtcagaagcttccaaggaagtgtcggagaaggccaaaaccctactcatcgacagagacctcacggagttctccgagctggagtacagcgagatgggcagcagctttagtgtgagcccaaaggccgagtccgccgttatcgtagctaaccctcgagaagagattattgtgaagaataaggatgaggaagagaagctggtgtctaataacatcctgcacaaccagcaagaactgcctaccgcactcaccaaactcgtcaaggaagacgaggtggtgtcatccgagaaagctaaagatagctttaatgagaaacgggttgcggtagaagctccgatgagggaagagtatgcagatttcaaacccttcgagcgcgtttgggaagtgaaggactccaaggaagactccgacatgctggctgccggaggcaaaatcgaatctaatttagagagcaaggtggacaaaaagtgttttgccgacagcctggagcagactaaccatgagaaagattcagagagttctaatgacgacacgtcatttccctcaactcctgaaggaatcaaggacaggagtggcgcctacattacttgcgccccattcaatccggccgctacagaaagcatcgccaccaatatctttcctctccttggcgacccgacatctgagaacaaaaccgatgagaagaagatcgaagagaaaaaggcccaaattgttaccgaaaagaacacttccacaaaaacgagcaacccttttctggtggccgcgcaagatagcgagacggactatgtgaccacagataacctgacaaaggtgacagaggaggtggtggcaaatatgcctgaggggctgacccccgatttggtgcaggaagcctgcgaatccgaattgaatgaggtcaccggcacaaaaatcgcctacgagaccaagatggatctggttcagacctcagaagtgatgcaagagtccctgtacccagctgcccagttgtgcccatcatttgaggaaagcgaggcgaccccaagccctgttctccctgatattgtaatggaggccccactcaacagcgctgttcccagcgccggtgcttcggtgatccagccatcaagcagtcccctcgaagcatcatccgtgaattatgaaagcatcaagcatgagccggagaaccccccgccgtatgaagaagccatgagcgtgagcttgaagaaagtcagtgggattaaagaggagatcaaggagcccgagaacatcaacgcagcactccaagagactgaggcaccctatattagcattgcgtgcgatttgatcaaggagactaaactgagtgcagaaccagcgcctgattttagcgattactcagaaatggccaaagttgagcagccagttcccgaccactcagaactggtcgaggattccagtcccgattccgagccagtggacttattcagcgatgacagcattcccgacgtgccacagaagcaggatgaaaccgtcatgctggtgaaggaatcgctgactgagacctcttttgaaagcatgattgagtacgaaaataaggaaaaactgtctgctctccccccagagggcgggaagccatatctggagtcattcaagctaagcctggataataccaaagatacgctcctccctgacgaggtgtctactttgagcaagaaggaaaaaatcccactccagatggaggaactaagcacagcagtgtactctaacgatgatctgtttatatcgaaagaggcccagattagagagaccgaaacatttagtgattctagccctatcgaaattatagatgagttccccaccctgataagcagcaaaacagacagcttctccaaattagctagagaatacaccgatctggaagtgagccacaagagcgaaatcgctaacgccccagatggcgccggaagtctcccttgcaccgagcttcctcatgatctgagcttaaagaatatccaacccaaggtggaggaaaaaatctcattttcagatgacttcagcaaaaacggatctgccacaagcaaggtgctgctgctcccgcctgacgtgtctgccctcgccacgcaagccgagatcgagtcaatcgtcaaacccaaggtgctagtgaaggaggcagagaaaaagcttccatctgatacggagaaagaggatagatcaccctctgcgatcttctccgctgagctctctaagacctctgtggttgatttgctatactggcgagacattaagaagaccggggtcgtctttggagcttcccttttcctgctactgtctctgacagtgttttccatcgtctccgtgacggcctatattgccctggccctgctcagtgttactatctccttccgaatttataaaggcgttatacaagctatccaaaagagcgacgaggggcatccatttcgagcttaccttgaaagtgaggtggcgatctccgaggaactcgtgcagaagtatagtaactctgcgctggggcacgttaattgcaccattaaggagctccgtagactttttctggtcgacgacctggtggattccttaaagttcgcagtcctgatgtgggtgttcacttacgttggagccctgttcaatggcttgacgttacttattttggccctgatttccttgtttagtgtgccagtgatttatgaacggcatcaagcacagatagatcactacctgggattggctaacaagaacgtaaaggacgccatggcgaaaatccaagccaagattcccggcctaaagcggaaagctgagtag

SEQ ID NO: 132240 - DNA, 1038 bp, synthetic construct
  misc_feature 1..1038: note = Description of Artificial Sequence: Synthetic coding sequence
  source 1..1038: mol_type = other DNA
atggagcccgaggacgaagaggaggaggaagaggaggaggaggaggacgaagatgaggacctggaagagctggaagtcctggagcgaaaacccgctgctgggctgagcgctgcacccgtcccaactgcaccagctgccggcgctccgctgatggatttcgggaatgattttgtgccgccagcaccccggggacccctgccagccgcccctcctgtggcacctgagcggcagccatcctgggatcctagtcctgtcagttccacagtgccagccccttccccactgagtgcagctgcagtcagtcctagcaaactgcccgaagatgacgagccccccgcaaggccccccccaccaccacccgcttctgtgtcacctcaggcagaacccgtctggactcctcccgcacccgcccctgccgccccccctagcactcctgccgccccaaagcgcaggggcagttcgggcagtgtggtcgttgaccttctatactggcgtgatattaaaaaaacaggcgtagtcttcggtgcgagcttgtttttactgttaagcctgacggtgttttccatcgtgtctgttaccgcctatatcgcgcttgcattgttatccgtgacgattagcttccgtatatataagggcgtgatccaagctatacaaaagtcagatgagggccatcctttccgggcctatctggagagcgaagtggctatttctgaggaactcgtccagaagtacagcaatagcgccctgggacatgtaaattgcaccatcaaggaacttcgaagactgttcctcgtggatgatctggtggactcgctcaagtttgccgtactaatgtgggttttcacttacgtgggggccctgtttaacgggctgaccctgcttatattggcactaatctccctctttagcgtccctgtcatctatgaaagacaccaagctcagatagatcactatctgggcttagcaaataaaaatgtgaaagacgccatggcgaagatccaggccaagattcccggattgaagagaaaggcggagtag

SEQ ID NO: 132241 - DNA, 2961 bp, synthetic construct
  misc_feature 1..2961: note = Description of Artificial Sequence: Synthetic coding sequence
  source 1..2961: mol_type = other DNA
atggatctcaaagagcaaccgggcaataccatctccgcaggtcaagaggatttcccatccgtgttgctcgagactgctgcatccttaccgagcctgtctccgttgagcgccgcttcctttaaggaacacgaatatctgggcaatctgtccacggtgctgcctaccgaggggaccttacaagagaacgtctccgaggcaagcaaagaagtcagcgagaaggctaagacactgctaatcgacagagatctcactgaattcagtgaactagaatactcagaaatgggcagttccttttccgtgtctcccaaagccgaatcggcagtgattgtcgccaaccctagggaagagattattgtcaagaataaggacgaagaggagaagctggtgagcaataatatactccacaatcaacaagagctgcctacagctttaacaaaactcgtgaaagaggacgaggtggtatcaagtgaaaaagccaaggacagctttaatgagaagcgggtggccgtcgaggccccaatgcgcgaggagtatgctgatttcaaaccttttgagcgagtatgggaggtgaaggactcaaaagaggattccgatatgttggcagcaggcggcaaaatcgagtccaatctggaatccaaggtcgataagaagtgttttgccgactcactcgagcagacaaaccacgagaaagattctgagagcagtaatgatgatacgagcttcccctccacgcccgagggtatcaaagatcggagcggagcctatataacgtgtgctcccttcaaccctgcagccaccgaatctatcgccacaaacatcttcccactgctgggcgaccctacctcagagaataagaccgacgagaagaaaattgaagaaaagaaggctcaaatagtgaccgaaaagaatacttccacgaagactagcaaccctttccttgtcgccgcccaagactctgaaactgattatgtcactactgataacctcaccaaggtgactgaggaagtagtggctaacatgcccgaaggacttaccccagaccttgttcaggaagcgtgtgaaagcgagttaaacgaggtgacaggaactaagattgcctatgagaccaagatggacctggttcagacttctgaggtgatgcaggaaagtttgtacccagccgcgcagctttgcccatcgttcgaagagagtgaggccactcccagccctgtcctacctgatatcgtgatggaagcacctttgaacagcgctgtccccagtgcaggcgcctctgttatacagccatcttcttcccccctcgaggccagcagtgtgaattatgaatctatcaaacacgagcccgagaatccgccaccttatgaggaggccatgagcgtctctctcaagaaggtgtccggcataaaagaggagatcaaggagccagagaatattaatgccgcactacaggagactgaagccccctacattagcatcgcttgcgatctgatcaaggagaccaagctctcagctgaacccgcaccagacttcagtgactacagtgagatggccaaggtggagcaaccagtgcccgaccattctgaactcgtggaggactcctctccagacagcgaaccggtggaccttttcagcgatgactctatccctgatgtaccccaaaaacaggacgagaccgtgatgctggttaaggagagcctgactgaaaccagctttgaaagtatgatcgaatacgagaataaagagaagctgagcgcccttccccctgaaggcggcaagccatatctggaatctttcaagctgtcgctcgataatactaaggacactctgttgcctgacgaagtgtcgacactgagcaagaaggaaaagattcccctacagatggaggaactgtccactgccgtgtatagcaacgatgatctgtttatttccaaggaggcgcaaatcagggaaactgagacttttagcgactcatcccctatcgagatcatcgatgaatttcctaccctgatttcctcaaagaccgactctttctccaaactggcaagggagtatacagacctggaggtatcccataaaagcgaaatcgctaacgcccctgatggggctggaagtctcccgtgtaccgaactgcctcacgatctgagtctgaaaaatatccagcccaaagtggaggagaagatctccttctccgacgacttttccaagaatggcagcgccacatctaaagtcctgctccttccacccgacgtgagcgccctggctacccaggcagagattgagtctatcgttaaaccgaaggtgctcgtcaaggaggcggagaagaagcttccctcagatacggagaaagaagatcggagcccctcagccatcttcagtgctgagctctccaagacgagtgtggtggacttgctgtactggagggatatcaagaaaacgggcgtggtctttggagcatcactattcctgttactctcattgactgtgttcagcatagtgagcgtgacagcctatattgctctggcactgctgtccgtgacaatttccttccgaatctacaaaggagtgatccaggctattcagaagtccgacgaggggcacccatttcgggcctatctggagagtgaggtagcaatcagcgaggagctggtgcagaagtactcaaatagcgccctgggccatgtgaattgcacaatcaaggagctgcgaaggttgttcttagttgacgatctggtcgacagtttgaagttcgccgtcctcatgtgggtctttacgtacgtcggagccctgttcaacgggcttacactactgattctggccttaatcagcttgttttcagttccggtaatctacgagcggcaccaggcacaaatagaccactatcttgggctcgccaacaagaatgttaaagacgccatggcaaagatccaggctaagatacccggacttaagcggaaagcagaatag

SEQ ID NO: 132242 - DNA, 2961 bp, synthetic construct
  misc_feature 1..2961: note = Description of Artificial Sequence: Synthetic coding sequence
  source 1..2961: mol_type = other DNA
atggacttgaaggagcagccagggaatactatctccgcaggccaggaggacttcccatcggtccttctggagaccgctgcatctctgccctctctgtcccctctatctgccgcatcttttaaagagcacgaataccttggtaacttgagcactgtcctgccaaccgaaggtacgcttcaagagaacgtgtccgaagcgtccaaagaggtttctgagaaagccaagactctactgattgatcgcgaccttactgaattttctgagctagaatacagcgagatgggctcttctttctccgtgagtcccaaagccgaaagcgccgtcatcgtggccaacccaagagaggagattattgtgaagaataaggacgaggaggagaagctggtgtcgaacaacatcctgcacaatcaacaggagctcccgactgcacttaccaaactggttaaggaggatgaggtggtatccagcgaaaaggctaaggattcgtttaacgaaaagagggtggctgtggaggcccctatgcgggaggagtacgcggactttaaaccatttgagcgcgtgtgggaagtgaaagattccaaggaagatagtgacatgctagctgctggaggcaaaattgagtccaatttagagagcaaggtggacaaaaagtgtttcgcggactcgttggagcaaacaaaccatgagaaagacagcgagtcaagtaatgacgataccagcttcccttcaactcctgagggaatcaaggaccgaagcggagcctacattacatgtgccccattcaacccagctgctaccgaatcaatcgcaaccaacatttttcctttgctgggggatcctacttccgaaaataagacagatgaaaaaaaaatcgaggagaaaaaggcccagattgtgaccgaaaagaacaccagtaccaaaacgtcaaatcccttcctggtggcagcccaggactccgagacggattatgtgacaactgacaacctgacaaaggttaccgaagaggtggttgcgaatatgcctgaaggcttaacccccgacttggtgcaggaagcctgcgagagcgagctcaacgaggtgactggtacaaagatcgcatatgagacaaagatggatctggtccagacatctgaagtgatgcaggagtcattgtatccagccgcccagttgtgtccatcttttgaagagtctgaggccaccccctcacctgtcctcccggatatagttatggaagctcctctcaacagtgcggttcccagcgcaggagcctctgtcattcagccaagtagctcccccctggaagcatcttccgtgaactacgagtcaattaagcatgaaccagaaaatccccccccatatgaagaggccatgtccgtgtccctgaagaaagtctcaggcataaaagaggaaattaaggagccggaaaatattaacgcagccctgcaggagaccgaagcaccttacatttctatcgcttgtgacctgattaaagaaacaaagctgtcagccgagcccgcccctgacttcagtgactattcagaaatggccaaggtcgagcaaccagtgccagaccattcagagctagtggaggattcatccccagactccgaacctgtggacctcttctcagatgatagtattcctgatgtcccacagaaacaggatgagacagtcatgttagtgaaagagagtctgaccgaaacctccttcgagagcatgatcgagtacgaaaataaggagaagttgagtgcactgccaccagagggcgggaaaccatatcttgagtcattcaagctgtccttggacaataccaaagacactttgttgcccgacgaggtgagtaccctgtcaaagaaggagaagattccactgcagatggaagaactgagcacggccgtgtattctaacgatgaccttttcatatccaaagaagcccagattcgagaaaccgaaactttttcagactcttcacccatagagattatagatgaatttcctaccttgatctcatccaaaactgactccttcagtaagctagccagggagtacaccgacctggaggtaagccacaagtccgaaatcgctaacgcccctgatggcgccgggtcccttccctgcactgagttgccccacgatctgtctttgaagaacatccagcctaaggtggaagagaagataagtttcagcgacgacttttccaaaaacggctcagcaacgtctaaggtactactgctcccacctgatgtatctgccctcgccactcaggccgagatcgagagcatcgtcaaacctaaagttctggtgaaggaggccgaaaagaagctgccctctgacacagagaaggaagatcgctccccatcggcaattttcagtgcagaactgtccaaaacatccgtcgtggatctgctctactggcgtgacatcaaaaagacgggtgttgtgtttggggcgagtctattcctactgctctcattaactgtgttctccatagtgagtgttactgcttatatagccctggccctgttgtcagtcaccatttcatttaggatttacaaaggagttattcaggctatccagaaatctgacgagggccacccgtttcgggcatacttggaaagtgaggtggcaatctctgaagagcttgtccagaaatactctaattctgcactgggccatgttaactgcactattaaagaactacgacgattgtttctcgtggatgacctcgtggatagcctcaagttcgccgtgctgatgtgggtgttcacatacgtgggagccttgtttaacgggttgactttactgatcctcgccctgataagcctattctcagtcccagtcatttatgagcgacatcaggcccagattgaccactatctgggacttgccaacaaaaatgtgaaagatgccatggcgaagatccaggctaaaattccaggcctaaaacggaaggctgaatag

SEQ ID NO: 132243 - DNA, 276 bp, synthetic construct
  misc_feature 1..276: note = Description of Artificial Sequence: Synthetic coding sequence
  source 1..276: mol_type = other DNA
atggacctgaaggagcaacccggaaacacaatctctgcggggcaggaagacttccccagtgtactactcgagaccgccgcctcattaccctcattaagccccctaagcgcagccagttttaaggaacacgagtatctggggaaccttagtacagtgctgccgacagagggtacactccaggagaacgtgagcgaagcctccaaggaggtttcagagaaggccaagactctgctgattgaccgtgatcttaccgaattctctgagctggaatactag

SEQ ID NO: 132244 - DNA, 1191 bp, synthetic construct
  misc_feature 1..1191: note = Description of Artificial Sequence: Synthetic coding sequence
  source 1..1191: mol_type = other DNA
atggagtttctgaaaacgtgcgtgttgcggcgaaacgcgtgcactgctgtgtgtttctggagaagtaaggtggttcagaagccttccgtgaggagaatttcaaccacgtccccacggtccaccgtgatgcccgcctgggtcattgataagtacggtaaaaacgaggtgctgaggtttacacagaacatgatgatgccgattatccattaccccaacgaggtcatcgtgaaggtgcatgcggcgtctgtgaacccaatcgatgtcaatatgcgcagtggatacggagccactgcgctcaatatgaagagggatcccttacacgtgaaaatcaagggcgaagaattccctctgaccttagggcgagacgtgtcaggcgtggtaatggaatgcggcttggacgttaagtattttaaaccgggcgatgaagtttgggccgccgtcccaccctggaaacaaggcacgttgagcgaattcgtggttgtgagtggcaacgaggtgtctcacaagcccaagagtttgacacatactcaggccgccagccttccatatgtggccctgaccgcatggagcgcaattaataaggtggggggtctgaatgacaaaaattgtacgggaaaacgcgttctgattctcggtgcgagcgggggcgttggtacgttcgcaatacaggtcatgaaagcttgggatgcgcacgtcaccgcagtgtgcagccaagacgcatccgaactggtccgaaagcttggcgctgatgacgttattgactataaatctggctccgttgaggagcagttaaagagtttgaagccttttgactttatcctggataacgttggaggatccacagaaacttgggctcccgactttctgaaaaagtggtccggcgcaacctacgtaactctcgtgacaccgtttttgctgaatatggatcgactgggaatcgcggacgggatgttacagactggggtgacagtgggcagcaaagccctgaagcatttctggaaaggagtccattatcggtgggctttctttatggcctctggcccctgtcttgacgatatcgcggagttggttgacgctggcaagatcaggccagttattgagcagaccttcccattcagcaaagtgcctgaagccttcctcaaggtagagcggggacatgccagagggaagactgtgatcaacgtggtgtag

SEQ ID NO: 132245 - DNA, 681 bp, synthetic construct
  misc_feature 1..681: note = Description of Artificial Sequence: Synthetic coding sequence
  source 1..681: mol_type = other DNA
atggagttcctgaagacctgtgtcttgcggcggaatgcctgtacagcggtatgcttttggcgtagcaaagttgtacagaagccaagcgtacggcgcatctccactacatccccacggagtactgtcatgcctgcgtgggtcatcgataagtatggcaagaatgaagtgttgcggtttacacagaatatgatgatgcctatcatccattaccccaatgaagtcatagtcaaggttcacgcagctagcgtgaatccaatcgatgtgaacatgcgaagcggctatggggcaactgccctgaacatgaaacgtgatccccttcatgtaaaaatcaagggtgaagagttccctctcacactgggccgcgatgtgtctggagtcgtgatggaatgtggcttggacgttaagtattttaaacctggtgatgaggtatgggcagcagtacctccatggaaacaggggaccctcagtgagtttgtggttgtatcaggaaacgaggtcagtcataagccaaaatcgctcacacacacccaagctgcgtccttgccatatgtggcgctgaccgcttggtctgccatcaataaagtggggggcttaaatgataaaaactgcaccggcaagcggatcagcggcaaggagtcaatcatcgctggacacttctcttggcccgtcgctcacgtgtag

SEQ ID NO: 132246 - DNA, 1422 bp, synthetic construct
  misc_feature 1..1422: note = Description of Artificial Sequence: Synthetic coding sequence
  source 1..1422: mol_type = other DNA
atgaaaagggcgtcagccggcggctcccggctgttggcttgggtcctctggttgcaggcttggcaggtggcagctccctgccctggagcttgtgtgtgttacaatgaaccaaaagtgacgacctcttgcccccagcagggtcttcaggccgtccctgtggggattccagcggcttcacagagaattttcttgcacggcaacagaatctcccacgtgccagccgcctcattcagagcttgcaggaacctgaccattctctggttgcactcaaacgtattggcacgaattgatgctgctgcctttacaggactcgcccttcttgaacagctcgacctgtctgataatgctcagctcagatcagtggaccccgccacgtttcacggcctcggcaggctgcacacgctgcacttggataggtgtggactacaggaactgggacctgggctcttccgaggactggctgccttgcagtacctttaccttcaggataacgctttgcaagccctgcccgatgatacgttcagagatctgggaaatctgacccacttgttcctacatggcaataggatttcatcagttcccgagcgggcttttcgcggccttcacagcctcgatagactgctcctgcaccagaatcgcgtggcccatgtgcatcctcatgctttccgtgacttgggtagactcatgaccttgtacttgtttgccaataacttgagtgctcttcctactgaggctcttgccccccttcgagctcttcagtacctcaggctgaacgataatccatgggtgtgcgattgtcgagcccgccccctgtgggcatggttgcaaaagttccgcggctcgagctccgaagtaccatgttcattgcctcaacgcctggctgggagggacctcaagcggctggcagccaacgatctccagggttgcgccgtggcaaccggcccttaccaccccatctggaccggtagggcaacagacgaagaaccattgggcctgcctaagtgctgtcagcctgacgctgccgacaaagccagcgtgcttgagcctggccggccggcctctgccggcaatgcattaaaggggagagtgcccccaggagatagccctccgggtaatggttccggccctcgtcacatcaatgattcacccttcggaacgttacctggatctgctgagccacccctgaccgcggtgcgacctgaaggcagtgaaccccctggatttcctaccagcggcccgcgcagacgccccggctgctccaggaaaaatagaacgaggtctcattgccggctcgggcaggctggctctggggggggaggcaccggggattccgaaggaagcggagccctacctagcctgacttgttctctgactcccttggggctggcattggtgctgtggactgtcttgggcccatgctag

SEQ ID NO: 132247 - DNA, 1041 bp, synthetic construct
  misc_feature 1..1041: note = Description of Artificial Sequence: Synthetic coding sequence
  source 1..1041: mol_type = other DNA
atgcacctgccgggatgtgcgcccgcgatggccgatgggagcttctctctcgccggtcacctcttacggtccccaggggggtccacctctagacttcactccatcgaggccatcttggggttcactaaggatgacggcatactcgggacctttcccgctgaacggggtgcccgcggggccaaggaacgagacaggcgcctcggcgctcgcccagcatgtcccaaagccccagaagagggctccgaaccgtcaccccctcctgcacccgccccggctccggaatacgaggcacctcgcccttactgtcctaaagaacctggggaggcaagaccttctcctggcttacctgtaggacctgctactggcgaggcaaagctgtccgaagaggagcagccaaaaaagaagcataggcgcaaccggaccacttttaccacctaccagctgcatgagcttgagcgggcgttcgagaaatcacactaccccgatgtgtattccagggaagagctggcgggcaaggtgaatcttccggaggtgcgtgttcaggtttggtttcaaaaccgcagagccaagtggcggaggcaggaaaagctggaggtctccagcatgaagctgcaggacagcccgctgctgagcttctcacgctctcctcccagcgcgacactgagtccgctgggagctggcccaggttccggggggggccctgccggtggggcgctgccactagagtcctggctgggacctcccctgccaggcgggggagccaccgcactgcagagcctgcccggattcggcccgccagcacagtctttacctgccagctataccccccccccgcccccaccgccattcttgaactccccgcctctgggacctggcctgcagcccttggcccccccccccccttcctatccatgcggtccggggtttggggataaattccccttggatgaagcggaccctaggaatagcagcatcgcggccctgcgtcttaaggcaaaggagcacatccaagcgattggcaagccctggcaggcgctgtag

SEQ ID NO: 132248 - DNA, 225 bp, synthetic construct
  misc_feature 1..225: note = Description of Artificial Sequence: Synthetic coding sequence
  source 1..225: mol_type = other DNA
atgcacctgcccggctgtgcgccagctatggccgatggctccttttcattggccgggcaccttctgagatcacccggagggagtacgagtcgcttacactcaatcgaggctatacttggattcaccaaagatgatgggattctcgggactttccctgcagagagaggagccagaggggcgaaagaacgggaccgcaggttgggcgcgagacctgcatgcccctag

SEQ ID NO: 132249 - DNA, 588 bp, synthetic construct
  misc_feature 1..588: note = Description of Artificial Sequence: Synthetic coding sequence
  source 1..588: mol_type = other DNA
atgagtctgatttcctggctgcgatggaacgaggcaccgtcccgactttctacaaggtctcctgcagagatggttctagagaccctcatgatggaactgacgggccagatgcgggaagctgaacgccaacaaagagaaagatcaaacgccgtcagaaaggtgtgcaccggtgttgattattcttggctggcttctaccccgcgtagcacctacgatctgagcccaatagagcgacttcagctggaggacgtttgcgtgaaaattcatcctagttattgcggccccgctatcttaaggttcagacagctgttagctgaacaggagccagaagtgcaggaagtttcacagctcttccgtagcgtgttacaggaggtactggagagaatgaagcaggaggaagaggcccacaaactgacacgacaatggtctctgcggccgcggggtagtttggcaaccttcaaaactagggccagaatcagccccttcgcaagtgacatacggaccatcagtgaggatgtggaacgcgacacacccccacccctcaggagctggtccatgcccgagtttagagcgccaaaggccgattag

SEQ ID NO: 132250 - DNA, 762 bp, synthetic construct
  misc_feature 1..762: note = Description of Artificial Sequence: Synthetic coding sequence
  source 1..762: mol_type = other DNA
atggcagagaccagcgccttgcccaccgggttcggcgaactagaggttctggcagtggggatggtcctcttagttgaagccctgagcgggctctctttaaacactctgacaatattttccttttgtaagacaccggagcttcgaacaccttgccacctgctcgtcctgtccctcgccttggccgatagcggtatatcactgaacgccttggtagccgccacttctagtctgctacggaggtggccctacgggagcgatggatgtcaggcacacggtttccagggctttgttacagctctggcatccatttgttctagtgcagccattgcatggggaaggtaccaccactattgcactaggtcccagttggcttggaacagtgccgtgtcacttgtattgttcgtgtggctgtcctctgcattttgggccgctctccccctcctcggctggggacattacgactacgaaccattggggacttgttgcaccctggattacagtaaaggtgatagaaactttacctctttccttttcactatgagtttctttaacttcgcaatgccactttttatcaccattaccagctactcattgatggagcaaaaactgggaaagtctgggcaccttcaagtgcccgcacttattgccaagatggtccccacaataaatgctattaattacgccctgggcaacgagatggtgtgtcggggcatatggcagtgtctgtcacctcagaaacgagagaaggacaggacaaaatag

SEQ ID NO: 132251 - DNA, 888 bp, synthetic construct
  misc_feature 1..888: note = Description of Artificial Sequence: Synthetic coding sequence
  source 1..888: mol_type = other DNA
atggcagaaacaagcgctctccctaccggcttcggtgagctagaagtgttggctgtcggcatggtgctgttagtggaggccctgagtggactgagcttgaatacattaactattttcagcttttgcaagacccccgagctacgcactccatgtcatctattagtactgtccctcgcactggcagattctgggataagcctgaacgccctggtggctgccaccagcagcctgttacgcgtgagtcaccggagatggccctacgggtcggacggatgtcaggcccacgggtttcagggattcgttactgccctggcctctatttgttcctctgccgcgatcgcgtgggggaggtatcaccattactgtacccgcagtcagcttgcctggaattccgctgtaagcctcgtgctctttgtttggctttcgagtgctttctgggcagccctgcccctgctcggctggggccattatgattacgagcccctcgggacttgttgcacgcttgattattcaaaaggtgaccggaatttcacatcgtttttgttcactatgagcttctttaattttgctatgcctttattcattactatcacctcatacagtcttatggagcagaagctcgggaaaagcggccatcttcaggtgaataccaccctccctgccagaactctcctgcttggctgggggccgtacgcaattctttacctttacgccgttattgctgacgtcaccagcattagcccgaaactccaaatggtcccagccctcatcgccaagatggtgcccaccatcaacgcaattaattatgcactcgggaacgaaatggtttgtcgggggatttggcagtgtctgtcaccacagaagcgggagaaggatcgtaccaagtag

SEQ ID NO: 132252 - DNA, 363 bp, synthetic construct
  misc_feature 1..363: note = Description of Artificial Sequence: Synthetic coding sequence
  source 1..363: mol_type = other DNA
atggccgaaactagtgcactcccaacagggttcggtgagctggaagtgttagccgttgggatggtgctgttggtggaggatccgggggcagcggatagtctgcctcccacgggcgcggagttgggctcctgcggacagtgggaccagcccgaatgccctcggtgctcccacatccagcccagcccttgcttgcctcaggctctcgccttgcgccttggccgattgcccgggagtcgtctgcccggcctctgtgatagcgttggtcagcacctgcagcagtgctcgcatcgaatgggcgcccttagccccttgttgcatcccccgaagtgctgccatagaagtcatcattttgagtggagatag

SEQ ID NO: 132253 - DNA, 1056 bp, synthetic construct
  misc_feature 1..1056: note = Description of Artificial Sequence: Synthetic coding sequence
  source 1..1056: mol_type = other DNA
atggcccccgtcttgccgctggtactaccactgcagcctcggatccggcttgcacagggtttatggctgttatcatggctgctggcactggctggaggagtgattcttctctgttctgggcatcttctcgtccagttgaggcacctgggcactttcctggcacccagttgccagttccccgtcttgccgcaggcagctctggcggcgggcgccgtggcattaggcaccggtttagttggggtgggggcttcgagggcgtctctcaacgctgcactgtatcccccctggaggggcgtgctcggccctttgctggtcgcaggcacagccggaggtggcggattgctcgtggttgggctgggcctcgcactggcccttcccggatcactggatgaggctctggaggaggggcttgtgaccgccctcgcacactacaaagataccgaagtcccaggccactgtcaggccaagcgacttgtagacgagctgcaactacgctaccattgttgcggtcgccacgggtacaaggattggtttggggtgcagtgggtgtcatctcggtacctagaccccggcgatcgagacgtggccgaccggatacagtcaaacgtagagggcctctatttaaccgacggcgtgcccttttcgtgttgtaatccccactcgcctaggccctgtttgcagaaccggctgtctgattcctacgcccatccattgttcgatcctcggcagcctaatcaaaatttatgggctcaaggctgccacgaggtcctcctggaacatctgcaggacttggctggtaccctggggtccatgctcgctgtgacctttttattacaggcactggtgttgcttgggttaaggtatctgcagacagccctggaagggctgggaggcgtcattgatgccggcggcgaaacccagggctacctctttcccagcggacttaaggacatgctcaagaccgcatggctccaggggggcgtggcatgccgccccgcccccgaggaagccccgcctggcgaagcacctcccaaggaagatctgtcagaggcatag

SEQ ID NO: 132254 - DNA, 1602 bp, synthetic construct
  misc_feature 1..1602: note = Description of Artificial Sequence: Synthetic coding sequence
  source 1..1602: mol_type = other DNA
atgtcaattcaggttgaacatccggccggcgggtataaaaaattattcgagacagtcgaggagctgtcttccccactgaccgcgcatgtgacaggccgcatccctttgtggctcacaggatcactccttcgttgtggcccaggtctcttcgaagtcggatcagagcctttctatcatttatttgatggacaggctcttttgcataaattcgatttcaaagagggccacgtcacctaccatcggcgattcattcgcacagatgcttacgtgcgggccatgacagagaagagaattgtcatcactgaatttggtacctgcgcattcccagatccctgcaagaacattttttcgcgcttcttctcctatttcaggggtgttgaagtaactgataacgcactcgtgaatgtctaccccgtcggcgaggattattatgcctgtaccgagactaacttcattaccaaaattaacccagagactctggaaacaatcaagcaggtggacctctgtaactatgtgagtgtcaacggcgctaccgcacatccgcatattgagaatgacggtaccgtttataacattggcaactgcttcgggaaaaatttttctatagcctacaacatcgttaagataccgccgcttcaagctgataaagaggatcctattagtaagagcgaaatcgttgtgcagttcccttgcagcgatcgatttaagccatcctacgtgcactctttcggattaactcccaactatattgtatttgtcgaaacacctgtgaaaattaatctgtttaaatttctgtcttcatggagtttgtggggagccaattacatggactgttttgagtctaacgaaactatgggagtatggttgcacattgctgacaaaaaacggaaaaagtatcttaataataagtatcgcacaagtcctttcaacttgtttcaccacattaacacctacgaagataacggatttctgatcgtcgacctatgttgttggaagggatttgaattcgtgtacaactacttatacctagcaaatctgagggaaaactgggaagaagtgaaaaagaatgcaaggaaagccccccagccagaggtacggcgctatgtgctgccactgaacattgataaagccgacaccggaaagaatctggtgacccttcctaatactacagccaccgctatactgtgctcagacgaaactatttggctggagcctgaggtgttgttctccgggccccgccaggcctttgagttcccacaaatcaactatcagaaatactgcggcaagccctacacttacgcatacggcctggggctaaaccattttgttcccgatcgcctgtgtaagctaaacgtcaagaccaaagagacgtgggtctggcaggagcctgacagttatccatccgaacccatattcgtgagccaccctgacgcgctggaagaggatgacggtgtcgttttgagcgtggtagtcagcccaggagctgggcagaagcctgcttatctgcttatcctgaacgccaaggatctgagcgaggtggctagggcagaggtggaaatcaatataccagtaacttttcacggactgttcaaaaagagctag

SEQ ID NO: 132255 - DNA, 954 bp, synthetic construct
  misc_feature 1..954: note = Description of Artificial Sequence: Synthetic coding sequence
  source 1..954: mol_type = other DNA
atgtccgagggcgtgggaacctttcgtatggtgccagaagaggagcaggaactcagggcacagttggagcaattaacaacaaaggaccacggaccagttttcggaccgtgtagtcagcttccccgccacacattgcagaaggcaaaggatgagctgaatgaacgagaagagaccagagaagaagcagtgagagaactgcaagaaatggtacaggcccaggccgccagcggagaagagctggctgtcgcggtggcagagcgggtgcaggaaaaagatagtggatttttcctccggtttatcagggctcgcaaatttaacgtggggagagcctacgagcttctcagaggttatgtgaacttccgactgcaatatccagagctgttcgacagtctctccccagaagccgtgcgatgtacaatcgaggcaggatatccaggcgtcttatctagccgtgacaaatatggccgcgtggtgatgctcttcaacatcgaaaattggcagagtcaggaaattacattcgatgagatattgcaggcttattgctttatactggagaaactgctggagaatgaggaaactcagatcaatggattttgcataattgagaattttaagggattcaccatgcaacaggcggcgtccctgcgcacctcagaccttcggaagatggtagatatgttgcaagattcctttcccgccaggttcaaggctatccattttatccaccaaccctggtacttcacaaccacctacaacgtcgttaagccgtttttaaaatcgaagctcttggaacgggtgtttgtgcacggggatgatctcagtggattctaccaggagattgacgaaaacatcctacctagtgactttggaggcacgctcccaaagtatgacggtaaagcagtggcagaacagctgtttggaccacaggcccaggctgagaacactgctttttag

SEQ ID NO: 132256 - DNA, 807 bp, synthetic construct
  misc_feature 1..807: note = Description of Artificial Sequence: Synthetic coding sequence
  source 1..807: mol_type = other DNA
atggctgaactcgatatcgggcagcattgccaggtcgagcactgccgacagagagatttcctcccctttgtgtgcgatgactgctctggcatattctgtttggaacatcgcagtagggagagccacggttgtccagaggtaactgtcattaacgagcgtcttaaaaccgaccagcacacctcttatccctgctcatttaaagactgcgcggagcgggaacttgttgccgtgatttgtccgtattgcgagaaaaacttctgtttaagacatcgacatcagagcgatcacgaatgtgagaagttggagatcccaaagcctaggatggctgctacccaaaaactggtgaaggatatcatcgattccaagaccggagaaaccgcctctaaacgctggaaaggtgccaaaaacagcgaaaccgctgccaaagtcgcactgatgaagctcaagatgcatgcagacggcgataagagtctcccgcagacagaaagaatttactttcaggtctttcttcccaagggctcaaaagaaaagtctaagcctatgttcttctgccacaggtggtccattggcaaggcgattgatttcgccgcttccttggctcgactcaagaacgataacaataagtttacagccaaaaaactgcggctctgccacatcaccagcggagaagctcttccgctcgaccacactttagaaacctggattgcaaaagaggactgccccctctataacggtggcaatattattctggagtaccttaatgatgaagaacagttttgcaagaatgtggaaagttatctggaatag

SEQ ID NO: 132257 - DNA, 2751 bp, synthetic construct
  misc_feature 1..2751: note = Description of Artificial Sequence: Synthetic coding sequence
  source 1..2751: mol_type = other DNA
atgcaacgcccagtagtgaaattatatgctactgacgggcgcagagtgcctagcctgcaggcagtgatcctgtcctctggtgccgtggtggccgccggccgcgagcctttcaaacccggcaattatgatatacaaaaatatctgttgccggccagacttcctgggatttctcagagagtgtacccaaaaggaaacgctaagagtgaatcaagaaaaagcagtaactggaaggtattcatcattacatctgatctgcccgatgcaggcacgtcatctcaaatctacattatcctatacggtcagcatcgttcttcagctccaatttatctttatggcaccgatggtgcacgattccaggtgggccacgaggacattttcacgatcacagtgggcgatataggagcgctcttcaagatccggattggtcataccaacagcggttcgagcccctcatggcattgtaaagaaattcaactgcacaacatgaattcgggaaagcagttttacgtaccagtccaacgatggctcgccagggatcaggaggatggcgagatttgtcgcgaattccccttgctgtcaaagggacagcccgtgctccccgttaccatctacgaagtgaacgtggcaaccggagagttgtggaatgccgggacagtggctaatgtgtatatctctatccatggcgagaagggggatactggcagccggcagctcttcaggagcaagagcagttttaacttcctgcggggccagaccgatacattcttcctagaggcagtgcacctgggcgacttgtgtaaaatcgtaatcggccatgatggcctagggcctggaaatgggtggttcctggatgatgtggtgataaaggaccccactaccaactatgagtacgcctttttttgccatcggtggttggaccagggcgaggacgattgcaagatcgtgcgcgagctctatgccagagacaattcaattttctcagcgaggcaaaagcttgagcttaagcggaaagagacctggaccgctgagagctggaagttcaccaagggtaatactttgcagttctacaataaactcacggggggctttgtgcggctccatccagatgggacagtggatgcaataggcgaaaaaacagataagtacggagtgttcgacgtgatttttaacaaacgaaatatttgcatctttcagtcacacgaaatgcgccacctgagtctggcgctagataatggaatagtgactggaatggtgtccggtgaagctacgacagagttgcgtgttctgtaccagcccaatcggtgtgccctcctcgagagtgcccttgtgcccggccatacggtcgtgttcgataggcatggcaagatagctgatgcttcaagcgcgggatacgctaacctcagtaaggagttcgtgatctttgtgaagggcgttttcctgaatagtgccgttgtgctgctggctacatcactgtgtcaggccctgtgtctgcagccggacggcagctgcactggagtaggctcccagagcgagaagtcctattggaaggttcacaagatttcttcgggcatctgtatgtttgagtccgttaagaacgctcaaatgtacctgcggatcaaagatgggagatgcgatgggacagggacaggagatgttgactgtcatttcaaaatcaagaagaacctcaagaatgcctctatttccttagaatcaaccaaatctcccggtctgttcgtggggctgcagtccgatggccaggccaagcccatgatctacaccaaagatgagaacgtgtgcttttacccacaagtgatacagttcggccgggagaacccaatggggatgagcgccacaccttcccaagaagaggagaaaatccacgagagcaagaaacagaaaaaaattcccccagagagtgaggcgcgtagccctctgccgtcttcaactgctaaggaaatacgccatttccagagctcggagaccctcttaagtgaggacgaatggaaggtactcgtcctgacaggaaacaccgggactcaggcaaatgtgaccctgtgggtgtatggagataagggagtgacaggccccatcagtcttaggaaagactcctccgaacagttatttttgcctgggcacgaggacgagtttcaggtcgaaatccgaaatactggcaacatctacaaaatcagaattggacacgacggcactagcgagcagccagagtggaacttgcagcgggtgacaatgcagcatatgaagtcgaaaaagatcctggacttcgcagcaaacgtatggctcagtcggattcaggccgacggcgacgtcgtgtgtgagctccctgtggttaaaggtgggcaggccattttcccactcgtccggtatcaggtggacgtgtacacggggcaattaaaacacgccgaaacggagagcgaagttttcctgtgcttgttcggggagagaggcgattctggtctccggcaactgtataaatccaacatgcaggttaaatttcagcgtggacagatagacaagttccaagtagctgctgtctcacttggtaagctccagaaggtgttgctgcggtgcgaagccagcgacaaatctcagtactggtactgtgaacaggtaattgtgcgcgaacctgggacaactagcgagtcgatttttacttgccaaaggtggctcccattcatgagccaagggatcatacacagcgagattgagctttacctccaaggggaagactactag

SEQ ID NO: 132258 - DNA, 7203 bp, synthetic construct
  misc_feature 1..7203: note = Description of Artificial Sequence: Synthetic coding sequence
  source 1..7203: mol_type = other DNA
atgaacagtacccccaggaatgcccaggcccctagccacagggagtgcttcctccccagcgtggcccgtacaccatcagtcaccaaagtgaccccagccaaaaagattactttcttaaagaggggagacccacgctttgcaggcgtccgcctggcagtgcaccagcgagcctttaagacatttagcgccctgatggacgaactgagccagcgtgtgcccttgagcttcggtgtgcggagcgtgacgacgcctcgcggacttcattctttatccgccctcgaacagcttgaagacggtgggtgctacttgtgctccgataaaaagccccctaaaacaccaagcggcccgggacggccacaagagcgaaacccaacagcacaacaacttagagatgtggagggtcagcgtgaagctccaggaacaagctcctccaggaaatcgctgaaaacccctcggcggattctgctcatcaagaatatggatccacggctgcagcaaactgtcgtcctgtcccataggaatacacggaacttggccgccttcctgggaaaagcaagcgatttactgcggttccctgtgaaacagttgtacaccacgagtggcaagaaggtggatagcctccaggcgctgttgcacagcccttccgtcctcgtgtgtgccggacacgaggcttttaggaccccggccatgaagaacgctcgcagatctgaggctgaaaccctgagcgggctgacttcacggaataagaacggatcctggggaccgaagactaagccgagcgtgattcactccagatctccccccggctcgactcccagactgcctgagcggcccgggccgagcaatcccccagtaggaccagcaccgggccgccatccccaagatacaccagcccagtctgggcccctcgtggcaggggacgatatgaaaaaaaaggtccggatgaacgaggacggttccctgagtgtcgagatgaaggtgcgctttcatctcgtgggagaagacacattgctgtggtcacgtaggatggggagagcaagcgctctgacggcagcgagcggcgaggatcccgtgctcggcgaggtggacccactgtgctgcgtctgggaggggtacccctggggattttcagagccaggagtgtggggcccccgaccctgcagagtcgggtgcagagaggtctttggcaggggaggtcagcctggaccgaagtacgagatttggactaaccctctccacgcatcacagggcgagcgggtggccgcgagaaagcgctgggggcttgcccaacatgttcgctgtagcggcttgtggggccacggcaccgcagggcgggaaaggtgctcgcaggatagtgccagcccagctagcagtactggactccctgaagggtcagagccagagagcagctgctgccctcggacacctgaagacggagtggattctgcatccccaagcgcgcagatcggcgctgagaggaaagccgggggctccttgggtgaggaccccggtttgtgcatcgacggagcggggctggggggccctgaacagggtgggcgactgacgcctcgggccagatccgaggagggggcttcatcagacagttccgcatctacaggtagccatgaaggatcttccgaatggggaggaaggcctcaagggtgtcctggaaaagcccgcgctgagaccagtcagcaagaggcctcagaagggggtgaccctgcgagtcctgcactgagcttgtccagtctgagaagtgacgatctccaagccgagactcagggacagggtaccgagcaagccaccggcgcagccgttaccagagagcctctggttctaggcctcagttgtagctgggactctgagggagcctcaagtacacccagcacgtgcacaagtagtcaacaggggcaaaggcgccacagatctcgggcaagcgccatgtcatcccccagcagcccgggcctgggacgagtggcacccagaggccaccccaggcacagccattaccgcaaagatacacactccccactggatagcagcgtgacaaaacaggtgccgcggccccctgagagaaggcgagcttgccaggacggatcggtgccccggtatagcggatcatctagctcaacgagaactcaggcaagcggtaatttaagaccgccaagctcaggatccctgccgagtcaggatttgcttggaacttcgtcagccacggtcactccagcagtgcatagcgatttcgtgtcaggtgtttcccctcataatgcacctagcgccggttgggcaggtgatgcgggctccaggacctgctcccccgctcccatcccgccacatacatctgatagctgttccaagagtggtgcagcctccctgggagaagaggctcgggatacacctcaacctagcagtcctctggtcctgcaggtcggacgcccagagcaaggggccgtcggcccacaccgctctcactgctgtagccaaccaggtacccaacctgcacaggaagcacagcgaggcccatcacccgaagcgtcctggctgtgcggacggtactgccccactccgccgcgtggccggccgtgtcctcagagacgttcatccagttgtgggtctaccggtagcagccaccagtccaccgctcgcggaccaggcggtagcccccaggaggggacgaggcaacccggccccaccccctccccaggtcctaactccggcgcatcccgacggtccagcgcctctcagggagcaggaagccgaggtctgagcgaagaaaagactctgaggagcggtggtgggccccagggtcaggaggaagcctccggcgtgagcccatcgagcctccccagaagttcacctgaggcagtcgtgagggagtggctggacaacatccctgaggaacccatcctgatgacctatgagctcgccgatgaaaccactggggctgcgggcggaggactccgtggtcccgaggtcgatccaggagatgatcacagcctggagggcttaggagaaccagcacaggccggccagcagtccctggaaggggatccaggccaggaccctgagccagaaggggccctgcttgggtcaagcgatacaggcccccagtccggcgaaggcgtgcctcagggcgcagcccctgaaggagtaagcgaggccccagcagaagcaggcgcggacagagaggctccagcagggtgtagggtaagcctccgcgctctacccggacgcgtctctgcttccacccaaatcatgagagccctaatgggttcaaagcagggtcgcccttcctcagtacctgaggtttcacgtcccatggccaggcgtctctcctgctccgcgggtgccctaataacatgtctcgcctcgctccagctattcgaggaagacctgggatcacccgctagcaaggtgcggttcaaggatagtcctcggtatcaagagctgctgtcgatctccaaagatctgtggcccgggtgtgatgtgggagaagaccagctcgactctggactgtgggagttaacgtggtcccaggctcttcccgatctcggaagccacgcgatgaccgagaactttactccaacaagcagcagcggggtggatatctcctctggatctggcgggagcggcgagtcgtccgtgccttgtgcaatggatggaacattggtcactcagggcaccgagttacctttaaagaccagcaaccagaggccagactcccgaacatacgaaagtcctggtgatcttgagaatcagcagcaatgctgtttcccaacctttctcaatgctcgagcctgcgcatgcgctacaaatgaggacgaggccgagagggattctgaggagcagagagctagttcaaatttagagcagctggctgaaaacaccgtgcaggaggaagtgcaactcgaggagacaaaggagggtaccgagggggaaggcttacaagaggaggctgtgcagctggaggaaacgaagaccgaagagggactgcaggaggagggcgtgcaattggaggaaactaaagagacggaaggggaagggcagcaggaggaagaggcccagctcgaggagatcgaagaaacagggggcgaagggctccaagaagagggcgtccagctggaagaagttaaagagggacctgaaggcggcctccagggtgaggctctggaggagggcctaaaagaagaagggttgcccgaggaggggtctgtccatggacaagaactcagcgaagcgtcctctcctgatgggaagggcagccaggaggatgatcccgtacaagaggaggaagccgggcgtgcatccgcttcggcagaaccttgcccggcagaaggtacagaagaacccaccgagcccccgtcccacctgtcggagacagatccgagtgcctccgaaaggcagtccggcagtcagcttgagcctggtctggaaaaacctccaggggctacgatgatgggacaggaacacacccaggcacaacctacccagggcgcagctgagcgcagcagttctgtagcctgttctgctgctctcgattgtgatcccatttgggtctccgtgctcttgaagaagacggaaaaagcctttttggctcatctcgcatctgccgtggctgagttgagagcccggtggggactgcaggataatgatctattggaccagatggcagccgagctccaacaggatgtcgcccagagactccaggattccaccaagagggagctgcagaagttacagggtagggctggtcggatggtattggaaccacctcgcgaagctctaaccggcgagcttttgctgcagacccaacagaggagacaccgacttaggggtctgagaaatttgtctgccttcagcgaacgtacattgggtctcggacctctgagctttactctcgaggacgagcctgctctcagtacagccttggggtcccagctgggggaagaggctgaaggagaggaattctgcccgtgcgaagcgtgtgttcggaaaaaagtgagcccaatgtctcccaaggccacgatgggcgctacccgcgggcccattaaggaagccttcgaccttcagcaaatactccagcgaaaaaggggagaacacactgatggagaagctgccgaggtggctcccgggaagactcacaccgaccccacctcaacaagaactgtgcagggcgcggagggggggcttggaccaggtctctcccaaggcccgggggtcgatgagggtgaggacggcgagggcagccagaggctgaatcgagataaagaccccaaactgggagaggcggagggcgatgcaatggcacaagaacgggaaggcaagacccataattccgagacctctgctgggagcgaactgggagaggcggaacaggaaggagaggggattagcgagcgcggagaaactgggggtcagggcagtggccatgaagataacctgcagggagaggccgcggccggaggagatcaggatcctgggcagagtgacggcgcggaaggtattgaggctccggaggcagagggggaggcacaaccggagtctgagggcgtcgaggcccctgaggctgaaggggatgcacaggaggcggagggggaagctcagcctgaatcagaagatgttgaggcccctgaagccgaaggcgaggcacagccagaaagtgaggatgtggagacacctgaagcagagtgggaggtgcagccagaaagcgagggcgctgaggcccccgaagcagaaaaagaggcgcagcctgagacagagagcgtcgaggcattggagacggagggcgaagatgagccggaatccgagggcgcagaggcccaggaggccgaggaggcagcgcaagaagctgaagggcaaacgcaaccagaaagcgaggttatagaaagtcaggaggctgaagaggaagcccaaccagagtccgaagacgtagaggcattggaggtcgaagtagagacacaggaagctgaaggggaggcccagcccgaaagtgaggatgtggaggctcctgaagcggagggggagatgcaagaggcggaagaagaagcccagcccgagtctgacggcgtggaggctcagcctaaatccgaaggcgaagaagcacaggaggtggaaggtgagacgcagaagacagagggggacgcacaacctgagtctgacggcgtggaagcccctgaagctgaggaggaggctcaggaagccgagggggaagtgcaagaggctgaaggagaggcgcatcctgagagcgaagatgtcgacgcgcaagaggctgagggagaagcacagcctgagtctgagggagtcgaggccccagaggcagagggggaggcacagaaggctgagggtatcgaagccccagagaccgagggtgaggcgcagcccgagagcgaggggatagaggctcctgaggcggaaggcgaagctcaaccagaatcagagggagttgaagcccaggacgccgaaggcgaggctcagccggaatctgagggcattgaagcccaggaagcggaggaggaggcccagccagagctggagggcgttgaagctccagaggcagaaggggaagcccagccggagtccgagggcatagaggcccctgaagccgaaggagaggcccagcccgagttagagggcgttgaggctcccgaagccgaggaggaagctcaacctgagcccgaaggagtggagacccctgaagcagagggggaagcacagcccgagtcagagggcgaaactcaaggcgagaaaaagggatccccacaggtgtcgttgggcgatgggcaatctgaggaagccagtgagagttcttctcccgttccggaggaccgaccgacgccaccgccctctcccgggggcgacactcctcatcagcgcccaggctcccagacaggcccaagctcatcccgcgcatcctcatggggaaactgttggcagaaagatagcgaaaacgatcatgtgctaggcgatacgaggagcccagatgctaaatccacggggaccccccacgctgagaggaaagcaacgcgtatgtatccggagagttctacaagcgaacaggaagaggctcccctgggctctaggacgccagagcagggggcatcggaaggatacgacctccaggaggaccaggccctgggaagcctggcacccaccgaagctgtgggccgggccgatgggtttgggcaggacgatctcgatttctag

SEQ ID NO: 132259 - DNA, 5019 bp, synthetic construct
  misc_feature 1..5019: note = Description of Artificial Sequence: Synthetic coding sequence
  source 1..5019: mol_type = other DNA
atgaaggtcgatcgcacgaagctgaagaagacccccaccgaagctcctgcggactgcagagccctcattgataagctcaaagtgtgtaacgatgaacagctcctcctcgaacttcagcaaataaaaacatggaatatcggaaaatgcgaactttaccattgggttgatttgctcgacaggtttgatggaatcctagcagatgctggccagactgttgagaacatgtcctggatgcttgtctgtgatagacccgagcgcgaacagctgaaaatgctcttgctggctgtacttaatttcaccgctctcctgattgagtacagctttagccggcatctgtactctagtatcgagcatctgactactctgctggcctcttcagacatgcaggtggtgctggcggtcctgaatctgctctatgttttttctaagaggagcaactatattaccaggttggggtctgacaaacgaacaccactgttaacacgcttgcagcatctagccgaatcctggggcggcaaagaaaacgggttcgggctcgccgagtgctgtcgtgacctgcacatgatgaagtatccgccttccgcaaccaccctccacttcgaattttatgctgacccaggagccgaggtgaaaattgaaaaacggacaacgagtaatacactgcattacatccacatcgagcagctggataaaatttccgagagtccctccgaaataatggagagtcttaccaagatgtactctatcccaaaggataaacagatgctgttatttacccatatccggctcgctcacggcttttccaatcataggaaacgcctgcaggctgtgcaggcccggctgcacgccatatccatcctggtttacagtaatgcactacaagaaagcgcaaactctattctttacaacggattgatagaggagctcgtggacgttcttcagattacagataagcagcttatggagattaaagccgcaagcttacgcacactgacctccatcgttcacctggagcgtactccgaagctttcatcgattatcgattgtaccgggacagcaagctaccacggatttttaccggtccttgtgagaaattgcattcaagcaatgatcgacccgtccatggacccatatccccaccaattcgctactgcactgttcagttttctataccacttggcatcctatgatgccggcggtgaagccctggtctcgtgtgggatgatggaagcactgctcaaggttatcaagttcctgggtgatgagcaggaccagatcacatttgtcacacgcgccgtccgcgtggtagatctgattacaaatctggacatggctgcatttcagtcccactctggtctcagtatatttatctatcgtcttgagcacgaagtggacctttgtcgcaaagaatgtccattcgtgatcaaacccaaaatacagcgacctaacaccactcaggagggagaagagatggaaacagacatggacggggtgcagtgtattccccagcgcgctgctttgctgaagagtatgttgaattttctgaaaaaagccattcaggatccagctttctcagacggtatccgccatgtcatggacggtagtttacctacttccctgaagcacataattagcaatgccgaatactacggtccgtcgctgtttttgctggcaaccgaggttgttaccgtatttgtattccaggagcctagcctgctgtccagccttcaggataatggcctcaccgatgtgatgctccacgccctcctgatcaaggatgtgcccgcaacaagggaggttttggggtccctcccaaacgtattctccgcactttgcttgaacgccagagggcttcagtctttcgtccagtgtcagccttttgagaggttgttcaaggtcctgctctctccagactatctgcctgctatgcggcgtcgtcgctcctccgacccacttggagataccgcaagcaatctgggaagtgccgtggacgaactcatgcggcaccagcctactttgaagacagacgctacaaccgctataatcaaactgcttgaggaaatttgtaacctcggccgggaccctaagtacatttgtcagaagccaagcattcaaaaggcagatgggaccgctactgccccccccccccgaagcaatcatgcagcagaggaggcatcatcagaggatgaggaagaagaagaggtccaggcaatgcagagtttcaattcaacacagcaaaatgagactgaaccaaatcagcaggtggtcggcacggaggaacggatccccattccactgatggactacatcctgaacgtgatgaaattcgtggaatccatactgtcaaacaacaccactgacgatcattgtcaggaatttgtcaaccagaaggggttactacctttggtcaccatcctgggcctaccaaatctcccaatcgactttccaactagcgccgcatgtcaggccgtagcaggggtctgcaaaagtatccttaccttgtcccatgagcccaaggtgctgcaggaaggcctgctacaactcgacagcatcctgtcatccctggagcccctacataggcccattgaatctccaggaggcagcgtgctcctgcgtgagctggcttgcgcggggaacgtggcggatgccaccctcagcgcacaggcgaccccgttgctgcacgctttgactgccgcgcacgcctacatcatgatgtttgtgcatacctgcagagtgggccaatccgagatccggtcaattagcgtaaatcagtgggggagccagctagggctgagtgtcctctctaagctgtcacagctgtattgctccctggtttgggagagtacagttctcctttcactttgcactccaaactcccttccttccggctgcgagtttggtcaagcggacatgcagaagctcgtgcccaaggatgagaaggcagggaccactcagggcgggaaaagatcagatggtgaacaagacggcgccgcaggctcaatggatgcttccactcaagggctgctggaagggattgggttggatggcgatactcttgctcctatggaaacagacgagcccactgcgagcgactcaaagggtaagtcaaagatcacaccggcgatggcagcccgcatcaaacagatcaagccccttctctcagctagcagtcgtcttgggagggccctcgccgaattattcggactacttgtgaaactctgtgtcggctcccctgtgcggcagcgccggtctcaccatgctgcgtctacgaccacagctcccacaccagctgctcggtcgacagccagcgccctgaccaagctgctcaccaagggtttgtcgtggcagccccccccatacactccaacaccacgcttccgtctgactttttttatctgttctgtaggctttacgagtccaatgttatttgacgagaggaagtatccttaccacctgatgctccagaagtttctgtgctcaggtggccataacgctttatttgagacgtttaattgggctctgtccatgggaggcaaggtgcctgtgtccgaaggactggagcacagtgatctgcccgacggtacaggcgaattcttagatgcctggctgatgttggtggaaaagatggtgaatcccacaacagtgttggagagcccacactccctccccgctaaacttcccggcggcgttcagaactttccgcagttttcagcactccggttccttgtcgtgacccaaaaggccgctttcacctgtatcaaaaacctatggaatcggaaacctcttaaagtctatgggggtcggatggctgagtcgatgttggcaatcctgtgccacatcctgcgcggggagcctgtgatcagggagcgtttatctaaggaaaaggagggttcgcgcggtgaggaagataccggccaggaggaggggggaagtcggagagaacctcaggtgaaccagcaacagttgcagcaacttatggatatggggtttacccgagagcatgctatggaagccctgctgaatacatcgaccatggagcaggctacagagtatttattgacccatcccccccccatcatgggtggcgtggtcagggatctgagtatgtcagaggaggatcagatgatgagggcaatcgcaatgagcttgggacaagatatccctatggaccaaagagcagagtcccccgaagaggtggcctgccgtaaggaagaggaggagcggaaggcccgggagaagcaggaggaagaggaggcaaagtgtttggaaaaatttcaagatgccgatccgttggagcaagatgagttgcacactttcaccgacaccatgttacctggctgttttcacctactggacgaactaccagacactgtctacagggtgtgtgatctaatcatgacggctatcaaaagaaatggagccgactaccgggatatgattctgaaacaggtcgtcaaccaggtgtgggaagctgccgatgtcttgatcaaggccgcccttcctttgacgaccagtgacactaaaaccgtcagcgaatggataagccagatggctactttaccccaggccagcaacttggcaacccgcatcctactattgacattgctgttcgaggaactcaagttaccttgcgcatgggtggtggagagtagtggcatcctgaatgtcttgatcaagctgttggaggtagttcagccttgcctacaggccgctaaggaacaaaaagaggtgcagaccccaaagtggatcacacctgtactacttcttattgacttctacgaaaagactgcaatttcttctaaacggcgcgcccagatgaccaaataccttcaaagtaactcaaacaattggagatggtttgatgacagatctggtcgctggtgctcctattcagccagcaacaactcaaccatagattccgcgtggaagtctggggagacctcagtgagattcactgcgggcaggcgccgctacaccgtgcaattcaccacgatggttcagggaacgtccgctgagtag

SEQ ID NO: 132260 - DNA, 666 bp, synthetic construct
  misc_feature 1..666: note = Description of Artificial Sequence: Synthetic coding sequence
  source 1..666: mol_type = other DNA
atgagttctcggccaggacgggaggatgttggtgccgcgggcgccagaagaccgcgcgaacctcccgaacaggagctgcaacgcagacgggaacaaaaacgtcggagacatgacgctcagcaactccagcaactgaagcacctggagtcattctatgagaagccaccccctgggctgatcaaagaagacgagactaagccagaagattgcattcccgacgtacctgggaatgaacacgcacgcgagttcctggcacatgcgccgactaagggcctgtggatgcccttagggaaggaggtgaaagtgatgcaatgttggagatgcaagcgctatgggcaccggaccggcgataaagagtgtccgttctttataaaaggaaatcagaaactggagcagttccgggtagctcacgaggatcccatgtatgacatcattcgcgacaataagagacatgaaaaagacgtcaggatccaacaactgaagcagctgctagaggattcaaccagcgatgaggatcgctcatcatcatccagcagtgaaggaaaggaaaaacataaaaagaagaagaaaaaggagaagcacaagaagcgaaagaaggagaagaagaagaagaagaagaggaaacataaatcgtcaaagtctaacgaaggcagtgacagtgagtag

SEQ ID NO: 132261 - DNA, 2262 bp, synthetic construct
  misc_feature 1..2262: note = Description of Artificial Sequence: Synthetic coding sequence
  source 1..2262: mol_type = other DNA
atgcgcgagcccgaagagttgatgccggactccggcgctgtgtttacctttggcaaatcaaagttcgcggaaaacaaccccggcaagttttggttcaaaaatgacgttcctgtccacctctcctgtggggatgaacattccgcggtggtcactggcaacaataagctgtatatgttcggcagtaacaattgggggcagctgggtcttggcagcaagtccgctatttctaaacctacttgtgtgaaagctctaaagcccgagaaggtcaagttagccgcctgtggtcgaaatcacaccttggtgtcaaccgagggcggcaacgtgtacgctaccggcgggaacaacgaggggcagcttggcctgggcgacacagaagagcgaaatacctttcatgtcatttcatttttcacatcggagcacaaaatcaagcagctgagcgccggatccaatacaagcgcagcgttaaccgaggatggccgactgtttatgtggggagataacagcgagggacaaattggattgaaaaacgtgagtaacgtctgcgtccctcagcaggtgactattggcaagcctgtgagctggatttcatgtgggtactaccatagtgcttttgtaactaccgacggggagttgtatgtatttggagagcccgaaaatggtaaattgggcctgcccaaccagctactgggcaatcacaggacgcctcagctggtttcagaaataccggaaaaagtaattcaagttgcttgtggcggcgagcacaccgtggtgcttactgaaaatgctgtgtatacttttggtctcgggcagtttggacagcttgggcttggaaccttcttgttcgaaactagtgaacctaaggtgatcgagaatatcagagaccagacaataagttatatttcttgcggcgaaaaccacactgctctgatcactgatatcggactgatgtatacatttggcgacggccggcacgggaaacttggcctgggtcttgagaacttcacgaaccacttcatccccacactctgctctaattttttgagattcattgtgaaacttgagcgatcacctgatagcttttccatgcgaagaacgctgcctcccattgaaggcactctcggtctatctgcatgcttcctccccaacagtgtgtttccgcgctgtagcgagcgtaacctgcaggaatcggtgcttagcgagcaggacttaatgcagcccgaagaaccagattatttgcttgacgagatgactaaggaggctgaaatcgacaatagcagcacagtggaatctttgggcgagaccactgatattcttaacatgactcacatcatgagtctcaatagtaatgagaagagcctgaaactgagtcctgtgcagaagcagaagaagcagcagaccataggagaacttactcaagacacagcactgaccgaaaacgatgacagcgacgaatatgaggagatgtcagagatgaaggagggcaaagcttgcaaacagcatgttagccaaggcattttcatgactcagcctgcaaccactatcgaagctttttccgacgaggaggtggagattcctgaggagaaagagggcgcagaagattccaagggcaacgggatagaggagcaggaagtggaggcaaacgaagaaaacgtaaaggtgcacggcggcagaaaagagaagactgaaattctgtccgacgatttgacagataaggccgaggaccatgagtttagcaagactgaagagctgaagctggaagatgtggacgaagaaatcaacgccgagaacgtcgagtccaagaagaagacagtgggagacgatgaatcggtgcccactggctaccatagcaagactgagggcgccgagcgcaccaacgacgactcctctgcagagacaatcgagaaaaaggaaaaggcgaatctcgaggagagggcaatctgtgagtataacgaaaatccaaaagggtacatgctggacgacgccgacagcagttctctggaaatcctggaaaacagtgaaaccacgccaagcaaggatatgaagaaaaccaagaagatcttcttattcaaaagagtgccatctattaaccagaagatcgtgaaaaacaacaacgagcccctgcctgaaattaaaagcatcggcgatcaaatcatccttaagagtgacaataaagacgccgatcaaaaccatatgtctcagaatcaccaaaatatccctcccacaaatacagagaggcggtccaagtcttgcacgatcctgtag

SEQ ID NO: 132262 - DNA, 2448 bp, synthetic construct
  misc_feature 1..2448: note = Description of Artificial Sequence: Synthetic coding sequence
  source 1..2448: mol_type = other DNA
atgcgggagcctgaagaactgatgccagactcaggcgcagttttcacattcggcaagtccaaattcgccgaaaacaatccagggaagttttggttcaagaatgatgtgccagtgcacctatcatgcggtgatgagcacagcgctgtggtaactggcaacaataagctgtacatgtttggctctaataattgggggcaactaggcttggggtctaaaagtgcgataagcaaacccacttgcgtgaaagctctgaagcccgagaaggtgaagcttgccgcatgtggaaggaatcacaccctggtcagtaccgaaggtggtaacgtctatgccaccggcggcaataacgaagggcaattgggattaggtgatactgaggagagaaacaccttccatgttattagctttttcacttctgagcacaaaattaaacagttatcagcagggtcaaacacctccgccgctttgacagaagacggcaggctgtttatgtggggggataacagtgaaggacaaattggtctcaaaaacgtgagtaatgtgtgcgtgccccagcaggttaccattggaaagcctgtttcatggatctcctgcggctactaccattcagccttcgttacaacagacggagagctttacgtgttcggggagccagagaacgggaagctgggcctgcctaaccagttgctaggtaatcaccggactcctcagctagtcagtgaaatacctgagaaagttattcaggtggcctgtgggggtgagcacaccgtggtgttgaccgagaacgctgtctacacctttgggctgggccagtttgggcagctgggactggggacattcctctttgaaacaagcgaacccaaagtaatcgaaaatattcgtgatcagacgatcagctacatctcctgcggggaaaatcatacagccctgattaccgatataggcctcatgtacacatttggcgatgggcgacatggaaaactgggccttggcctggaaaactttactaaccacttcattccaacactgtgttccaactttctccggttcatcgtgaaacttgtggcttgcgggggttgccacatggtagtgtttgccgctccccaccggggggtggccaaggagatcgagttcgatgagatcaatgacacttgcctcagcgtagcgacctttctgccctattcctcattaacaagcggtaacgtgctgcagagaaccttgagcgccagaatgcgccgtcgcgagagagaaaggtcaccagactcttttagtatgcgtagaaccctgccgcctatcgaggggactcttggcctgtcagcctgtttccttccaaattctgtattcccccgctgttccgagagaaaccttcaggagagcgtgctctcagagcaggatctcatgcagccggaggagcctgactacttgctcgacgagatgacaaaggaggccgagatagataactctagcacagtggagtcactgggagaaacaacagatattctaaacatgacccacattatgtcactaaacagtaatgaaaagtcactgaagttgtcgcctgtgcagaagcagaagaagcagcagaccatcggggaactgacacaggacacagcactgacagagaacgacgattcagacgagtatgaagaaatgagtgagatgaaagagggcaaggcttgcaagcaacacgtgtctcagggcattttcatgacacagccggccacaacaatcgaagctttttccgatgaggaagtagaaatccccgaagagaaggagggcgccgaggactccaagggcaatgggatagaggaacaagaagttgaagccaatgaggaaaacgtgaaagttcacggcggacgcaaggagaagacggagattctgtcagacgatctgaccgacaaagcagaggatcacgaattcagcaagactgaggagctgaagttggaggatgttgacgaagagattaacgccgagaatgtggaatctaagaaaaagacagtgggggacgatgagtctgtaccaaccgggtaccattctaagaccgagggagcagaaaggactaacgatgattctagcgctgagacgatcgagaaaaaagagaaagccaatctcgaagagcgcgccatctgtgagtacaatgagaatcccaagggatacatgcttgatgacgctgatagtagcagcctggagatcttagaaaattctgaaactaccccgtcgaaggatatgaagaaaacaaaaaaaatcttcctgttcaagcgggtcccttcgatcaatcagaagattgtgaaaaacaacaacgaacccctgccagagataaagagcataggagatcagatcattctcaaaagcgataataaggacgccgatcagaaccacatgagccagaaccatcagaatatccctccaacgaatactgaacgcagaagcaagtcatgtacgatattgtag

SEQ ID NO: 132263 - DNA, 1443 bp, synthetic construct
  misc_feature 1..1443: note = Description of Artificial Sequence: Synthetic coding sequence
  source 1..1443: mol_type = other DNA
atgagagagcctgaggaactaatgcctgactccggcgcggtcttcacatttggcaaatctaagttcgctgaaaataaccctggaaaattttggttcaaaaacgacgttccagttcacctgtcttgcggggacgaacactctgctgtggtgaccggaaataataagctctacatgttcggcagtaataactggggccaactgggcctcggatcaaagtccgccattagcaaaccgacatgtgtgaaggcactgaagccggaaaaggtgaaactcgccgcatgcgggcggaaccacacactggtttctacggaagggggtaatgtgtacgctaccgggggcaacaacgagggtcagctggggctgggagatacagaagagcgcaacactttccatgtgatctccttttttacgagcgagcataagatcaagcagctgtcagccggatcgaatacgtccgccgctcttacagaagacggccgcctctttatgtggggagacaactcagagggccagatcggactgaagaatgtgtccaacgtgtgtgtaccacagcaggtaacgattggcaaacccgtcagctggattagttgcggatactatcacagcgcttttgtgaccactgatggggaactgtatgtcttcggagaacctgagaacgggaagttggggcttccgaatcagctcctcgggaaccatagaaccccgcagctggtaagtgagattcccgagaaggtgatccaggtggcttgtggtggtgagcatacagtggtcctaaccgagaacgctgtttacaccttcggcctcggacagtttggccagctgggactgggcacttttctgtttgagactagtgaacccaaggtgatcgagaacatacgcgatcagaccatcagctatattagctgcggggaaaatcatactgctctgataacggacattggtctcatgtatacatttggggatggacggcacggcaaactcggccttgggctcgagaatttcacaaaccactttattccaaccttatgcagcaatttcctgcgattcatcgtcaagctggtggcgtgcggaggttgccacatggtggtgttcgctgcgccccatcgcggtgtggctaaagagatcgaatttgatgagattaatgacacatgtttgtcagtggcaaccttccttccttacagttcactgacttcaggtaatgtactccagaggactctttccgctcgcatgcgccgccgagagagagaaagatcaccagatagcttctctatgaggcggaccctcccacccatcgaggggactttgggcctgtctgcctgctttcttcctaactctgtgtttccgagatgtagtgagcgcaatcttcaggagagcgtgctgagtgaacaagacctcatgcagccagaggagcccgacacgcaccacgagcctgagtttcagtag

SEQ ID NO: 132264 - DNA, 3063 bp, synthetic construct
  misc_feature 1..3063: note = Description of Artificial Sequence: Synthetic coding sequence
  source 1..3063: mol_type = other DNA
atgcgagagcccgaagaattgatgccggatagcggggcagtgtttactttcggcaaaagtaagttcgccgagaataaccccggcaaattttggttcaaaaatgacgtcccggtacacctaagctgcggagacgagcactccgccgtcgtgacgggcaataataagctttacatgttcggctcgaacaactggggccaattagggcttggatccaaaagtgccatatctaaaccaacgtgtgttaaggccctgaagcctgaaaaggtgaaactggcagcctgtggaagaaaccacacgctggtctccaccgaaggagggaatgtgtacgctacaggaggtaataatgagggacagcttggacttggcgatactgaagagcggaatacattccacgtgatcagctttttcactagtgagcataaaattaaacagttgagcgccggctccaacaccagcgcagctctgacagaggacggtaggctgttcatgtggggcgacaatagcgagggacagatcggcctgaagaatgtgtcgaatgtgtgcgtgccccagcaggtgacaattggaaaaccagtatcctggataagttgcggttactatcattccgccttcgtgactaccgacggcgaactgtacgtttttggcgagcctgagaacgggaaactgggtttgcctaaccaactcctaggtaatcacaggacaccacagttagtgtccgagatccctgaaaaggtgatccaggtggcctgcgggggcgagcataccgttgtgttgactgaaaatgcagtctatacatttggtcttgggcagtttggtcagctgggactcgggacctttttgttcgagacgtctgaacctaaggttatcgagaacattcgcgaccagactatttcatacatttcctgcggagagaatcacactgccctgatcaccgacatcggattgatgtatacatttggcgacggtcgtcatgggaaattaggtctgggcctggagaacttcaccaaccatttcattcccacgttgtgcagcaattttcttcgcttcatagtgaagctggtggcctgcggcgggtgtcacatggtcgtatttgcggctccccacagaggagtggccaaagagattgaatttgacgagattaatgatacttgtctgtcagtggcaactttcctgccctattccagcttgactagcggaaatgttctgcagaggaccctcagtgccaggatgcgcaggagagaaagagagaggagccccgattcattttccatgaggcgcacacttccacctattgagggcactctaggattatctgcatgcttcctgcccaacagcgtatttcctaggtgttcagaaagaaacctccaggagtcggtgctgtccgagcaggacctgatgcagcctgaagagccggattatcttcttgacgagatgacgaaggaagccgaaattgataacagctctactgtggaaagcctcggcgaaacaaccgatattttgaacatgactcatatcatgtctctgaactcgaatgagaaatctctaaagttgtccccggtccagaaacagaaaaagcaacaaaccattggggagctgacccaggataccgctcttaccgagaacgatgattcagatgagtacgaagaaatgtctgaaatgaaggaaggaaaagcctgcaagcagcacgtcagccagggcattttcatgacccagccagccaccacaattgaagctttttctgacgaggaggtaggtaatgataccgggcaagttggcccccaagctgataccgacggggagggtcttcagaaggaagtttaccgacacgagaataataatggcgtagaccagctcgacgcaaaggaaattgagaaggagtctgatggtgggcactcacagaaggagtctgaggcagaagagatcgattctgagaaagagactaagctggcagaaatcgccggtatgaaagatctacgcgagcgcgagaagagtaccaaaaaaatgtcgccttttttcggaaacctgccggaccgcggaatgaatactgaatctgaggagaacaaggacttcgtcaaaaagcgggagtcttgcaaacaggacgtgatctttgacagtgaacgggaatcggtcgagaaacccgactcatacatggagggtgcatccgaaagccagcaggggattgcggacggcttccaacagccggaggccattgagttcagtagcggcgagaaagaggacgacgaggtggagacagaccagaatataaggtatggcaggaagctgatagagcagggcaacgagaaagagactaagccaatcattagcaaaagtatggcaaaatatgactttaaatgcgatagattgtccgagatacccgaggagaaggaaggcgctgaagattctaaagggaatggtatcgaagagcaagaggtagaggccaatgaggaaaacgtgaaagtgcacggagggcgtaaagagaaaaccgaaatcctttcagacgacctcaccgataaggccgaagaccatgaatttagtaagaccgaggagctgaagctagaggatgtagatgaagaaattaatgccgagaacgtggaaagcaagaagaaaaccgtgggcgacgacgaaagcgtgccgacaggctatcattctaagaccgagggcgctgagcgaaccaatgacgacagctccgcggaaactatcgaaaagaaagagaaagccaatctcgaagagcgggccatctgtgagtacaacgagaaccctaaagggtacatgctcgacgatgctgactcttcttcactagaaatcttagaaaattccgagactacacccagtaaagacatgaaaaagacaaagaagatcttcttgttcaagagagtcccaagcataaatcaaaagattgtgaagaacaataacgagccgctgcccgagatcaaatcaattggcgatcagattatcctaaaaagcgataataaggatgctgaccagaaccacatgtcacagaatcaccaaaacataccccccacaaataccgaaaggcgctctaagtcttgcactatcctatag

SEQ ID NO: 132265 - DNA, 1941 bp, synthetic construct
  misc_feature 1..1941: note = Description of Artificial Sequence: Synthetic coding sequence
  source 1..1941: mol_type = other DNA
atgcgagagccagaggaattgatgccagatagcggggcggtgtttacctttggtaaatcgaaatttgccgagaataaccccgggaagttttggtttaagaacgatgttcctgttcatttaagttgtggcgatgagcactccgccgtcgtgacaggcaataataagctgtacatgttcggtagtaacaattggggacagctcggactggggtctaagagtgcaatctctaagcccacatgtgtcaaggcgctgaaaccagagaaggttaaacttgccgcatgcgggagaaaccataccctcgtgtccacagaaggaggcaacgtctatgccacgggaggcaataacgaagggcaacttggtttgggagacactgaggaaagaaatacctttcatgtgatttcattctttacatctgaacacaaaattaagcagctgtccgctggctctaatacatccgcagctctgactgaggacggcagactgttcatgtggggagacaattctgagggccagattggcctgaaaaatgtcagtaacgtctgtgtgccacagcaggttactattggaaagcctgtctcctggatttcctgtggatactaccatagcgctttcgtgacaactgacggggaactctacgtcttcggtgagccagaaaatggcaagctgggtctcccaaatcagctcctgggcaaccaccgaacaccccagctggtgtccgaaattccagaaaaggtgatccaggtcgcatgcggaggcgagcataccgtagtgcttacggaaaacgcagtctataccttcggccttggtcagtttggacagttgggtctgggaacatttttatttgagacgtcagaaccaaaagttatagagaatattcgagaccaaaccatttcttatatatcatgcggtgaaaaccatacagcattgataacggatatcggattaatgtatactttcggtgatggacggcatggtaagcttggtctgggcttagagaattttaccaatcacttcatacccacgctttgctctaactttcttcggtttatcgtgaaacttgtggcatgtggcggatgccacatggtggtgtttgctgctccccatcgaggcgttgccaaggagatagaattcgatgagataaacgatacctgcttatccgtggcgacttttctgccttatagttccttgacctctggaaatgtgctccagagaactctcagcgctagaatgaggagacgggagcgcgagagaagccctgactcttttagtatgcgtcgcacgctcccccccatcgaggggaccctcggcctaagcgcctgctttttgcccaacagtgtatttcccaggtgctctgagcggaacctgcaggagagtgttctttccgagcaagacttaatgcagcctgaggaacctgactaccttttggatgagatgacgaaggaggccgaaatagacaactcctcgactgtggagagtctaggtgaaaccaccgatatcctgaacatgacacacatcatgtccctcaatagtaatgaaaaaagtctgaaattgtcccctgtccagaaacagaaaaagcagcaaaccatcggggagctcacccaggatacagcattgaccgaaaacgacgactcagatgaatacgaagagatgagcgaaatgaaggaaggcaaagcctgcaaacagcatgtatctcaaggcatcttcatgacacagccggccaccaccattgaagcgttctctgacgaagaggtggagatccctgaagagaaggaaggtgccgaagatagcaaaggcaatggaattgaagaacaagaggtcgaggcaaatgaagaaaacgtgaaggttcacggcggtcggaaggagaaaaccgagatccttagcgatgatctcaccgacaaagccgaatattccgcgagtcattcccagattgtatccgtgtag

SEQ ID NO: 132266 - DNA, 3459 bp, synthetic construct
  misc_feature 1..3459: note = Description of Artificial Sequence: Synthetic coding sequence
  source 1..3459: mol_type = other DNA
atgcgcgagcctgaagagctaatgcctgattccggcgctgtatttacctttggaaaaagtaaattcgctgaaaataatccaggtaaattctggtttaaaaatgatgtgcctgtgcatctgtcatgcggagacgaacatagtgccgtagtaaccggcaacaacaaactctatatgttcggctctaataactggggccagctgggattggggtccaaatcagcgataagtaaacccacttgtgtgaaagctctgaagcccgagaaggtgaaactcgctgcttgcggacgcaatcatacacttgtgagcacagaaggagggaatgtgtatgcgaccggtggtaacaacgagggccagttgggcctaggggatacagaagagagaaacacatttcacgtcatctcatttttcacatccgagcacaagatcaagcagctttcagcagggagcaacacatccgctgccctaactgaggatggtcgtctgttcatgtggggggacaatagtgaaggacaaatcgggctgaagaacgtttctaacgtgtgcgtcccccagcaagtcactatcggaaagccagtatcatggatcagctgcggatactatcacagcgcatttgtgaccaccgacggggaactctatgtctttggcgagcccgaaaacggaaagctgggcctgcccaatcagctgctgggcaaccaccgcacaccacaactggtttccgagatacctgagaaggtcatccaggtcgcctgtggcggagaacacaccgtggtcttgacagaaaatgcagtgtatacctttgggttaggccaatttggtcagttgggacttggcacctttctgtttgaaacctcagagccaaaggtcattgagaatattcgcgatcagaccatttcctatatcagctgtggggaaaaccatacggcccttatcacagacatcggcctaatgtataccttcggagacggtcgacacgggaagctgggcttgggtctggaaaacttcaccaatcattttattcccaccttatgttctaattttctgagatttatagtgaagttggtggcatgcggagggtgccacatggtcgtcttcgcggcgccccatcgcggcgtggcaaaggagatcgagtttgacgagattaacgatacctgcctgtcagtggccacctttctcccgtactccagcttaaccagtggcaatgttctccagaggacgctaagtgctcggatgcgcagacgcgagagggagcgctcacccgattccttttctatgcgacggacactgcccccaattgagggaacccttggtctgagcgcctgcttcttgccgaattcggtttttcctaggtgttccgagaggaatctccaggagagcgtgctgagcgaacaggaccttatgcaacccgaagagcctgactacctgttagacgagatgaccaaggaggccgaaatcgacaactcctctacagtggagtcactaggggagaccaccgatatcttgaatatgacgcatattatgtctctgaactccaatgagaaatcactgaagctttcccctgtgcagaagcagaaaaagcaacagactatcggagaactgacacaggacaccgctttgaccgaaaacgatgactccgatgaatacgaagagatgagcgagatgaaagagggcaaagcctgcaagcaacatgtgtctcaggggatatttatgacccagccggccacaacaatagaggcattctctgacgaagaggtcgaaatccccgaggagaaggaaggggccgaagactctaaaggtaatggcatcgaagagcaggaagtggaagctaatgaagaaaacgtgaaagtgcacggcggaagaaaagaaaagaccgagatactgagtgacgaccttacagataaagcggaagtgtctgaagggaaggccaaaagtgtgggagaagctgaagatggacccgagggcagaggggatggcacctgcgaagagggctcctcaggagctgaacactggcaagacgaggagcgggaaaagggcgagaaagacaaagggcgcggcgagatggaaaggccaggcgaaggagaaaaggaactggcagagaaagaggaatggaaaaagcgcgacggagaagagcaggagcagaaggagagagagcaggggcaccagaaggagcgcaatcaagaaatggaggaaggtggcgaagaggaacacggtgaaggagaggaggaggaaggtgaccgggaggaggaagaggaaaaagaaggcgaagggaaggaagagggagaaggggaagaggtggagggggagcgggagaaggaggaaggcgagcggaagaaagaggagcgggcaggtaaggaagagaagggtgaagaagagggcgaccagggggagggcgaggaagaagagacagagggccgcggagaagagaaagaagagggcggtgaagtcgaagggggtgaagtcgaggaaggtaagggagagcgagaggaggaggaagaagagggcgagggggaggaggaggaaggcgagggagaagaggaagagggcgagggagaggaagaggaaggcgagggaaaaggcgaagaggaaggcgaagaaggcgaaggggaagaggaaggggaggagggagagggcgagggggaagaagaagagggcgagggcgagggcgaagaggaaggcgagggcgagggcgaagaggaggagggggagggagaaggagaagaagagggcgagggggaaggtgaagaggaggagggcgagggaaagggagaggaagaaggagaggaaggcgagggcgagggagaggaggaggagggggagggtgagggcgaagacggtgagggcgagggagaagaggaggagggagagtgggaaggagaggaggaggagggagagggcgagggtgaggaggaaggtgagggagaaggggaggagggggaaggagagggcgaggaagaggagggcgagggggagggagaggaagaggaaggagaagaggaaggcgaagaagagggcgagggggaggaggaaggggagggggagggtgaggaggaagaggagggcgaggtcgaaggtgaagtggagggtgaggaaggcgagggcgagggcgaagaagaagaaggcgaggaggagggagaggaacgcgagaaagaaggagaaggagaggagaataggcgcaaccgggaagaggaggaggaagaagaaggtaagtaccaggagacgggagaagaggagaacgagagacaggatggagaggaatacaaaaaagtgtcaaaaattaagggctctgttaagtacggcaagcacaagacatatcagaaaaaaagtgtgaccaacactcagggaaatgggaaggagcagaggagtaaaatgcccgttcagtcaaagcgactcttgaaaaacgggccatcaggctcaaagaaattctggaacaatgtacttccacattacctagagttaaagtag

SEQ ID NO: 132267 - DNA, 2121 bp, synthetic construct
  misc_feature 1..2121: note = Description of Artificial Sequence: Synthetic coding sequence
  source 1..2121: mol_type = other DNA
atgaacgagagcaaaccaggtgattctcagaacttggcatgcgttttctgcaggaaacacgatgattgcccgaacaagtacggggagaagaaaaccaaggagaaatggaacctaaccgtccactactactgccttctgatgagtagcggcatatggcagcggggcaaagaggaagagggcgtgtatggcttccttatcgaggacatccggaaggaggtgaatcgcgctagtaaattgaagtgctgcgtctgtaagaagaacggcgcttcaatcggatgcgttgcgccccgatgcaaaagaagctaccactttccctgtgggttgcaacgcgaatgcatcttccaattcaccggaaattttgcttccttttgttgggatcatagacccgtccagataattacaagtaacaattaccgggagtccctcccctgtactatatgtctggagttcatagaaccaattcctagttacaacattctaagaagcccctgttgtaaaaatgcgtggtttcacagagactgcctgcaggtacaggctataaatgccggcgtttttttcttcagatgcactatttgcaacaattctgatattttccaaaaggaaatgctgcggatgggtatacacatacccgaaaaggacgcctcctgggagctggaggagaacgcataccaagagctcctgcagcattatgagcgttgtgatgttaggcgttgccgctgcaaagagggccgtgattacaacgctcccgatagtaagtgggagatcaagaggtgccagtgttgcggctcctctggtacacatctcgcatgttcatctcttcgttcctgggaacaaaattgggaatgtcttgagtgtcgcgggatcatttataatagcggcgaatttcagaaggctaaaaagcacgtgctgcccaatagcaataatgtcggcatcacggactgccttttagaggagtccagtccgaagctgccacggcagagtcccgggagccagtctaaggatttgctgagacaagggtccaaattccggaggaatgtatctaccctgctcatcgagctcggcttccaaatcaagaaaaaaactaaaaggttgtacatcaacaaagccaatatttggaattctgctctggatgcatttcgtaaccgaaacttcaacccgagctacgctatcgaagtggcatacgtgattgaaaacgataactttggcagtgagcaccctgggagcaaacaggagttcctgtcccttctgatgcagcacctagaaaatagctcattattcgagggctctctgagtaaaaatctttctctaaacagtcaggctctcaaggaaaatctgtattacgaggcaggaaaaatgttagcaatctccctcgtgcacgggggtcccagtcctggattctttagcaaaaccctctttaattgcctagtgtatggcccagaaaacacccagcctatcctggatgatgtgagtgactttgatgtagcccagattattattagaatcaacactgctacaactgtggccgacttaaagagcatcatcaatgaatgctacaactatctggagctgattggctgtctgaggttgatcacaactctcagcgacaagtacatgctggtcaaagacatcctgggataccacgttatccagagagtgcacacacctttcgaatctttcaaacaagggctgaagacactcggggtgcttgagaagatccaggcctaccctgaggcattttgctctattctgtgtcataagcctgagagcttatctgcgaaaattttgagcgaactgttcacagtccacactttacctgatgtgaaagcccttgggttttggaacagttatctgcaggccgttgaagatgggaaatccactaccactatggaagacatcttaatcttcgcgacgggatgctcaagcattcctcccgccggtttcaaaccgactccttccatagagtgtctgcatgtggatttccctgttgggaataaatgtaataactgccttgcaatccctataacgaacacatataaggagttccaggaaaatatggatttcacgatacgcaacaccttgagactcgagaaggaggagagcagtcactacataggccattag

SEQ ID NO: 132268 - DNA, 1938 bp, synthetic construct
  misc_feature 1..1938: note = Description of Artificial Sequence: Synthetic coding sequence
  source 1..1938: mol_type = other DNA
atgctgctcatggcacctgatcgctgtcgatacgtgtggaaacattgtcagcctatggagatgaggattaagtggattttcctctgttgtatacgtccactctacgattttacatctcagtatgtcatggaaacagactctctgttcctccactacctacaggaggcctctgccagactggacatacaccaggccatggccagcgaacacagcaccctcgccgccggctggatctgtttcgatcgtgttctagagacagtcgagaaagtacatggactggcaactctgattggtgcaggtggtgaggaattcggtgtgcttgagtactggatgcgacttaggtttccgattaagccctctcttcaagcttgcaataaacggaagaaagcacaggtgtacttgagcactgacgtgttaggcgggaggaaggcacaggaggaggaatttcgttctgagtcctgggagcctcagaacgagctgtggattgagataactaagtgttgtggccttcgtagcagatggctggggacgcagccatcaccttatgccgtatatcgattctttacgtttagcgaccatgatactgctattatacccgcttccaacaacccatatttcagggatcaggctcgctttcctgtcctcgtgacatccgacctggaccactatctgcggagagaggctctatccattcatgttttcgatgatgaggatcttgagcccggctcctacctcggccgagcgcgcgttccactcttgcccctggcaaaaaatgaaagcatcaaaggtgattttaacttgactgatccggcagagaaaccaaacggttcaattcaggtacagctggattggaagtttccttatataccccccgagtctttcctgaagcctgaggcgcagaccaaaggaaaggacactaaggactcatccaaaatctctagtgaagaggagaaagcctcttttccctcccaagatcagatggcctcaccggaggtgcccattgaagcaggtcagtatcggtccaaacgtaagccgcctcatgggggagaaaggaaggaaaaagagcaccaggtagttagctattcgcgaagaaagcacgggaaaagaataggtgtgcagggcaaaaatcggatggagtatctgagtttgaacattctgaatggcaatacaccagagcaggtgaactatacagaatggaagttttccgaaactaacagttttattggcgacggcttcaaaaatcagcatgaggaagaggagatgactttatctcactccgccctgaagcagaaggaaccactgcaccccgtaaatgacaaggagtcctctgagcaggggtccgaggtgagtgaggcacaaaccactgatagcgacgacgtgatcgtgccacctatgtctcagaagtatcccaaggctgattcggaaaagatgtgtattgagattgtttctttagccttctatccagaggcagaagttatgagtgacgagaatattaaacaggtttatgtcgagtataagttctacgacctgcctctgtccgaaaccgaaactcctgttagcctgaggaaaccacgggcaggggaggagattcatttccatttttccaaggtcattgatctggacccccaagagcagcagggtcgcagacgtttcctgtttgacatgttaaacggacaggatcccgatcaaggacatctgaagttcaccgtggttagcgacccccttgatgaggagaagaaagagtgtgaagaagtgggctatgcctacttgcaactttggcagattctggaaagcggacgtgatattctggagcaggagctggacatcgtctcgccagaagatctagctactccaattggcaggctgaaagtgtctttgcaggccgctgccgtgctgcacgctatttataaagagatgaccgaagacttgttttcttag

SEQ ID NO: 132269 - DNA, 1839 bp, synthetic construct
  misc_feature 1..1839: note = Description of Artificial Sequence: Synthetic coding sequence
  source 1..1839: mol_type = other DNA
atgttaaagctggataacaaagacgtgatcagccatcctctgggatacccttcagagtccttgctatccattgccagtatgctggattctagcgactcatcgtctcaacctcactggtcaaacgagctgatagctgaacagcttcagcagcaagtctctcagctgcaagatcagctggatgccgaactcgaagataagcgcaaagtactactcgaactttctagggaaaaagcccagaatgaggatctcaagctggaagtcaccaacattctgcaaaagcacaagcaagaggtagagctgctgcagaacgctgccactatctctcagcctccagataggcagtctgagcctgcaacccatcctgcagtgttacaggagaatactcagattgagccctcggagccgaagaatcaggaggagaaaaagttgtcgcaggtccttaatgaactgcaggtgtcccacgctgagacgaccttggagttagagaaaacgcgtgacatgctgattctgcagaggaaaatcaacgtgtgttaccaagaggaactagaagctatgatgactaaggcggataacgacaacagggatcataaagagaaactggaacggctgacgcgcctgctggatctgaagaacaatcggatcaaacagttggaaggcattcttcgatcacacgacctgcccacgagcggcgattttaatcttacggatccggccgagaaacctaatggaagtattcaggtccagctggactggaagtttccctatattccaccagagtccttcctgaagcccgaagctcaaacaaaagggaaagacactaaagattctagtaagattagtagtgaagaggagaaagctagttttcctagccaagaccagatggcctctcctgaggtccccatcgaagccggtcagtaccgtagcaagcgaaaacccccccacggaggtgaaaggaaagagaaggaacatcaggttgtcagttattcccggcgaaaacatgggaaacggataggcgtgcaaggcaaaaatcggatggaatatctgtctttgaacatcctgaacgggaacacccctgagcaggtgaattatacggagtggaagttctctgagaccaactcctttataggagatggcttcaaaaatcagcatgaagaagaagaaatgaccctcagtcactctgcccttaaacaaaaagagcctctccaccctgttaacgacaaggagtcctcagagcagggttcagaggtgagcgaagcccagacaactgacagcgatgacgtaatcgtgccacctatgtcccagaaatacccaaaggccgatagtgagaagatgtgtattgagatcgttagtctggcgttttatcctgaggccgaggttatgtcggatgagaacatcaagcaagtgtatgttgagtacaagttctacgacctgccattgagtgagactgaaacacctgtgagcctgcgaaaacctcgcgctggtgaagaaattcattttcacttttcaaaggtgattgacctggatccacaggagcagcagggacggaggaggtttctgtttgacatgctgaacggccaggatcccgatcagggacacctgaagtttactgttgtgtcggatccactggatgaagaaaaaaaggaatgtgaggaggttggctatgcttacctgcagctgtggcagattctggaaagcggcagggacatccttgaacaggagctggacatcgtgtccccagaggatcttgctactcctatcgggaggctcaaggtgtcccttcaggcagccgccgtattacacgccatctataaggaaatgactgaagatctgttttcatag

SEQ ID NO: 132270 - DNA, 3861 bp, synthetic construct
  misc_feature 1..3861: note = Description of Artificial Sequence: Synthetic coding sequence
  source 1..3861: mol_type = other DNA
atgagtcatctggtcgaccccacgagcggcgatctccctgtgcgggatattgacgcgattcctctggtgttgccagcatcaaagggtaaaaacatgaagactcagccacccctgagtcgcatgaacagagaggagctggaggatagcttcttccgcttacgggaagatcatatgctggtgaaggaacttagctggaaacaacaggacgaaattaagagactgagaaccacgctgctaaggctgactgctgcaggcagggacctgagggtggctgaagaggctgctcctctgtccgagaccgctaggagaggccagaaggctgggtggagacagcgactgtccatgcaccagcgccctcagatgcatcggctccagggccactttcactgcgtaggtccagccagtccacggcgagcccagcctagggtccaggtcggacatagacaactgcacaccgccggcgctcctgtgcccgagaagccaaagcggggcccacgagaccggctgtcttataccgctccaccctctttcaaggagcacgccactaacgagaatcgtggcgaagttgccagtaaaccttccgagttggtgagcggctccaactccataatctccttctcgtcagtcatctcgatggctaagcctataggattatgtatgccaaatagtgctcacatcatggcctctaacacaatgcaagtggaggagccgccaaagtctccagagaagatgtggcctaaggatgagaattttgaacagcgaagcagtctcgagtgcgcacagaaggctgccgaactacgcgcatcaataaaggaaaaagtggagctgatcaggctaaaaaaactactgcatgagcgcaatgcctccctggtcatgaccaaggctcagctgactgaagttcaggaagcctatgaaacactgttgcaaaagaatcaggggattctgtccgcagctcatgaagcattactcaaacaggtcaacgagctacgggccgagctgaaggaggaaagcaagaaggctgtttctctgaaatcccagttagaagacgtttctatcctccagatgacactaaaagagttccaagagcgcgttgaagacctggagaaggagcgaaagcttctgaatgacaactacgataagttgctcgaatcgatgcttgacagcagtgatagctcctcgcagccacactggtcgaacgagctgatcgctgagcaacttcagcagcaggtctcacagctgcaggatcagctggatgccgaattggaggacaaacgtaaggttttgcttgaacttagtagggagaaggcacagaatgaggacctaaaattagaggtgaccaatatactgcagaagcataagcaggaggttgagctcttacaaaacgctgccacaatttcacaaccaccagacaggcagtcagaacctgcaacacaccccgccgtgctgcaggaaaacacccagatagaaccgtctgagcctaagaaccaagaagaaaagaaactgtcccaggtgttgaacgagttgcaggtctcccacgctgaaacgaccctagaactggagaaaacccgcgacatgctgattctacagcggaaaatcaacgtctgttaccaggaagaactagaagctatgatgactaaagctgataatgacaacagggatcacaaggagaagttggaacgcctcaccagactgctagacctcaagaacaaccgcatcaagcagttggaagggatccttcgatcccatgatctgcccacttctgagcagctcaaagatgtggcctacggcacacggcccttgagcctctgtttggaaacgcttccggcccacggggacgaggataaagtcgatatctctctgctgcaccaaggtgaaaatctgtttgagctgcatattcatcaagcattcttgacctcagccgccctggcccaagccggcgacactcagccaacaaccttctgtacatattccttttatgactttgaaacgcattgcacacctctgtcggtgggccctcaacccctgtacgacttcacatcacagtacgtgatggaaacagatagcctttttcttcattacctccaggaggcatcagcccggcttgatatacatcaggctatggccagtgagcacagcaccttggcggccgggtggatctgttttgatcgagttctcgagacggttgagaaagtacacggtttagccacactgattggcgcagggggagaggagttcggcgtgctggaatactggatgcgactgcgatttcctattaagccctccctccaagcctgtaacaagaggaaaaaagcccaggtatacctatcaacagatgtcctgggggggaggaaggctcaggaggaggaattcaggagcgaatcgtgggagccccaaaacgagctctggatcgaaatcactaaatgctgtgggctgagatcccgttggctggggacccaaccgtctccctacgccgtgtatcggtttttcacttttagcgatcatgacacagccatcattcccgcctctaacaacccttattttcgggaccaggccagatttcccgtccttgttactagcgacctcgaccattacctgaggagggaggcgctgagcatccatgtgtttgacgacgaagacttggagcctggctcatatttaggcagggcaagggtgccattgctccccttggccaaaaacgagagtataaagggagattttaacctgacagatcccgcggaaaagcccaatggtagcatccaggttcagcttgactggaagtttccttacataccaccagaatcgttcctgaagcccgaggcacaaacaaaaggtaaagataccaaagatagcagtaagatctcctctgaagaggaaaaggccagttttccctcccaagaccagatggcatcacccgaggtcccaatcgaggccgggcagtaccggtctaaaaggaaacctccacacgggggtgagcgtaaagagaaggaacatcaggtagtctcatactctcgccgcaaacacggtaagaggattggcgttcaggggaaaaatagaatggagtatctgtcacttaatatcctgaacggtaatacccctgaacaagtcaattacaccgaatggaaattcagcgaaaccaacagcttcattggggatgggtttaagaatcagcacgaagaagaggaaatgactctctcccatagtgctctcaaacagaaagaacccctgcacccggtaaatgataaggagtcctctgaacagggaagcgaagtgagcgaggcccaaaccactgatagcgatgacgtgatcgtccctcccatgagtcagaaatacccaaaagccgattctgaaaagatgtgcatagaaatcgttagtctcgcgttctatccagaggccgaggtcatgtcagatgaaaacattaagcaggtttatgtggagtacaagttctacgatttgcctctctctgagaccgagacgcccgtgagcctgcgtaaaccaagggctggggaagagatccatttccacttctctaaggtgattgacttagatccacaggagcagcagggcaggcgtcgtttccttttcgacatgctgaatggtcaggatcccgatcaaggtcacctgaagttcaccgtggtcagcgacccactggacgaagagaaaaaggagtgcgaagaagtgggttacgcctacctgcaactttggcagattctggagagcggcagagacattctggaacaggaactggatatagtgtctccagaggatctggctacccctattggtcgcctgaaggtgagtttacaggcggctgccgtgctccatgcaatttataaagagatgaccgaggatctgttctcttag

SEQ ID NO: 132271 - DNA, 1617 bp, synthetic construct
  misc_feature 1..1617: note = Description of Artificial Sequence: Synthetic coding sequence
  source 1..1617: mol_type = other DNA
atgaacctggaattgttggagtcatttggccaaaattatcctgaggaagctgatggcaccctggactgcatctcaatggccctgacatgcaccttcaacaggtggggcacccttctagctgtgggatgtaatgacgggcgcatcgtgatctgggactttcttactaggggaatcgcaaaaatcattagcgcccatattcatccggtttgtagcctctgttggagtagggatggccataaactggtttcagcctctaccgacaacatcgtatcccagtgggacgtgctctcaggcgattgcgaccagcgattccgctttccatcgccaattcttaaggtgcaatatcacccgagggatcagaataaggtccttgtctgcccgatgaaaagtgcccccgtgatgttgacactgagtgactctaaacatgtggtgctcccggtcgatgatgatagcgatcttaacgttgtggcctcctttgatagaagaggggagtatatatacacaggaaatgctaaaggtaagatcctggtccttaagacagattcccaagatttagtggcttccttcagggtgacgactggaaccagtaacaccacagccatcaaatcgatcgagtttgcccggaaaggctcatgtttcctgataaatactgccgaccgcatcattcgggtgtacgatgggcgtgagatcttgacgtgcgggcgggatggtgagccagagcctatgcaaaaactgcaggacctggttaacaggacaccttggaaaaagtgctgtttctcaggcgacggggaatacatagttgcagggtcagcacggcagcatgccctttacatctgggaaaagtcaattggtaacctcgtgaaaatcctccatggtactcggggagagttactgctcgatgtggcatggcatcccgtaaggccaatcattgctagtatttccagcggagtcgtctcaatttgggcacaaaatcaagttgaaaactggtccgcatttgcaccagatttcaaagagctggacgaaaatgtggagtacgaggagcgtgagtccgagtttgacatcgaggacgaagataaaagtgagccagagcaaaccggcgcagacgccgccgaggacgaggaggtggacgtcactagcgtcgaccctattgcagcattttgttcaagtgatgaagaattggaggattccaaggcgctcctgtacctgcctattgcccccgaggtggaggatcctgaggagaatccctatggaccacctccggatgccgtccaaacctccttgatggatgaaggtgcttcatccgaaaaaaaacgccagtccagcgctgatgggtcccagccacctaaaaagaagcccaaaacaacaaatattgaactacagggcgtgcctaatgatgaagtgcatccactgttgggcgtgaagggcgacggcaaatcaaagaagaaacaggctggcaggcctaagggctcaaaagggaaggaaaaggattctccattcaaacccaagctgtataagggggatcggggactgccccttgagggatccgcgaaggggaaggtgcaggcggagctcagtcagcctttgactgcaggtggcgccatctctgagcttctgtag

SEQ ID NO: 132272 - DNA, 1503 bp, synthetic construct
  misc_feature 1..1503: note = Description of Artificial Sequence: Synthetic coding sequence
  source 1..1503: mol_type = other DNA
atgaatctggagcttctggaatccttcggacagaattaccctgaggaagctgacggaacgcttgattgcatttcaatggccctgacctgcacctttaaccgttggggcacgttactagcggtgggctgtaacgatgggagaattgtgatttgggatttccttactagaggtatcgctaagatcatttccgcacacattcaccctgtgtgttcgttgtgctggtcccgcgacggtcataagctggtcagcgcaagtactgacaacatagtctcccagtgggatgtgctgtccggagattgtgatcaaagattcaggttccccagccctattttaaaagtgcaataccatccgagagatcagaataaggtgctggtgtgcccaatgaagtccgcacccgttatgctcaccctgtctgactccaaacacgtcgtattacctgtagacgatgatagtgatctgaacgtcgtggcctcattcgaccggcggggggaatatatttatacaggcaacgcaaagggaaagatcctcgtattgaagactgatagccaagatctggtggctagcttcagagtgactactggaacatcaaatactacagccattaaaagcatcgagttcgctagaaagggtagctgcttccttattaatacagccgatagaatcatccgggtgtacgatggccgtgagatcctcacatgcgggcgggacggggagcctgaacctatgcaaaaactccaggacctagttaatcggacaccttggaagaagtgctgcttcagtggggatggcgagtacatcgtcgcagggagcgcaagacagcacgccctgtacatttgggagaagagcatcggaaacttagtgaagatcctacacggaacacgcggggagctgctgttggacgtggcctggcaccctgtccgcccaattatcgcgagcatttctagcggcgtggtcagcatctgggcccagaatcaagtggagaattggtccgctttcgcacctgactttaaggaacttgacgagaatgttgaatacgaagagagggagtccgagtttgatattgaggatgaggacaagagcgagcccgagcaaactggcgccgatgccgccgaagacgaggaggtggacgtcacctcagtagatccaatcgctgctttctgtagctcagatgaggagcttgaggactccaaggccctgctctacctgccgatcgctcctgaggtggaagaccctgaggagaacccttatggtccgccaccagatgccgtccagacctcactcatggatgaaggagccagtagcgaaaagaagcggcagagttcggccgatgggagccagcctccaaaaaaaaagcctaagaccaccaacattgagctgcaaggtgtgccaaatgatgaggtccatccactccttggggttaaaggtgatggaaagtcgaagaaaaagcaggcagggcgccctaagggaagcaaggcaggaggtgccattagcgagcttctctag

SEQ ID NO: 132273 - DNA, 5379 bp, synthetic construct
  misc_feature 1..5379: note = Description of Artificial Sequence: Synthetic coding sequence
  source 1..5379: mol_type = other DNA
atgtcctgtgtacactacaagtttagctccaagctcaattacgacacagtgaccttcgatggcttgcatatcagcctttgtgatctgaagaaacaaatcatgggccgggagaagctgaaggccgctgattgtgatctacaaatcacaaatgcgcagactaaagaggaatacaccgacgacaatgcactgatacccaagaattcaagcgtgatcgtgaggcggattcccattggcggggtcaaaagtacgtctaagacatacgtgatttcaagaactgagccagctatggcaaccactaaagcaatcgacgatagctcagcctcgatctcactggcacagcttactaagacagctaacctagccgaggcaaatgcctccgaggaggataagattaaggccatgatgtctcaatccggccacgagtatgaccctattaattacatgaagaagccactggggccgcctccccctagctacacatgctttcgttgtggcaagcctggtcactatattaagaattgtcccacgaatggggacaaaaatttcgaaagcggacctcgtatcaagaagagcactgggatacccaggtcatttatgatggaggtgaaggatcccaacatgaagggtgctatgctcacaaacacaggaaagtacgctattcctactatcgatgcagaagcctacgctattggcaaaaaggagaagcctccttttctgcccgaggagccaagcagctctagtgaagaagacgaccccatacctgatgaactgctatgtctaatctgcaaggatataatgactgacgccgtcgtcatcccctgctgtggaaacagctattgtgatgagtgcatccgcacagccctgctagagtccgacgagcacacatgcccaacctgccatcagaatgacgtgagtcccgacgccttaattgccaacaaatttttgcgccaggcagtgaataacttcaagaatgaaactggttacacgaaaaggttacggaagcagttgccccctcctccgccccctatccctccgccgcgcccacttatccagcgaaacctgcagccactgatgcgcagtccaatctcacgccaacaggatcccttgatgatcccggtgactagcagtagtacgcacccagccccatctataagttccctcacttccaaccaatcttcactggcgcccccagtttcaggtaatccttcatctgcacctgcgcctgtgcccgacatcaccgctacagtcagtatctccgtgcactcagagaagtctgatggccccttcagagactcagacaacaaaattctaccggcagctgcactggcctcagaacattctaaaggaacgtcctctattgccatcaccgctctgatggaggagaagggataccaagtgccagtactgggtactccatcccttttgggtcagagcctattgcatggccagctaattccaacgacagggcctgtacgaataaatactgctagacctggaggaggcaggccagggtgggaacattccaataaactgggctatttggtctctcctcctcagcagatacgccgcggtgaacggagctgctacaggagcattaatagaggccggcaccattcagaacggtcacagaggactcagggcccttctcttcccgccacacccgtcttcgttccagtcccccccccaccgctgtatcccccgcctcctcatactttaccacttccacctggcgtgccaccaccacagttctccccccaatttccaccaggccaaccacccccagctgggtactccgtgcctcccccagggtttccacccgctcctgctaacttaagcactccgtgggtgtcatccggagtgcagaccgcccactctaatacaattccaaccacacaggcccctcccctctccagagaagagttctacagagaacaacgcagactgaaagaagaagaaaagaagaagtccaagctggacgagtttactaatgatttcgctaaggagctcatggaatacaagaagatacaaaaggaacggaggcgctccttcagtagatccaagagcccctacagcggcagtagctactcccgcagctcatacacttactccaaatctaggagtgggtccacccgttcacggagttatagccggtcattcagtcgctcgcattctagatcctacagccggtctcctccttatccacgaaggggcagaggcaagagcagaaactacaggagtcgctctcgctcccacggttaccaccgttctcgctctagatccccaccttaccggcgttaccattcccgttcccggtctccccaagcctttcggggacaaagccccaataaaaggaacgtgcctcagggggagactgaacgggaatatttcaatcgatacagggaggtgcctcctccttacgacatgaaagcttattacggacgaagtgtcgattttcgggacccttttgagaaggagaggtatcgggaatgggaacgcaagtaccgggagtggtatgagaagtattataagggttatgccgctggagcccagccccgcccttcagccaaccgagaaaacttttcccccgaaagatttctgccactaaacattcgtaacagcccatttacccgtgggaggcgcgaggattacgtcggagggcagtcccatagatccagaaatatcgggagcaactatccagaaaaactttctgccagagatggacacaaccagaaagataacacgaagtccaaagaaaaagaaagcgagaatgcccccggagatggcaagggtaataagcacaagaagcaccgcaaacggcgtaagggcgaggagtctgagggatttctcaaccccgagctgctggagacctccagaaagtcacgggagcctactggtgtggaggaaaacaagactgactccttgtttgtcctaccatctcgggatgacgcaacccccgttcgcgatgagccaatggatgctgaatctattacctttaagagcgtctctgagaaagacaagcgagaaagggacaagccaaaggccaagggtgacaagaccaagcgtaaaaacgatgggtccgctgtctccaagaaagagaacatcgtgaagcccgccaagggaccccaagagaaggtggatggcgaacgcgaacgtagccccaggtccgagccaccaatcaaaaaagccaaggaggaaactccgaagaccgataacactaaatcaagctcttcttctcagaaggacgaaaagatcactgggacaccgcgtaaggcacactcaaagtccgccaaagagcatcaggagaccaaacccgtgaaagaggagaaagtgaaaaaagactactctaaggacgtgaagtctgaaaagctgacaacaaaggaggagaaagccaagaaaccaaacgagaagaacaagccgttggacaataaaggcgagaagagaaaacgcaaaacggaagagaagggagtggacaaagacttcgaaagcagtagcatgaagatcagtaagctggaggtgacagagatcgtaaagccctccccaaaacgcaagatggagccagatacagaaaaaatggacagaacccctgaaaaagacaagatctcattgtctgcacccgctaaaaaaatcaagcttaatagagagactggaaaaaaaattggcagcacggagaatatcagcaatacaaaagagccatcagaaaaactggaaagcacgagtagcaaggtgaagcaggagaaggtgaaaggtaaggttcgccgcaaagtaacagggactgagggcagtagttctaccttagtcgactacactagtacctcgtcaacgggggggtccccagtaaggaagtcagaagaaaagaccgataccaagcgaactgtgatcaagacaatggaggaatacaataacgacaatacagcacctgctgaagatgtgattattatgatccaggtgcctcaaagcaaatgggacaaggatgatttcgagagtgaagaggaggacgtcaagtctactcaaccgatctccagcgtcggtaagcccgccagcgtgatcaaaaacgtaagcacaaagccttcgaacatagttaagtacccagaaaaggaatcagagcccagcgagaagattcagaaattcaccaaggacgtgagccacgaaatcatccagcacgaggtgaaaagttccaagaattccgcctcttcggagaaaggtaaaaccaaagatagagactacagcgtcctggagaaggagaacccggaaaagagaaaaaacagcacacaacctgaaaaagagagtaatctcgaccggcttaacgaacaaggaaactttaagtctctgagtcagagctccaaagaagccagaaccagtgataagcatgacagtacacgggcctcctctaacaaagacttcactccaaacagggacaagaaaaccgattatgataccagagagtactcgtcatccaaaaggcgcgacgaaaagaatgagttgacccggcgcaaagattccccttcaagaaacaaggactcagctagtggccagaagaacaagccacgggaggaacgcgacctgcccaaaaaaggtaccggcgactctaagaagtctaactcatcaccatcaagggaccgaaagcctcacgaccataaagccacatacgacaccaagcggccaaacgaggaaaccaagtccgtggataaaaatccctgcaaggatagggagaagcacgtcctcgaagcacgtaacaacaaggagagtagcggcaacaagctcctctacattctgaatccccctgaaacgcaggttgagaaagagcaaatcactggccagattgacaagagcactgtcaaacctaaaccccagcttagtcacagctcccgtttgtcctcggacttgactcgagagacagacgaggcagcctttgaaccagattacaatgaatcagatagcgagagcaatgtcagtgtgaaggaggaggagtcctctgggaatatttctaaagaccttaaagataagattgtggagaaagctaaggaaagtctcgataccgccgcagtggttcaagtgggaatttcaagaaatcagtcacattcttctccctcagtgtcccctagccgctctcacagcccatcaggcagccagactaggtcacactcgtcttctgcatccagcgccgaatcacaggactcaaagaagaagaaaaagaagaaggagaaaaagaaacataagaagcataaaaagcacaaaaagcacaagaagcacgcagggactgaggttgaactggaaaagtctcagaaacataaacataaaaaaaagaagtctaagaagaataaggataaagaaaaggagaaggagaaagatgaccagaaagtgaaaagtgtcacggtgtag

SEQ ID NO: 132274 - DNA, 5277 bp, synthetic construct
  misc_feature 1..5277: note = Description of Artificial Sequence: Synthetic coding sequence
  source 1..5277: mol_type = other DNA
atgagctgcgtccattacaagttcagctccaaacttaattacgataccgttactttcgatggtctgcatatatccctttgcgatctcaagaagcagatcatgggaagagagaagctcaaggcagccgattgcgatctgcagatcaccaatgcccagactaaagaagagtacacagatgacaatgctcttatccccaagaatagctctgtgatcgtgaggcgcattccaataggcggggtcaaatctacgtccaaaacttatgttatttcccgcacagaacctgcaatggctaccactaaggccattgacgattcatccgcctcaatctccctggcccagctgactaaaacggccaatttggccgaggccaacgccagtgaggaagacaagatcaaggccatgatgtcccagagtggacacgaatacgatccaatcaactacatgaaaaagcccctggggcctcccccgccttcctatacatgctttcgctgcgggaaacccggtcactacatcaaaaattgcccaactaatggcgataagaactttgaatcaggcccaaggatcaaaaagtctaccggcatacccagatccttcatgatggaggtgaaggatcccaacatgaaaggtgcgatgcttactaacaccggcaagtacgccattcccacaatcgatgccgaggcttacgcaatagggaagaaagaaaaacctcctttccttcccgaagagccgtcctcaagctccgaggaagacgatcccataccagatgagctgctttgtttaatttgtaaggatataatgaccgacgctgtagtgataccctgttgcggcaattcctactgcgacgaatgcatccgcactgctttactggaatctgacgaacacacgtgtccaacgtgccaccagaatgatgtgagccctgacgcgctcatcgctaacaaatttctgagacaggcagttaacaattttaaaaatgagacaggatataccaaaaggctccggaagcagctgcctccaccacctcccccgatcccgccccctagacccctgatccagagaaatctgcagcccctgatgcggagtccaataagtcggcagcaggacccacttatgattcctgtaacctcttcttctacccatcccgctccatcaataagcagccttactagcaatcagtcgtcattggcaccccctgtctccggtaatccaagctccgctccggcaccagttcctgacataacagccaccgtatcaatcagcgtgcatagcgagaaaagcgacggccccttccgagactctgataacaaaatcctgcccgccgccgccctggccagcgagcattctaagggcacatccagtatagccataaccgcactcatggaagaaaaagggtaccaggtcccggttctgggtaccccgtcactcttgggccagtcattactacacggacagctgatccctactaccgggccagtccgcattaataccgcccgtccaggagggggtcgaccagggtgggagcattccaataaactagggtacctggtgtctcccccacagcagataagaaggggagagcggagctgctaccggagcattaaccgtggccgtcaccactcagagagaagccagcggacccagggcccatctctgcctgctacccccgttttcgtgccagttcctccgccacctctgtaccctcctcctcctcatacccttccccttccacctggggtacctcctccacagttcagtccacagttcccccccggccaaccaccacctgccggctactccgttcccccccctgggtttccccctgccccagcaaacctaagcactccatgggtgtcatctggcgttcagaccgcccactctaatacaatacccaccacacaggctccaccactatctagggaggaattttatcgtgagcaacgtaggctcaaggaggaaagcaagtccccatactcgggaagtagctactcacggtctagttacacttacagcaagtctagatcaggaagcacaagatcacggtcctattcacggtcattctccaggagtcatagccgaagctactcccggtcacctccttacccccggagggggcgcgggaagtctcggaattatagatccagaagcaggtctcacgggtatcacagaagtagaagtcgatcccctccatacagaaggtatcacagccgtagccggagcccacaagccttccgcggccaaagccccaacaagcgcaatgtgccacagggcgaaaccgagcgagagtatttcaatagataccgcgaagtgcctcccccttatgacatgaaggcttattatggtcgaagcgtcgactttagggacccattcgaaaaggagcggtacagagagtgggagaggaaatacagagagtggtatgagaaatactataaaggctatgcagccggggctcagccaaggccatcagccaatagggaaaacttctccccggagagattcttgccactgaacatcaggaactccccttttacaaggggacgtagagaagactacgtgggaggccagtctcatcgctctcggaacattggatcgaactatccagaaaagcttagtgccagagacggccacaaccaaaaagacaacactaagagcaaggaaaaggagtccgagaatgcccccggggacggtaaagggaacaagcataagaagcatcgaaagaggaggaagggggaggagtccgaaggatttctgaatcctgagctgctggaaacttctcgcaagtcacgggagccaaccggagtggaagaaaataagacagatagtcttttcgtgttgccaagtagagacgacgctacgccggtgcgcgacgaaccaatggatgccgaatctataacattcaaaagcgtatccgagaaggataagcgagaacgcgacaagcccaaggccaaaggagataaaactaagcgcaagaatgacgggagtgccgtcagtaaaaaggaaaacattgtcaaacccgctaaagggccacaagagaaggtggacggcgagcgggaaaggtcccccagaagcgaaccaccaattaagaaagccaaggaagagacaccaaagactgataacaccaaaagtagcagtagcagtcaaaaggacgaaaagatcacgggtacccctcgcaaagctcattctaagtctgctaaggagcaccaggagactaaaccggttaaggaggaaaaagttaaaaaagactactctaaagacgtcaagtccgagaaactgaccacgaaggaggagaaggcaaaaaaaccaaacgagaagaacaagcccctcgataacaagggcgagaagcgcaagcgcaaaactgaggaaaaaggcgtagataaagactttgagagctcaagcatgaaaatctccaagcttgaagtgactgaaatcgtgaaaccgtccccaaaaaggaagatggagccagatactgagaaaatggatagaacccctgagaaagataagatcagcctgagcgccccggcgaaaaaaattaagctgaatcgcgagacaggcaagaagatcgggagtactgaaaacatatctaacacaaaagagccttcggaaaaactagagtcaaccagctccaaagtaaaacaagaaaaagtgaaaggtaaggtgaggcgcaaagttaccggcaccgaaggttccagtagcaccttggtggactacacctctacaagctctacaggaggaagccccgtgcggaagtctgaggaaaaaacagacaccaagcgcacagtgattaagaccatggaagaatacaataatgacaatacggcccccgccgaggacgtaatcattatgatccaggtgccacagagtaagtgggacaaggacgatttcgagtccgaggaagaggatgtgaaaagcacacaaccaataagctcagtgggtaaaccagcgagcgtcattaagaacgtcagcactaagccttccaacatcgtcaaataccccgagaaggaaagcgagcccagcgagaagatacagaagtttactaaggatgtatcacacgagatcatacaacacgaggtaaagtcttcaaaaaacagcgcttcctcagagaagggcaagacgaaggacagggactactcagtgctcgagaaagaaaatcccgagaaaaggaagaattccacgcagcccgagaaggagtcaaacctggaccgattaaacgaacagggtaactttaagagcctctcccagagttctaaagaagctagaacatccgataagcatgatagtacccgggctagctccaacaaggactttacgcctaatcgagataaaaagactgattacgacactcgagaatactcttctagcaaacgccgcgatgaaaagaatgagctgacacgacgaaaggactcgcccagtaggaacaaggatagtgcctctgggcagaaaaacaaaccaagagaggagagagatctccctaagaaaggcacaggcgattctaagaaatctaactcctcgccgtcacgggaccggaagccccacgatcataaggctacatacgataccaaacgcccaaatgaggagaccaagtccgtagacaaaaacccatgtaaagatagggagaaacacgtgctggaggccagaaataacaaggagtcctcaggcaataagctgctttacatcctgaatccccctgaaacccaggttgaaaaggagcaaatcaccggtcagatcgacaaatccacagtgaaacccaagccccagctttctcattctagcagacttagtagtgacctcactagagaaaccgatgaggcggcatttgagcctgactacaatgagtctgacagcgaaagcaacgtctcagtgaaagaggaagaatcttcgggtaacatttctaaagacctcaaggataaaatcgtcgaaaaggccaaagaatccctggacaccgccgccgtggtgcaggtgggtatctccagaaatcaatcgcatagttccccatcagtgagcccctcaaggtcacattccccaagcgggtcacaaacaagaagtcacagctccagcgcgtcgagcgccgagtcacaggacagtaagaagaaaaagaaaaagaaggagaaaaagaaacacaaaaaacataaaaagcataaaaagcataagaaacacgccgggaccgaggtcgagcttgagaaatcacagaaacataagcataagaagaaaaaatctaagaagaacaaggacaaggagaaggagaaggaaaaggatgaccagaaagtaaaatccgttaccgtgtag

SEQ ID NO: 132275 - DNA, 2859 bp, synthetic construct
  misc_feature 1..2859: note = Description of Artificial Sequence: Synthetic coding sequence
  source 1..2859: mol_type = other DNA
atgtcctgtgttcattataagtttagttcaaagctgaattatgatactgttacattcgatggactacacataagcctatgcgatttaaagaagcaaatcatgggccgtgagaagttgaaggcggccgactgcgacctgcagattactaatgcacagaccaaggaagaatacacagatgataacgctctgatcccaaaaaattcgagtgtcatcgtcagaagaattcccattggaggagtgaaaagcacctcaaaaacttatgtgataagtcgtacagagccagcaatggccacgaccaaagctattgacgacagctcagccagcatttccctggcccagctgacaaaaaccgctaatcttgcagaggcaaacgccagtgaggaagacaaaatcaaagccatgatgagccaaagcggacacgaatacgatcctataaattacatgaagaagccacttggacctcctccaccttcctatacttgcttccggtgcgggaagccgggccattatattaaaaactgccccactaacggagataagaacttcgaatcaggtccccggatcaagaagtcaaccggaattccccgttctttcatgatggaggttaaggaccccaacatgaagggggccatgctgacaaacacgggaaaatacgcgattcccacaatcgatgcagaggcctatgcaatcggcaagaaagaaaaacctccctttctacccgaagaaccctctagtagtagcgaagaagatgatccaattcctgatgagctgctatgcttaatctgcaaggatatcatgacagatgccgtcgtgattccgtgctgtggtaacagttattgtgatgagtgcattcgcacggccctgcttgagtcagacgagcacacttgccctacgtgtcaccagaatgacgtctcccccgacgctttaatagcaaataagttcctgcgtcaagcagtgaacaattttaagaacgagaccggttacaccaagaggctacgaaagcagttgcctccaccacccccaccaattccccccccccgtccccttattcagcgaaatctgcaaccgctgatgagaagtcccatctccaggcagcaagaccccctcatgatcccagtaacttcctcttcaacacatccagccccctctatttcgagcctgacaagcaaccaatcttcactggccccaccagtgtctggaaaccctagctcggctcctgcccctgtacctgacatcactgccacagtctctattagtgtgcacagtgagaagagtgacggtccttttcgcaccagctctaccggcggcagccccgttcggaagagcgaagaaaagactgacaccaagcgaaccgttatcaagacaatggaagagtataacaacgataatacggcccctgcagaggatgtcatcatcatgattcaggtaccacagtccaaatgggataaggatgatttcgaatccgaggaagaggacgtgaagtccacccagcccatttcttccgtcggaaagccagccagtgtgatcaagaatgtgagcactaagcctagtaatatcgttaaataccccgaaaaagaaagcgaaccctcagaaaagattcaaaaattcacgaaagacgtgagtcatgagattatacagcatgaagttaagtccagcaaaaactctgcttcttccgaaaagggcaagacaaaagacagggactacagcgttctcgaaaaggaaaaccccgagaaacgcaaaaactccacccagcccgaaaaggagtccaatctggaccgcctgaacgagcaaggtaatttcaaatccttgtcacagtcctcgaaagaagcccggacgtctgacaagcacgattctacacgtgcatccagcaacaaagactttacaccaaaccgcgacaaaaaaaccgactacgatacaagggagtactcatcctcgaagcgccgggacgaaaagaatgaactgacccgtaggaaggattctccaagcagaaacaaggactccgcctcaggccagaagaacaagcctagagaggagcgggacctgccaaagaaggggactggcgacagtaaaaagtctaactcaagcccctcaagagatcggaaaccccacgaccacaaagccacctacgataccaaaagacccaacgaagagactaagtccgtggacaaaaatccctgtaaggatcgtgaaaagcatgtgctggaagctcggaataacaaggagagttcaggtaataagctgctctacatacttaatcccccagagacccaagtggaaaaggagcagatcacaggacagatcgataaatccaccgttaaacccaaacctcagctgagtcatagctctagactctcaagcgacctcacgagagagaccgatgaggctgccttcgagccggactacaatgagtccgactcagagtctaatgtttccgtgaaagaagaagagtctagtggtaatatctctaaggacctcaaggacaagattgtcgagaaagccaaggagtcactcgacacagcagcggtggttcaagtggggatttccaggaaccagtcccactcaagcccgtcggtttctccctcccgtagccattctcccagtggctctcagacacgctcccactcctcctcagccagcagcgccgaaagtcaggattcgaagaagaaaaaaaagaagaaggagaagaaaaagcacaaaaagcacaagaaacacaagaagcacaagaagcacgcggggactgaggtggagctcgaaaaatcccagaaacacaaacacaagaagaaaaagagcaagaagaataaggacaaggaaaaagaaaaagaaaaggatgaccaaaaagtcaagtcagtgaccgtctag

SEQ ID NO: 132276 - DNA, 357 bp, synthetic construct
  misc_feature 1..357: note = Description of Artificial Sequence: Synthetic coding sequence
  source 1..357: mol_type = other DNA
atgtcatgcgttcattataagttcagtagtaaactgaactacgatactgtaactttcgacggacttcacatctcattatgtgatcttaaaaagcaaatcatggggcgggaaaagctgaaagcggcggactgtgatttacaaatcaccaacgcccaaaccaaggaagaatatacggatgacaatgctctgatcccaaagaacagtagcgtgattgtgcgtagaatccccattggcggcgtgaagtctaccagcaaaacttatgttatcagtcggacagagccagcaatggcaactaccaaagctgtgtgcaagaatacaatctcacacttcttttatactctcctcctgcccctctag

SEQ ID NO: 132277 - DNA, 1410 bp, synthetic construct
  misc_feature 1..1410: note = Description of Artificial Sequence: Synthetic coding sequence
  source 1..1410: mol_type = other DNA
atggcagccgaagctggcgtagtgggggcgggggcatccccggatggggactggcgtgaccaggcttgtggcctgttgttacatgtgcacctgagcagtagactcgggagagcggctcctgtgcggaccggccggcaccttcgcactgttttcgaagacaccgtcgaagaacgggtcattaacgaggagtacaagatttggaagaagaatactcccttcctatatgacctagtgatgacccatgcactccagtggccaagtctcaccgttcaatggctgccagaggtaaccaagcctgagggcaaggattacgccttgcactggctggtgttgggtacccacacatcagatgagcagaaccacctcgtcgtggcgcgggtccatatccctaatgacgacgcacagttcgatgcaagccactgtgatagcgacaaaggcgaatttggtggcttcggaagcgttaccggtaagatagagtgcgagattaaaatcaaccacgagggcgaagtgaacagagcaagatatatgccccagaacccccatataatcgccaccaagacaccaagtagcgacgtcctggttttcgactatacaaagcacccagccaagccggacccgagtggagaatgtaaccccgacctgcgactccgtggacaccagaaagaaggttacggcctctcatggaacagcaacctcagtgggcatctccttagtgcatcagatgaccatactgtgtgtctgtgggatatcaatgctgggcctaaggaaggaaagatcgtggacgccaaagccatcttcacaggccactctgctgtggtcgaggacgtagcttggcatctgctgcacgaatcccttttcggtagcgtcgccgatgaccagaaacttatgatttgggatacccgatctaatacgacgtcaaaaccaagtcatctggtcgatgctcacactgctgaagttaactgcctctcgttcaacccctattccgagtttatcctggccacgggatcagctgacaagaccgtggccctttgggacttgaggaaccttaagctgaaactgcacactttcgagtcacataaggatgagatctttcaagttcattggtcccctcacaacgaaacaattctggcatcgtcaggcactgaccgtagactgaatgtttgggatctgtccaaaataggagaagaacagtcagctgaggatgccgaggacgggccccctgaacttcttttcatacacggggggcatacagctaagatctctgatttctcctggaatcctaatgagccgtgggtcatctgtagcgtctccgaagataacattatgcagatatggcagatggcagagaatatttacaatgatgaagaatccgatgtcactacctccgagctggagggacaggggagctag

SEQ ID NO: 132278 - DNA, 1278 bp, synthetic construct
  misc_feature 1..1278: note = Description of Artificial Sequence: Synthetic coding sequence
  source 1..1278: mol_type = other DNA
atggcttctaaagagatgtttgaggacacagtcgaggaacgcgtcattaacgaagaatataagatttggaaaaaaaacacaccctttttgtatgatctggtcatgacacatgcactgcaatggccctcacttaccgtccagtggctgcctgaagtgacaaaacctgaaggcaaagactacgccctgcattggcttgtgttggggacacatacctctgatgagcagaaccatctcgtggtggctcgggtacatatacctaatgatgacgcacagtttgacgcatcacattgcgatagtgacaagggtgaatttggggggttcggctccgtcaccggaaaaattgagtgtgaaattaagataaaccacgaaggcgaggttaaccgcgccaggtacatgccccagaatccccatatcatcgcaacaaaaacccctagctccgatgtgctagtttttgattacacaaaacaccctgcgaaaccagacccaagtggcgaatgcaaccctgacttgagattgaggggtcatcaaaaagaaggctacggcttatcctggaactctaacctgtccggtcatctgctcagcgcaagcgatgatcataccgtgtgtttatgggacatcaacgctgggcctaaagaagggaagatcgtggacgcaaaggccattttcactggacacagtgcagtggttgaagacgtggcgtggcaccttctacacgagagcctcttcggctcggttgcggacgatcagaaactcatgatatgggacactaggtccaacacaacgagtaaaccgtcccacttggttgatgcgcataccgctgaggtgaactgtctctccttcaatccatattcggagtttatcctggccacaggctccgccgataagaccgttgccttatgggatctccgcaacctgaagctgaaactccatacatttgagtctcataaagacgaaatatttcaggtacactggtctccgcacaacgaaacgattctggctagttctggaacggaccgtcgcctgaacgtctgggatctgtcaaagataggcgaggagcagagtgccgaggacgctgaagacggccctcccgagctgctgtttattcacggcgggcacaccgccaagatttccgatttttcctggaaccccaatgagccttgggtaatatgttcggtgtcggaagacaacatcatgcagatctggcagatggccgaaaacatttataatgacgaagagtcggatgttaccacaagcgaactggagggacaaggctcgtag

SEQ ID NO: 132279 - DNA, 1251 bp, synthetic construct
  misc_feature 1..1251: note = Description of Artificial Sequence: Synthetic coding sequence
  source 1..1251: mol_type = other DNA
atggcgtctaaggaaatgttcgaggacacagtggaggaacgtgtgatcaatgaggagtacaagatatggaagaagaacaccccgtttctgtacgacttggtgatgacccatgctctccagtggccatcattaactgtgcagtggctccccgaagtgacaaaaccagaagggaaagattatgccctccactggctggttttaggcacacatacgagcgacgagcaaaaccaccttgttgtggctagggtgcatatccctaacgatgatgctcagtttgatgcatctcattgtgactctgacaaaggggggaagatcgagtgtgaaataaaaatcaatcacgaaggtgaggtgaatagggcccgctatatgcctcagaaccctcatattatagcaacaaaaacaccctccagcgacgtgctggtgttcgattacaccaaacaccccgccaagccggacccctccggggaatgtaacccggatctgagattaagaggtcaccaaaaggaaggttacgggttatcctggaactctaatctgagcggacacctgctgagcgcaagcgacgatcacaccgtgtgcctgtgggacattaatgctggtcctaaggagggtaaaattgtggacgccaaagctatctttacgggtcatagcgcagtggtggaggatgttgcctggcacctgctgcatgagagtctctttggatcagtggcagacgatcagaaactgatgatttgggatactcgatcaaataccacgtccaagccctcccacctggtggatgcccatacggccgaagtgaactgtttgtcatttaacccctactccgagtttattctggcgacagggagcgctgacaagactgttgccctgtgggacctaaggaacctcaagctcaagctccatacattcgagtcacataaagacgaaatcttccaggtgcattggagccctcacaacgagaccattctggcctctagtggcacagataggcgtctgaatgtctgggatttatcaaaaattggagaagagcagtccgcggaggatgccgaggatggacctccagaactgctttttattcatggaggccacaccgcaaagatcagcgatttcagctggaaccctaacgagccgtgggtgatctgtagtgtctcagaagacaacatcatgcagatttggcagatggccgagaacatctacaacgatgaagaaagtgatgtaactaccagtgaattagagggtcagggcagctag

SEQ ID NO: 132280 - DNA, 561 bp, synthetic construct
  misc_feature 1..561: note = Description of Artificial Sequence: Synthetic coding sequence
  source 1..561: mol_type = other DNA
atggctagtccaagcaaggccgtaatcgttccagggaacggtggaggcgacgtaactacccacggatggtacggatgggtgaagaaagagctcgaaaagattcccgggttccagtgcctggctaagaatatgcccgaccctatcacagcccgggagtcaatctggctccctttcatggaaaccgagctccactgcgacgaaaagacgattattatcggccacagtagcggagcaattgccgccatgcggtacgccgaaacccaccgggtttacgctattgtgctcgtcagcgcctatacaagtgatctgggagacgagaatgaacgagcttctggttactttacccgtccatggcagtgggagaagattaaggccaactgtccttatatcgtgcaatttggaagcaccgacgatccgttcctgccttggaaagaacagcaggaagtggctgatagactggaaaccaagttacacaagtttacagactgcggccattttcagaataccgaatttcatgagcttatcacagtggtcaagtcactgttgaaagtcccagcatag

SEQ ID NO: 132281 - DNA, 519 bp, synthetic construct
  misc_feature 1..519: note = Description of Artificial Sequence: Synthetic coding sequence
  source 1..519: mol_type = other DNA
atggcctcccccagtaaggcggtgattgtgcccggaaatggaggaggggacgtgactacccacggctggtatggttgggtaaagaaagagcttgaaaaaattccaggatttcagtgcctggcgaagaatatgcccgacccaattactgcccgagagtccatttggttgcccttcatggagaccgagctgcattgcgatgagaaaactattattatcggacacagttcaggagctatcgctgcaatgcgctacgccgagacacacagggtgtacgctattgtgctggtatccgcctacacctcggatttgggtgatgaaaacgaacgtgctagcgggtactttactcgcccctggcagtgggaaaagataaaagctaattgcccatacatagtgcaatttgggtccaccgacgacccatttttaccttggaaggaacagcaggaagtggctgattggaaaccaaactgcacaaactcactgaccgtggccacctttcggactcaatcttttatgaattag

SEQ ID NO: 132282 - DNA, 741 bp, synthetic construct
  misc_feature 1..741: note = Description of Artificial Sequence: Synthetic coding sequence
  source 1..741: mol_type = other DNA
atggccgcggcggccatcccagccttgcttctctgccttcctctcctgtttctgctattcggttggtcaagggcacgccgggacgatccgcattcattgtgttacgacattactgtgatccctaagtttcgaccgggtccccggtggtgtgctgtgcagggacaggttgatgagaagacttttttacactacgattgcggcaacaaaacggtgacgcccgtgagcccattaggtaaaaaacttaacgtcactatggcctggaaagctcagaatccagtactgcgagaggtagtggacatccttacagagcagttactggacatacagctcgaaaactacacgcctaaagaacctctgaccctccaggcccgcatgtcatgcgaacagaaagccgagggccactcctcaggcagctggcagttcagcatcgacggtcaaaccttccttctttttgatagtgagaagcgtatgtggaccacagtccatccaggcgcccgaaaaatgaaagagaagtgggaaaacgacaaagatgtggcaatgtcttttcattacatctcaatgggggactgcattggctggctggaagattttctgatgggcatggactctacactggagccaagtgccggcgctccccttgcaatgagctcaggtaccacacagcttcgagccacagcaactactcttatcctgtgctgcctcctgattattcttccatgcttcattctccctggaatatag

SEQ ID NO: 132283 - DNA, 741 bp, synthetic construct
  misc_feature 1..741: note = Description of Artificial Sequence: Synthetic coding sequence
  source 1..741: mol_type = other DNA
atggccgctgcagccattccagcgttactcctttgcctccccttattattcctgctgtttggatggtcccgagcccgacgcgatgacccccactccctctgttacgacatcacagtgatccccaagttccggcccggcccgcgatggtgcgccgtgcaagggcaggtggatgagaaaacgtttctgcactacgattgcggcaacaagaccgttacacctgtcagccccttgggcaagaaactgaatgtgacgatggcttggaaagcacagaaccccgtgctcagggaggtggtagacattctgaccgaacagctactggacatccaactcgagaactatactccaaaagaacccctaactctgcaagcaagaatgagctgcgagcagaaggctgaaggccatagttcaggatcctggcaatttagtattgatgggcagacattcctgttgttcgactcagagaagcggatgtggacaacagtacaccccggggcgagaaaaatgaaagagaagtgggagaacgacaaggacgtggctatgtcttttcattatatcagtatgggggactgcattggatggctcgaagatttcttaatgggtatggattcaaccctggaaccatctgctggcgcgcccctggctatgagtagcggaactacccagctgcgcgccacagcaacaaccctaatcctgtgctgtcttctcattatcctgccttgttttatcttgccagggatctag

SEQ ID NO: 132284 - DNA, 4923 bp, synthetic construct
  misc_feature 1..4923: note = Description of Artificial Sequence: Synthetic coding sequence
  source 1..4923: mol_type = other DNA
atgcagtcctttcgggagcgctgtgggttccatggaaagcagcagaattaccagcagaccagccaggaaacatccagactagaaaactacagacagccatctcaagcaggcctctcttgcgataggcagcgtctgctggctaaggattactacaatcctcagccttacccaagttatgagggaggggccggtaccccctcgggcactgccgccgcagtggcagccgataagtatcatcggggaagcaaggcactgcctacccaacaggggctccaaggcagacccgcatttccggggtacggcgtacaagactcttctccttaccccggcagatacgctggggaggagagcctacaggcctggggcgcaccccagccaccccccccacagcctcagcccttgcccgctggtgtagccaagtatgatgaaaacctcatgaaaaaaacagctgtccctccttcccggcagtatgccgagcaaggcgcccaggttccatttagaacccactctttacatgttcagcagccgccgcccccgcagcagccactcgcatacccgaaactccagcggcagaagttgcagaatgatatagcatcccctctgccctttccgcaaggcacacacttcccccagcacagtcagtcttttcctaccagctccacgtattcgtcatccgtgcagggcggtggccagggcgcccactcttataagtcttgtactgccccaacggcacagccccatgatcgccctctgactgcctcgtcgagcctggcccctggtcagcgtgtgcaaaacctgcatgcatatcagtccggccggctttcctacgatcaacagcaacagcaacagcagcagcagcagcagcagcagcaggctctgcagtccagacatcacgcacaagaaaccttgcattatcaaaaccttgccaaatatcagcattacgggcaacagggacaggggtactgtcagcccgatgctgccgtgcgcacccccgagcagtactatcagacattttcgccttcttctagccactcacctgcccgatccgtgggccggtccccgagttactccagcacacccagcccgctcatgccaaatcttgagaacttcccttatagccagcagcccctgagcactggcgcatttccagcgggcatcacggaccactcacactttatgccactgctgaaccccagccctaccgatgccacttcgagtgtcgacacccaggctgggaattgtaagcctctccagaaagacaagctgcccgagaacctgctgagtgacctatccctccaatctctgactgcgctcactagtcaggtggaaaacattagcaatactgtgcagcagctcctgctgtctaaagctgcggtgccacagaagaagggagtgaaaaacctagtctcacgaactccagagcagcataaaagtcagcactgttcacccgaaggctccggatactccgccgaacctgcaggaactccactgtccgagcccccctcgtctacacctcagagtacccacgcagaaccacaggaggctgactacctgagcgggtcagaagaccctctggagagaagcttcctatactgcaaccaggcccgcggctccccagccagagtgaacagtaatagtaaggccaaacccgagagcgtgagcacctgctcggtaactagcccggacgatatgtctacaaagtcggatgacagtttccagagtctccatggtagtttacccctggacagcttcagtaagttcgtcgccggggaacgagattgccccaggctgttactgagcgctctagcgcaggaggaccttgcgtccgagattcttgggctgcaggaagccatcggagagaaagctgataaggcttgggcggaggcaccctccctagtaaaagactctagcaagccccctttctcattggaaaatcatagcgcctgcctcgattcggttgccaagagtgcctggccaagacccggcgaacccgaggctttaccagattcgctccagttagataaggggggcaacgcgaaggactttagccctggattgtttgaagacccctccgtcgcctttgctacaccggaccctaaaaaaacaactggcccactgtcttttggaacaaagcccacactgggggtcccagcccctgaccctaccactgccgcatttgactgcttccccgataccacagctgctagcagcgcagactccgccaacccctttgcatggccggaagagaatctgggggacgcctgtcctcgatggggattgcacccaggtgagctgactaaagggttggagcaagggggcaaagcctccgacggcatcagcaagggggacacccatgaagcatcagcgtgcctgggatttcaggaggaggatcctcccggcgagaaggtggccagcctccctggtgactttaaacaggaggaagtcggcggcgtgaaggaggaggccggtggtctcctgcaatgccccgaagttgcgaaggccgacaggtggctggaggactctagacattgttgttctactgccgattttggggacctcccactgttgcctccaacaagcaggaaagaagacttggaggccgaagaggagtattcctccctgtgcgaactgctggggagtccggaacagagaccaggaatgcaggatcccctgagccctaaagcccctcttatatgtactaaggaagaggtagaggaagtgttggattccaaagctggctggggatcgccatgccatctttctggtgagagtgtcatcttgctaggcccaacagtggggacagaatcaaaggtgcagtcctggttcgaatcttcactgtctcacatgaagcccggcgaggaagggccggatggggagagggctcctggcgacagcacgacatcagatgccagtctggctcagaaacctaacaagccggcagtgcccgaagctcccattgcaaagaaagaaccagtacccagaggaaaatccctgagatccagaagggttcaccgtggcctcccggaagcagaagactccccctgcagagccccagttctgcccaaggaccttttgttaccagagagctgcaccgggcctccacagggacaaatggaaggggccggcgctcccggaaggggagcttctgagggcctgcccaggatgtgtacaagatccctgaccgctttgtcagaaccacgcacaccaggccccccggggcttaccacaactccggcccctcccgataaactgggaggcaagcagagagccgccttcaaaagcgggaagagggtgggtaaaccctctcccaaggcagcctcgtcgccctcaaatccggccgctctgccggttgctagcgattctagtcccatgggaagcaaaaccaaagagaccgattctccatctactccaggcaaggaccagaggtctatgatactgagaagccgcaccaagacgcaagagatctttcattctaagcggcggcgacctagcgagggccgtttgcctaattgtagagcgaccaaaaagctgttagataatagccatctgccagccaccttcaaagtttcctcaagcccccagaaagagggaagagtgagccagagagcccgggtccctaagcccggggctggtagtaagctgagcgacaggccgctgcatgccctgaagcggaaaagcgccttcatggcaccagtacccacaaagaagcggaatctcgtgcttaggtccagatcctctagctcgagtaatgcctctggtaacggaggagacgggaaggaagagagaccagaaggctcacccacgctcttcaaaagaatgtcttccccaaagaaggccaagcccaccaagggtaatggagagcctgccaccaaactaccacctcccgagacccccgacgcctgcttgaaactcgccagtagagccgccttccagggagcaatgaaaacgaaagtactcccaccccgtaagggccgcggactgaagctggaggcaatagtgcagaagataacttctccgtctctgaagaagttcgcatgcaaggctccgggtgcttcacccggtaacccactgtccccaagtcttagcgacaaggatcgcggcctgaaaggtgcaggtggatcgcctgtgggcgtggaagaggggctagtgaacgtcgggaccggccagaaactccctaccagcggcgccgaccccttgtgtcgcaaccctaccaaccgctccttaaagggcaaactcatgaactcaaagaagctttcaagtacggactgcttcaaaaccgaagcctttaccagtcctgaagcattgcagcctggggggacagcattggccccaaagaaacgaagccgcaagggccgcgcaggggctcacggactgagcaagggtcctcttgagaaacggccctacctggggccagcactgctgctgaccccacgtgacagggcctccggcacgcagggggccagtgaggacaactctggagggggcggtaagaaacctaaaatggaagaattggggctggcctctcagcctcctgaaggtcgaccctgccagccacagacgcgcgcacagaaacagccgggtcacaccaactactcgagctacagcaagcgcaaaagacttaccaggggccgggccaaaaataccacatcaagcccctgtaaggggcgagctaagagacgaaggcagcagcaggtactccccctggatcctgccgaacccgagattcgcctgaagtacataagcagttgcaaaaggcttagaagtgattctcgcacccccgcgttctctccgttcgagccaagtctgggagcccagaatccaaggagtggacagaatgccccccctgctcccgccgatgcccgaccgctgtgtacaacacgggatcgccgcgcctatagtgccagagagcaggggcagagatag

SEQ ID NO: 132285 - DNA, 5589 bp, synthetic construct
  misc_feature 1..5589: note = Description of Artificial Sequence: Synthetic coding sequence
  source 1..5589: mol_type = other DNA
atgcagagcttccgcgagcgatgcgggtttcacgggaaacaacaaaactaccaacagacatcccaggagaccagtagactggaaaattatagacagccaagtcaggctggtctcagttgtgaccggcagcggcttctcgcaaaggattactacaacccccagccgtatccgtcctatgaagggggggctggaacacccagtggcacagctgcggcagtagcggcagataaatatcaccgtgggtccaaggccctcccgacccagcagggcctccagggtagacccgccttccctggatatggagtccaagatagttccccctaccctggacgctatgccggggaagagtcacttcaagcctggggagccccccaaccaccgcctcctcagccgcagccactgccagctggggtcgccaagtatgatgagaacctgatgaaaaagaccgctgtgcctccatcaaggcaatatgcggagcagggggctcaggtgcctttccgcacacattcactgcatgtgcagcaacccccccccccccaacagccgcttgcttaccccaaactgcaacgccagaagctgcagaatgatatagctagccctctaccatttccacagggctggtgggctggccactcctacaagtcatgcacagctccgacagcacaaccacacgacaggcctctcaccgccagctcgtctctggcacctgggcagagggttcagaatctgcacgcgtaccagagtggacggctcagttacgaccaacagcagcagcagcagcagcagcaacagcagcagcagcaggccctgcagtcaaggcaccatgcccaggagacactgcactaccaaaatttagcaaaataccagcactacggacagcaaggacagggctattgtcaacctgatgccgctgtcagaacgccggaacagtactaccaaacattttctccatcctcctcccatagccctgcacggtccgtgggacgtagcccgtcatactcctcaaccccctctcccctgatgcctaatctcgagaacttcccatacagtcagcagccattatctactggcgcctttcccgcgggaattacagatcattctcactttatgcccttgctgaacccaagtcccacagatgcaacctcttctgtcgattctctgactgcactgacatctcaggtggagaatatatcaaatactgtgcagcagctcctcctgtctaaagcagccgtaccccaaaagaagggagtcaaaaatctggtgagtagaacgcccgaacagcacaaatctcagcactgttcgcctgagggatccggatatagcgccgaacctgccggcacacccttgagcgagccaccatcttcaactccccaatccactcacgcagaaccacaggaggccgattacctgagcggctctgaagacccactagagaggtctttcctgtactgcaatcaggctagaggtagtcctgcccgggtgaactccaattctaaggcaaagcctgaatccgtgagcacatgctccgttaccagccctgacgacatgagcaccaaatccgacgatagcttccagtcgctgcatgggtctctgccacttgatagttttagcaagtttgttgccggggagcgtgattgccccagactcctgctctccgcactagctcaagaagacctggcaagcgaaattctgggtctgcaggaggctatcggtgaaaaggctgataaagcctgggccgaagctccaagtcttgtcaaggatagctccaaaccaccattctctctcgaaaaccactctgcttgcctggacagcgtagctaagtcggcatggccacgacccggcgagccagaagcgctgcccgattcattacagctggacaagggaggtaacgctaaggatttttctcctggattgttcgaagatccatccgttgccttcgctacccctgatcctaaaaagacaacaggacctctgtcctttgggaccaaacccacactgggagtgccagctccagaccccaccacagcagcatttgattgcttcccagacactacagccgcttcctccgcagactcggctaatccgttcgcttggcccgaagaaaatttgggggacgcgtgccctcgatgggggctgcaccccggtgagctgacgaaaggactggaacaagggggcaaagcaagcgacggcatctccaagggggacactcacgaggcatccgcctgcctgggtttccaggaggaggatccccccggggaaaaggtggccagcctgcctggcgactttaagcaggaggaagtaggaggcgtgaaggaagaggccggcgggctgctgcagtgccccgaagttgccaaagccgatcgttggctcgaagattcgcgacactgctgtagcacagccgactttggggacctgcccctgctgcccccaacatccagaaaggaggaccttgaggccgaggaagaatactcctcactatgtgaactcctgggtagtcccgagcagcgccccgggatgcaggacccactgtctcccaaagcaccattgatttgtacaaaagaggaagtagaggaggtgctagattctaaggcagggtggggttctccctgtcatctgagtggtgagtcagtcattctattgggacctactgtcggtaccgagtccaaggttcagagctggttcgaaagttccctgagccacatgaagcctggtgaagaaggcccagatggcgagcgcgcgcctggtgatagcacaactagcgacgcttctctcgcccaaaaacctaacaagcctgccgtacctgaggctcccattgcaaagaaagaacccgtgccccgggggaagagcctccgatcacgcagagttcatagagggctccccgaggcagaagattccccctgccgcgcccctgtattacccaaagatctgttgctgccggagtcatgcaccgggccaccccagggccagatggagggggccggcgcgcctgggaggggagcctcagagggccttccacggatgtgcactaggtcactcactgccctgtcagagcctcgtacacctggaccacctggccttaccactacaccggcaccaccagacaagcttggaggtaaacagagggccgcttttaagagtggtaaaagagtgggtaaaccttcccccaaggccgcatccagcccatcaaatcccgcagcactcccagtggcctcagacagcagtcccatgggatctaagaccaaggagacagatagtccgtcgactcccgggaaggatcaaaggagcatgatcctccgctccaggacaaaaacccaggagatcttccattccaagagacgccgtccctcagaaggaagactgcctaactgtcgggctaccaagaagctgctcgacaattctcacctacctgctacctttaaagtgagtagcagccctcagaaagagggtagggtgtcccagagggccagggtgcctaagcccggggctggaagtaagctgtcagataggccgttgcacgccctgaagaggaagagcgcttttatggctcctgttccgaccaaaaagcggaatctcgtactccgctcccgctcttccagctcctccaacgcgtcggggaacggtggcgatgggaaggaggagaggcccgaagggagcccaacactctttaagcggatgtcctcaccaaagaaggccaaacctaccaaaggcaatggagaaccagccacaaaactcccgccaccagagacgcccgatgcctgcctgaagctggcatccagagccgcatttcagggggctatgaagaccaaggtcttacccccccggaaaggcagagggctaaagttggaggcaatcgtgcagaaaatcactagcccaagtcttaagaagtttgcttgcaaggcccctggggccagccctgggaatcctctaagtccaagtttgagcgacaaggatcgcgggttgaagggggccgggggttctcccgtgggcgtggaggaaggtctggtcaacgtgggcaccggccagaagctgccaacatcaggtgccgaccccctatgccgcaaccccactaataggtcactgaaaggaaagcttatgaataaccgcgcgtcaggcacacagggggccagtgaggacaacagtggtggaggtgggaaaaaacctaaaatggaagaactgggcctggccagtcagcctcctgaagggcggccctgtcagcctcagacacgagcccaaaaacagcccggccatactaattacagctcatactcaaaacggaaaagactaactcgaggaagggcaaagaatacaaccagcagcccttgtaaagggcgagccaagcgcaggcgacagcagcaggtcttacccctggaccctgccgaacccgagatcaggttgaagtacatctccagttgtaaaagactgcgttctgacagccgaacccctgcttttagcccatttgtgcgggtggagaaaagggatgcgtttaccaccatatgcacagtcgtgaactcccctggggatgcacccaaaccccataggaagccttccagttccgcttcttcaagctcctcctcatcaagcttcagcttagacgctgccggagctagtctcgccacattgcctggtgggtcaattctgcagccccggccaagcctgccattgtcatcgacaatgcacctgggccccgtcgtgagtaaggctctgagcacgtcatgcctcgtgtgttgtctctgtcagaaccctgctaacttcaaggacctgggggacctgtgtggaccctattacccagaacattgcctacccaagaaaaaacccaaactcaaagagaaggtaagacctgaggggacttgtgaggaagctagcctaccactggagagaactctgaagggccctgaatgcgccgcggccgctacagcgggcaaacccccacggcccgatgggcctgcagatcctgcaaagcaaggacccctcagaacctctgcacgagggctcagccgccgtcttcaaagttgttattgctgtgatggcagggaagacggcggcgaagaagccgcccccgctgacaaagggcactgggtgcacgaagcttgcgccgtctggaccggaggcgtgtatttggtcgctggcaagctgttcggactgcaggaagccatgaaggttgcagttgatatgcacggcgggaccgtggccctggcaccaggcgatttctccttgcccggcctaaggtttgcctctctgtttcaggggccatcatggtgcgactgcccagtgctcgccacttctaccccaagttcttggagcagatgtgtgcccgccgcgaaaaagcctggccctcccctgggtgccgctactaaggacgcttctacgccaacaacaacacgcgtgccagccatgcaggtacgggcacgccccggaaccgggggacattggagcccttccaaacaatcgcgggggaccctccctggacactccagccctaatcccggtcccatctccctgttttcctttccccccctcctaccccagcagttcttttatccttccgtgtgcttagacctgtgttgggccatgcccggtacatggaagtag

SEQ ID NO: 132286 - DNA, 5721 bp, synthetic construct
  misc_feature 1..5721: note = Description of Artificial Sequence: Synthetic coding sequence
  source 1..5721: mol_type = other DNA
atgcaatcctttagagagagatgtggtttccacggcaagcagcagaattaccagcagacgagccaagaaacaagccgactggagaactatcgacagccttcgcaggcaggtctgagttgtgaccggcagagacttctggccaaagattattacaacccccaaccttacccgtcgtacgaaggtggcgccggtacaccctctgggacggccgcggccgtggcagccgataagtaccatcgggggagcaaagcactccctactcaacaaggtcttcagggaaggccagcttttcctgggtacggagtgcaggattcatcaccctacccaggaagatacgcaggcgaggagtccctgcaggcatggggcgcaccgcagccccccccccctcaacctcaaccactgcctgccggggttgccaaatatgatgagaaccttatgaagaaaaccgccgtgcccccttcccggcagtatgcagagcagggcgctcaggtgccgtttaggacacattccctgcacgtgcaacagcctcctccaccccagcagcctctggcctaccccaagctacagcgccagaaattacagaatgacatcgccagtcccctccccttcccacagggaacacattttccccagcactcccaatctttcccaacatcctcaacttactcttcttctgttcaaggcggagggcagggcgctcactcctacaaatcctgcaccgccccaacagcgcagccccacgatagaccactcacagccagctcatcactggctccgggacagagggtgcagaacctgcatgcatatcagagtggccgactcagctacgatcaacaacagcagcaacaacagcagcaacaacagcaacagcaggcactgcaatcacgacaccatgcacaggagacactccattatcagaacctggccaagtaccagcactatgggcagcagggccagggctactgtcagcccgacgcagcagtaaggacgccagaacagtattatcagacctttagcccatcatccagtcactctcccgctaggagcgtgggtaggtccccttcctactcatctacaccctctccactaatgcccaacctggaaaactttccatactcacaacagcccttatccaccggggcctttccggccggcattacagaccattcacacttcatgccattgttaaacccctctcctactgatgcgaccagctcggtcgacacccaagcaggcaattgtaagcctttgcaaaaagataaacttcctgagaatctcctctcagacctgtctttacaaagtctcacagctctcacatcccaggtggagaacatctcgaacaccgtccaacagctgctgctgtccaaagcggccgtgccccagaaaaaaggcgtaaagaacctcgtgtcacggacacccgagcaacacaagtcccagcactgcagtcctgagggatcaggctattccgcagagcccgcaggaacacccctgtcagagccgccttccagtacacctcagtcaacccacgctgagcctcaagaagccgattacttgtcagggtcagaagaccccctggaaaggagctttctctattgcaaccaagcccgtggcagtccagctcgggtcaactcaaacagtaaagctaagcctgaatctgtatcaacatgcagcgtaacttcaccagacgatatgtcaaccaaatccgacgatagctttcagagccttcacggatcactgcctcttgatagcttctccaagtttgtagccggagaaagagactgcccgaggctgctgctttccgccctggcacaggaggatctcgcaagtgagatcttgggactccaggaggccattggggagaaagccgacaaagcttgggccgaggcacccagccttgtgaaggatagttcgaagccccccttctctcttgaaaaccattctgcttgcctggacagtgtggcgaagtcagcttggcctcgaccaggagaaccagaagcgttacccgactcacttcagctggataagggtggaaacgctaaggatttttctccaggactgtttgaagacccttccgtggccttcgccactccagatcccaaaaagactacaggaccattgagctttggcacaaagccaacactcggggtaccggcgcccgacccgacaaccgcggcttttgactgcttcccagacactactgccgcctcatccgcagattccgccaaccctttcgcttggccagaggagaatctcggcgacgcctgcccacgatggggacttcatcctggggagctgacgaagggcctcgaacagggtggtaaggcttctgatggcatttccaaaggggatactcacgaagccagtgcttgtttgggattccaggaggaggacccgccgggagagaaggtggcatccctacccggcgactttaaacaggaggaagtcgggggagtaaaggaggaggcaggaggactcctgcagtgtcctgaggtggcaaaggctgaccggtggctggaggactcccgccactgctgcagtactgctgacttcggggacctgcctctgctgcccccaaccagcaggaaagaagatctggaggccgaagaggaatattcaagcctctgcgagctgctggggtcaccagagcagcggccagggatgcaggatcccctgagcccgaaggcgcccctgatctgcacaaaagaggaggtcgaagaggttctggattctaaagctggatggggatcaccatgccacttgagcggcgagtctgtaatccttctaggaccaaccgtaggtaccgagtcaaaagtgcaatcatggttcgagagtagcttgagccatatgaaacctggcgaggaggggccagacggtgagagagcacctggtgactctacaacatcagatgcttcactcgcccaaaaacccaacaaacccgcggtgcctgaagcaccaatcgccaagaaagagcccgtgccccgggggaaatcacttaggtccagacgtgtccaccgtggtttgcctgaagcagaagatagtccctgtcgtgcacccgtgctgcctaaggatttgctcctgcctgaatcctgcaccgggccgccccagggccagatggagggagccggggctccaggccggggtgcctctgagggactcccgcgcatgtgcacccgaagtctgaccgctttatcggagccgaggaccccaggcccccctggcctgaccacaactcccgctccacctgataagttaggcgggaagcagagagccgccttcaagtcaggcaagcgggtcggcaaacccagccctaaagctgcctcctcgcccagcaatcctgcagctcttcccgtggcctccgattcctcacctatgggctcaaagacgaaggaaacagattctccctccacacctggaaaagaccagcggtctatgatcttgaggagtaggacgaagactcaggaaatttttcattcaaagaggcggaggccttccgaagggcgccttccgaactgccgtgcgacgaaaaaattactggacaactctcacctcccagcaacattcaaagtttcttctagtccacagaaagagggcagggtatcacaacgagctcgggtacccaaaccaggggcgggatcaaagctgtcggaccgccccctccacgcactgaagagaaagtctgcgtttatggcacccgtccccacaaaaaaacgcaatctcgtactgcgcagccgatcatcctccagctctaatgcgagcgggaatggcggggacggcaaagaagaaagacccgagggtagtccgacgctgtttaaacgcatgtccagcccaaagaaggcgaagccaactaaagggaacggggagcctgccactaaactccctcctcctgagactcccgatgcctgcctcaagttagcctcacgagccgctttccagggcgccatgaaaaccaaagtactaccgccaaggaaaggcagaggcctgaaactggaagccatcgtgcaaaagataacgtctccctctctcaaaaaattcgcttgtaaagcccctggggcttctcctgggaaccctttaagcccgtccctctccgacaaggacagaggactgaagggcgctggtggctcaccggtcggagtggaagagggcctggtgaatgtcggtaccggccagaaactccccacaagcggagctgacccattatgcagaaaccccacaaaccgcagcctaaaaggaaaactgatgaattcgaagaaactcagtagcacagattgttttaaaacagaggctttcaccagtcctgaggctttacagccaggcgggacagcactggcgcctaaaaagcgctctcgtaagggacgagccggagcacatggcttatcaaaaggaccactagaaaaacgtccatacctgggtccagctctgctgcttacacctcgcgatcgggccagcggaacacaaggggcaagtgaagacaacagcggggggggagggaagaagcctaagatggaagaactgggcctggcctctcaaccgccagagggacgaccctgccagccccagacccgtgctcaaaaacagcccggacataccaactactccagctattctaagcgtaagcgcctgacacgcggaagagccaagaatacaacctcatccccatgtaaggggcgcgcaaaacgtaggcgccagcaacaggtgctccccctggaccccgctgaacctgaaattaggttgaaatatatctcttcatgcaagcgtctgcggtccgactctcgtacacccgctttctcacccttcgtgcgtgtcgagaaaagggatgcttttacaacgatctgcaccgtggtgaactcgccaggcgatgctcccaaacctcaccgcaaaccaagtagctctgcttcatcatccagctcaagctcctcatttagcctggacgctgcaggtgcctccctggccacattgcctggcggctcaatactccaacccaggccaagcctgcctctttcctcaactatgcacctcggccccgtagtgtctaaggctctgtcaacaagctgcctggtctgttgtctgtgccagaatcctgccaacttcaaagatttgggcgatctgtgtggtccttattaccccgagcactgcctgcctaagaagaaacccaaattgaaagagaaggtgaggcccgaaggcacctgtgaagaggcatctctacctcttgaacgcacattaaaggggcctgagtgcgccgctgcagcaacagctggcaaacctcccaggccagacggtccggccgatcctgctaaacaagggcccttgcggacaagcgcacgggggctatcacgcagactccagtcctgctactgctgcgatggcagagaagacggcggcgaggaggcagccccggccgataagggccggaagcatgagtgcagcaaggaggcccccgccgaaccgggcggggaggcccaggagcactgggtgcacgaggcctgcgcagtctggacaggaggagtgtacctagtggccggaaagctgttcgggcttcaagaggccatgaaagttgccgtcgatatgatgtgtagttcatgtcaggaggccggagccactatcggctgctgtcataaaggatgtctacatacctaccactatccctgtgcaagcgacgcaggctgtatattcattgaagaaaatttcagccttaaatgccccaaacacaaacggcttccatag

SEQ ID NO: 132287 - DNA, 2901 bp, synthetic construct
  misc_feature 1..2901: note = Description of Artificial Sequence: Synthetic coding sequence
  source 1..2901: mol_type = other DNA
atgcaaagcttcagagaacgctgtggctttcacgggaaacagcagaactatcagcaaacttcgcaggagacgagcagactcgaaaattatcgccaaccatcccaggccggattgagctgcgaccgccagcggttgctcgctaaagactactataatccacagccctatccgtcctacgaaggcggagccggaacacccagtggaaccgcggctgccgttgcagcagataaataccaccgcggctccaaggcactacctactcaacagggcctgcagggaaggccagcttttcccggctacggcgttcaggactcgtcaccatatcctggtaggtatgcgggagaagagagccttcaggcttggggggcccctcagccgcccccccctcagccacagcccttgcccgcaggggtcgcaaagtatgatgagaacctgatgaaaaaaacggctgtgccaccgtccagacaatacgcggaacaaggcgcacaggtcccctttagaacacacagtttacacgtccagcagccccccccacctcagcagccactagcatacccgaagttgcaacgacagaagttacaaaacgacatagcatccccactgccattcccacagggaacgcacttccctcagcacagccaatcttttcccaccagctctacctattcctcatcagtgcagggtggcggacagggagcacattcgtataaaagttgcaccgcccctactgcacagccacacgatcggcctctgactgcttcctcttctctcgcacctgggcagagagtacagaacctgcacgcttaccagtctgggagactttcctatgaccagcaacaacagcagcagcagcaacaacagcagcagcaacaggcactccagtctcggcaccacgctcaggagactctgcattaccagaacctggccaaataccagcactacggccagcagggccaggggtactgccagcctgatgctgccgttcgaacccctgagcagtactatcagacgtttagcccctcctctagtcattccccagcccgttcggtcggtagatccccgtcatacagtagcacccccagccccttgatgcccaatctcgaaaactttccttattcacagcaacccctgagtaccggggcattccccgcgggaatcacggatcactcacactttatgcccctgctcaatccttcccccacagacgccacatcatccgttgatacgcaggccggaaattgtaaacctctccaaaaggataagctgccagagaacctgctctccgatctctctttgcagagcttaacggccctcaccagtcaggtggagaacatctccaataccgtccagcagctgctgctctccaaagctgccgtcccccagaaaaagggggtgaagaacctagtgtctagaacaccagaacagcacaaatcccaacattgttctccagaggggtccggatattccgccgagcccgccggtactcccctctcagaacctccgtctagtactccccagtccacacacgcagagccccaggaggctgattacctctcaggatcagaggacccacttgagcggtcattcctctactgtaatcaggcacgtggctccccagctcgggtgaactcaaacagtaaggctaaacccgaatcagtaagcacctgttctgtgacttctcccgacgatatgagcacaaaaagtgacgattcattccagtctttgcacggatccctccctttggactcctttagcaaatttgtagcgggagaacgggattgtcccagactgcttctcagcgctctggcacaggaggacttagctagcgagatattgggtctgcaggaggcaattggggagaaagccgataaggcctgggcggaagctccatctctggtcaaagacagttccaaaccgccctttagtctggagaaccattccgcctgtcttgacagcgtggccaagtccgcctggcctcgccctggcgaacccgaggctctgcccgacagtctccagctggataagggcgggaatgcaaaggacttttcgcccggtctgtttgaagatccttcggtggcatttgccacgcctgatccaaagaagactaccggtcccctctcctttggtacaaaacctacactcggcgtgcctgcacccgaccctacaaccgcagcattcgactgctttcctgataccacggccgcctccagcgcggactcggccaacccctttgcatggcccgaagaaaaccttggtgacgcctgcccacgctggggcctgcaccctggcgagctcaccaaaggtctggaacaggggggtaaggcctctgatggtatttctaaaggcgatactcatgaggcctcagcctgtctgggcttccaggaggaagacccgcctggagaaaaggtcgcaagcctgcccggagattttaaacaggaggaggttggcggcgtgaaggaagaagcaggtggtctcttacagtgtcctgaagtggcgaaagccgacagatggttggaggattcccgccactgctgttctaccgctgatttcggagatttgcccttgctgccccccactagccggaaagaagatcttgaggcggaggaggagtacagcagcctctgcgaactcttagggagccctgagcagcgacccggtatgcaggatcctctatctcccaaggcaccactgatttgcacaaaggaagaggtggaagaagtgctggatagcaaagcaggatggggctccccttgccacctgagcggggaaagtgtgattctcttggggcctaccgtcggtacggagtctaaggtgcaatcttggttcgaggccagcctttatagtgtgtacatttgcatccacatccacatttataacatttacgaggactgcaagtgctag

SEQ ID NO: 132288 - DNA, 2829 bp, synthetic construct
  misc_feature 1..2829: note = Description of Artificial Sequence: Synthetic coding sequence
  source 1..2829: mol_type = other DNA
atgcagagcttcagagaacggtgcgggttccacggcaagcagcagaactatcagcaaaccagtcaggaaacaagcagacttgagaattacagacaaccatcccaagctgggctcagttgtgataggcagaggctcctggctaaggactactataacccgcagccttatcccagctacgaaggaggagccgggacaccttccggcaccgcagccgccgtggctgcggataaataccacaggggtagcaaggcactccctactcagcaggggctccagggacggccagccttccccgggtacggtgtgcaggacagttcaccgtatccaggacgctatgcaggcgaggaatctctacaggcttggggcgcgcctcagcccccacctccacaaccccagccactgcctgcgggtgtcgccaagtacgatgagaaccttatgaagaaaactgccgtgccccctagcagacagtatgcagagcagggcgcccaagtgccttttcgcactcatagcttacacgttcagcagccaccccctcctcagcaaccacttgcatacccaaagctgcagcgccagaagcttcaaaatgacatcgcgagccctctgccatttccgcagggaactcacttcccacagcactctcagagcttcccaacctcgtcaacctacagctctagtgtccagggtggggggcagggtgcacattcttacaagagttgcaccgctcccacagcccaaccacacgaccgacccctcaccgcatcttccagcctggcaccgggccagcgagtgcagaacctccatgcctatcaatccggtcgactctcctatgatcagcaacagcagcagcaacaacagcagcagcagcagcagcaggctctgcagtccaggcaccacgcccaagagacgctgcattaccaaaatctggccaagtaccagcattacggccagcagggtcagggctattgtcagccggatgctgccgtgcgtacacctgagcaatattaccaaacatttagcccttcatcctctcatagcccagctcgctcagtcgggaggtcaccaagctacagctccacacctagccccctaatgccgaatctggagaactttccctattctcagcagccactgtctacaggcgcgtttcctgccggcatcactgatcactctcactttatgcctctcctgaatcccagcccaactgacgcgacttcaagcgtggatacccaagccgggaattgtaagcccctccagaaagataaattgcccgaaaacctcctgtccgacctcagcctacaatctctgacagcactcacttcacaggtcgagaacatcagtaatacagtgcagcaactgctgctttcaaaggcggctgtcccccagaaaaaaggcgtcaagaatctggtctcgcgtacacctgagcaacacaaatcccaacactgcagccctgaggggagcggatatagcgcggaaccagcaggcacccctctgagcgagcccccctcctccacaccccagagcacgcacgccgaacctcaggaagcggattacctgtccggctctgaagatcctctggaaaggtctttcctctactgcaatcaggctagaggttctccagcgcgcgtgaattctaactcaaaggcaaaacctgaaagtgtgtccacctgcagtgtgacgagtccagatgatatgtccacaaaaagcgacgacagctttcaaagcctgcacggtagccttccactcgatagcttcagcaagtttgtggctggcgagcgcgactgccctcgactgctgctgtccgcactggctcaggaggacctggcctctgaaatcctggggttgcaggaggccatcggagagaaagctgacaaggcctgggccgaagcccctagtctcgtgaaagattcctcaaagccaccattttccttagaaaaccattccgcttgtctggactctgtggctaaatctgcttggcccaggccaggtgaaccagaagctctgcctgattcccttcagttggacaagggaggtaatgccaaagacttttccccagggctatttgaggaccctagcgtcgcctttgcaacccccgatccgaagaaaacaacggggcctctgagctttggcaccaagccaaccctgggcgtgccggcccctgatccaacgacagccgcctttgattgcttccccgacaccacagctgcctctagtgctgatagtgcgaatccatttgcttggcccgaggagaatctgggagacgcatgccctagatggggactccacccgggtgagctgaccaaaggccttgagcaggggggaaaagcatccgatggcatttccaagggggacacccatgaagccagcgcttgtctaggcttccaggaagaggatcctccaggggagaaagttgcgtccttgcccggggactttaaacaagaagaagtaggaggtgtgaaagaagaggctggaggccttttacagtgtcccgaggtagccaaagccgaccggtggctagaagatagccgccactgttgcagcaccgcagattttggagatctgccgctgttaccccccacatcccgtaaggaagacctggaagccgaggaggagtattcatcactgtgtgaactccttgggagccctgagcagaggcccggaatgcaggatccgctgtcccccaaggcacccctgatttgcaccaaggaggaagtggaagaggtcctggattccaaggccggctggggctccccttgtcacttgtcaggagaatccgtaatattgctaggccctacagtggggacagaatccaaagtccagtcctggttttag

SEQ ID NO: 132289 - DNA, 5982 bp, synthetic construct
  misc_feature 1..5982: note = Description of Artificial Sequence: Synthetic coding sequence
  source 1..5982: mol_type = other DNA
atgcagtcttttagggagaggtgtggattccatggtaagcagcaaaactaccagcagacctcccaggagacttcacgactcgaaaactaccggcagccatcccaggcaggactgagttgcgatagacagagattactggcaaaagattattacaatcctcagccctatccctcatatgaggggggggcaggcactcccagtggcacagccgccgccgtggctgcggacaaataccaccgcggttcaaaggctctgcccacccaacaaggcctccagggaagacccgcctttccggggtacggagttcaggatagcagtccttatcccgggcgatacgcaggagaggagtctttacaagcttggggggcccctcaaccccctcccccccagcctcagcctctcccagccggcgtagcaaaatacgatgaaaacctcatgaagaagacagccgttcccccctctcgccagtatgccgagcagggagcccaggtgccatttcgaacccactctctccacgtccaacagcctccaccaccccagcaacccctggcctaccccaaattacagcgacagaagttgcagaatgatattgcctccccgctgccttttccacaggggacacactttcctcagcacagccagagtttccctacaagctcaacttattcctcatctgtccaaggtggcggccagggcgcccattcctataagagctgcaccgccccaactgcacagcctcacgacagacccctcacggcaagcagttcactggccccaggtcaacgcgttcagaacctccacgcgtatcagtctggcaggctttcctacgatcaacaacagcagcagcagcagcaacagcagcaacagcagcaggccctacagtccaggcatcacgcacaagagacattgcactatcagaacctggcaaagtatcaacattatggccagcaggggcagggctattgtcagcctgacgccgcggtgaggacaccagaacaatattaccaaaccttttcgcctagctccagccattcaccggctaggtcagtgggccgctccccctcatacagctctaccccatcccccctgatgcccaaccttgaaaattttccttacagccagcagcctctctccaccggagcctttcctgccgggattactgaccactcccactttatgcccctgctgaatccctcccctacagatgctacctccagcgttgatactcaggctggtaactgcaaaccattacagaaggacaagcttcccgaaaacctcctaagtgacctgtcactgcaaagcctgaccgccctgacttctcaggtggagaatatcagcaataccgtccaacagctcctcctctccaaagcggcagtgccccaaaaaaagggcgtcaaaaatttggtcagtagaactcctgaacagcataagtctcaacattgttccccggagggtagcggatattcggccgagccagctggaactcccttaagtgagcctccatctagtacgccacagagcactcacgctgagccccaggaggctgactacctgagtggtagtgaggacccattagaaagaagctttctgtactgtaatcaggctaggggcagcccagccagggttaactcgaatagtaaggctaagccggagagcgtatctacctgcagcgtcacttctcccgacgacatgagcactaaatccgacgattcctttcagtcattgcatggctccctgccactggatagtttcagtaaattcgtggcaggagaacgcgactgccctcgattgctcctgtctgctctggcacaagaagatctggcctccgaaattttgggtctgcaggaagccattggggaaaaggcggataaagcctgggccgaggcgccatccctcgtcaaggactctagcaagccccctttctccttggaaaaccactccgcttgtctggattctgtggccaagagcgcctggccccgtccaggagaacctgaggccctgccagactctttgcagctcgacaaaggaggtaacgccaaagatttcagcccgggattgttcgaggacccctcggtagcctttgcaacacctgatcctaagaagaccacaggacccctgtccttcggaaccaagcccactctcggagtgcccgctcccgacccaactactgcagcatttgactgcttccccgacaccacagcggcctcatccgctgatagtgcaaaccctttcgcatggccggaagaaaatctcggcgacgcttgtccccgatggggacttcaccctggcgaattaaccaaagggctggagcagggtggcaaagctagtgatgggatttccaagggcgacacacatgaagcttcagcatgccttggctttcaggaggaggatccaccaggtgagaaagtcgcgagcctgccaggagattttaaacaggaggaggtaggcggcgtaaaagaggaggccggaggactgttacaatgtcccgaggtagctaaagctgacagatggctggaggactccagacattgctgttctacagctgatttcggagacttacccctactgcccccgacaagtcggaaggaggacctggaggcggaggaagaatatagtagcctttgtgagttgctgggatctcccgaacagaggcctggaatgcaggacccactgagccctaaagctccactgatctgcacaaaggaggaagtggaggaggttctggacagcaaagcaggatggggatcaccatgccatctgagcggggaatccgtcattctcctggggcccactgtgggaacagaatctaaagtacagagctggtttgagtctagcctgagtcacatgaagcccggtgaggagggtcccgacggggaaagggcccccggggattccacaacctctgatgcttccctggcccaaaaaccaaataaacctgccgtgccagaagcacccattgccaaaaaagagcctgtgccgcgagggaagtccctacgcagtaggagagtacaccgggggttgcctgaggccgaggattctccctgtagggccccagtgctcccaaaagacctgctccttcccgagagctgtacgggaccccctcagggtcaaatggagggggccggcgcccccggaaggggcgcatcggaggggctgccaagaatgtgtactcgaagccttactgccctaagtgagcccaggacacccgggccccctggcttgacgactacacccgcccctccagataagctcggtggcaagcagagggcagcttttaagtctgggaagcgtgtaggtaaaccctcccctaaagccgcctccagtccctccaatcctgccgcactgccagtggcatcagatagcagtcctatgggcagcaaaaccaaggagacagacagccctagtacccctgggaaggaccagagatcgatgattctgcggtcccgaaccaaaacccaggagatttttcacagcaagaggcgccggccgagcgaaggaagacttcctaactgccgagctactaagaaattactggacaactcccaccttccagccaccttcaaggtgtcgagttcaccccaaaaagagggccgggtctcccaacgtgccagggttcctaaaccgggagccgggtcgaagctatctgatcgacccttgcatgctcttaaacgcaagtctgccttcatggcacccgtgcctaccaaaaaaaggaatctggtactgcgcagtaggtcaagttcatctagcaacgcatcaggcaatggcggagacggcaaggaggagcgtcccgaaggaagccctactctgttcaaacggatgtcctcccctaaaaaagccaaacccaccaaaggcaatggagaacccgcaactaaattaccaccacccgaaactccagacgcctgcctcaagttggcgtccagggctgctttccagggggcgatgaagaccaaggtgcttcctccgcgcaaaggaaggggactgaagctggaagccattgtccagaaaataacttctcccagcctcaagaagttcgcttgtaaggcgcctggagcttcccccgggaatcccctgtccccttctttgagcgataaggacagagggcttaagggagcgggcgggtctccggtaggagttgaggaggggcttgtcaatgtggggacaggtcagaaactacctacctccggagcagacccactttgcagaaaccccacaaatagatccctgaaaggaaagctgatgaacagcaaaaagttaagctccaccgattgtttcaaaacagaagccttcacttctcctgaggccctgcagcccggagggaccgcactggcccctaagaaacgtagcagaaagggtagggcaggcgctcacggactctctaaagggcctttggaaaagcgaccatatttaggtccagccctgctcttgacacctagggatcgagccagcggaacccagggggcaagcgaggacaatagcggtgggggaggtaagaagcctaagatggaggaacttggattggcatctcaaccccctgaagggcgtccctgccaaccacagactcgagcccagaaacagccagggcataccaattactcatcttactctaaacggaaacgcttgacccgggggagggccaagaacacaactagttccccttgtaaaggcagggcaaaacgacggcgccagcagcaggttctgcctctggaccccgcagaacccgagattcggctcaaatatatcagtagttgtaagcggctccgatcggactcgcgcacccctgctttctccccctttgttcgcgtcgaaaagcgagacgccttcacaactatttgtactgtcgttaattcaccaggggacgcccctaaacctcacaggaaacccagcagctctgcaagcagctcaagctcatcctcctcctttagtctggatgccgcaggcgcatctttagcaaccctgcccggcggttctattttgcaacctaggccatctctgcctctcagttccacaatgcaccttggtcccgtggtttctaaggcactgtccaccagctgcctggtctgctgcttgtgtcagaacccagccaatttcaaggatctgggtgatctgtgtggcccatactatccggagcactgcttgccaaaaaagaagcccaagcttaaggagaaagtgcgacctgaaggaacgtgtgaggaggccagcctgcccttagaacgcacactgaaaggcccagagtgtgcggccgcagctaccgccgggaaacccccacgacctgatggcccagctgaccccgctaaacaaggaccactccgcacatccgcacgggggttgtccaggcgcctgcagtcctgctattgttgcgatggcagggaagatggaggcgaggaggcagctcctgccgataagggacgcaaacatgaatgttccaaggaagcacccgcggagcctgggggggaagctcaggagcattgggtccacgaagcgtgcgcggtgtggacaggcggcgtgtacctagtagcgggcaaattgttcggactgcaggaggccatgaaagttgcagtggacatgcatggcgggactgtcgccctcgccccaggagatttttccctgccagggctacggttcgcctcactgttccagggaccaagttggtgtgactgccctgtgttagcaacctccactccatcatcctggtctagatgcgtcccggctgccaagaaaccaggtccacctctaggcgccgctacaaaagacgcttcaactccaaccacaacgagagttcccgcaatgcaggtacgagccagacccggtaccggcggtcactggagcccatccaagcagtctcggggcaccttacccgggcacagctcaccaaatcctggtcctatctccctcttcagctttccaccgttactgccccaacagttcttttatccttccgtgtgtttggatctctgctgggctatgcccgggacatggaagtag

SEQ ID NO: 132290 - DNA, 2943 bp, synthetic construct
  misc_feature 1..2943: note = Description of Artificial Sequence: Synthetic coding sequence
  source 1..2943: mol_type = other DNA
atgaaaagtctcaaagctaagtttaggaagagtgataccaatgaatggaataagaacgacgaccgtctgctccaggctgtggaaaacggagacgccgagaaggtggcctccctgcttggtaagaagggggcttccgccacaaagcacgatagcgagggcaagacggcgttccatttagccgccgccaagggccatgtggagtgcctgcgcgtaatgattacgcatggcgtcgatgtgactgctcaggacacaaccgggcacagcgcgctacatttggccgccaaaaacagccatcacgaatgtatcagaaagctgctgcagtccaaatgccccgctgagtccgttgacagctctgggaaaactgctctccattatgcagcggcccagggatgcctacaggccgtgcagatcctgtgtgagcataagtcccccattaaccttaaagacctcgacgggaacatccctctgctgctggccgtgcagaacggccacagcgagatatgccactttctcctggaccacggagcagacgtaaactctcgcaacaagtccggaaggacagcacttatgctggcctgtgaaatcgggagctccaatgccgtggaggcccttatcaaaaaaggggctgatctgaacctagtggactcgctggggtacaatgctctccactatagtaagctgagtgaaaatgctggtatccagagcctgttgctgtctaaaatatcgcaggatgctgacctgaagactcctacaaagcctaaacaacacgatcaggtgtcgaagatctcttccgaacgtagtggcacacctaaaaagaggaaggcccctcctccccccatcagcccaactcagctcagcgatgtaagttctccaagatctataacatccactcccctgagcggaaaagaaagcgtgtttttcgccgagccacctttcaaggccgagatcagctctatcagagagaataaggacagactgtccgatagcactacaggtgccgactcgctgcttgatatcagttcagaggccgaccagcaagacctgttgtcactgctccaggccaaggtcgctagcttgactttgcataacaaagagctgcaggacaagttgcaagccaaatctcccaaggaagcagaagccgacctttccttcgactcttatcattccactcaaacagacctcggaccatcgcttggcaagccgggagagacaagcccgcccgatagcaagtctagcccatctgtgctgattcacagtctcggcaagtccaccacagacaacgatgtcaggatccagcagcttcaggagatcctgcaggatcttcagaaaaggttagagagttcagaggctgagcgtaagcaactgcaggtggaactgcagagcaggagagccgaattagtgtgtctaaataatacagagataagcgagaactcatccgatctgagccaaaaactgaaagagactcagagcaaatacgaggaggctatgaaggaagttctgtctgttcaaaaacagatgaagctcggtctggtgagtcctgagtcgatggataattacagccattttcatgaactacgagtgactgaagaagaaataaatgtgcttaagcaggatcttcagaacgcactggaagagtccgagcgtaataaagagaaagttagggagctggaggagaaactcgtggaacgcgaaaagggaacagtcataaaacctccagtcgaggagtatgaagagatgaagtcttcttactgttccgtgattgaaaatatgaacaaggaaaaggcattcctctttgagaaatatcaggaagcgcaggaggaaattatgaaactgaaagataccctcaaatcccagatgacacaagaagccagcgatgaagcggaggatatgaaggaagccatgaaccggatgatagacgagctgaacaaacaggtatccgagttgagccagctttacaaggaggcacaggccgagctggaggattacagaaagcggaaaagccttgaagatgtgaccgccgagtacatacataaggctgagcacgaaaaactgatgcaactcaccaatgtgtctagagctaaagcagaagatgctctctcagaaatgaagtctcagtatagcaaagtgcttaacgagctgacgcaactcaaacagctcgtggatgcacaaaaggaaaattccgtgagcatcaccgagcatctccaggtgatcacgaccctccgcacagctgccaaagaaatggaagagaaaatatccaacctgaaggagcatctggcatccaaggaggtggaggtggctaaactcgagaagcagctgctggaggaaaaagcagccatgactgacgcgatggtcccacgctcttcctatgagaaactgcagagcagtctggagtcagaggttagtgtgcttgcctccaagctcaaggagtctgtcaaggaaaaggaaaaagttcatagcgaggtggtccagatccggtcagaagtctcccaggtgaaacgagagaaggaaaatattcagactctgctcaaatcaaaggaacaagaagtgaacgaactgcttcagaagttccagcaggcgcaggaagaactagccgagatgaagcgatatgccgaaagcagcagcaaactggaggaggacaaagataaaaaaatcaacgagatgtccaaagaagtgaccaagctgaaggaagcactcaattcactgtctcaactatcttacagcacttcctccagcaagcgccagagccagcagttggaagccctgcagcagcaggtcaaacagctccagaaccagctcgccgagtgtaaaaagcagcatcaagaagtgatatccgtttaccgaatgcacctgctctacgctgtccaaggacagatggacgaagatgtgcagaaagttctcaaacagatcctgacaatgtgtaagaatcagagccaaaagaaatag

SEQ ID NO: 132291 - DNA, 2922 bp, synthetic construct
  misc_feature 1..2922: note = Description of Artificial Sequence: Synthetic coding sequence
  source 1..2922: mol_type = other DNA
atggttaagggaaagaccaacgagtggaacaagaatgatgatagattattacaagccgtagaaaatggcgacgccgagaaggtggcttccctgctgggcaagaaaggggcatcagccactaaacacgatagcgagggaaaaacagcctttcatctcgctgcagccaaggggcacgtggagtgcctccgagtgatgataacccatggagtcgacgtgaccgctcaggacacaaccggtcacagcgcccttcaccttgccgcaaaaaattcacatcatgagtgtatcagaaaactacttcagagcaagtgtccagccgagtctgtggactcttccggtaagaccgcgcttcattacgccgcagctcaaggctgtctccaggccgtgcagatcttatgcgagcacaagtccccgattaacctcaaagacttggacggcaacattcctctgttgttagccgttcagaatgggcattcagaaatatgccattttctcctggaccacggcgcagacgtaaattcccgaaacaagagtgggcggactgccctcatgctagcatgcgagattggcagttcgaatgccgtggaggcgctgattaagaagggggctgacctcaacctggtggatagtctcggctacaacgcgctacactactcgaaattatctgaaaacgcaggaatccagtccctcttgttgagtaagatatcccaggacgcagatttaaagactcccaccaagcccaagcagcacgaccaggtatccaaaataagtagcgaacgaagtggtacgcccaaaaaacggaaagcgcctccaccacccatttcaccgacccagctttccgatgtatcatcacctaggagcataacgagtacacctctgtcaggcaaggaaagcgtattcttcgctgaaccgccctttaaggctgaaatatccagcataagggagaataaagatcgcctcagcgattcaaccacaggggccgacagcctgctcgatataagctccgaagcggatcagcaggacctgctgtctttactccaggcaaaggttgcctccctcacactacacaataaggagctgcaggacaagcttcaggcgaagtctccaaaagaagccgaggccgacctcagttttgacagctatcatagcactcagacggatctaggtcctagtctgggaaagccaggcgagactagtcctcccgattcaaaaagcagcccaagtgtcctcatacactctctgggtaaatccacgaccgataatgatgtcagaattcagcagttgcaggagattcttcaagaccttcagaaacgtctggagtcctctgaagcagagcgcaagcagctgcaggtggaattacagagccgacgggctgagctggtgtgtctcaataataccgaaatctctgagaactcctctgacctgtctcagaaacttaaggaaacccagtcaaaatacgaagaagcaatgaaggaggtgctgagcgttcagaagcagatgaagttgggattggtttcaccagaatccatggacaattacagccactttcatgagttacgcgtgactgaggaagaaatcaatgtgctcaagcaagatctccagaatgcacttgaagagagtgagaggaacaaggagaaggtgagggaactcgaagaaaaattggtcgagcgcgagaagggaacagttataaaaccacctgtggaagagtatgaagaaatgaaatcctcatattgctcagtgatcgagaatatgaacaaagaaaaagcctttctgttcgaaaagtaccaggaggcccaagaagaaattatgaaacttaaggatacgctcaaatcgcagatgacccaggaggctagcgacgaagcagaggacatgaaggaggccatgaaccgaatgattgatgagcttaataaacaggtgtcagagctgtcgcagctttacaaagaggcacaggcggagttggaagattatcggaagagaaaaagcctggaagatgtgaccgcggagtacatacataaggcagagcacgaaaagctgatgcagctgactaacgttagccgagctaaggccgaggatgctcttagcgaaatgaagagccagtactccaaggtgcttaacgagcttacccagctgaaacaactggttgatgcccagaaagagaattcagtcagcatcactgaacatctgcaggtgatcaccacgctgcgcacagctgctaaggaaatggaggaaaagatttctaacctaaaagaacacctcgcctctaaagaggtagaggtggccaaactcgaaaagcaattgctcgaagagaaggccgctatgaccgatgccatggtccccaggtcctcctacgagaagttgcagtcttcactcgaatccgaggtaagtgttctggcctccaaactgaaggagtccgtgaaggagaaggaaaaggtacactctgaggtagttcaaatacgctctgaggtatcacaagtcaaacgagagaaggaaaacattcagaccctcctgaagtccaaggaacaggaggtgaacgagctgttacagaagtttcagcaggctcaggaagagctcgctgaaatgaagcggtatgcagaatcgagcagcaagttggaagaggataaagacaagaagatcaacgagatgtcaaaagaggtaaccaagctgaaagaggcactaaattcgctctcacaactttcgtatagcaccagcagcagcaagcggcaaagtcagcaactagaggccctgcagcagcaggtgaagcagcttcagaaccaactcgctgaatgcaagaagcagcatcaggaggttatctccgtctacaggatgcatttgctgtacgctgtgcagggccagatggatgaggacgttcaaaaagttttgaaacagatactcacaatgtgtaagaatcagtcccagaagaaatag

SEQ ID NO: 132292 - DNA, 2943 bp, synthetic construct
  misc_feature 1..2943: note = Description of Artificial Sequence: Synthetic coding sequence
  source 1..2943: mol_type = other DNA
atgaaaagtttgaaggccaaatttaggaaaagtgatacgaacgagtggaataaaaacgatgaccgccttctgcaggctgttgagaacggcgacgccgaaaaggtggcctcccttttgggcaaaaaaggtgcgtctgccaccaaacatgacagcgaggggaaaaccgcattccacttggccgccgctaaaggccacgtcgagtgccttagagttatgataactcacggtgtggacgtgacagcacaggatacgaccgggcattctgcactgcacctggccgccaagaactcgcatcacgaatgtatccggaagcttcttcagtccaagtgtcccgcagagagtgttgactccagcggtaagacggccttgcactatgcagccgcacagggctgtctccaggctgtgcagatcctctgtgaacataagtcccccataaatttgaaggacctcgacggaaatatacctttgttgttagctgtccagaatgggcactctgaaatctgccattttctactggatcacggcgcagatgtgaactcccgtaacaaatccggaagaacagccctgatgctagcctgcgagataggctcaagtaatgccgtcgaagcccttatcaaaaaaggagccgaccttaacctagtagactctctcgggtacaatgcccttcattactctaagttaagcgagaatgctggtatccagtcacttctgctgtcaaaaatctcccaagacgcagatctgaaaacaccaaccaagcctaagcagcacgaccaggtttccaagataagctctgagcgatccggcactcccaagaaaaggaaggccccgccacccccaattagtcccacacagctgagtgacgtcagctcaccgcggtcgataacgagcacacctctcagcggaaaagagtctgtgttcttcgccgagcccccgttcaaggccgaaatatccagtatccgggagaataaggaccggctgagcgactcaactacaggggcggattctctcctcgacataagctccgaggctgatcaacaggacctgttgtcacttctccaggccaaagtcgctagtttgactcttcacaataaagagctgcaggacaagttgcaggccaagagccctaaggaagcggaggctgatttatcgtttgacagctatcacagtactcagacggaccttggcccatccttagggaagcctggagagaccagcccccccgactctaagtcgtccccctccgtcctgatacactccctgggtaaatctacgactgacaatgatgtccgtattcagcagctgcaggagattctgcaagacctccaaaaacgtctggaaagcagcgaagctgagaggaagcaattgcaggttgaactgcagtcaaggcgtgccgagcttgtgtgcttaaataataccgagatatccgaaaatagcagtgacctgtcccagaagctgaaagagacccagagcaaatatgaggaagcaatgaaggaggtcttgagtgtccagaagcagatgaagctcggacttgtctcaccggaatccatggacaactactcacacttccatgaactacgcgtgaccgaggaggagatcaatgtcctcaagcaggacctgcagaatgccctagaagaatccgaacgcaacaaagagaaggtaagagaactggaagaaaagctcgtggagcgggagaagggaactgtcattaaaccccccgtggaggagtacgaggagatgaaatcttcgtactgcagtgtgatcgaaaatatgaataaggaaaaggctttcttatttgagaagtaccaagaggcccaggaagagataatgaaactgaaggatacgctgaaatcacagatgacccaggaagcctctgatgaagctgaggatatgaaggaagctatgaatcgcatgattgatgagctgaataaacaagtgtctgagctcagccaactgtacaaagaagctcaggccgaactcgaggattatcggaaacgcaaaagtctcgaggacgtgacagcagaatatatccacaaagccgagcacgagaagctcatgcagttgacgaacgtttcccgcgcaaaggcggaagatgccttgagtgagatgaagtcacagtactccaaagttctgaacgaactaacccagttaaaacaactggtggacgctcagaaggagaattccgtttctataaccgaacacctgcaggtgatcactaccctgagaactgccgctaaggaaatggaagagaaaataagtaacttgaaagagcatttagcgtctaaggaggtggaagttgccaaactcgagaagcagcttttggaggaaaaggccgcaatgacggacgctatggtgccacggtcatcctacgaaaagcttcaatccagtctcgaatccgaggtgagtgtgcttgcctccaagctcaaggagtctgtgaaggaaaaagagaaggtgcattctgaggtcgtgcagatcaggagtgaggtgagccaggtgaagagagaaaaagaaaatattcagaccctattgaagagcaaagagcaggaggtgaacgaacttctgcaaaagttccagcaggctcaggaagagctcgcagagatgaaacgatacgccgagtcctctagtaaactggaagaggacaaggacaagaaaatcaatgagatgtcgaaagaggttaccaagttgaaagaggcacttaactccctgtctcagctttcatactcgacctccagttccaaacggcagtcccaacaactggaagcgcttcaacaacaagtaaagcagctccagaaccagctcgccgaatgcaaaaagcagcatcaggaggtgattagcgtatacagaatgcatctgctctacgctgtgcaggggcagatggacgaggatgttcagaaggtgctgaagcagatccttaccatgtgtaaaaaccaaagtcagaagaaatag

SEQ ID NO: 132293 - DNA, 2943 bp, synthetic construct
  misc_feature 1..2943: note = Description of Artificial Sequence: Synthetic coding sequence
  source 1..2943: mol_type = other DNA
atgaagtccctgaaggcgaagttcagaaaaagcgataccaacgagtggaacaaaaatgacgatagactgctccaagccgtcgaaaacggggacgcagagaaagtcgcctcactgctagggaagaagggtgctagcgccactaagcatgattctgagggcaaaactgcattccacctggcagccgcaaagggccacgttgagtgtctccgagtcatgattacccatggcgtagacgtgacagctcaggataccacgggacatagtgccctccacctggccgctaagaatagccatcacgaatgtatacggaagttattacagagcaagtgccccgccgagtctgttgactcctctgggaaaacggccttgcactacgccgctgctcaaggctgcctgcaggccgtgcaaatcctctgtgaacacaaatcccccatcaacctgaaggacctggatgggaatattcctttgctgctcgccgttcaaaatggacacagcgagatttgtcattttctcctggatcacggcgctgacgttaacagcaggaacaaatcagggcgaaccgctctgatgctggcgtgcgaaatcggcagcagtaacgcggtggaagccctgatcaagaagggagcggacctgaacctagtcgatagcctggggtataacgcactccactactctaaactaagtgagaatgctggcatccagtccctcttgctttccaagatctcccaggacgccgatctcaagacccctactaagccaaaacaacacgatcaagtttccaaaatcagctctgagaggtccggcactcccaagaagagaaaggctcctcctccacctatctccccgacgcagctcagcgacgtgagctcaccacggagtattacttccacccctctctctggtaaagagagcgtcttcttcgccgagcccccattcaaggccgagatctcttccattagagagaacaaggataggctgagcgacagcactacaggggcggacagtctgcttgacattagttccgaggctgaccagcaagacctgttgagccttctgcaagctaaggtggcaagcctgactttacacaataaagagttacaagacaagcttcaagcgaaatccccaaaagaagcagaggccgacctctctttcgactcttaccactcaacccagaccgacctgggtccttcgttaggaaaaccaggcgaaacctcccctcctgacagcaagagctcaccgtctgtccttatccattcccttggaaagtccacgaccgacaacgatgttcgcattcaacagctgcaggaaattttgcaggaccttcagaaacgccttgagagcagtgaagcagaacgaaagcaactgcaggtggagctgcaaagccgcagagctgaactggtttgcctgaacaatactgagatcagcgagaattcatccgatctgagccagaagctgaaagaaactcagtccaagtacgaggaagctatgaaggaggtgctgtccgtgcagaagcagatgaagttaggattggtatcacccgagagcatggataattattcacacttccacgaactgcgagtgacagaggaagaaataaacgttcttaagcaagatctgcagaatgcgcttgaagagagtgagcgtaacaaagaaaaagtccgcgaactggaagagaaacttgtggagagagaaaaggggaccgttatcaagccaccggttgaggagtatgaagagatgaagtcatcttactgcagtgtcattgaaaacatgaataaagagaaagccttcctcttcgagaaatatcaggaagcacaagaagaaatcatgaagctcaaagacaccctcaagtcccaaatgacgcaggaggcctcagacgaagctgaggacatgaaggaggcaatgaatagaatgatagatgaactgaacaaacaggtctcagaattgagccagctgtacaaagaagcccaggccgagctggaggactatcgtaaacggaaaagcctggaagatgtgacagcagaatacatccataaagccgagcacgagaaacttatgcagctaactaacgtgagccgggcaaaggccgaagatgccctcagtgagatgaaaagtcagtacagcaaagttctcaacgagttgacccagttgaaacagcttgtggacgctcagaaggagaacagcgtttctattacggagcatttgcaggtgataacaaccctccgtacagcagccaaggagatggaggaaaagatcagcaacctcaaagaacacctagcttctaaagaagtggaggtggccaagttggaaaagcagctgctggaggaaaaagcagccatgactgatgcaatggtgcccaggtcttcatacgaaaagttacaaagtagtctcgagagcgaggtgtctgtccttgcatccaaactcaaggagtcggtgaaagagaaagagaaagtacattccgaggtggttcagatccggtctgaagtgagccaggttaagcgagaaaaggagaacatccaaacacttctcaaatcaaaggagcaggaggttaacgagttgctgcaaaaattccagcaagctcaggaagagcttgcagaaatgaagcgttatgcggagtctagttcaaaactcgaagaggataaagacaagaaaataaatgaaatgtcaaaggaggtcactaaacttaaagaagcactcaacagcctctcccagctctcatactccacctcaagctcgaaacggcagagtcaacaactggaagctctgcaacagcaggtaaaacaactacagaatcagttagcagaatgcaagaaacagcaccaagaagtgataagcgtctaccgaatgcatcttctgtacgctgtacaggggcagatggacgaagatgtgcagaaggtcctcaagcaaatcctaactatgtgcaagaaccagtctcagaaaaagtag

SEQ ID NO: 132294 - DNA, 345 bp, synthetic construct
  misc_feature 1..345: note = Description of Artificial Sequence: Synthetic coding sequence
  source 1..345: mol_type = other DNA
atgaagtccctcaaagctaaatttcgaaagtctgataccaatgagtggaacaaaaacgatgaccgcctccttcaagcagtggagaatggcgatgccgagaaggtagcttcgctcttaggcaagaagggggcttcagcaacaaaacatgactccgaggggaagacagcgtttcacttggccgctgctaagggtcacgtagaatgcctccgtgtgatgataacacatggcgtcgatgtcactgctcaggacactaccggccactcagcactccatctggcagcgaagaattcacaccacgaatgtattcggaagcttcttcagtctaagtgcccagccgagagttag

SEQ ID NO: 132295 - DNA, 2919 bp, synthetic construct
  misc_feature 1..2919: note = Description of Artificial Sequence: Synthetic coding sequence
  source 1..2919: mol_type = other DNA
atggaggctaagactaatgaatggaacaagaacgacgatcggctgttacaggctgtggaaaatggtgatgccgagaaggtggctagcttgctgggaaagaagggggcaagcgcgactaagcacgactccgaagggaagactgccttccacctggctgcagccaaaggccacgttgaatgcttgcgcgtcatgatcactcatggcgtcgatgttacagctcaggatacaaccggacacagtgcacttcatctagccgccaaaaattcccaccatgaatgtattcggaaactgctacaatctaagtgtcctgcagaatccgtcgacagcagcggtaaaaccgccttgcactacgcagccgctcagggctgtctccaagctgtgcagatcctctgtgaacacaagagtcccattaacctgaaggatctcgacggcaatattcctttgctgttggcggtgcagaatggtcactctgagatctgccacttcctactcgaccacggggctgatgtgaattccagaaataaatccggtcgaaccgcgctcatgttagcatgcgaaattggtagttctaatgcggtggaggcattgatcaagaaaggggccgatcttaacctggttgactctttaggttataatgcactgcactactcaaagctgtcagagaacgccggcattcagtccctgttgctgagtaagatcagccaggatgctgatttgaaaaccccgaccaaacccaaacaacacgatcaggtgtcgaagatttcatccgagcgctccggaactccaaagaaacgtaaggcacccccccctcccattagccccactcagctcagcgacgttagcagcccccgttcgatcacgtctacccccctttcaggcaaggaatccgtattctttgccgaaccaccttttaaagcagaaatttctagtataagagagaataaagaccgcttatccgattctacaactggtgcggattcactgttagacatatcttctgaggcggatcagcaagacttgctatctctcctccaggctaaagtggcatcattaacgcttcacaataaagaattgcaggacaaactgcaagccaaatcaccgaaagaggctgaggccgatctgtcattcgatagttatcactctacccaaaccgacctgggtccatctctgggtaagcctggggaaacatcgcctcctgactccaaatcgagtccctctgttctgattcactccttgggaaagagcacgacagataatgacgtcagaattcaacagttgcaggaaatcctgcaagatcttcaaaagcgccttgaaagttccgaggcagagcgaaaacagctgcaagtggaactccagagcaggcgtgccgaactcgtgtgccttaacaacaccgagattagcgagaacagttcagacctgagtcaaaagttaaaggaaactcagtccaagtacgaagaggccatgaaggaagtgctatccgtacagaagcagatgaagctgggcctggtgagtcctgaaagtatggataattatagccacttccatgagctgcgcgtgacagaggaggaaatcaacgtattgaagcaggatctccagaatgctctcgaagaaagcgagagaaacaaagagaaggtcagggagctggaagagaagctcgtagaacgcgagaagggaacagtaataaaaccacccgtggaagagtacgaagaaatgaagagcagctactgcagcgtgatcgagaacatgaataaggaaaaggcgttcctcttcgaaaagtaccaagaggcccaggaagagataatgaagctgaaggacacactgaaaagccaaatgacacaggaggcctctgacgaagcggaagacatgaaggaggcgatgaaccgcatgatcgatgagttaaacaagcaggtttccgagctgtcccagctgtacaaagaagctcaagctgagctggaagattaccggaagcgaaaatccctagaagacgttaccgccgagtacattcacaaggcagagcacgaaaagctgatgcagctgaccaatgtcagtagagcaaaggccgaagatgctctgtcagagatgaagtcccagtattcgaaagtactgaacgagctcacccaacttaaacagctcgtggatgcccaaaaggaaaactctgtctccatcacggagcacctgcaggtgatcaccaccctgaggacagcggctaaggaaatggaagagaaaatatccaatttgaaagagcaccttgctagtaaggaggtcgaagtcgccaagctggaaaaacagctgttagaggagaaagccgctatgaccgatgcaatggtgccgcgttcttcctacgagaaactgcagtccagcctcgagagcgaggtgtctgtgctggcatccaaactcaaggaatcagtcaaggaaaaggagaaggtacactcggaggtggtgcagattcggtccgaggtgtcccaggtgaaacgtgaaaaggaaaatattcaaacactgctgaagtccaaggagcaggaggtaaacgaactgctgcagaagttccagcaggcccaggaggagctggcagaaatgaagcgttatgcagagagttcctcaaaactggaagaggacaaggacaagaagattaacgagatgtccaaggaagtgaccaagctcaaagaggccctgaattccctgtcccaacttagctattctaccagctcaagtaagcgtcagtcccagcaactggaggctctgcagcagcaggtcaagcaactacagaatcaattggctgaatgtaaaaaacagcaccaggaggtcattagcgtctatagaatgcacctgctgtatgccgtgcaggggcagatggatgaagacgttcagaaggtgctgaagcagattctgaccatgtgcaaaaaccagagtcagaaaaagtag

SEQ ID NO: 132296 - DNA, 378 bp, synthetic construct
  misc_feature 1..378: note = Description of Artificial Sequence: Synthetic coding sequence
  source 1..378: mol_type = other DNA
atgaagagcctgaaagccaagttccgaaaatccgatactaatgagtggaataaaaacgacgaccggctactccaggccgtggagaacggggatgccgagaaggtggcctcccttctcggaaagaaaggagccagcgccaccaagcacgacagcgaggggaagactgcttttcaccttgcggcagctaagggacacgtggagtgcctaagagtgatgatcacacatggtgtggacgtaaccgcgcaggacaccacaggtcatagcgccctacacttggcagctaagaattcacaccatgaatgtatccggaaactactgcagtcgaaatgccctgcagagtcagtagacagtagcggcaagaccgctctgcactattag

SEQ ID NO: 132297 - DNA, 324 bp, synthetic construct
  misc_feature 1..324: note = Description of Artificial Sequence: Synthetic coding sequence
  source 1..324: mol_type = other DNA
atgaagtcgctcaaggctaagttccgcaaatccgacactaatgagtggaacaaaaacgatgacaggctgctgcaggcggtagaaaacggcgacgcagaaaaggtagccagtctgctgggtaaaaaaggcgctagtgctaccaagcatgatagtgagggcaagacagcgttccatctggcagccgcaaagggacacgtcgaatgtctgcgagttatgatcacccacggagtggacgtcaccgcacaagataccaccggccactctgcacttcacctagctgccaaaaacagccaccatgagtgtattcgtaaactgctgcagtag

SEQ ID NO: 132298 - DNA, 453 bp, synthetic construct
  misc_feature 1..453: note = Description of Artificial Sequence: Synthetic coding sequence
  source 1..453: mol_type = other DNA
atgaagagtctgaaggccaaattccgcaaatccgatacaaacgagtggaacaaaaatgacgacagactgcttcaagccgttgaaaatggggatgccgagaaagtcgccagtctgctcggtaagaaaggcgcttctgccacgaaacacgacagcgaaggcaagacagcctttcatttggcggcggccaaggggcatgtcgagtgtctgagagtcatgatcacccatggggtggacgtcactgctcaggacacaacagggcacagcgctctacacctggctgctaagaatagtcaccacgaatgtatccggaaactcctccaaagcaaatgtcctgcggagtccgtggattcgtccggcaagacggcgctgcactacgccgccgcccagggctgcctgcaagccgttcagatcctctgcgaacataagagcccaataaacttgaaagatttgtag

SEQ ID NO: 132299 - DNA, 381 bp, synthetic construct
  misc_feature 1..381: note = Description of Artificial Sequence: Synthetic coding sequence
  source 1..381: mol_type = other DNA
atgaagtcgctgaaagctaagtttagaaagtccgatacaaacgagtggaataagaatgacgaccgccttctccaagccgtcgaaaacggcgacgctgaaaaggtagcaagcctgctgggtaagaagggtgcttccgccacgaagcacgatagcgagggcaagaccgcatttcacctggccgcggcgaaggggcatgtagaatgtctgagagtgatgattacccacggggtcgacgttactgcccaggacacaacaggccactcagctctgcacttagccgcgaagaatagtcatcacgaatgtatcaggaagctgctgcagtctaagtgtcctgccgagtcagtagactcatcagggaaaaccgctctgcactatgcatag

SEQ ID NO: 132300 - DNA, 315 bp, synthetic construct
  misc_feature 1..315: note = Description of Artificial Sequence: Synthetic coding sequence
  source 1..315: mol_type = other DNA
atgaagagcttgaaagccaaattcagaaagtcggataccaatgagtggaacaagaacgacgaccgccttctccaggccgtggaaaacggcgatgccgaaaaggtcgcgagtctgcttgggaaaaaaggcgcctcggcaaccaagcacgattcagagggtaagacggcctttcatcttgccgcggccaaaggacatgtcgaatgccttagagtgatgatcacccatggcgtagatgtgacggcacaagacacaactggccacagcgctctgcacctggccgccaagaatagtcaccacgagtgtatcagaaagtag

SEQ ID NO: 132301 - DNA, 420 bp, synthetic construct
  misc_feature 1..420: note = Description of Artificial Sequence: Synthetic coding sequence
  source 1..420: mol_type = other DNA
atgaagagcttaaaggccaagttccggaagagtgacacgaatgagtggaacaagaatgacgatcgcttactgcaggccgtagagaatggggacgctgaaaaagtggctagtctgctcgggaaaaaaggcgcttctgccacaaagcatgacagtgaaggaaagaccgccttccacttagcagccgctaagggccatgtggaatgccttagggttatgattacacacggagtggacgtcacagcacaagacaccaccggacactctgcattacatctcgcagccaaaaatagccaccatgagtgcattagaaagctgttgcagagcaaatgccctgcggaaagtgtggacagtagcgggaaaaccgctctgcattatgccgcggcacagggttgcctgcaagccgttcagatattgtgctag

SEQ ID NO: 132302 - DNA, 381 bp, synthetic construct
  misc_feature 1..381: note = Description of Artificial Sequence: Synthetic coding sequence
  source 1..381: mol_type = other DNA
atgaaatctcttaaggctaaatttagaaagtctgataccaacgaatggaacaaaaacgatgacagactgttgcaggcggtggaaaacggagatgccgagaaggtcgcgagcctacttggcaaaaaaggcgcttcagccactaagcatgattctgagggcaagaccgcatttcacctggctgctgcaaagggccatgtcgaatgcctgcgagttatgattacgcatggtgtggatgtgactgcccaggacactactggacattcagctctgcatctggctgccaagaacagccatcatgagtgcattcggaagctgctccagagtaaatgccctgccgaaagtgtcgacagctccgggaaaaccgccttgcactatgcatag

SEQ ID NO: 132303 - DNA, 2952 bp, synthetic construct
  misc_feature 1..2952: note = Description of Artificial Sequence: Synthetic coding sequence
  source 1..2952: mol_type = other DNA
atgcagcccacatatctgccttggctttctgctaaagagaagaagacgaatgagtggaacaagaacgatgacagactcctgcaggcggtcgaaaatggggatgcggagaaggtggcctcgctgctgggaaagaagggcgcctcagctacaaagcacgacagcgagggaaagacagcatttcacctggcagccgctaaggggcacgtggagtgtcttcgggttatgattactcacggcgtggatgtcacagcccaggacacgaccggccattcggcgctgcacttggccgccaagaacagccatcacgagtgcatcagaaagctgctacagagcaaatgtcccgccgaatctgtggactctagtggtaagactgcactgcactatgccgcggcccagggatgcctccaggctgttcagatcttgtgcgagcacaaatccccaatcaatcttaaagatttagacgggaacatccccctcctgttggccgtacagaacgggcatagcgagatttgccactttttactggatcacggagctgacgtcaactctcgtaacaaaagcggaaggactgccctcatgctcgcctgtgagattggctcctctaatgctgtggaagcccttatcaaaaagggagccgacctgaacctcgttgactctctcggatataatgccctccattactccaagctaagtgaaaacgccggaattcaatcactcctgctctccaaaatctcgcaggacgcggacctgaagacacctacaaagccaaagcagcacgatcaggtcagcaagattagtagcgaacgtagcggaacccctaaaaaacgcaaagcaccaccaccccctatatcaccaacacagctatctgatgtgtccagcccacgatcgattactagcacaccattgtccggcaaggaatctgttttcttcgccgagccaccttttaaggcagagatctctagcatccgagagaacaaggatcgactcagtgactccactacaggcgccgactccctactggacattagcagtgaagctgatcagcaggatctactatctctgcttcaagctaaagtcgcaagcctgacactccataacaaggaactgcaggacaaactgcaggcgaaaagccctaaagaggcagaagcagatctttctttcgattcctatcattcaacgcaaacagatctcggcccatcactcgggaagccaggcgaaacctctcctccagattcaaagagcagtccctcagtcctcattcattcactgggcaaatccactaccgacaacgacgtgcggattcagcagctgcaggagatcctccaagacctacagaagcggctggaatcttctgaggccgaaagaaagcagctgcaggtagaactccagtcccgccgtgcagaattggtctgccttaacaacaccgagatttcagaaaacagcagtgacctgagtcagaaactcaaggagacgcagtctaagtatgaggaagctatgaaggaagttcttagtgttcaaaaacaaatgaagctggggctggtaagccctgagtcaatggacaattattcacactttcacgagctccgcgtaaccgaagaggagattaacgtgctgaaacaggatctgcaaaacgcgctggaagagtctgagcgaaataaagaaaaggttcgagagttggaagaaaagcttgtagagagagagaaaggaaccgtaatcaaacccccggtggaggagtatgaggaaatgaagtcctcctattgctcagtaatcgagaatatgaacaaagagaaggcttttttgttcgagaaatatcaggaagcccaggaggagatcatgaaactgaaggacaccctgaaatctcagatgactcaggaggcttcggacgaagccgaggacatgaaagaggcaatgaacagaatgatcgacgagctaaacaagcaggtgtctgagttgtcccaattgtacaaagaagcgcaagccgagttggaagattatcgcaaacgtaagtctctggaggatgtcacggctgagtatattcacaaggctgagcatgagaagctgatgcaactcaccaatgttagcagggcaaaagccgaggacgctctcagcgaaatgaagagccagtatagcaaggtcttgaacgagttgactcaactgaagcagcttgttgacgcccaaaaggaaaacagtgttagtatcacagaacacctccaggtgattaccaccctaagaacagccgccaaggagatggaggaaaagatcagcaatctgaaggagcacctggcctcaaaagaggtggaggtcgccaaactggagaaacagctgcttgaggagaaggccgcaatgacagacgcgatggtgccccgcagctcctacgagaaattacagtcttcactagaaagcgaggtgtcggtccttgcatctaagctcaaagagagtgtcaaagagaaggaaaaggttcattcagaagtcgtgcaaatcagatcagaagttagccaggttaaaagggaaaaggagaacatccagactctacttaagtctaaagagcaggaggtgaacgagctcctccaaaagtttcagcaggcccaggaagaattagcagagatgaaacggtacgcagagtcctcttccaaattagaagaagataaagacaagaagattaacgagatgtctaaagaagtgacaaagctgaaagaggctctcaactctctatcccaattgagttacagcactagtagctccaagagacagagccagcagctggaagcgttgcagcaacaggtcaaacagctgcagaatcagctcgcagaatgcaaaaaacagcaccaagaggtgatctccgtatataggatgcacctgctttatgccgtgcaggggcagatggacgaagatgtgcagaaggtccttaagcagatcctgaccatgtgcaagaaccagtcacagaaaaagtag

SEQ ID NO: 132304 - DNA, 2856 bp, synthetic construct
  misc_feature 1..2856: note = Description of Artificial Sequence: Synthetic coding sequence
  source 1..2856: mol_type = other DNA
atgaagagtctgaaggccaagttccgtaagtccgacacaaatgaatggaacaagaatgacgaccggttacttcaagccgtagaaaatggggacgcggagaaagtagccagtctcttggggaagaagggcgcaagtgcgaccaagcatgactccgagggaaagaccgctttccaccttgcggccgccaaagggcacgtggaatgcctgagggtgatgattacacatggggtggacgttaccgctcaggataccactggccactctgccctccatctggcggcaaagaattcccaccatgagtgtatcagaaagttgttgcaatcaaaatgcccagccgagtcagtcgactccagcggaaagaccgccctacattatgctgccgcccaaggctgccttcaggccgtgcaaattttatgcgagcataagtctcctataaatctcaaagaccttgatgggaatatacctcttctactggctgtacaaaatggacactccgaaatatgccattttctgttagaccacggcgcagacgtgaattctagaaataaaagcggtcgcactgccctaatgttggcatgtgaaatcggctccagcaacgccgtcgaggccctaataaagaagggcgccgaccttaacctcgttgacagcctcggctacaacgccctgcattattcgaagctttcagagaacgctggcatccaatccctgctgctgtcgaaaatcagccaagatgccgacctgaaaactccgaccaagccgaagcagctgtccgatgtatcatcccctaggagtatcacgtctacacccttatccggaaaagaatcagtattctttgccgagccgccatttaaggcggagatttcttcaatcagggagaacaaggaccggctctccgactcaacgacaggtgcagactcactgctggacattagctccgaggccgatcagcaggatctcctttcactgctgcaggcaaaagtggcctccctgaccctgcacaacaaggaattgcaggataaactccaggcgaaaagcccaaaagaagccgaagccgaccttagcttcgattcttatcattccacccagacagatctgggtccaagtctggggaaacccggggagacatccccacccgattccaaatcttcaccttcggtgctcatacacagcttaggaaaaagtaccactgacaacgacgtacggatccaacagctacaagaaattctccaagacctgcagaagagactcgaatctagcgaagcggaaaggaaacaactgcaggtggaattacaatcacgccgagccgagcttgtctgtctgaacaatacagagatatccgagaactcaagcgatctgtctcagaagctgaaggagacacagagtaagtacgaggaggctatgaaggaagtgctctccgtgcagaagcagatgaagctgggtctggttagcccagaatcgatggataactattcacatttccacgagctgcgggttactgaggaagaaattaatgtcttgaaacaagaccttcagaacgccctggaggagagtgagaggaacaaggaaaaggtgcgagagctggaggagaagttggttgaaagggagaaaggtaccgttattaagcctcctgtagaggagtacgaagagatgaaaagcagctattgtagcgtcatcgagaatatgaataaggagaaggcattcctgtttgaaaaatatcaagaagcccaggaagagattatgaagcttaaagataccttaaagagccagatgacccaggaggcaagtgatgaggccgaagacatgaaggaggcgatgaacagaatgatagacgaactgaacaaacaggtctctgagctttcccagctgtacaaggaggcacaagccgagctggaggactatcgcaagagaaaaagcctcgaggacgttaccgccgaatatattcataaagccgagcacgagaaactcatgcaactcactaatgtgtctcgggccaaagccgaggatgcgttaagcgagatgaagtctcagtattcgaaggtgctcaatgaactgacccagcttaaacagcttgtggacgctcagaaggagaacagtgtctctattaccgagcatctgcaggttataacaacactgagaacagcagccaaggagatggaagaaaagatatctaacttgaaagagcacctggcctcaaaagaagtcgaggtggctaagctggaaaaacagcttttggaggagaaggctgctatgacggacgcaatggtacctcggtcgtcctacgaaaagctccagagcagtttggaatctgaagtctctgtactggccagtaaactgaaggaaagcgtgaaagagaaggaaaaagttcatagcgaggtcgtgcagattagaagcgaggtctcccaggtgaagagagagaaagaaaatattcagactctactgaagagcaaggaacaggaggtgaatgaactgctgcaaaagtttcagcaggcccaggaggaactggccgaaatgaaacgatacgcagagtcttcatcgaaactcgaagaggataaggataaaaagatcaatgaaatgagcaaagaggtgactaagttgaaagaggccctcaactcactaagccagctctcttattcaacctccagctcgaagcgccagtcgcagcagcttgaggctcttcagcagcaggttaaacaactgcagaatcagcttgccgaatgtaaaaaacagcatcaggaagtgatcagcgtatacagaatgcatctgctgtatgctgtgcagggccagatggacgaggacgtccagaaagtgctgaagcagatcctgaccatgtgcaaaaaccagagtcagaagaaatag

SEQ ID NO: 132305 - DNA, 1593 bp, synthetic construct
  misc_feature 1..1593: note = Description of Artificial Sequence: Synthetic coding sequence
  source 1..1593: mol_type = other DNA
atggacgatctccagagtcaaaacctttccatggacatgacggatagcccaccagcactggcgaacaaccgattagaaaacgggatggctcagcttataactactgaagcctggaatattaactctactgacctcgtgaagaaggctctcgttactgtccccgcgccctctatccttaatccacccgccgagagtcagtcgggcatggccctgaaagtagctgctacagtgctgcagcccctgtgtctcggtgagagcccagtcgttatgccaattcatatgcaggttgaaggcagctcagctccggagctgaatcctaacgggaatgctacttacgtgatgactacacaggggcccgtgcagctgccggttgtgctggaacaacacgtgttccaacacttaaacagcccgttagtgctcccacaggaagccccctgctcttcatctacaatacacaacaacctcttccagggggcggaagaccccgaggctcagcctcagctgcttgacctcaggatcccatctcagccccaggaacccactctgcccttcgaggccgtgctgcagaacctcttcccttcacagggcacgctgggaccaccaccatgccagcctccacctgggtacgctccagtgcccccacagcctttcagctccccattatctccactagttccccctgccactctgctggtgccctaccccgtgatcgttcccctccccgtaccagtgcccatccccatacctatccctatgccgcagagctccgaatccaagttttcctcctcctttcctaagccccccagttctttcggcctccacccatttaaaggcacccaaacccctttggaaaaggacgaactgaagccttttgacatcttgcagcccaaggagtattttcaactgagtcggcacacagtgataaagatggggtctgagaacgaagccctggacctctcaatgaagtctgtgccctggcttaaagcaggagaagtgtctcccccaattttccaggaggacgccgcacttgatttatcagtcgcagcgcacaggaagtctgaacctcctcctgagaccctgtacgattcgggggctagcgtggattctagcggtcataccgtgatggaaaagctgcccagtggcatggaaatcagttttgcccccgccacaagccacgaggctccagcaatgatggatagccacatttccagctcagacgccgccactgagatgctgtcacaaccaaaccatcctagtggggaggtaaaagccgaaaacaacatcgagatggtgggggagtctcaggcagccaaagtgatagtttccgtcgaggatgcagtccccacaattttctgcgggaagattaagggcctgtctggggtgtctacaaagaacttcagctttaagagagaggatagtgtgctccaggggtacgatattaactcccaaggggaagagagcatgggcaatgcagaacctctccgcaaacccatcaagaatcggtcaattaaattaaagaaggttaactcgcaagaaattcatatgctgcctatcaagaagcagaggcttgcgaccttctttccaaggaagtag

SEQ ID NO: 132306 - DNA, 1593 bp, synthetic construct
  misc_feature 1..1593: note = Description of Artificial Sequence: Synthetic coding sequence
  source 1..1593: mol_type = other DNA
atggacgatctccaaagccagaacctgtcaatggatatgaccgattccccaccagctctggctaataaccgcctcgaaaatgggatggcccagttaattacaaccgaagcatggaatattaactcaacagacctggttaaaaaggcactcgtgactgtaccggcaccatcaatcctcaatccgccagctgagagtcagtctggaatggccctgaaggtggccgcgactgtgctacaaccgctctgcctgggtgaatctcctgtggtcatgcccattcacatgcaggtggaaggctctagcgcgccggaacttaatcctaatggtaatgcaacctacgtcatgactacgcagggtcctgtccaactgccggtagtgctcgagcagcatgtctttcaacaccttaacagtccgctggtcctgcctcaggaggccccttgctcatccagcaccatccacaataatctgttccagggggccgaagaccctgaagcacaaccacaacttctcgatctcagaattcccagccagcctcaggaaccaactctccccttcgaggccgtgctacagaacctgttcccaagccagggtacactggggcccccgccctgtcagccacctcctggttatgcgcctgtccctcctcagcctttctcttctccgctctcacccctggtgcccccagccaccctgctggtgccgtacccagtgattgtcccattgcccgtgccggttccgattcctatccctattcccatgcctcagagtagcgaaagcaagttctccagctccttccccaaacctccaagctctttcggtctgcaccctttcaagggcactcagactccacttgagaaagatgagctcaaaccatttgacattctgcagcccaaagaatactttcaactgtctagacatacagtaataaagatgggctctgaaaacgaggcactggacttgtccatgaagtccgtaccgtggttaaaggccggggaggtcagtcctcccattttccaagaggacgcagcgctcgacctgtccgtcgctgctcatcggaagagtgagccccctcctgaaaccctttacgattcaggcgcgtcagttgacagctccggccacaccgttatggagaaactgccatcaggtatggaaatctctttcgcccctgcgacaagccacgaggccccagcgatgatggattcccatataagctcttcagacgctgccacagaaatgctcagtcagcctaaccacccctctggggaagtcaaggctgaaaacaatattgaaatggtgggcgaatctcaagccgctaaagtaattgtttcagtcgaggacgccgtgcccaccattttctgcggcaaaatcaagggcctgagtggcgtgtctactaaaaatttttcattcaagcgcgaggacagcgtgctgcaaggctacgacataaatagccaaggcgaagagagcatgggaaacgcagaacccttgcgaaagccaataaagaaccggagtatcaaactgaagaaagtgaactcacaggaaatacatatgctccctattaaaaagcagaggcttgctacctttttcccccgcaaatag

SEQ ID NO: 132307 - DNA, 1443 bp, synthetic construct
  misc_feature 1..1443: note = Description of Artificial Sequence: Synthetic coding sequence
  source 1..1443: mol_type = other DNA
atggacgatctacagtcccaaaacctgtctatggacatgacagacagtccgcctgcactggctaataaccgcttagagaatggcatggcccaactcatcacaactgaggcttggaatataaacagcactgacttagtggaaggatcttccgctcctgaactaaacccgaacggcaatgccacgtacgtgatgaccactcaggggcccgtgcagcttcctgtggtgcttgagcagcacgtcttccagcatctgaatagccctctggtcctgcctcaagaggccccctgcagttcctccaccatacacaacaacttgtttcagggagccgaagatcctgaggcccagccacaattacttgacctcagaatcccctcacagccgcaagaacccacactgccttttgaagcagtcctgcaaaacctattcccgagccaggggactttgggtcctcctccatgtcaaccgcctccaggctacgcaccagtgccgccgcagccattttcctccccactttcccccctcgtaccgcctgcaacgttattagtgccatacccagtgattgtacccttgcccgtgcccgtgcctatccccatcccaatacccatgccacagtcttcggaatctaaattctcttcgtcctttcctaagccacctagttcttttggtttgcacccttttaaggggacccagaccccattagagaaggatgagctcaaaccatttgacatcctacagcccaaggagtacttccagctgagccgtcataccgtcataaagatgggttccgaaaatgaggcactagatctaagcatgaaaagcgttccttggctcaaggctggcgaggtcagtccacccattttccaagaggacgcagcactggatttgtccgtcgctgcacaccgaaaaagcgagccacctccagagactctgtatgatagcggcgcaagcgttgactcttccgggcacactgtcatggaaaagctgccctccggtatggaaattagcttcgcacccgccacaagccacgaagcccccgccatgatggactcccacatcagctcatcggatgctgccactgaaatgctttcacagcccaatcatcctagcggcgaggtgaaagccgagaacaacattgagatggtcggcgaatcccaggctgccaaagttatcgtaagcgtggaggatgcagtgcctacaatcttctgtggcaaaatcaagggactgtctggggtgtctacaaagaacttctcgtttaagcgagaggacagcgtgctgcagggctacgatatcaacagccagggcgaggaaagcatggggaacgccgaacccctccgcaagccgataaaaaataggagtataaaactgaagaaggtgaacagccaagagatccatatgctgccgataaagaaacagcgactcgctacttttttcccccgaaagtag

SEQ ID NO: 132308 - DNA, 1593 bp, synthetic construct
  misc_feature 1..1593: note = Description of Artificial Sequence: Synthetic coding sequence
  source 1..1593: mol_type = other DNA
atggacgatcttcagtcccagaatttgagcatggatatgaccgacagccctccggcactcgcaaacaaccggcttgaaaatggcatggcacagctgatcaccactgaagcttggaatatcaactccacagacctcgtaaagaaggccctggtgacagtccctgcccctagtattcttaacccacctgccgaaagtcagagcggcatggccctgaaggttgctgccacagtgctccagcccctctgcttgggggagtccccagtcgtgatgcctattcacatgcaagtggagggctcgtctgcgcccgaactgaacccaaatggtaatgccacctatgttatgacaacccagggacctgtgcaattgccagtcgtgctggaacagcacgtcttccagcatctaaattcgccacttgtcttgccacaggaagcaccgtgctctagctcgactattcataacaacctctttcaaggagctgaggacccagaagcgcagcctcagctactggaccttagaatcccaagccagcctcaggagcctacgttgcccttcgaagctgtcctgcagaacctgtttccaagccaaggcacactgggtccgccaccttgccagcctcctcctggctacgctcctgtacccccacaacccttctcctcacccctatcccccctggtgccaccggcgaccctcctggtcccctaccctgtgatcgtgccactgcccgtgcccgtccctatcccgatcccaatccctatgccgcagtcatccgaatctaagttctctagttcatttcccaaacccccatccagttttggtctacacccttttaaaggtacccaaaccccgctagagaaggacgagctaaagccattcgatattctccaacccaaggagtacttccaactctccaggcatacagttattaaaatgggctccgaaaatgaggctcttgatttgtctatgaagtccgtgccatggttgaaggccggcgaggtatcaccccctattttccaggaagacgctgcgcttgacctctccgtggccgctcaccgcaagagcgagccaccacccgaaacgctgtacgactccggcgcctccgtcgacagtagcggtcatacagttatggagaagttgccaagcgggatggagatctccttcgcacctgctacgagccacgaggcaccagcaatgatggacagccacatatcttccagcgacgctgctacagagatgctctctcagcccaaccatcccagtggagaggtcaaagctgagaacaatatcgagatggtgggagagagccaggcggctaaagtgatcgtctcagtggaggatgccgtccctacaattttctgcggaaaaataaaagggctgtccggcgtctcaacaaagaactttagcttcaaaagggaggattctgtgctccaggggtatgatataaatagccaaggagaggagtctatgggcaatgccgagccattgcggaaaccaataaaaaataggtctataaaactcaagaaggtcaactcacaggaaattcacatgctgcctataaaaaaacagagattagccaccttctttcctcggaagtag

SEQ ID NO: 132309 - DNA, 1593 bp, synthetic construct
  misc_feature 1..1593: note = Description of Artificial Sequence: Synthetic coding sequence
  source 1..1593: mol_type = other DNA
atggatgatctccagagccagaatttgtccatggatatgactgattctccaccggccctggctaacaacagactggagaacggtatggctcagttgatcaccaccgaggcctggaacattaattctaccgacctggtgaagaaggcgctggtaacagtgcctgcaccctcaattcttaaccccccggccgagagtcagagcggaatggcactcaaggttgccgcgacagtcttacagccgctgtgccttggtgagagcccagtcgtgatgccgatacatatgcaggtggagggaagctctgcacccgagctcaatccaaatggcaacgccacgtatgtcatgacaacacaaggacccgtgcagctgcccgtggtgctagagcagcacgtattccaacacttgaattcccctctggtgctaccgcaggaggcaccctgctcgtctagtacgatacataacaatctgttccagggggctgaggatcctgaagcacagccgcagctgcttgatctccgaatcccttcgcagccccaggaaccaacactgccatttgaggcagtgttgcagaatctctttccaagtcaggggactctcggacccccaccttgccaaccccctcccggctatgcacctgtgcccccacagccattctcctctccactgagccctctggttcctcccgccactctgctggttccgtatcctgtcatcgtccccttacctgtccctgttcccatccctattcccatcccaatgcctcagtcatccgagtctaaattctcaagctcttttcctaaaccgcctagctcattcggcctgcatccctttaagggaactcagaccccattggaaaaagacgagcttaaacctttcgatattttgcagcccaaagaatacttccaactttctcgtcacactgtaatcaagatgggctcggagaacgaagccctggatctatctatgaagagcgtcccttggctgaaggcaggcgaagtgtctccccctatcttccaggaagacgctgccctggatctcagtgtggccgcccaccggaagagtgagcccccacccgaaaccctctacgacagcggggcttccgtggattcatcaggacataccgtgatggagaagctgccatcgggaatggagatcagctttgctccagcaacctcacatgaggcgcctgcgatgatggactcacacatttcatcttctgatgctgccaccgagatgcttagccagcccaaccatcctagcggggaagtcaaagcagagaacaacatagagatggtgggcgaaagtcaagcagccaaggtcatcgtatcggtggaggatgcagtccccaccatattttgcgggaagatcaaaggtttaagcggcgtctctactaaaaatttctccttcaagagggaggatagtgttctacagggttatgatatcaattcacagggtgaagagagtatgggaaacgcagaaccgctgagaaaaccgatcaaaaacagaagtatcaaattgaaaaaagtgaactcacaggagatacacatgttgccaattaaaaagcaaaggctcgccacattcttcccacgtaaatag

SEQ ID NO: 132310 - DNA, 885 bp, synthetic construct
  misc_feature 1..885: note = Description of Artificial Sequence: Synthetic coding sequence
  source 1..885: mol_type = other DNA
atgcagccacgacggcagagactgccagccccctggagcggaccccgggggccccggccaacagctcctctgttagccctactgcttctcctggctcctgtggcagcccccgcaggatcgggcgaccccgatgacccaggtcagccccaggacgcaggagtaccccgccggctgttacagcaagccgctagagcggctctgcacttctttaattttcgctctggctccccttctgccctgagagtccttgccgaggttcaggaagggcgggcctggatcaacccaaaggagggttgtaaggtccatgtcgtgttttcaactgaaaggtataaccccgagtctttactgcaggagggggaggggagattaggtaaatgtagtgcacgagtgttctttaagaaccagaaaccaagacctacaattaacgtgacctgtacacgattgattgaaaaaaagaagcgacagcaggaggattatctgctctacaaacagatgaagcagttgaagaatcctctcgaaatcgtctccatacccgacaaccacggacatatcgaccctagcctacggctcatctgggatttagccttccttggtagcagctacgtcatgtgggagatgacgacacaggtgtcccattattatctggcacagctgacatcagtgcggcaatggaagaccaatgacgacaccattgactttgactacaccgtcctattacacgagctgtctacacaggagatcattccctgtcgtatccacctggtctggtatcctggtaagccgcttaaggtgaagtaccactgccaggaactgcagaccccagaagaggcatcaggtacggaagagggttcagctgtggtgcctacggagttgtccaacttctag

SEQ ID NO: 132311 - DNA, 687 bp, synthetic construct
  misc_feature 1..687: note = Description of Artificial Sequence: Synthetic coding sequence
  source 1..687: mol_type = other DNA
atgcagccacgcaggcaacggctgcccgccccctggtctggacctcgaggtcctcggcccaccgcccccttgttggccctcctcctcctattagctcccgtggccgcgcccgccggatctggagacccagacgacccaggccaaccgcaggatgccggggtcccccgacggttactccagcaggctgcaagagccgctctgcacttctttaatttccggtctggcagcccatctgctttaagagtgctcgccgaggtccaggaagggagggcttggattaatccgaaggaaggctgcaaagttcacgtggtcttttctaccgagcggtacaatccagagtccctgttacaggaaggagagggacgcctcggtaagtgttcagcgagggtgttctttaaaaaccagaagccccgtcccaccattaatgtgacttgcacaagactcatagagaagaagaagcgtcagcaggaagactacttgctgtacaagcagatgaagcaacttaagaatcctctcgagatcgtctcaattcctgacaaccacggacatattgacccctcactgcgcctcatttgggatctcgcgtttctcggctctagttacgtcatgtgggagatgacaacccaagtgagccactactacttggcccagttaacatcagtgaggcagtgggtgcgtaagacttag

SEQ ID NO: 132312 - DNA, 1008 bp, synthetic construct
  misc_feature 1..1008: note = Description of Artificial Sequence: Synthetic coding sequence
  source 1..1008: mol_type = other DNA
atggtcagacgggataggctgcgaagaatgcgggagtggtgggtgcaggtgggtctgctcgctgtccctcttttggccgcgtacctgcacatcccccctccacagctctcaccggctcttcatagctggaagtcttccggaaagttttttacttacaaaggattgcggattttctatcaggatagcgttggggtcgtaggcagccctgagattgtggttctcctgcacggctttcccacctccagctacgactggtacaaaatctgggaggggctgactctgcggtttcatcgtgtcatcgcactagattttctgggcttcggcttttcggacaaaccgagacctcaccactactctattttcgaacaggcatcgattgtggaagctcttctgcggcatctggggctccaaaaccgacgcattaacctgctaagtcatgactacggagatatcgtggcccaggagcttctctatcggtacaagcagaatcgcagcggaagattgacaattaagagcctatgtttatccaatggaggcatctttcccgaaacacatcgtccgttgttgctccagaagctccttaaggacggcggggtcctgtcacccatcctgacccgactcatgaacttctttgtattcagcagaggattaacaccggtgtttggtccctacactcgtccctcggaatccgaactgtgggatatgtgggcaggcattcgtaataatgatggcaacctggtgatcgatagtttgttacagtacataaatcagagaaagaaattcaggagacgttgggtgggggcactcgcatcagtgaccatccccattcactttatctacgggcctttggacccagtgaatccgtatcccgagtttctagagctctatagaaaaactcttccacggtccaccgtaagcatcttggatgaccacatttcccattaccctcaattagaggatcccatgggttttctgaatgcctacatgggttttattaactccttttag

SEQ ID NO: 132313 - DNA, 492 bp, synthetic construct
  misc_feature 1..492: note = Description of Artificial Sequence: Synthetic coding sequence
  source 1..492: mol_type = other DNA
atgagacggttgttaattcctctcgcactctggctgggagccgtgggagtgggagtggcggagctgacagaagctcagcgcagagggttgcaggtcgccctggaggaatttcataagcacccccctgtgcagtgggcattccaggaaactagcgtcgaaagtgccgtggataccccgtttccagccggtatcttcgtacgactggagttcaagctgcagcagacctcctgtaggaagcgtgactggaagaagcctgaatgtaaggttcgcccaaatggccggaaaagaaaatgcctggcttgcattaaattgggtagcgaggataaggtccttggccgtcttgtgcactgtcctatagaaacacaggtgctgcgcgaggcagaagagcaccaggagacacaatgcctgcgcgtccagcgtgccggtgaagaccctcattccttctacttccccggccagtttgccttctcaaaggcacttccccggagctag

SEQ ID NO: 132314 - DNA, 492 bp, synthetic construct
  misc_feature 1..492: note = Description of Artificial Sequence: Synthetic coding sequence
  source 1..492: mol_type = other DNA
atgcggcggttactgatacccttggcgttgtggttaggcgctgtgggtgttggagtagccgaactgacagaggcccagcgcagaggcctccaggtcgccttggaagaattccataagcacccccctgttcagtgggctttccaggaaacatccgttgaatctgcagttgatacccctttccccgctggaatttttgtgcgccttgagtttaagcttcagcaaacatcctgccgcaaacgggattggaaaaaaccagagtgcaaggtgagacctaacgggcgtaaacgcaagtgtcttgcgtgcattaaactgggtagcgaggacaaagtcctggggaggctggtgcactgccctattgaaacccaggtgcttcgcgaggcagaggagcatcaggaaactcagtgtcttcgcgtccagcgagcgggcgaggatcctcacagcttttactttccgggccaattcgccttcagtaaagcgcttcctcgaagctag

SEQ ID NO: 132315 - DNA, 495 bp, synthetic construct
  misc_feature 1..495: note = Description of Artificial Sequence: Synthetic coding sequence
  source 1..495: mol_type = other DNA
atggcctcaccccaccaggagcccaagccaggggacctgatagagatcttccgcctcggctatgaacattgggctctgtacataggcgacggatacgttattcacttggctccgccatccgaatatcccggggcgggcagctcatccgtttttagtgtgctgtccaactctgccgaagtcaaacgggagagactggaggatgtggtagggggctgttgctatagagtgaacaactctttagaccacgaataccagcctaggccagtcgaggtcatcatcagctctgccaaagagatggttggccagaagatgaagtacagcatagtttcccgaaactgtgagcacttcgtcacacagcttcgatatggcaaatcccgctgcaagcaggtagagaaagcgaaggtggaggttggcgtagctacagcccttggaatattagtggttgctgggtgctcattcgcgatccgtcggtaccagaagaaggctacagcctag

SEQ ID NO: 132316 - DNA, 495 bp, synthetic construct
  misc_feature 1..495: note = Description of Artificial Sequence: Synthetic coding sequence
  source 1..495: mol_type = other DNA
atgggactgccagaaccgaagcctaagcccggcgacctgattgagatctttaggctggggtatgagcattgggctctctacatcggagacgggtacgtcattcatttggctccccccagtgagtaccccggtgcgggaagcagttccgtgttctcggtgctgtccaacagcgcagaggtaaagcgggaaagactagaggacgtcgtcggtggttgttgttatcgtgtgaataattcactggaccatgaataccagcctagacctgtagaggtgattataagcagcgcaaaggaaatggtaggacagaaaatgaaatattccatcgtttctcgcaactgtgagcacttcgttacgcagttgcgctacgggaagtcacgctgcaaacaggtggagaaagcaaaagtcgaagtgggggtggcaactgctctgggtattctagtagtagccggttgttcatttgcgatacgccgatatcaaaagaaagctaccgcctag

SEQ ID NO: 132317 - DNA, 1389 bp, synthetic construct
  misc_feature 1..1389: note = Description of Artificial Sequence: Synthetic coding sequence
  source 1..1389: mol_type = other DNA
atggcctccaacagttcttcatgtcctacgcctgggggtggacacctcaatggctaccctgtgcctccgtacgccttttttttcccccctatgctgggcggtctgtccccccctggcgcactgacaacgcttcaacaccagcttcctgttagcggttattccactccttctccagccacaatcgagacacagagctcctcgtctgaggagatagtaccatctccgccttctcccccccccctccccagaatttacaagccttgtttcgtctgccaggataagtcatcaggctatcactacggagtatctgcatgtgagggctgtaaagggttttttagacgcagcatccagaagaatatggtgtatacctgtcatcgtgataagaactgcataataaataaagtcacccgtaacaggtgccaatattgccgactccagaaatgcttcgaggtgggaatgagcaaggagagcgtgagaaatgacaggaataaaaagaaaaaagaagtccccaagcccgagtgctctgagtcatacactctgacccctgaggttggggagttgatagagaaggtgagaaaagcccatcaggagacgttccccgccctctgccagctggggaagtacaccacaaacaattctagtgaacagcgcgtttctctggatatcgatctgtgggacaagttctctgagctgtctactaagtgcattattaagacggtggagttcgctaaacagctaccaggattcacaacactcacaatcgcagaccagataacactcctcaaagccgcctgcctcgacattttgatccttaggatttgcacgaggtatacgcctgagcaggacacaatgaccttcagtgacggcttgacattgaatcgcacccagatgcacaatgccgggtttggccccctaactgatctggtgtttgcattcgctaaccagctgttgcctttggagatggatgacgctgagactggcttgctttccgccatttgccttatttgtggcgaccgccaggacttagaacagcccgaccgcgtggacatgctgcaggagcctctgttggaggcattgaaggtgtacgtgcgaaaacggcgcccctcgaggccgcatatgttccccaagatgttgatgaagatcactgatctcaggagcatcagcgcaaagggggcggagagggtgatcaccttaaaaatggagattccagggagcatgccccctttgatccaggaaatgctggaaaattccgaggggctggatactttgagcggacaacccggcggcggagggagagacggcggaggcctcgctccaccacccggtagctgttctccttccctgagtccctcctcaaaccgttcttcacccgctacccattcgccttag

SEQ ID NO: 132318 - DNA, 1902 bp, synthetic construct
  misc_feature 1..1902: note = Description of Artificial Sequence: Synthetic coding sequence
  source 1..1902: mol_type = other DNA
atgtacgagtcagtggaggtcggcggaccaactcctaacccattcttggtggtcgacttttataaccaaaaccgcgcgtgtctgctcccggagaaggggctgccagcccccggaccctactccacgcccctgaggacccctctttggaatggctctaatcactccatcgagacgcaatcttcaagctccgaggagattgtgcccagccctccttcaccaccacccttgccacgtatatataagccttgtttcgtttgccaagataaatccagtggctatcactacggtgtgagtgcttgcgagggatgcaaaggctttttccggcgcagtatccaaaaaaacatggtgtacacatgtcaccgagacaaaaattgcatcattaataaggtcacgcgcaaccggtgtcagtattgccgcctgcagaagtgtttcgaagtgggaatgtcaaaggagtcagtcaggaatgatcggaataaaaagaaaaaagaggtgcctaaacctgagtgctctgaaagctatacccttaccccagaggtgggtgaactaatcgagtgtgcgaaacgcacccggaagccttcactccctagtgcatcctgggctaataccctgcgaaccacggcgcagaataatgtctcgctgtggacgcttacctctgggacttcaagtgtgaatagccccaagtgtatcatcaaaactgtggagtttgccaagcagctacctggatttaccactctgacaattgcagatcaaattacgctgttgaaggctgcttgcctggatatcttgatcctgcggatctgtacccgatacacacctgaacaggacaccatgacattcagcgacggccttactctcaatcgaacacagatgcataacgctgggttcggccccctaactgatttagttttcgctttcgcaaatcaactgttgcctctcgagatggatgatgccgagaccggcttgctctccgcaatatgtctgatctgcggggaccggcaggacctagagcagccagaccgcgtcgacatgctccaagagcctcttcttgaagctctaaaggtctacgtgcgaaaacgtaggccttcaaggccgcacatgttccccaagatgctgatgaaaataactgatctccgcagtatctctgcgaagggcgccgaaagagtcattacattaaagatggaaattcccggatctatgccccccctgatccaggagatgctggagaatagtgagggcctggataccttaagtggccaacctggcggaggtggccgcgatggaggaggactgcctcgccaggccgccgtcgcacctgcctcggccccagcgcctacagaagctgctaggccacctacgccacgggataggcctagacatatggacaccgctctggcactcagacccgggttttccctgccattttatcggccctgtgatcccgcacccgctctgcctccccctgctctacctggcagcactggagatttgccgtggggaaccggacgcgaggaggcggctactccgtggaccgaagcctgggccttatcaggattgccggcccccactgcttgggccgacgttagaggccgcggacaagagctctcagaagcccccggccccggctcccaggatggctcttgggggccaagagtgcatcaggatacaccactgccttcctccccccacttgcaccaccagcagacaccaggactagggtctcctattttgcggacccacaagccccttctccctagctggggcacctctacttctcctctgccaagacttgtcacagaaggcgtggggcaggggcgtggcgtgcccccagtccatacactgccctaccagccacaggttctgattctggccgggttcgtatttatcctgatctttctgttctag

SEQ ID NO: 132319 - DNA, 1374 bp, synthetic construct
  misc_feature 1..1374: note = Description of Artificial Sequence: Synthetic coding sequence
  source 1..1374: mol_type = other DNA
atgtacgagagtgttgaggtcggcggccctacgccgaatccattcctggtggtggatttctataaccagaacagggcgtgtctcctgcccgagaagggcctccctgcccctggcccttactccacacctctgcgaacacccctctggaacgggagcaaccactcgatcgagacgcagagttcaagcagtgaggaaatcgtaccttctccaccgtcccccccacctctcccccggatatacaaaccctgtttcgtgtgccaagataagtcttctggttaccactatggggtctccgcatgtgaaggatgcaaggggtttttccgaagatcaatccaaaagaacatggtgtatacctgccatcgggacaagaattgtatcataaacaaagtgacacggaatagatgccaatactgcagactccagaaatgcttcgaagtgggcatgtccaaggagtctgttaggaacgacaggaacaaaaaaaagaaagaggtgcccaagcctgagtgcagcgagagctacacgctgacacctgaagtgggggagcttatcgagaaagtgcgcaaagctcatcaggaaactttccccgccctgtgtcagctgggcaagtacacaaccaacaattctagcgagcagcgggtcagcttagatatcgacctatgggacaagttctctgagctgagcacaaagtgcattattaaaaccgtggaatttgctaaacagctgccagggtttacgacccttactatcgccgatcagatcaccctcctgaaagccgcttgcctagacattttaatcttgaggatttgcacacgttatacaccagagcaggataccatgacattttctgacggcttgacattgaatcggactcagatgcacaatgccggcttcgggccactgactgacctcgtattcgcctttgcgaatcagctgctgccccttgagatggacgatgctgagacaggcctgttaagcgcaatttgtctgatctgcggcgatcgtcaggatctggagcagccagaccgcgttgacatgttgcaagagccgttgctggaggcactgaaggtctacgtgcggaaaagaagaccatctcgcccgcatatgtttcctaagatgcttatgaagattactgacctgaggagcatcagcgctaaaggagcagagagagtcatcaccctaaagatggaaatacccggaagcatgcctccactgatacaggagatgctggaaaacagcgaaggtttagatactctctctgggcaaccagggggcggcgggcgggatgggggcggcctggcccctccacctggatcttgctctccttcactgtccccgtcgtccaatcgatctagtcctgccacacactctccctag

SEQ ID NO: 132320 - DNA, 1437 bp, synthetic construct
  misc_feature 1..1437: note = Description of Artificial Sequence: Synthetic coding sequence
  source 1..1437: mol_type = other DNA
atgatgagccagactatgacccaggcgggagtatccttcaggcacagtgtccgggcagcccagtgccacactagggtaccaaacacatggcctcgggctaccagaccctacgcgtcatgtagaagatccccgcgtctacgcgggaggtggcccggatccgccggtcagggagcaggtgggcgcgccccccgggccggttggcgggcaggcgatgtgaccggctccgcaattgagacacagtcctctagttcagaagaaatagttcccagtcctcccagcccaccaccactcccacggatctataaaccctgtttcgtgtgccaagacaaatcctccgggtaccattacggagtcagtgcctgcgagggatgtaagggctttttcaggagaagcatacagaagaatatggtgtatacttgccaccgtgacaagaactgtattatcaacaaggttaccagaaaccgctgccagtattgtagactccagaagtgcttcgaagtgggtatgtcaaaggagagtgtaagaaacgaccgcaataaaaagaagaaagaggtcccgaaaccggagtgctccgagtcctacacattgacacctgaggttggcgaactgatagaaaaagtccgtaaagctcatcaggaaacctttcccgccttgtgtcagctaggaaaatatacaacaaataacagctccgagcaacgagtatcactggacattgatctctgggataaattttctgagctgtctactaaatgcataattaagaccgtggagtttgccaagcagctcccaggattcacaactctgacaatcgcggaccagatcaccctcttaaaggctgcatgtctagacattcttatcttaagaatctgtacacgctacaccccggaacaggataccatgaccttcagcgacggattgaccctcaacaggacccagatgcataatgccggcttcgggcctctgacagacctggtgtttgccttcgcaaaccagctgctccccctcgagatggacgacgctgaaaccgggctcctgagtgccatttgcttaatctgcggcgatcgacaggatctggagcagccggatagagtcgacatgcttcaagaacctcttctggaggcattgaaagtctacgtgcggaaacgtagaccatccaggccgcacatgtttcccaaaatgctgatgaaaatcaccgatctgagatcgatctctgcaaaaggggccgaacgcgtaattactctaaagatggaaatccccggtagcatgccccccttaattcaagaaatgttggaaaactcagagggcctagacaccttgtccggccagcctggtggtggaggtcgggacggcggcggtctcgccccaccgccaggtagttgttccccctctctgtcaccctctagcaatcggtcttccccagccactcatagtccttag

SEQ ID NO: 132321 - DNA, 1389 bp, synthetic construct
  misc_feature 1..1389: note = Description of Artificial Sequence: Synthetic coding sequence
  source 1..1389: mol_type = other DNA
atggccagtaattcctccagctgtcctacccctggcggcggccatctcaacgggtaccccgtccccccttacgcctttttctttccccctatgctggggggcctgtctccaccaggcgctttgacaacattacagcaccagcttccagtgtcaggatattccactccctcaccagcgacgatcgagacgcagtctagctcaagcgaagagatcgtcccttccccaccctcccccccacctcttccgaggatctacaaaccctgtttcgtatgtcaggataagagttccggctatcactacggagtgagcgcctgtgaagggtgtaagggcttttttaggcgcagcatccagaagaacatggtctatacctgccaccgcgataaaaactgtatcattaataaggtgacgagaaatcggtgccagtactgtagacttcaaaaatgcttcgaggtggggatgagcaaggaatctgtgcggaacgatagaaataaaaaaaagaaggaagtgcccaagccagagtgttctgagtcctacacattgacgcccgaggtgggtgaacttatcgaaaaggtgcgcaaagcccatcaggagacgttccctgctctgtgtcagttggggaagtatactacgaataatagctcggagcagcgtgtgtcgctcgatatcgacctgtgggacaaattcagtgaactctcaactaagtgcatcatcaagactgtggaatttgccaaacagctccccgggttcacaactctgacgattgctgaccagataactttgctcaaggccgcttgcctagacattctcatactcagaatatgcacccggtatacgcccgagcaggatacgatgacttttagtgacggactcactctcaaccgaacccaaatgcataatgccggtttcggacctttgaccgacctggtgtttgcctttgcaaatcaactgcttccccttgaaatggatgatgccgagaccggattactgtccgccatctgcctcatctgcggcgacagacaggacctcgagcaaccagacagagttgatatgctacaggagcccttgctagaagcccttaaggtgtacgtacgcaaaaggcgcccatctaggccccacatgttccccaaaatgctgatgaaaatcactgatctgagaagcatttccgctaaaggagctgaacgtgtcattactctcaaaatggaaattcctggcagcatgccacccctgatacaggagatgctcgagaatagcgagggcctcgatacgctgagcggacagccaggcggaggcggtagagatggaggcgggttggcgccaccgcctgggtcttgctccccgagtctctccccaagctcaaacagatctagtccggccacccatagtccatag

SEQ ID NO: 132322 - DNA, 1041 bp, synthetic construct
  misc_feature 1..1041: note = Description of Artificial Sequence: Synthetic coding sequence
  source 1..1041: mol_type = other DNA
atgggacaagaaatccttccagctcggagccctacgctgagactgggctcgcctaccccccatctcccacaggagctcctgagggcctcacctaagggccccccaggacgcctgcaattaggtgggctcgcagtgcgcaacgaccgcaacaagaagaagaaggaggtgcccaaacccgaatgctcagaaagttacaccctgaccccagaggtcggggaactcatagaaaaggtgaggaaggcccaccaggaaaccttccccgccctctgtcaactgggaaagtataccacaaataactcctccgagcagcgcgtcagtctcgatatagacctttgggacaagtttagcgaactgagtaccaaatgcatcattaagactgtagagtttgcaaagcagctccccggtttcacaacactcaccatcgccgaccaaattacccttctgaaggcggcgtgtctggacatccttatcctgagaatatgcacgaggtatacaccagagcaggataccatgactttcagcgatggcctgaccctcaatagaacccagatgcataacgccggatttggaccgcttacagacctggtttttgcgtttgccaatcaactgcttccgctggaaatggatgatgcggagactggacttctctctgccatttgcctaatctgcggtgaccggcaagacctggagcagcctgaccgtgttgatatgctgcaggaaccgctgttagaagccctgaaggtgtacgtaagaaaacgcaggccatcgagacctcacatgtttccgaaaatgctgatgaaaattactgatttaaggtccatttcagcaaagggggcggagcgggtaatcaccctcaaaatggagattcccgggtctatgccccccctgattcaagagatgctcgagaatagtgaaggcttagacacactttcaggtcagcccggcggaggcggtcgggatgggggcgggctggccccaccgcccgggtcttgttctccatcccttagcccgtcctctaatcgttcctcaccggctacgtag

SEQ ID NO: 132323 - DNA, 1098 bp, synthetic construct
  misc_feature 1..1098: note = Description of Artificial Sequence: Synthetic coding sequence
  source 1..1098: mol_type = other DNA
atggcttctaactcatcttcctgtccgacgccaggcggcggccatctgaacggataccccgtgcccccatacgcattcttctttccgcctatgctgggcggcctgtccccccccggcgctttgaccactctgcagcaccaactacccgtaagtgggtatagcacaccctcccctgccacagtacgtaatgatcggaataagaaaaagaaagaggtccctaagccagaatgtagtgagtcatatacactgacccccgaggtcggcgagctgatcgagaaagttaggaaagcccaccaagaaactttccccgcactctgccagctgggaaaatacactacaaacaattccagtgagcagcgagtgagcctggacatcgacctatgggacaagttttccgagctgagcactaagtgtataattaaaaccgtggaatttgccaaacaactcccgggttttactacgcttactatagccgatcaaataactctgctgaaggctgcctgtcttgacatccttatcctcaggatttgcacccggtacacccccgaacaagacaccatgactttctctgatggattaactctaaatcgcactcaaatgcataacgccgggttcggccccctcacagacctggttttcgcttttgccaatcagttattgcccctggagatggatgatgccgagactggcctgctgtccgcaatctgtcttatatgcggggatcgtcaggatctagagcagcccgaccgggtggacatgctccaggagcccctgttggaggcgttaaaggtgtatgttcggaagcggaggccaagccgccctcatatgtttcctaagatgctcatgaaaatcaccgatctaagatctattagcgccaaaggtgcggaaagggttattacgctgaaaatggaaattccagggtccatgccccctctgattcaggaaatgctggaaaacagtgaagggctggacacactgtctggacagccgggcggcggaggaagagacggtggcggcctggctccccctccaggctcctgttccccgtcacttagcccctcctccaacagatctagtccagctacacactcaccttag

SEQ ID NO: 132324 - DNA, 1149 bp, synthetic construct
  misc_feature 1..1149: note = Description of Artificial Sequence: Synthetic coding sequence
  source 1..1149: mol_type = other DNA
atggtgccttcatctccttcaccaccccccccccctcgggtgtacaaaccatgtttcgtttgcaatgacaaatccagtggttaccattacggggtcagcagttgcgaaggctgcaagggattttttcgaagaagtatccagaagaatatggtgtacacatgccatagggataagaattgtatcatcaacaaagtgacccgtaaccggtgtcagtactgccgacttcagaagtgctttgaggtcgggatgtccaaggaggctgtacgtaacgaccgaaacaaaaagaagaaagaagtgaaagaagaaggtagcccagacagttatgagctgagcccccagctggaagagctaatcacaaaggtttcgaaggcacatcaggagaccttcccaagcctgtgtcagttgggtaaatacaccaccaactctagcgctgatcaccgggtgcagctggaccttggtctttgggacaaattcagtgagcttgcgacgaaatgtatcatcaagatcgtggaattcgccaaacgtcttccaggattcaccgggctttctatagcagatcagatcacactcctcaaagccgcatgcctcgatattctgatgctgcggatatgtactcgatacacccccgagcaagacacaatgactttttcagacgggcttaccctgaacagaactcagatgcacaatgcagggtttggcccgttgaccgacctagttttcgcatttgcggggcagctcttgcccttggagatggatgataccgagacaggactcttgtccgcaatttgtctgatttgtggcgaccgaatggatctcgaggagccagagaaggtggacaagctgcaggaaccactgctggaggctcttaggctctatgcccgtcgcagaagacctagccagccgtacatgttcccacgaatgctgatgaaaattaccgatctgcgtggcattagcactaagggggccgaacgcgcaataacactcaaaatggagatccccggtcctatgccgccacttatcagggagatgctggagaatcctgagatgtttgaggatgacagtagtcaacccggaccacatccaaacgcaagctcagaggatgaggtgcctggggggcagggtaaaggtgggctgaagtccccagcctag

SEQ ID NO: 132325 - DNA, 1332 bp, synthetic construct
  misc_feature 1..1332: note = Description of Artificial Sequence: Synthetic coding sequence
  source 1..1332: mol_type = other DNA
atgtacgattgtatggaaacattcgcacctggcccccgacgcctctacggcgccgcagggccaggcgccggcctgttaagacgtgcaacagggggatcctgttttgccgggctcgagagttttgcctggccccagccagccagtctccagtcggtcgaaacccagtccaccagctcggaagaaatggtacctagctcaccttccccccctcccccaccccgggtgtataagccttgtttcgtgtgtaatgataagtcctctggataccactatggcgtctctagctgcgaggggtgtaagggattcttccgccgcagtatacagaagaacatggtgtatacctgtcatcgggacaaaaattgcatcattaacaaggtgacccgcaacagatgtcagtattgtaggctgcagaaatgcttcgaagtcgggatgtcaaaggaagcagtgagaaatgatcgcaataaaaaaaaaaaggaggtgaaggaagaggggtcaccggattcatatgagctgagccctcaactggaagaactgattacgaaggtctccaaggcacaccaggaaactttcccatcactgtgtcagctcggcaagtatactacgaacagtagtgctgatcaccgagttcaactcgatctgggcctgtgggataagttttcagagctcgcgaccaaatgcatcattaagatcgtggaattcgctaagcgccttccaggcttcactggtctaagtattgcagaccagatcaccctcctgaaagcagcctgtctggacatattgatgctccgcatttgcacacggtatactcctgaacaggatacaatgactttttctgatggtctaacgctgaaccgcacacagatgcataatgcaggattcggtcctttgaccgacctggtgtttgccttcgctgggcagctccttccactagagatggacgataccgagaccggtctcttgagtgccatttgtctcatctgcggggacaggatggacctggaggaaccggaaaaggtggacaagttacaggaaccgctgctggaggcgctccggctctacgctcgcagacgccgaccctcgcagccatacatgttcccccggatgctgatgaagattaccgacttgaggggcatcagcactaagggggctgaacgcgctatcactcttaaaatggagattcccgggcctatgcctcctctgatcagagaaatgcttgagaaccccgaaatgtttgaggacgacagttcccagccaggcccacaccccaacgccagcagtgaagacgaagtgcctggcggccagggaaagggcggtctgaaaagccctgcatag

SEQ ID NO: 132326 - DNA, 1365 bp, synthetic construct
  misc_feature 1..1365: note = Description of Artificial Sequence: Synthetic coding sequence
  source 1..1365: mol_type = other DNA
atggcaacaaacaaggagaggctgtttgcggcaggagcgctcggccctggctcaggttaccccggcgccggtttcccatttgctttcccaggcgctttaagaggttctcctccattcgaaatgctgtcccctagtttcagaggacttggccaaccagatttgccaaaggaaatggcgtctcttagcgtcgagactcagagcacatccagtgaagaaatggtcccttccagcccatcacctcctcctccacccagggtctacaagccctgcttcgtctgtaatgataagtcctccgggtaccactacggtgtgtcgtcctgcgagggctgcaagggattctttagaagaagcattcaaaaaaacatggtgtacacctgtcacagagacaagaattgcattataaacaaggtcactcgaaacaggtgccagtattgtaggctgcagaaatgcttcgaagttggaatgagtaaggaagccgttcgtaacgacaggaacaagaaaaagaaagaagtaaaagaggagggatcacccgatagctatgagctcagcccccagttagaagaattgattacaaaagtttctaaggcccatcaggagacattccccagcttgtgtcagttgggaaaatacactacaaattcaagcgcagatcaccgagtgcagctggatctggggctgtgggataagttttccgagctggccactaaatgtatcatcaaaattgtggagtttgctaagcgactgcccgggtttacggggctgtctatcgccgaccaaatcaccttactgaaagccgcgtgtctggatatactgatgctgcgtatatgcacccgctacaccccggagcaggacacaatgactttctccgatggactcactttaaacaggacccaaatgcacaacgcaggatttggtccactcacggaccttgtgtttgcattcgcaggacagctgttacccttggaaatggacgataccgaaactgggctgctctccgcgatatgtctgatttgtggagaccgcatggacctggaggagccagaaaaagttgataaactccaggagcccctgctggaagctcttcggctctacgccaggcgacgtcgtccaagtcagccttacatgttcccgcgcatgctcatgaagattactgatctgcggggtatctccaccaagggagcagagcgcgccattactctgaagatggagatccctggccccatgccccccctgatccgggagatgcttgaaaatcccgagatgttcgaggatgactcctctcagcccgggcctcacccaaatgcctcatcagaagatgaagtgcccggtggacaagggaaagggggtctgaagtctccagcttag

SEQ ID NO: 132327 - DNA, 1365 bp, synthetic construct
  misc_feature 1..1365: note = Description of Artificial Sequence: Synthetic coding sequence
  source 1..1365: mol_type = other DNA
atggctaccaacaaggaacgcctctttgccgctggtgctctggggcctggcagcggctatcctggggccggcttcccctttgcattccccggggccttgaggggcagccccccatttgagatgttatcaccttcttttagaggtctgggccagcctgacttacccaaagaaatggcctcactctccgttgagactcagagcacctcaagcgaggagatggtacctagttcacctagcccaccccctcctcccagggtgtacaaaccatgttttgtctgcaatgacaagtcatccgggtaccactacggggtgagcagttgtgagggatgcaagggatttttccggcgttctatacagaaaaatatggtgtatacctgtcatagagacaaaaactgcatcatcaacaaggtcacaaggaaccgctgccagtactgccggctgcagaagtgctttgaagttgggatgtctaaagaagccgtgcgcaatgataggaacaaaaaaaaaaaagaagtgaaagaagagggatcgcccgacagctacgagttgtctccccagcttgaagagctaattactaaagtatcaaaggcccaccaggaaactttccccagcctatgccagctcggtaagtacacaactaactcatctgctgaccaccgggtgcagttggatctcggattgtgggataaattcagtgaattggccactaagtgtattattaagatcgttgaatttgctaagagactcccaggcttcacagggctttcgattgcagatcagattactctgttaaaggccgcgtgtcttgacatcttgatgttgaggatatgcactcgctataccccagagcaggacaccatgaccttttccgatgggctgacccttaataggactcagatgcacaacgccggattcggccctctgaccgatctagtatttgcgttcgctggacagctgctcccactggaaatggatgatactgaaacgggcctactgagtgctatctgcctcatttgtggcgataggatggacctggaggaaccggaaaaagtggacaagttacaagagccattgctggaagctctgaggctgtacgccaggcggagaaggccttcccagccctatatgtttccccgaatgctcatgaagatcactgacctcagaggcatctccaccaaaggtgccgaacgtgccatcacgctaaaaatggagatcccaggccctatgcctcctctgatccgggaaatgctggaaaacccagaaatgtttgaagacgattcctcacagcccggaccgcatccaaacgcatcatctgaggatgaggtgccaggcggtcagggaaaggggggactgaaaagcccagcgtag

SEQ ID NO: 132328 - DNA, 306 bp, synthetic construct
  misc_feature 1..306: note = Description of Artificial Sequence: Synthetic coding sequence
  source 1..306: mol_type = other DNA
caccaccaggatgaatttgcaaagcgcctgcccggttttaccgggctttcaatcgccgatcaaatcacgcttctgaaagccgcttgcctagatattctcatgttacgcatatgtacaaggtatacccccgagcaggacactatgacattctcagacggactgacgctcaacaggactcagatgcataatgcgggttttggcccactgactgacctggtgtttgcgttcgctggtcagcttttgccgcttgagatggatgatacagagacgggcctgttatctgctatatgcctgatctgcggttag

SEQ ID NO: 132329 - DNA, 1299 bp, synthetic construct
  misc_feature 1..1299: note = Description of Artificial Sequence: Synthetic coding sequence
  source 1..1299: mol_type = other DNA
atgctggccttgccattacctccatgctggagtggcgcccctcccggggaggagggcgaaagcgcagcaggaccttggtgcttccagcatcccgtgtcccttcaagccggcagcaggtgcaccaccgtgtggaaacgactgcctcgcgtgagagatggctgtacaggccggccgggacccggccccgcttgttgcgcggaaccgcctgcagcccccgtctccccagatctaaacttgttaccaggccgcaatcctcccgcttgtaacgggttcttcaggagaagtatacagaaaaacatggtttacacctgtcaccgggataagaactgcatcatcaacaaagtcacccggaatcgatgccaatattgtagactgcagaaatgcttcgaggtggggatgtctaaggaggcagtgaggaatgatagaaataaaaaaaagaaggaggtcaaggaagagggttcccccgactcctatgagctctcaccccagctggaggaactgatcacaaaagtatccaaggcccaccaggaaacctttccaagcctgtgccagcttggaaaatataccacaaattcttctgcagatcatagggtgcagctcgacctcggcctctgggataagttctcagaattggcaactaaatgcattattaagatagtagagttcgcaaagaggctgccgggtttcactgggctcagcattgccgatcagataactctactgaaggccgcctgtctcgacattctgatgctgcggatttgtacccggtataccccagagcaggatacgatgactttctcggatggcctgactctaaatcgaacacaaatgcacaatgccggctttggtccactgactgatttggttttcgcttttgccggccaactgctcccacttgaaatggatgacaccgaaaccggtctgttgtcagccatctgcctaatctgtggtgataggatggacctggaagaaccggaaaaggtggataagctccaagaacccctgctagaggccctcagattgtacgcaaggaggagacggcctagccagccatacatgtttcctagaatgttgatgaaaataaccgacctccgcggcatttccaccaaaggtgccgaaagagccatcacactgaagatggaaatccctggacccatgccgccactgatccgggagatgctggaaaatccagaaatgttcgaagatgactccagccaacctgggccacaccccaatgccagttccgaagatgaggtacctgggggccaggggaaaggtggcctgaagtcacctgcctag

SEQ ID NO: 132330 - DNA, 1389 bp, synthetic construct
  misc_feature 1..1389: note = Description of Artificial Sequence: Synthetic coding sequence
  source 1..1389: mol_type = other DNA
atggacaccaagcacttcttgccactggatttcagtactcaggtcaattctagcttgacaagcccgaccggtagaggttcaatggcagccccttccctccacccctctttggggccaggtatcggttctccaggacagttgcactcccccatatccactctcagctccccgatcaacggcatgggcccccccttttctgtgatcagtagtcccatgggaccccactccatgtccgtgccaacgaccccaacactggggttcagcaccggatccccccagcttagctcacccatgaacccagtgagcagctcggaggacattaagcccccactcggtcttaacggagtgttgaaagtgccggcacacccatccggtaacatggccagttttaccaagcacatatgtgccatctgcggagacagaagtagtggcaaacactatggagtctattcctgcgaaggctgcaagggcttttttaagaggaccgtgaggaaggacctcacctacacttgccgagacaataaagattgcttgattgataagcggcagaggaatcgctgccaatactgtaggtatcagaagtgtttagctatgggcatgaaaagggaggctgtgcaggaagaacgccaaagaggcaaggatcgaaacgaaaatgaggtcgagtctacctccagtgccaatgaagatatgccagtcgagagaatactcgaagccgagttggcagtcgaacctaagacagagacatatgtcgaggctaacatgggcctcaacccttcgtcccccaatgatccggtcactaacatatgccaggccgctgataaacaactgtttactttagtcgagtgggccaagcgaattccccacttctctgagctacccctcgatgaccaggttatcttgctgagagcggggtggaacgaactgctgatcgcatcttttagtcatcggtccatcgctgtaaaagatggcattcttctagctaccggcctgcatgttcatcgcaatagcgcccattcagccggcgtaggcgcaatattcgatcgggtactgacagaactggtgtctaagatgcgcgatatgcagatggacaaaactgagctcggttgcttacgagcgatcgtgctgttcaacccggatagcaaggggctcagtaaccctgcggaagtcgaggctctgcgggagaaagtttacgcatcccttgaggcttattgtaaacacaaatacccagagcaacccgggagatttgcaaagctgctgctgcggctccccgccctccgatccatcggattgaagtgtctcgagcacctcttcttcttcaaattaatcggggacacgcctatcgacaccttcctaatggaaatgctggaggctccccatcaaatgacttag

SEQ ID NO: 132331 - DNA, 1098 bp, synthetic construct
  misc_feature 1..1098: note = Description of Artificial Sequence: Synthetic coding sequence
  source 1..1098: mol_type = other DNA
atgaatcctgtatcaagcagtgaggacatcaaacctccactcggcctgaacggagtgctgaaagtgcccgctcaccccagcgggaatatggctagcttcacaaagcacatctgtgccatttgcggcgataggtcgtctggcaaacattacggggtgtactcatgcgagggatgtaagggtttctttaagcgcacggtccggaaagacttgacatatacctgccgggataataaagactgtctgatcgataagcggcagaggaatcgttgtcagtactgtaggtaccaaaagtgtctggctatgggtatgaagcgggaagccgtccaagaggaacggcagagggggaaggaccgcaatgagaatgaggtggaatccacctcctcagcaaacgaggacatgcctgttgagagaattttagaggctgaactggctgttgagcctaagacagagacatacgtcgaagccaacatgggtcttaatccttcatcccccaatgaccccgtcacaaacatctgtcaggctgccgacaagcagctgtttactctcgtcgaatgggccaagaggatcccacactttagtgagctcccactagatgaccaggtcatccttctgagagccgggtggaatgaactgttgatcgcctctttcagccacaggtcaatagccgtcaaggacggtatcctcctggctacaggcctgcatgtacatcgaaattccgctcacagcgcaggcgtgggtgccatcttcgatcgtgtcctcacagaattagtcagcaaaatgcgcgatatgcagatggacaagaccgagttgggctgtctcagagctattgtcctatttaaccccgactcaaaaggcctctcaaaccccgccgaagtcgaagccctgagggaaaaagtgtacgcttccctggaggcatattgcaaacacaaataccccgagcagccaggacgcttcgctaagctgctcctacgtctgccggctcttagatctatagggttgaaatgtttggaacatcttttcttttttaaactgatcggcgacacgccaattgacaccttcctgatggagatgcttgaggccccccaccagatgacctag

SEQ ID NO: 132332 - DNA, 1602 bp, synthetic construct
  misc_feature 1..1602: note = Description of Artificial Sequence: Synthetic coding sequence
  source 1..1602: mol_type = other DNA
atgtcgtgggctgctcgccccccctttcttccacagcgacacgccgcaggccaatgtggacctgtgggtgttcgcaaggaaatgcactgcggcgtggccagccggtggcggaggcggcggccttggcttgaccctgcggctgccgccgcggcagcagtggctggcggcgagcagcaaactcctgagccagagcccggagaagctggcagagacggaatgggggactccgggcgggattcccgctcgccagattctagttcacctaatcctttgccacagggagtacccccccccagtccgccaggcccacccctcccaccgtccactgccccatccttaggcggttcaggcgctcctccccccccccctatgcccccccccccgttgggcagtccctttcccgtgatctccagtagtatggggagtccagggctgcctcctccagccccccctggtttctccggccctgtatctagcccacagatcaatagcacggtaagcctgcccggcgggggttctggcccccccgaggacgtgaagcctccagttctgggagtgcggggtctgcactgtcccccacccccgggagggcccggtgccggcaagcgtttgtgcgcgatatgcggagaccggagcagcggcaaacactatggggtgtacagctgtgagggttgcaaagggttcttcaagaggaccattcgaaaggatctaacttactcttgtagggacaacaaggattgtacagtggacaagcggcaacgcaaccggtgccaatactgtcgttatcagaagtgcctcgccactggaatgaagagggaggcagtccaggaagaacgccaaagagggaaagataaggacggagatggcgagggggccggaggcgccccagaggagatgcccgtggaccgaatcctggaggccgagctagcagtcgaacagaaatccgatcaaggcgtggaggggccaggtggtactggtggctcaggttcatccccaaatgacccggttaccaatatatgccaggctgccgacaaacaactgttcacgctcgtcgagtgggccaaaagaattccccacttttcttccctccccctggatgaccaggtcatactgctccgggcaggttggaatgagctgctgatcgcttccttcagccatcgttctatcgatgtacgagacggtatattgctggctacagggctccacgtccacaggaattctgcacattcagcaggagtaggggctatctttgatcgggtgctgacagagctcgtctctaagatgcgggatatgcgaatggataagactgaacttggatgcctgcgtgccatcattctgttcaatcccgacgcgaagggcctgagtaacccttccgaagtggaggtgctaagggagaaggtctacgcgtctttagagacttattgtaaacaaaaatatcccgagcaacaaggccgattcgccaaactgctgttacggctgcccgcgctgcgttcaattggactcaaatgtctggagcatctgttcttctttaagctgattggagatacccccattgacacctttttaatggagatgctggaagctccacatcagctcgcctag

SEQ ID NO: 132333 - DNA, 1614 bp, synthetic construct
  misc_feature 1..1614: note = Description of Artificial Sequence: Synthetic coding sequence
  source 1..1614: mol_type = other DNA
atgtcgtgggcagcaagacctccttttttaccacaaaggcacgccgcagggcaatgcgggcccgtaggagtgcgtaaggagatgcactgcggcgtggcgtcaagatggcgaaggagacggccgtggctggatcccgccgccgcagctgcagctgctgtggccgggggggaacagcagactcccgaaccggagccaggtgaagcaggacgggatgggatgggggactcagggagagattcaagaagtcctgattctagctctccgaaccccctcccccaaggagtgccccctccgagtcccccggggccccctcttccaccaagtaccgctccatctctgggaggcagcggagcaccaccaccccccccaatgcctccccctccccttggaagtccatttcccgtcatttctagctctatgggcagtccgggtctgcctccaccggcacctccggggtttagcgggcccgtgtcctccccgcaaatcaactccaccgtgagcctccccggcggcggcagtgggccgcccgaggacgtaaaaccccctgtgcttggcgtcaggggtctccattgtccacctccgcccgggggccccggggcaggtaaaagattatgcgcaatctgtggtgataggagcagcggaaagcactatggtgtatactcatgtgaaggttgtaaaggattttttaaacgcacaattcggaaggatctcacctacagctgcagagacaacaaagattgcactgtagataagcgacaaaggaacagatgtcagtattgtagataccaaaagtgtctcgcaacaggaatgaagcgcgaagctgttcaagaggagcggcagcgcgggaaggacaaagacggcgatggcgagggcgcaggcggggcacctgaggagatgccagtggatcggatccttgaagctgagctggccgtagagcagaagtcagaccagggcgtggaaggcccaggtgggacaggcgggtccggctccagtcccaatgaccccgtcactaatatctgtcaggcagccgacaaacagttatttactctcgtcgaatgggctaagagaattcctcatttttctagcctgcctttggacgaccaggtaattctgttaagggccggatggaacgagctgctgatagcctcgttctcccatcgtagcattgacgttcgcgatggtatactgcttgctaccggcctccatgtgcacagaaattccgctcattctgccggagtcggcgccatcttcgaccgtagcctgagcagggttctgacagagcttgtgtctaagatgcgggacatgcggatggataagaccgagcttggatgcctgcgggcgatcatcctgttcaaccccgacgctaaaggattgagcaatccctccgaggtcgaagtgttacgggaaaaagtatacgcctccctggaaacctactgcaaacagaagtaccctgagcaacaggggaggttcgccaagctgctgcttaggctccctgccctccgctcaattggtcttaaatgcctggagcacctcttctttttcaagctcattggtgatacacccatcgataccttcctgatggagatgttagaagcaccacaccagctcgcttag

SEQ ID NO: 132334 - DNA, 1614 bp, synthetic construct
  misc_feature 1..1614: note = Description of Artificial Sequence: Synthetic coding sequence
  source 1..1614: mol_type = other DNA
atgtcgtgggccgccagacccccttttcttccccagcgacatgctgcaggacagtgcggacccgtgggtgtccgaaaggagatgcattgtggggtggcctctaggtggaggcgtagaaggccctggctggaccctgctgcggccgcagcagccgcagtggccggtggcgagcagcagacccccgaacctgagcccggagaggcaggaagggacgggatgggagacagcggtcgggacagtcgctcccctgacagctccagcccaaaccctctccctcagggtgtccctccaccaagtccaccaggccctcctctgcctccaagcaccgctccatctctgggcggtagcggggctccaccacctcctcctatgcccccgccaccactcggtagtcccttccctgttataagctcctcgatgggctccccggggctgcctccaccagctccccctggattttcgggccctgtctcctctcctcagattaattcaacagtgagcctcccagggggcggcagtgggcctcccgaggatgtgaaaccaccggtgctgggagttcgcgggctgcactgcccccctcctcccgggggccccggagctggtaagagactgtgcgcgatatgcggcgaccggtccagtggtaaacactatggtgtttactcttgtgagggctgcaaaggcttctttaaaagaactatccgtaaggacctgacctactcttgtagagacaataaggattgtactgttgacaagagacaacgcaaccggtgccagtactgccgttaccagaagtgccttgcgactggcatgaaacgtgaggcggtccaagaagagcgccagcgtggcaaggataaagacggggacggggagggggcaggcggcgctcctgaagaaatgcctgtagacagaatcctggaagccgaactggcggttgaacagaagtccgatcagggcgtggagggtcctggaggcactggcggctctggctcctcccctaacgatccagtgacgaacatttgccaagccgcagacaagcagctttttacactggttgaatgggccaagcgtatccctcactttagcagccttcccctcgacgaccaggtcattctgctgcgtgctggctggaatgagctgctgattgccagtttcagccacagaagcatcgacgtcagagacggaattctgcttgccactggattacatgtgcataggaatagcgcccactcggcaggtgtcggggctatcttcgataggtccctgtctagagtcctgaccgagctcgtttccaaaatgcgcgatatgcgtatggataaaacagagctcggctgcctgcgggccataattctgtttaaccccgatgctaagggcctctcaaacccctccgaagttgaagtcctccgggagaaagtttatgctagcctagagacctattgcaaacagaagtatcccgagcagcaaggtagattcgccaaactgctgttgagattgccagccttgaggagcatcgggctgaagtgcctggagcacctcttttttttcaaactcattggggatactccgatagatacattcttgatggagatgctggaagcccctcaccagctggcatag

SEQ ID NO: 132335 - DNA, 1602 bp, synthetic construct
  misc_feature 1..1602: note = Description of Artificial Sequence: Synthetic coding sequence
  source 1..1602: mol_type = other DNA
atgtcttgggccgcacgccccccttttctaccccaacgccacgctgctggacagtgcgggccagtcggggttaggaaagagatgcattgcggggtcgccagcaggtggaggagacgccgaccttggctcgacccagccgcagccgcagcagcagcagtggcgggtggagagcaacagactcctgagcctgagcccggcgaagccggcagagatggaatgggcgattcaggacgggattctcgctctcccgattcctcaagcccaaaccctctcccccagggggtccccccaccaagtcccccgggaccacctttgcccccgagcaccgcccctagcctcggagggtctggggccccgcctccaccccctatgcccccccctcccttaggctctccatttcccgtgattagctcatctatgggtagccctgggctgccaccacctgcaccacctggcttttcaggcccagttagctcccctcagattaattctacggtttctctccctggcggcggatcaggtcctcccgaggacgtgaaaccccctgtactgggagtgcgggggctgcattgtcctcccccgcccggaggccctggcgctggcaaacgtctgtgcgctatatgtggggacagatcatcaggtaaacattacggagtgtactcctgcgaagggtgtaaaggcttcttcaaacgtaccatccggaaagatttaacatatagctgtcgagataacaaagactgcaccgtcgacaaaaggcaaagaaaccgctgccagtactgcaggtaccaaaaatgcctagccactgggatgaaaagggaggcagtgcaagaggagcgacaacgcggcaaagacaaggatggagacggagaaggagccggcggcgctccggaagagatgcctgtggatagaatcttggaagctgaacttgctgtggaacagaaaagtgatcagggggtcgagggacctggaggcacagggggctccggctcaagcccaaacgacccagtgacaaacatttgtcaggctgcggacaagcagttatttactctggttgaatgggccaaaaggatcccacacttttcttctctgcctctggacgatcaggtaatcctattacgagctgggtggaatgagctgctgattgcttccttctcacaccgtagcatcgacgtgagggacggaatactcttggctacaggactgcatgtccaccgcaatagtgcacattccgccggtgtcggggccatcttcgatcgtgtactgaccgagctcgtgagtaagatgagggacatgcggatggacaaaactgagcttgggtgtttgcgtgccatcatattgttcaacccagacgcaaaagggctgtccaacccctccgaggtcgaagtcttgcgcgaaaaagtgtatgcaagcttggagacctactgcaagcaaaaatacccagaacaacagggtcgctttgcaaagcttctcctccggctcccagccctgagaagtattgggcttaaatgtttggaacacttgttcttcttcaaactaataggggacacccccatagacactttcctgatggaaatgcttgaggcgccccatcagttagcctag

SEQ ID NO: 132336 - DNA, 861 bp, synthetic construct
  misc_feature 1..861: note = Description of Artificial Sequence: Synthetic coding sequence
  source 1..861: mol_type = other DNA
atgccacaaggaagcgtgggccggtgggggtgcgaaaaaaagtgtatcgttggcagtcgaccaggaggaggcggcgatgggccaggctggatccctcagagaaggagacggcggcgctggcaggccgaaaataacaaaccgaggtctaggagccaaggtcgtctggatggaacaggctgggccactgccggcggcattaactcaactgttagcttaccagggggagggtctggcccacccgaagatgtgaagccccccgtactcggggtcagagggctgcattgccccccaccccctggaggccccggcgctggcaagcggctgtgtgcaatctgtggcgacagaagtagcggcaaacactatggagtatatagctgtgaaggctgcaagggattctttaaacgcacaatacgaaaggatttgacctacagctgtagggacaacaaagattgcaccgtggacaagcgtcagcgaaatcggtgccagtattgccggtaccagaagtgccttgcaacaggtatgaaaagagaggcagtacaggaagaacgacagagggggaaggataaagatggagacggggaaggcgcaggcggagcacctgaggaaatgccagtagacagaatcctcgaagcagagctcgctgtggagcaaaagtcagaccagggcgtggaggggccagggggcaccggcgggagcggctcaagcgtctccgttggagtgaaccccctgagttttgtgatgggagtaggtggaggcagcctaggattgttctatatccccagcccttcatttccactcatcaccttccttaccctactgggcacaggtggagccgctaagcaaggactgtccaatatctag

SEQ ID NO: 132337 - DNA, 1602 bp, synthetic construct
  misc_feature 1..1602: note = Description of Artificial Sequence: Synthetic coding sequence
  source 1..1602: mol_type = other DNA
atgtcgtgggccgcgaggcctccattcctcccacagcgccacgcagcgggacaatgtggtccagtcggagtgaggaaggagatgcattgcggcgtcgcatcccggtggaggaggcgacggccttggcttgacccggctgccgcggccgccgcggctgtggccgggggcgagcagcagacccccgaaccagagccgggtgaggcaggccgggatggaatgggtgattccggccgggattcccggtccccagactcctcttctccgaacccattgccccaaggcgtaccaccaccctctccgcccggacctccattgcccccttccacagcacctagccttggtgggtctggcgctccgccgcctccacccatgccgcctcctccactgggaagtccatttcctgtgatctcaagttcaatgggctctcctggcctgccaccccctgctccaccaggcttttctggccctgtgagctccccccagatcaatagcactgtgtcgctgccaggtggtggatcagggcccccagaggatgttaagccaccagtactgggcgtaagaggccttcactgtccccccccaccaggggggcccggggccgggaagcgcctctgtgccatttgtggtgatcgctcctccggcaaacattacggcgtctattcttgcgaagggtgtaaagggtttttcaagaggacaatacgaaaggatctcacgtatagttgtcgggacaacaaagattgcaccgtcgataagcgacagcgtaaccgctgccagtactgccgctatcaaaaatgcctggctacggggatgaaaagggaggctgtgcaggaagagcggcagcggggaaaagataaggatggcgacggggagggcgccggtggcgcacctgaggaaatgccggtggatagaatcttggaggctgaattagcggttgaacagaaatccgaccaaggagtggagggaccaggcggtaccggagggtccggatcctccccaaacgatcctgtaacaaacatttgtcaagctgcagacaagcagctgtttacattggtggagtgggccaagcgcattccccatttctcctctctcccgctggatgatcaagtgatcttactgagggccggttggaacgagttactgattgcatcgttttcccatcgtagcatcgacgtaagagacgggatactgctcgccacaggcctacatgtccaccggaatagcgcccatagtgcaggtgtcggagcaatctttgacagagtgctgactgagctggtttctaagatgcgagatatgcggatggacaaaacagagctcggatgcctgcgcgcaattatcctgttcaatcctgatgcgaagggcctctccaacccaagcgaggttgaggtactacgagaaaaagtatacgcttcccttgagacttattgtaagcagaagtatccagaacagcagggcaggtttgccaaattgctcttgcgcctacctgccctgcggtcaataggccttaagtgccttgagcatcttttcttctttaaactgatcggcgacaccccaatcgatactttcctcatggagatgctggaagcgccacatcagctagcctag

SEQ ID NO: 132338 - DNA, 291 bp, synthetic construct
  misc_feature 1..291: note = Description of Artificial Sequence: Synthetic coding sequence
  source 1..291: mol_type = other DNA
taatcccctaatgatccagtaacaaatatctgccaagcagccgataagcagctgttcactttggttgaatgggctaaacgcattccccacttcagttccttgcccctggacgaccaggtgattctactgagagccgggctccacgtgcaccggaatagcgcccattcagcgggcgtgggcgcaatcttcgacagggtactaacagaactagtcagcaagatgagggatatgcggatggataagacagaactcggctgcctacgggctattattttgttcaatcctgactag

SEQ ID NO: 132339 - DNA, 1602 bp, synthetic construct
  misc_feature 1..1602: note = Description of Artificial Sequence: Synthetic coding sequence
  source 1..1602: mol_type = other DNA
atgagctgggcagccagacctcccttcctgccacagagacacgccgctgggcagtgcgggccagttggcgtgcgaaaagagatgcactgtggagtggccagcagatggaggcgaaggcgtccctggctagaccccgctgcagcagccgctgccgcagtggcaggcggagagcagcagacccccgaacctgagcccggggaagccggccgagatggtatgggagatagtggacgggacagtcggtctccggacagctcctctcctaatccgctgccacagggggtgccccctccgagcccccctgggccacctctgcctcccagcacggctccttcattggggggaagcggcgcgcctccaccaccgccaatgccgccacctccgctggggagcccattccccgtgatctcctcttctatgggaagtccgggtctccccccccctgccccacccgggttctcgggaccagttagttccccccaaatcaattcgacggtgtctcttccaggtggcggaagcgggccacccgaggacgtaaagccccccgtccttggtgtgagaggactccactgtccacccccaccgggaggaccgggcgcaggaaaaaggctgtgtgccatatgcggggataggtcttcagggaagcattatggggtgtactcctgtgaaggctgcaagggtttctttaaacgcacaattaggaaagacctcacttattcttgccgcgacaataaggattgcaccgttgacaaacgccaaagaaacaggtgtcaatactgtaggtatcagaaatgcttagctaccgggatgaagcgtgaggccgtgcaggaggaacggcagcgggggaaagacaaagatggagacggggaaggggccggaggagcgcctgaagagatgcccgtggaccgcatcctggaagctgagttggctgttgaacagaagtccgatcaaggcgttgagggccctggtggcactggtggtagtggaagttcccccaatgatcccgtgactaacatctgccaggccgcagacaaacagctattcactctcgtggaatgggctaagcggataccccactttagctctctgcccctcgacgatcaggttattctcctgagggccggttggaatgagcttcttatagctagcttctctcaccgaagcattgatgttcgcgatggtatcctgctagccacgggcctgcacgtgcacagaaattcggcgcattcagctggagtcggtgcaatctttgaccgcgtgcttacagagctggtgtccaagatgagagatatgagaatggacaaaactgagttaggttgcctaagggcaattattctgttcaaccccgacgccaagggtctgagtaacccttctgaggtagaggtgcttcgggaaaaggtgtatgcatccctggaaacttactgcaagcaaaagtatcctgagcaacagggtcgattcgccaagctattattacggttgcctgctctgagaagcatcggcctcaaatgtctggaacacctctttttcttcaagctgatcggagacacaccaatcgacacattcctaatggagatgcttgaagccccccaccagttagcatag

SEQ ID NO: 132340 - DNA, 291 bp, synthetic construct
  misc_feature 1..291: note = Description of Artificial Sequence: Synthetic coding sequence
  source 1..291: mol_type = other DNA
tgaagtccaaatgacccagtgacaaacatctgccaggctgctgataagcagctcttcacacttgtagagtgggcgaaaagaatcccccacttcagcagtctgccgctcgacgaccaagtcattctactcagggcaggtctgcacgtgcaccggaattctgcacactctgctggggtaggcgctattttcgatcgtgtgctcactgagctagtatcgaagatgcgcgacatgcgaatggacaagactgagctggggtgcctgcgtgcgatcatacttttcaaccctgactag

SEQ ID NO: 132341 - DNA, 1614 bp, synthetic construct
  misc_feature 1..1614: note = Description of Artificial Sequence: Synthetic coding sequence
  source 1..1614: mol_type = other DNA
atgtcctgggccgcgcggccaccattcctcccacaaagacacgcagctggtcagtgcggtcccgtgggggtccgcaaagagatgcattgtggcgtggcctcacggtggaggaggagacggccatggctggatccagccgcagcagccgctgccgccgtcgccggaggagagcagcagacgccggaacccgaaccaggcgaagccggcagagatgggatgggagattccggcagggactcacgctcaccagatagttcatccccaaatcccctgcctcagggtgtacctccgccctcaccccccggccctccattaccgcccagtaccgctccctctctgggaggctcaggcgccccaccccctcctccaatgccccctcctccgttaggctctccttttcctgttatttcttcaagtatgggctcaccggggttacccccccctgctccgccaggattctcagggccagtttcttctccacagattaactccacagtgagcctgcctggcgggggttcaggtccgcccgaagacgttaagcctcctgttctaggcgtacgcgggttgcactgcccgcctccacctggtggccctggtgcaggtaagaggctgtgtgctatttgcggcgataggagctcgggtaagcattacggagtttatagctgcgaaggatgcaaaggattttttaaacgcaccattaggaaagatctgacatactcatgtagggacaataaagattgtaccgttgataaaaggcagcgaaataggtgtcagtattgtagatatcagaagtgtctggccaccgggatgaagagagaagctgtccaggaggaaagacagcggggcaaggataaagatggagatggagagggagcagggggggcccccgaggaaatgccagttgaccgaattttggaggcggaacttgctgtggagcagaagtctgatcaaggtgtcgaagggcccggaggcaccggaggatcggggtcatcgcctaatgaccctgtgacaaatatttgtcaagctgccgacaaacagctgttcactctagtcgagtgggccaaaaggattcctcatttcagtagtctccctctggatgatcaggtgatccttctgagagctggctggaatgagctcctgatcgcgtctttctcgcaccgctccatagacgttcgggacgggatcctgctcgccaccggcctgcacgtgcacaggaattcagcccatagtgctggggtgggggccatttttgaccggtccctcagtagggtgctgacagaacttgtctccaagatgcgggatatgaggatggacaagacagagctgggctgtctgcgcgcgatcattttattcaatcctgatgccaaaggtctttctaacccttctgaggtagaggtattacgagagaaggtttacgcttccctagaaacctactgcaagcagaagtaccccgaacaacaagggaggtttgctaagctgctgctgagacttcctgctctgcgcagcatcggcctcaagtgcctagaacatctattctttttcaagctgattggggacacgcccattgacaccttcctgatggagatgcttgaggctcctcatcagctcgcttag

SEQ ID NO: 132342 - DNA, 1602 bp, synthetic construct
  misc_feature 1..1602: note = Description of Artificial Sequence: Synthetic coding sequence
  source 1..1602: mol_type = other DNA
atgtcatgggcggcacgtccacctttcttgcctcagcgccatgccgcgggacaatgcggacctgtgggcgtcagaaaagagatgcactgcggagtagcttcccgttggcgcaggcgtaggccatggctcgacccagctgccgccgccgccgcagcggttgccgggggagagcagcaaacgcctgaaccagaaccaggagaggccgggcgcgatggaatgggggactccggaagggactcccgctcacccgatagtagtagccccaatcccctcccacagggggtcccgcccccatcgcctccaggacctcccctgcctcccagcactgcgccttccttaggtggatctggggccccccctcctcctcctatgcctccgccacccttaggttcccctttcccagtaatctccagcagcatgggcagtccaggacttcccccccctgcccctcccggctttagcgggcctgtgtcttctcctcagatcaacagcactgtgtctctgcccggggggggttcaggacctcccgaagatgtgaagcccccggtcctcggtgtacgcggactacactgcccacccccacctggcggaccaggggccggcaagcggctgtgtgccatttgtggtgaccgctcctccggtaagcactatggcgtgtactcttgtgaggggtgtaaaggcttttttaaaagaacaatccggaaagacctgacttacagctgccgggacaataaagactgtactgttgacaaaaggcagcgcaataggtgccagtattgtcggtatcagaagtgtctggccacaggaatgaagagagaggcagtgcaagaagagcggcagagagggaaggacaaggatggcgacggtgagggggccggcggggcccctgaagagatgccagtggaccggatactcgaagccgagctggctgtcgagcagaaaagcgatcaaggagttgagggaccaggaggtacaggcggctcaggatccagccccaacgatccggtcaccaatatttgccaggctgcagacaaacagctctttaccttggtcgaatgggccaagcggattccacacttctccagtttaccccttgacgatcaggtgatcctgctgagggcaggttggaacgaattgctaatcgcgtcttttagccataggtcaatcgacgtgcgcgacggtatccttctcgctacaggtctgcacgtccaccgcaacagcgcccacagcgcaggagttggggctatcttcgatagggtgttgacagagctcgtatccaagatgagggacatgcgcatggataaaacagaactgggctgcctgcgcgcaattattctgttcaaccccgacgccaaagggttaagcaacccttccgaggtcgaggtcctaagggagaaagtgtatgctagtcttgagacatactgtaagcagaagtacccggagcagcaggggaggttcgctaaattgcttctacggctaccagcccttagaagcatcggattaaagtgcctcgagcacttgttttttttcaagttaattggagacacacctatcgacacgttcctcatggaaatgttggaggccccccatcagctggcctag

SEQ ID NO: 132343 - DNA, 1602 bp, synthetic construct
  misc_feature 1..1602: note = Description of Artificial Sequence: Synthetic coding sequence
  source 1..1602: mol_type = other DNA
atgtcttgggcagcccgacctccatttctccctcaacgtcacgccgctggtcagtgcggcccagtaggggttaggaaagagatgcactgcggagtcgccagccgctggagacgcagacgcccctggctggaccccgcagctgcagctgctgctgctgtggcagggggagaacaacagaccccggagcccgagcccggggaggctgggagagacggcatgggggacagcggacgggactctcgctcccccgactccagcagtcccaatccccttccccagggcgtgcctcccccatccccccctggacctcccctgccaccttcaacagccccttcccttggaggttctggagccccccccccccctcccatgccacctccccctctcggctctcctttccccgtcatatcatcttcgatgggcagcccaggccttcctccgccagcaccgcccgggttctcaggccctgtttcttctccgcaaatcaattctaccgtgtccctgcctgggggcggatctggccccccagaggatgttaagcccccagttcttggggtgcgcggtctccactgcccccctcctcctggcggacccggcgccggcaagaggctctgcgcaatttgtggagacagaagctcggggaagcactacggtgtgtacagctgtgagggttgtaagggcttttttaagcgaacgatcagaaaggatttgacctattcatgcagagacaataaagactgcaccgtcgataaacgtcagcgcaatagatgccagtactgccggtaccagaagtgccttgcgactgggatgaagcgcgaggctgtgcaggaagaacgccaacgagggaaggacaaagacggagatggcgagggcgcaggaggcgcgcccgaggaaatgcctgtggacaggattttagaggcagagttggcggtggagcagaaaagtgaccagggagtcgaggggcccggaggcacgggcgggtcaggaagctcacccaacgaccctgtaacgaacatctgccaggctgccgacaaacagttgttcactctagtagaatgggccaaacgcattccccacttttccagcctcccactggacgatcaggttatccttcttagagccggatggaatgagctactgattgcaagcttctcgcaccgaagcatagatgtaagggacgggattctgttggctacaggcctgcatgtgcatcgaaactcagctcactctgccggggtcggggcaattttcgaccgcgttctaacggagttagtgtctaagatgcgagatatgcggatggacaaaactgaactcggatgtttacgcgccatcatcctttttaaccctgacgctaaaggattgtctaatccatccgaggtcgaggtgctgcgtgaaaaagtctatgcatctttagaaacttactgtaagcagaaatatcctgagcagcaaggtcgattcgccaagcttttactgcggctgcccgctctgagatccataggcttgaagtgtcttgagcacctgttcttctttaagcttataggcgataccccaattgatacattcctgatggagatgttggaggcaccgcaccaactcgcctag

SEQ ID NO: 132344 - DNA, 291 bp, synthetic construct
  misc_feature 1..291: note = Description of Artificial Sequence: Synthetic coding sequence
  source 1..291: mol_type = other DNA
taaagccccaatgatcccgtaaccaatatttgccaggctgcagataaacagttattcacactggtggagtgggcaaaacggatcccacacttcagctcactcccactcgatgaccaggtgatcctcttaagagcaggcctacacgtccatagaaacagtgcccactcagccggagtgggagcgatttttgacagagttctgactgaactggtctccaaaatgagagatatgcgcatggacaagacggaactgggctgcttacgggctatcatcctgttcaatccagattag

SEQ ID NO: 132345 - DNA, 291 bp, synthetic construct
  misc_feature 1..291: note = Description of Artificial Sequence: Synthetic coding sequence
  source 1..291: mol_type = other DNA
tagtccccgaatgatccggtcaccaacatctgccaggccgccgataaacagctttttactctagttgaatgggctaaaaggataccccacttttctagtttaccgctggatgaccaggtgatcctgttgcgggctgggctgcatgtccaccgtaattccgcccatagtgctggcgtgggtgctatcttcgacagggttctgaccgagctggtcagcaagatgagagacatgcgcatggataagactgaacttggctgtcttcgagcaatcattttatttaacccggattag

SEQ ID NO: 132346 - DNA, 1614 bp, synthetic construct
  misc_feature 1..1614: note = Description of Artificial Sequence: Synthetic coding sequence
  source 1..1614: mol_type = other DNA
atgtcttgggccgcccggcctccattcctcccccagcggcacgctgcaggtcagtgtgggcctgtcggggtccgaaaggagatgcattgtggagtcgcctccagatggcggcgacggagaccttggctcgaccccgccgctgccgccgccgctgcggtcgccggcggggagcagcagactcccgaacctgagcctggagaagctggacgggatggcatgggtgacagtggtcgagacagcagaagtcctgattcctcttctccgaatccactgcctcagggagtcccgccaccttcccctcctggtcctccactgcccccaagcaccgctccttcactggggggctcgggagcgcccccaccaccccccatgcccccccccccgttaggctcgccgttccccgtgattagctcatctatgggctcacccggacttccccccccggcccctccaggctttagcggccctgtcagtagccctcagatcaactcaaccgtgtccctgcccgggggcgggagcggccctccagaagatgttaaacccccagtccttggcgtgcgtggcctccactgtccacccccgccgggtggaccaggcgccggcaagcgactttgtgccatctgcggcgatcgcagttcaggtaaacattacggtgtgtactcctgcgagggttgcaagggcttcttcaagcgcactatacgcaaggatttgacctattcatgtagagacaataaagattgcacggtcgataaaaggcagagaaaccggtgtcaatactgcagataccagaagtgcctggccactggcatgaagcgggaggctgtccaggaggagagacagagaggtaaagacaaggacggagacggcgaaggagcgggcggcgctccagaggaaatgcccgtcgatagaatcctagaggcagaactggcggttgagcagaagagtgatcagggcgtcgagggtccagggggtaccggaggtagcggctcctcccccaacgatccggtaacaaacatttgtcaggccgcagataagcagttgttcaccctggttgaatgggctaaaagaatcccccatttcagtagtttacctctggatgaccaagtgatcttattgcgcgcaggatggaatgaactgttgattgcaagctttagccatcgatccatcgacgtacgcgatggtatactgctggcgacaggcttacatgttcaccgcaatagcgctcactccgctggcgtcggcgcaatctttgatcgatcactttccagggtgctgacagagctagtgtccaagatgcgggatatgcgaatggacaagaccgaactcggctgcctgagggccatcatcctgttcaacccagacgccaagggattgtctaacccctctgaggtggaggttcttcgtgaaaaggtttatgcttcccttgaaacctactgcaaacagaaatatcctgagcagcagggtaggtttgcaaagctgctgcttcgtctgccggcactacggagcattggcctgaaatgcctcgaacacctgttcttcttcaagctcattggagatactcctatagatacgtttctgatggagatgctggaggctccgcaccaactcgcatag

SEQ ID NO: 132347 - DNA, 291 bp, synthetic construct
  misc_feature 1..291: note = Description of Artificial Sequence: Synthetic coding sequence
  source 1..291: mol_type = other DNA
tagagccccaatgatcccgtgacaaatatttgccaggctgccgataaacagttgttcactctagtggagtgggccaaacgtatcccccacttctcatcgctgcctctggacgatcaggtcatactgcttagggctggcctgcatgtccatcggaacagcgcccatagcgccggagttggtgccatcttcgaccgtgtgctgaccgagttggtctcaaagatgagggatatgaggatggataaaactgagctaggctgtctgagggccatcatcctgttcaaccctgattag

SEQ ID NO: 132348 - DNA, 1614 bp, synthetic construct
  misc_feature 1..1614: note = Description of Artificial Sequence: Synthetic coding sequence
  source 1..1614: mol_type = other DNA
atgtcatgggccgcgcgccccccttttctccctcaaagacatgccgctggccagtgcgggcccgtgggagttcgcaaggagatgcattgtggggtggcaagcaggtggcgaagacggaggccatggttggatcccgccgcagcggctgccgccgccgtcgccgggggtgaacagcagacaccagaaccggagccaggagaggccggccgggacgggatgggcgatagcggcagagactctagaagcccagactcctccagccctaacccacttccgcagggagtgccccctcccagtccaccaggaccacccctcccacccagtactgctccatccctggggggctcaggagcccccccaccaccccccatgcctccaccccccttggggtccccctttccagttatatccagctccatgggaagccctggcctcccccctcccgcccccccaggctttagcggtccagtgagcagtcctcagataaatagcacggtgagtctacctgggggcggttccggaccaccagaagatgtgaagcccccagttctgggggtgagaggcctacattgcccaccccccccaggcgggcccggtgctggcaaaagactgtgtgccatttgtggggaccgctcctcaggtaagcattatggagtgtattcttgcgaaggatgcaaaggattttttaagagaacaattagaaaggatttgacatactcctgccgagacaacaaggactgcacagtcgacaagcggcagcgaaaccgctgtcagtactgtagatatcagaagtgtctggctacagggatgaagcgggaggcggtccaagaggaacgccaacgcggaaaagataaagatggcgatggggaaggagctggcggggcccccgaggaaatgccggtggatcgcattttagaggccgagctggccgtggaacagaaaagcgaccagggtgtagaaggccctggcggaacaggaggatccggatcctctcccaatgacccagttaccaatatttgccaggctgcagataagcagcttttcacattagtggagtgggctaagcggatcccacacttttccagcctccccctggacgaccaggtgatactgctcagagcagggtggaacgaacttctgatagcaagtttctctcaccggtctattgatgtgagagatgggattctcttggccaccggtctccacgtccatcgtaactcagcccactcagctggcgtcggggcaattttcgaccgttctctaagtcgggtgctgacagagctcgtgtccaagatgagagacatgagaatggataagacagaactgggctgtctgcgtgccattatcctatttaatcccgatgccaaggggctcagtaatccttctgaggtagaggttctccgggagaaggtttacgccagcctggagacttactgtaagcaaaaatatcctgaacagcaggggcggtttgccaagctgctactgaggctgccagcgctccgatcaatcggattgaaatgtctcgaacatttattcttttttaagcttatcggggacactccaatcgacaccttcctcatggagatgctggaggcccctcaccaacttgcttag

SEQ ID NO: 132349 - DNA, 1614 bp, synthetic construct
  misc_feature 1..1614: note = Description of Artificial Sequence: Synthetic coding sequence
  source 1..1614: mol_type = other DNA
atgagctgggctgcgcggcccccgtttctgcctcagaggcatgcagctggtcagtgtggacccgtgggggtccggaaggagatgcattgtggggttgcttctcggtggcggcggaggaggccatggcttgatcctgccgccgccgcagccgccgccgtggctgggggcgagcagcagacccctgagccggagcctggggaagcgggcagggatgggatgggcgattcagggcgagacagcaggtcaccagactcgagttcaccaaacccactacctcagggggtgccccctcctagccccccggggcctcctctaccacccagtaccgccccgagcctcggaggttcaggagcccccccaccacctcctatgcctcctccccccttgggttcgccattccccgtgatttcaagcagtatggggagccctgggctacctcctcccgctccccccggtttctcgggtcccgtctccagcccccagattaacagtaccgtttctctgccagggggtggatcgggaccccccgaggacgtcaaaccccctgtgctcggggtgcgcgggctgcattgcccacctccacctggagggcccggagccggcaagcggttgtgcgctatctgtggcgatcgctccagcggcaagcactatggtgtgtactcttgcgagggctgtaagggctttttcaagcggacaattaggaaggaccttacttattcttgccgcgacaataaggattgcacagtagataagcggcagagaaaccggtgccagtactgcagataccagaagtgtctggccaccggcatgaagagagaagcagtgcaggaagagaggcaacgcgggaaagacaaagatggtgatggcgaaggtgctggaggagccccggaagagatgcccgtggataggatcttggaggccgagctagcagtggaacagaagagcgatcagggcgttgagggacccggagggacaggcggatctggttcttcccctaatgaccctgtgacgaatatctgccaagccgctgacaagcaactcttcacactagtggagtgggcaaaaagaatccctcatttctcctccctgccactggacgatcaagtcattctccttagagccggctggaacgagctgcttatcgcttcattctctcaccgctcaattgacgtgagggacggaatactgctagccacaggactgcatgtgcacaggaactctgcccatagcgccggagtaggtgcaatctttgaccgtagtctgtcacgagttctgaccgaacttgtgtcaaaaatgcgggacatgagaatggacaagacagaattgggctgcttgagggccattattctttttaatcctgatgccaagggcctgtccaacccgagtgaggtcgaggtattgagagagaaggtatatgcgtctttggagacttactgcaagcagaagtatccggaacaacagggtcgcttcgctaaactattgcttcgcctgcccgccttgcgatcaattggactgaaatgccttgagcatctgttcttttttaaactgatcggagacacccctatagacactttcctcatggagatgctcgaggcaccccatcagctggcttag

SEQ ID NO: 132350 - DNA, 1044 bp, synthetic construct
  misc_feature 1..1044: note = Description of Artificial Sequence: Synthetic coding sequence
  source 1..1044: mol_type = other DNA
atgcgcgaatgcggcggaggaccgggagcaggcaaacgcttgtgcgcaatttgcggagacagatctagcggaaagcattacggggtgtacagttgcgaaggttgcaagggatttttcaaaagaacaattcggaaggacctgacttacagttgcagggacaataaggactgcacagttgataagcgccaacggaacaggtgtcagtactgtaggtatcaaaagtgcttggccaccggaatgaagagagaggccgtacaggaggaacgccagagaggcaaggataaggacggcgatggggagggggccggcggtgcccccgaggaaatgcccgtcgatcgaatcctggaagccgagcttgccgttgagcaaaagagcgaccagggcgtagaggggcccggcggtaccggtggcagtggttcgagccccaatgaccccgtgactaatatctgccaagcagccgataagcagctttttacattggtcgagtgggccaagagaatcccccacttctcaagcttgcctttagacgatcaggttatcctcctgagggctggctggaatgagttgctcattgcctctttctcacatagatccatcgatgtgagagacggaatcctgctagcgacagggctccatgtccacaggaattctgcccactccgccggcgtcggcgctatctttgacagatccctttcgcgggtactgactgaactggtctctaagatgagggatatgagaatggacaagaccgagttgggttgccttcgcgctataatcctattcaatccggatgctaagggcctgtccaatcccagcgaagtagaggtcctccgcgagaaggtatatgcttccctggagacatactgtaaacagaagtatcccgagcagcaaggacggttcgcgaagctcctcctaaggcttcccgctctgaggagtattgggctgaagtgtcttgaacacttattttttttcaagctgattggcgacacccccattgacaccttcctcatggaaatgctagaggctccccaccagctggcctag

SEQ ID NO: 132351 - DNA, 1179 bp, synthetic construct
  misc_feature 1..1179: note = Description of Artificial Sequence: Synthetic coding sequence
  source 1..1179: mol_type = other DNA
atgggttctcctggcctcccacctcctgcccctcctggcttctctgggccagtatccagccctcagattaacagcactgtttcactcccaggcggaggaagtggccccccagaggacgtcaaaccccctgtccttggcgtccgcggccttcattgcccgcctccacccggtggccccggcgccggcaagcgcttgtgtgccatatgcggagatcggtctagtggtaagcactacggggtatattcttgtgaagggtgcaagggattctttaaaagaacgattcgcaaggatctgacctacagctgcagggataataaagattgtactgtggacaagaggcagagaaacaggtgccagtactgcaggtatcagaagtgcctagctacaggcatgaaacgcgaagctgtgcaggaggaaaggcagagaggcaaggacaaggatggagacggagagggagccggtggtgcccccgaggagatgccggttgacaggattttagaggcagaattagccgtggagcagaagtctgaccagggcgtggagggtcccggcgggaccggagccccatcgcccaacgacccagtgactaacatctgccaggctgcggataagcagctgtttaccctcgtggagtgggccaaacgtattccacacttcagtagtctgcccttagatgatcaggtcatattactgcgagctggctggaatgaactgctgatagcatccttctctcataggtcaatcgacgtgcgcgatggaatcctactggccactggactccacgttcataggaatagtgctcactcagctggcgttggggcaatttttgatcgtgtcctaacagaactggtctctaagatgagagacatgagaatggacaaaactgagttgggttgcctcagggcaattatccttttcaaccccgacgctaagggcctttctaacccatctgaagtggaagtgcttcgcgagaaggtttatgcttccctcgaaacctactgtaagcagaagtatcctgaacagcaaggaaggtttgcaaaattactactgcggttgcctgcgttacggagtatcggactgaagtgtctcgagcacttgtttttcttcaagctgatcggagacactccaatcgacacattcctaatggaaatgctcgaggcgcctcaccagttagcgtag

SEQ ID NO: 132352 - DNA, 1170 bp, synthetic construct
  misc_feature 1..1170: note = Description of Artificial Sequence: Synthetic coding sequence
  source 1..1170: mol_type = other DNA
atgggctctccagggcttccgccccccgccccgccagggttctcgggaccagtttctagcccgcagatcaactcaaccgtatcgctacctgggggcgggtccggacctcccgaggacgtgaagcctcctgttcttggcgttcgggggctccattgcccaccccccccaggagggcctggcgcgggtaagaggttgtgcgcaatttgtggcgaccggagcagcggaaagcattatggcgtctattcttgtgaggggtgcaaaggatttttcaaaagaactattcgtaaagatctcacctactcctgtcgggataacaaggattgcacggtggataagagacagaggaatcgctgccaatactgccgctatcagaaatgcctggcgactggcatgaagagggaggccgtgcaggaggaaagacagcgagggaaagataaggacggtgatggcgaaggggcaggaggcgcacctgaggaaatgccagtggatcgaatccttgaggctgaattggccgtcgagcagaagagtgaccaagggggctctcagcatatttcgaaatctcctaatgatcctgtcactaatatctgtcaagctgcggataaacagttgttcaccttggttgagtgggctaaacgtattccacatttttcctccctccctcttgacgaccaggtgatcttgcttcgggcaggttggaacgagctgctgatagcttcttttagtcaccgctcgattgacgtgcgcgacggaattctgttagctactggtctccacgtccaccgtaactcagcacactccgcaggcgtgggggctatcttcgaccgagtcctgaccgagcttgtttccaagatgagagatatgcgaatggacaaaacagaactcggctgtttacgggctatcattctatttaaccccgatgccaaaggcttaagcaacccatccgaggtcgaagtgttacgcgaaaaggtgtacgcctcattggaaacatattgtaaacaaaagtatccggagcaacaaggcagatttgctaagctgctgctaaggctgcctgctttgaggtccattggtctcaagtgtctggagcacctgttcttcttcaagctcatcggcgatacccccattgatacctttctgatggagatgctggaagcgcctcatcagctggcctag

SEQ ID NO: 132353 - DNA, 1044 bp, synthetic construct
  misc_feature 1..1044: note = Description of Artificial Sequence: Synthetic coding sequence
  source 1..1044: mol_type = other DNA
atgagagagtgcggcggcgggcctggcgctggtaagaggctgtgcgcaatatgcggtgaccggagctcaggaaaacactatggagtctatagttgtgaggggtgtaaaggctttttcaagaggaccattcgaaaggatctgacatattcctgccgcgacaacaaggactgcacggtggataagcgtcaaagaaacaggtgccagtattgtcgctatcaaaagtgtctcgcaaccggaatgaagagagaggctgtccaggaggaaagacagcgtggcaaagacaaggatggggacggtgaaggggctgggggtgctcccgaagaaatgccagtggatcggattctggaagccgaacttgcagtcgaacaaaagagtgaccagggggtagaggggccaggagggaccggagggtccggatcttcacctaatgatccagtcactaacatctgccaagccgctgataaacagctttttaccctggtcgaatgggctaagagaatcccacacttctcatctcttcctcttgacgatcaggtgatcctgcttagagcaggatggaatgaacttctaatagccagcttctctcaccgaagcatcgatgtgcgtgacggaatccttctggcgactgggctgcatgttcacaggaactcggcgcactccgccggtgttggcgccatcttcgatcggagcctgtcacgtgtcctaacagagctcgtctcgaaaatgagagatatgaggatggacaagaccgagctcgggtgtctgcgggctattatcctttttaacccagatgctaagggtttgagcaaccctagcgaagtggaagtgctccgtgaaaaggtctacgctagcctcgagacctattgtaaacagaagtatcccgaacagcagggtcggtttgcaaagttgctgcttcgacttcccgcgcttagatcaatcggcctgaagtgcctcgagcacttgttcttttttaagctgataggagacacacccatcgacacctttcttatggagatgttagaggctccccatcagctggcgtag

SEQ ID NO: 132354 - DNA, 1179 bp, synthetic construct
  misc_feature 1..1179: note = Description of Artificial Sequence: Synthetic coding sequence
  source 1..1179: mol_type = other DNA
atgggcagcccaggtctgccaccccccgctccccccgggttttccgggcccgtcagctcaccccagataaattcaacagtgtcgctgccaggcgggggcagtggcccccctgaagacgtaaaacctccagtcttgggggtacgtgggctgcactgccctcctcccccaggagggcctggagccggcaagaggttgtgcgcgatttgtggagaccggtcttctggaaagcactacggtgtatacagctgtgaagggtgtaagggcttcttcaaaaggaccatccggaaagacttgacctattcttgccgggataataaagattgtacagttgataaacgccagcgaaatagatgtcagtactgcaggtatcaaaaatgccttgcaaccggcatgaagcgggaagctgtgcaggaggaacgacagagaggaaaagataaagatggggacggagaaggcgccggcggagcgcccgaagaaatgccagtcgaccggatccttgaggctgagctggcggtggaacagaagtccgaccagggtgtggagggcccaggaggaacaggtgccccgtcgcccaacgatccagttactaatatttgccaggctgcagacaagcagttattcacgttggtggagtgggcaaaacgtatcccccacttctcaagcttacctcttgacgaccaggtgattctgctccgggcaggctggaatgaattgctgatcgcttcattctcccacagaagtatagacgtgagggacgggatcctactcgcaacaggactgcacgtccataggaacagcgcacattctgccggggtcggcgcaatcttcgacagagtcttgaccgagctcgtgtcaaaaatgcgggatatgcggatggataagacagaattggggtgtttacgggccattatcctgttcaaccccgatgcgaaaggactcagcaatcctagcgaggtggaggtgctgagggagaaagtgtatgcatccctggagacctactgcaaacagaagtaccctgagcagcagggccgctttgccaagcttctgcttaggcttcctgcactgcgctctattggtcttaagtgtctcgaacacttgttcttttttaaactgataggagacacccccatcgataccttcctcatggagatgctggaagctccccaccaactggcatag

SEQ ID NO: 132355 - DNA, 1170 bp, synthetic construct
  misc_feature 1..1170: note = Description of Artificial Sequence: Synthetic coding sequence
  source 1..1170: mol_type = other DNA
atgggaagccccgggctgccacctcccgctccgcccggattcagcggacctgtgagctctccacagatcaactcaactgtgtctctgccagggggcggatccgggcccccggaggatgtgaagccacccgtgttaggcgtgaggggcctgcattgtcccccgccccccggaggccctggcgctggaaaacggttatgtgcgatttgcggggacaggtcaagcggcaaacattacggggtttactcttgcgagggctgcaagggcttcttcaagaggacgatccgcaaggaccttacatattcctgtcgcgacaataaggactgtactgtggacaagcgccagagaaacaggtgccagtattgccggtatcagaaatgcctcgcaaccggcatgaagagagaagcagtgcaggaagaaaggcagagggggaaggacaaagacggtgacggtgagggcgcggggggcgcaccagaggaaatgcccgttgaccgcatcctagaggctgagctggcggtcgaacaaaagtccgatcagggcggaagtcagcacatttccaagagcccgaatgatcccgtgacaaacatttgtcaggccgccgataagcagctgttcaccctggttgagtgggcgaagcggatacctcatttttcctctctaccgttagacgaccaggtgattttgctgcgggcaggatggaacgagctcctgattgcttctttttcacaccgtagcatcgatgttagggacggtatcttgctcgctacaggcctgcacgttcacagaaacagcgctcactctgccggcgtgggggccatcttcgaccgtgtgctgacagaactagtgagtaagatgcgcgatatgcggatggacaaaactgagcttgggtgtctgcgtgccataatccttttcaaccccgatgctaagggactcagtaatccttcagaagttgaagtactgcgcgagaaagtgtacgcatcgctagagacctactgcaagcagaagtatcctgagcagcagggacgcttcgccaagctcttgctgcggctgccggccttgcgcagcattgggctgaaatgtctagagcacctcttttttttcaaactgattggggacactcctattgacacatttttgatggagatgttggaagcccctcaccaattagcctag

SEQ ID NO: 132356 - DNA, 861 bp, synthetic construct
  misc_feature 1..861: note = Description of Artificial Sequence: Synthetic coding sequence
  source 1..861: mol_type = other DNA
atgccccagggatctgtgggtcgatggggatgcgaaaaaaagtgtatcgttggatccagaccagggggagggggagacgggccggggtggattcctcagcggaggcggagacgccgctggcaagccgagaacaataaaccacggtctaggagtcaaggacgtctggacggcacaggatgggcaacggctggcggcataaatagcacagttagtctgcccgggggcgggtcaggccctcccgaggacgttaagcctcccgtgctcggggtacgaggactgcactgtcctcctccccccggtgggcctggcgctggaaaaagactgtgcgcaatttgcggcgacagaagctctgggaagcattacggcgtttacagctgcgaagggtgcaaggggttttttaagcgaacaatcaggaaggacttaacttacagttgcagagacaacaaggactgtaccgtggataagaggcaacgcaaccggtgccagtactgtcgttatcagaagtgtctagcaaccgggatgaagcgagaagctgttcaggaggagagacaacgaggcaaagataaggatggtgacggggagggagccgggggtgcacccgaggagatgcccgttgacaggattctggaagccgaattggccgtggagcaaaagagcgaccaaggggtagagggccctgggggcacggggggatcaggctcgagtgtgagcgtcggggtcaaccctctgagtttcgtcatgggggtgggcggtggcagcctcggactgttctatatacctagcccgtcatttcccctgataacattcctgaccttgctggggaccgggggtgccgcgaaacaggggcttagcaacatttag

SEQ ID NO: 132357 - DNA, 1170 bp, synthetic construct
  misc_feature 1..1170: note = Description of Artificial Sequence: Synthetic coding sequence
  source 1..1170: mol_type = other DNA
atgggcagccctgggcttccccccccagcccccccgggattttctggcccagtctcctccccccagataaactccacagtatctttgcccggaggcggttcaggcccgccagaagacgtgaaaccaccagttctgggggtgaggggattgcactgccccccacccccaggcggccccggggcaggtaagcgtctgtgcgccatttgcggagaccgctcatctggcaaacattacggagtgtacagttgcgaggggtgcaaggggtttttcaagcgaacgatccgtaaagacctgacttactcttgccgggacaataaagactgcacagtcgataagagacagcgcaatcgatgtcaatattgccggtaccagaaatgtctggccactggcatgaaaagggaagcagtacaagaggagcggcagcgtggcaaggacaaggacggggacggcgagggcgccggcggagcacccgaagaaatgcctgtcgatcgtattctggaagctgagctggcagtggagcagaaatctgatcaggggggaagccaacacatttctaagtccccgaacgaccccgtaactaacatttgtcaggcggccgacaaacagttattcactctggtagagtgggctaaacgaattccccacttttctagcctgccccttgatgatcaggtgattctcctgagagccggctggaatgaacttttaatagcctcattctcccatagatcaatcgatgtgagggacgggattctactggccacaggcctacatgtccacaggaactccgcgcactctgcgggagtgggggctatctttgacagggtgcttactgagttagtgagtaagatgcgcgacatgagaatggataagacagaactgggatgccttcgcgccatcattctcttcaaccctgatgccaaagggctctccaacccatctgaggtggaagtcctgcgggagaaagtgtatgcctcactggaaacctactgtaaacagaaataccccgaacagcagggacggttcgccaagttgctgctgcggctgcccgccttgcggtccataggcttaaagtgtttggagcacctttttttttttaagctcataggagacacgccgattgatacattcctgatggagatgctggaggccccacatcagctcgcctag

SEQ ID NO: 132358 - DNA, 861 bp, synthetic construct
  misc_feature 1..861: note = Description of Artificial Sequence: Synthetic coding sequence
  source 1..861: mol_type = other DNA
atgccccaaggtagcgtggggagatggggatgtgagaaaaaatgtattgttggttcacgacctggtggaggcggagatggcccaggctggatccctcagcgccgtcggcgtaggcggtggcaggccgagaataacaaaccgcggagccgaagtcagggcaggctggacgggaccggttgggccacggccggcggcattaactcaacagtgtccctgccaggcgggggttcagggcccccagaagacgtgaagccgcctgttctcggagtgagagggttgcattgccctcctcccccaggtggcccgggcgcgggcaaaaggctttgcgccatctgcggggatcgctctagcggaaaacattacggggtgtactcctgtgagggttgtaaaggtttttttaagagaaccatacggaaagacctgacctactcctgccgcgacaataaagactgcactgtggacaagcgacagcggaatcgatgccaatactgcaggtatcagaaatgcttggcaacgggcatgaaaagagaggcagttcaagaggagaggcagcgcggaaaagacaaggacggtgacggggaaggagccggaggtgcgccggaggagatgcccgtagatcgcattttagaggccgagttggctgttgaacagaagtcggatcagggggtcgagggaccaggcgggaccggtgggtccggatcctcagtgtccgttggagtgaaccccctcagcttcgtcatgggcgtgggtgggggctcccttggacttttttacattccaagcccttctttccccctgattacatttctgacattgctcggaaccggcggggcagctaagcaaggcctgtccaatatttag

SEQ ID NO: 132359 - DNA, 1179 bp, synthetic construct
  misc_feature 1..1179: note = Description of Artificial Sequence: Synthetic coding sequence
  source 1..1179: mol_type = other DNA
atgggcagtcccggcttaccccctcccgcacccccgggctttagcggcccagtgtctagtcctcagataaacagcactgtgtcattgcctgggggcggctctggtcctccagaggatgtgaagcctcccgtgctgggcgttcgaggtctgcattgtcctcctcctccagggggtccaggcgccggtaaacgattgtgcgcaatctgcggggacagaagttcgggcaaacattacggggtatacagctgtgaaggatgtaaaggctttttcaaaagaacgatccgcaaggatctgacctatagttgtagagacaataaggactgcaccgtggacaaaaggcaacgcaatcggtgtcaatactgtagataccagaagtgtcttgctacagggatgaaaagggaggccgttcaggaagagcgacagagaggcaaggacaaagacggagacggagaaggcgcagggggagccccagaagaaatgccagtggatcgcatcctggaggccgaattagccgtcgaacagaagtcggatcagggcgtcgagggaccaggggggaccggggcgccctctccaaacgacccagtgaccaatatctgtcaggctgcagacaaacagctcttcacgctggtggagtgggcaaaacggatccctcatttcagttccctcccactagatgatcaggtgatactgctgcgggccggttggaacgaacttctcatagcttctttttctcaccggtcaatcgatgtgagggacgggatcctactggctacaggccttcacgtgcatcgcaattctgcccactctgccggcgtcggcgcaatcttcgaccgggtgcttaccgagctggtctcgaaaatgcgcgacatgcggatggataaaaccgagctcggctgtctgagggctattatcctgttcaacccagatgccaaggggctttcgaacccaagcgaagtggaggttctgagagaaaaggtctatgcttcgctagaaacttattgcaagcaaaaataccccgagcagcaggggagattcgcgaagctactgctgcgactacctgcccttcggagcatcgggctcaagtgtctggagcatctgttcttttttaagctcatcggggacactcccatagatacttttttaatggagatgctcgaggccccccatcagctcgcctag

SEQ ID NO: 132360 - DNA, 1044 bp, synthetic construct
  misc_feature 1..1044: note = Description of Artificial Sequence: Synthetic coding sequence
  source 1..1044: mol_type = other DNA
atgagagagtgcggagggggtcccggagccgggaaacggctgtgcgcaatttgcggtgatcggtcctcagggaaacactacggggtgtactcctgtgaagggtgtaaggggttctttaagcgcaccatcaggaaagatctgacctacagctgtcgcgataacaaggactgtaccgtggataaaaggcagcgaaatcggtgtcagtactgccgataccagaagtgtctggcaacgggcatgaagagggaggctgtgcaagaagaaagacagcggggcaaggacaaggacggggacggggagggcgccggcggggctcctgaggaaatgccggtggaccggatactggaagctgagctcgcagtcgagcagaaatctgatcagggggtagagggccccggcggaacaggtggatccggctcgtcacctaacgatccagtgactaacatctgtcaggctgcagacaaacaactgtttactctggtcgagtgggctaaacggatccctcactttagctccctcccacttgacgaccaggtcatccttttgcgcgccgggtggaacgagctcctcatcgcaagcttttcccaccgaagtattgacgtgagggacggcattctcctggccaccggcctccacgtgcacagaaattccgcccactcggctggggtcggagccattttcgatcgaagtctctcgagagtgttaactgaactggtgagcaagatgagggatatgcggatggataagactgagcttgggtgtttaagggccattatcctgttcaacccagacgctaagggcttgtctaatccgtcggaagtggaggtccttcgcgagaaggtgtatgcctcactggagacctactgtaaacagaagtacccggagcagcaggggcgatttgcgaaacttctcttacgccttcctgccctgaggtctataggcttaaagtgcctggaacacctgttctttttcaaactgatcggcgacactccaattgataccttcttaatggaaatgctggaggctccccaccagctggcatag

SEQ ID NO: 132361 - DNA, 1179 bp, synthetic construct
  misc_feature 1..1179: note = Description of Artificial Sequence: Synthetic coding sequence
  source 1..1179: mol_type = other DNA
atgggcagccccgggttaccacccccagcacctccaggtttcagcgggcctgttagttcaccccagatcaatagcacagtcagcctgcctggagggggaagcggaccaccagaagacgtgaaacctccagtccttggcgttcggggcttacactgccctccacccccgggaggaccaggagccggaaaacgcctgtgcgcaatctgcggcgataggagtagtgggaaacattatggcgtttactcttgtgagggatgtaaggggttctttaaacgcacgattcgcaaggacctcacatattcctgcagagacaacaaagattgcaccgttgacaaaagacaaagaaacagatgtcaatattgcagataccagaagtgcctagctaccggcatgaagagggaggcagtgcaagaagagaggcagaggggcaaggataaggacggggatggcgagggggccgggggggccccagaggagatgccagtggaccgcatcctggaggcggaattggctgtggagcagaaaagtgaccagggcgtggagggaccaggtggcactggggccccgtcacctaatgaccccgtcacaaacatatgccaagctgccgataagcagctttttaccctggtagagtgggccaagaggataccccatttttccagtctgcctctggacgatcaggtcattcttctcagagccggatggaacgagctgctgatagccagcttctctcaccggtctatcgatgtccgggacggaatcctgctcgcaacaggcctgcacgtgcatagaaactccgcgcacagcgcgggtgtcggcgccatctttgatagggtccttaccgagctggtctccaagatgcgcgacatgcgaatggacaagactgagctggggtgccttcgtgcaataatactgttcaaccccgacgccaaagggttgtcgaatccaagcgaggtggaggtgctgagggaaaaggtgtatgcttctctcgagacttattgcaaacagaagtaccctgaacagcaggggcggtttgctaaactactgttgcggctcccggccctccggagtatcggactcaaatgcctcgaacatctcttttttttcaagttaattggggacacgcctatcgatacctttctcatggaaatgctcgaagccccccaccagttggcttag

SEQ ID NO: 132362 - DNA, 1179 bp, synthetic construct
  misc_feature 1..1179: note = Description of Artificial Sequence: Synthetic coding sequence
  source 1..1179: mol_type = other DNA
atgggaagtccaggcctaccccctccagccccccccgggttctcaggccctgtgtcctcaccccaaattaactctaccgtaagcctgcccggagggggttcagggccgccagaggacgtgaagccccctgtgctcggcgtaagaggcctgcactgtcctcccccacccggcggacccggcgctggaaagcgcttgtgtgccatttgcggtgaccgcagctcagggaaacactacggtgtgtacagctgtgagggctgcaagggattcttcaagaggacgatcagaaaggatctaacatattcctgccgtgataacaaggactgtacagttgataagcgccaacgcaataggtgtcagtattgccgctatcagaagtgcctggctactggtatgaagcgcgaggcagtgcaggaagaaaggcagcgcggcaaggacaaggacggcgacggggagggggcaggcggcgccccagaagagatgccagtggatcggatcctcgaggctgaactcgccgttgaacagaagtcagaccagggtgtggaaggacccggagggaccggcgcgcccagccccaatgatcctgtgacgaacatttgtcaggccgccgacaagcaattattcacgctggttgaatgggccaagcggatacctcacttttcctctctccctctggacgaccaggtcatcctgttgcgcgcaggctggaatgagctgctgattgcctctttctcacacagatcaatcgatgtccgcgatggaatcctgctggccacgggtcttcacgtgcacaggaattccgcacattcagccggcgtgggagccatctttgaccgggtgctgacagagctagtttccaagatgcgagacatgaggatggataagacagaactgggctgtttgcgagctatcattctgttcaacccagacgcaaagggcctgagcaacccttctgaagtggaagtgctgcgtgaaaaagtctacgctagcttagaaacttactgtaagcagaagtatccagaacagcaggggagattcgctaagctactccttcggttgcctgccctgcggagtattggccttaaatgtctcgagcacctttttttcttcaagctgatcggtgatacacctatcgacaccttcttgatggaaatgctcgaggccccccaccagctagcctag

SEQ ID NO: 132363 - DNA, 861 bp, synthetic construct
  misc_feature 1..861: note = Description of Artificial Sequence: Synthetic coding sequence
  source 1..861: mol_type = other DNA
atgccacagggctcagtgggtagatggggctgcgagaagaagtgcatagtggggagcagacccgggggtgggggagacggacccgggtggatcccccagcgccgtagacggcgaagatggcaggccgagaacaacaaacctagatctagaagtcaggggcgactggatggtaccggctgggcaactgcaggaggcattaacagtacagtgtcacttcctggcggggggtccggaccacccgaggacgttaagcctcccgtcctgggagtgcgcggactccactgtccaccgcctcccggaggacccggggctggcaagcgtctctgcgccatttgcggggacaggtctagcggcaagcattacggagtatactcatgcgagggctgtaaaggattttttaaaaggacaatccggaaggacctcacctattcctgtcgggacaataaggattgcacagtagacaaaagacagcgcaatcgatgtcagtattgcaggtatcaaaagtgcctcgccaccggaatgaagagagaagccgtgcaggaagagcgacagaggggcaaagacaaagatggtgacggtgagggcgctggaggcgcccccgaagaaatgccggtggatagaattctggaagccgaactggcggtcgagcagaagtcggatcagggagttgaaggcccaggcggcaccggcggcagcgggtcttccgtctcggtcggcgttaatcccctctcattcgtcatgggggttggcggtggctcattgggcctcttctacatcccttcaccatcctttcctctcattacctttctaacccttcttgggacaggcggagctgctaagcaaggattgtctaatatctag

SEQ ID NO: 132364 - DNA, 1170 bp, synthetic construct
  misc_feature 1..1170: note = Description of Artificial Sequence: Synthetic coding sequence
  source 1..1170: mol_type = other DNA
atggggtctcctggactgccccctccagccccacctggtttctccggtccggtgtccagtccccagatcaactctacagtgagcctgcctggcggcgggtcggggcctccggaagatgttaaaccccccgtgctcggcgtgagaggcttgcactgtccccccccacccggaggcccgggagccggcaagcggctatgcgccatctgtggggataggagtagtgggaagcactatggtgtttactcctgcgaagggtgtaaaggattctttaagagaacaatccgcaaagatctgacctacagctgtcgggacaataaagactgtacagtagataaacgtcagagaaaccgatgccagtactgtaggtaccagaaatgtctggctaccggaatgaaacgcgaggccgttcaggaagagagacagaggggcaaagataaggacggggatggcgaaggcgccggaggggcccctgaggagatgccagttgacaggattttggaagccgagctggctgtggagcagaagtcagaccagggagggtcacagcatattagcaagagtcccaatgatcccgtcaccaatatctgccaggcagccgacaaacagctcttcacattggtggagtgggccaagcgcatcccccactttagctctctgccgctggacgaccaggtgatcttgctgagagcgggctggaatgaattactgatcgcaagtttcagccaccgctccattgatgtgagggatggcattctgttggccacagggctccacgtgcaccgaaactcagctcattccgcgggcgtgggggccatttttgacagggtcctgacagaactggtgagtaaaatgcgcgatatgagaatggacaaaacagagttaggctgtttgagggccataattctgttcaatcctgacgccaaaggccttagcaacccttctgaggtcgaggtgctcagggaaaaggtgtatgcttccctggaaacatactgcaagcaaaagtacccggaacagcagggaaggtttgcaaagctgctgctccgacttcccgcactgcgcagcatcggcctcaagtgtctggaacatctgttctttttcaagcttatcggggacacccccatcgacacattcctgatggagatgctcgaggccccacatcagctcgcttag

SEQ ID NO: 132365 - DNA, 1044 bp, synthetic construct
  misc_feature 1..1044: note = Description of Artificial Sequence: Synthetic coding sequence
  source 1..1044: mol_type = other DNA
atgcgggagtgcggtggcggccctggcgccggcaagagattgtgcgcaatttgcggagataggtcatctggcaagcactacggtgtgtattcttgtgagggatgcaagggcttcttcaaaaggaccatccgcaaagacctgacgtactcatgtagggacaacaaggactgtactgtggacaaacggcaaaggaataggtgtcaatattgcagatatcaaaagtgtctggccactgggatgaagcgggaggccgtgcaggaggagcggcagaggggaaaggataaggacggcgacggcgagggtgccggcggcgcccccgaggagatgccagttgatcgcattttggaggccgagttggctgtggaacagaaatcagaccagggagtggagggtccgggcggcaccgggggaagcgggtccagccctaatgatcccgttactaacatttgccaagccgccgacaagcagctgtttaccctcgtagaatgggcaaagcggatccctcacttcagttccctcccattggacgatcaggtgatcctgctcagagctgggtggaacgaacttttaatcgcatccttttcccacaggtcaattgacgtccgcgatggtatcctcctggccacggggcttcacgtgcataggaacagcgcccactccgcaggggttggggcaattttcgatcggtcccttagcagagttttaaccgagctggtttcgaagatgagagacatgagaatggacaaaacagagctcgggtgcttaagggccatcatcctgttcaatccagacgcaaaggggctatcaaatccctccgaagtcgaagtgcttagggagaaggtgtatgcatctctcgaaacatactgcaagcaaaagtatcctgaacagcagggtcggtttgcaaaactcctgctgcgcctgcctgccctgaggtccataggcctcaagtgcctagagcatctattcttcttcaagcttatcggcgacacgcccatcgatacttttctgatggaaatgttggaggccccccaccagctggcttag

SEQ ID NO: 132366 - DNA, 1170 bp, synthetic construct
  misc_feature 1..1170: note = Description of Artificial Sequence: Synthetic coding sequence
  source 1..1170: mol_type = other DNA
atgggttcacctggcctgcctcctcccgccccacctggatttagcggcccggtgtcctcaccccagatcaatagcacagttagtctgccaggagggggtagcggcccccctgaagacgttaagccacctgtactcggcgtccgcggattacactgccctcctccacccggaggaccgggcgccgggaaacgcctttgcgcgatctgtggtgacagatctagcgggaaacactacggggtttattcttgcgagggatgcaagggctttttcaaacgcacaatccgtaaagacttgacctactcatgcagagacaataaggactgtactgttgataagcgacaacgcaaccgttgtcagtactgtagataccagaaatgtcttgcaactggtatgaagcgagaggccgtgcaggaggagcgccaaagaggtaaggacaaagacggcgacggcgagggcgccggcggagcaccagaggaaatgcccgtcgaccgcatactcgaggcggagctcgccgtggagcagaaatccgaccaaggaggttctcagcacatatctaaatcgccgaacgaccccgtgacgaatatatgccaggccgccgataaacagttgtttacactcgtcgaatgggcgaagcggattccccatttcagctctctccccctggatgaccaggtcatcttgctaagggcaggctggaacgaactactgatcgcaagtttttcccatcgctctatcgacgttcgagacgggatcctgctggctaccggactgcacgttcacagaaattctgcacattcagctggagtgggtgccatattcgatagggttttgaccgagcttgtgagcaaaatgcgggatatgcgtatggataagactgagctgggctgtctacgagctattattcttttcaaccccgatgcgaaaggtctgtcgaatcccagtgaggtcgaagttctgcgggagaaagtgtatgcgtcgttagagacctactgcaagcagaagtacccggaacagcagggcagatttgctaagttgctcctcagactaccagctctacggtccattgggttaaaatgcttggaacacctgtttttcttcaaactcattggagacactcccattgacacattcttgatggagatgctcgaagcacctcaccagctggcgtag

SEQ ID NO: 132367 - DNA, 1044 bp, synthetic construct
  misc_feature 1..1044: note = Description of Artificial Sequence: Synthetic coding sequence
  source 1..1044: mol_type = other DNA
atgcgcgaatgcgggggggggcccggagccgggaagagactgtgcgctatctgtggtgatcggtcctccggcaagcactatggagtgtactcatgcgaggggtgcaagggcttctttaagcgaaccatcaggaaagacctgacttactcctgtagagataataaggattgcacagtagacaaacgacagagaaatcggtgtcaatattgcagatatcagaagtgtttagcaaccggcatgaaaagagaggctgtccaggaggaacgccaaagaggaaaggacaaggatggggacggggagggcgctgggggcgccccggaagagatgcccgtcgacagaattctcgaggcagagcttgcggtagagcagaaatcagaccaaggcgtagagggacctggcggcaccggtggctctgggtcctccccaaatgatccagtcaccaacatctgtcaggccgccgataagcaactgttcaccctggtggagtgggccaagcgcataccccacttcagctcactccccttggatgaccaagtgatcctgctgagagccggttggaacgaacttctgatcgctagtttctctcacaggtcaattgacgtgagagatggcattctccttgctaccggcttacatgttcaccgaaacagcgcccactccgccggggtcggagccatatttgatagatccctgagccgggtgctgacagagttagtgtcgaagatgcgggatatgcgcatggataagacagagcttgggtgcctgcgtgccataatactgttcaatccagatgctaaggggctttcgaatcccagtgaggttgaagtgctgcgcgaaaaagtgtatgcgtcactcgaaacctactgcaaacagaaatacccggagcagcaaggtcgatttgctaagctccttctgaggctcccagctctccgttctataggcctgaaatgtctggaacatctgttctttttcaagcttattggtgacactccaattgatacatttctcatggaaatgctcgaggcgccccaccagcttgcatag

SEQ ID NO: 132368 - DNA, 861 bp, synthetic construct
  misc_feature 1..861: note = Description of Artificial Sequence: Synthetic coding sequence
  source 1..861: mol_type = other DNA
atgccacagggaagcgtgggccgttggggctgcgagaaaaagtgcattgtgggctctcggccaggcggtggaggcgacgggccaggatggattccacaacggcggaggaggaggagatggcaggccgaaaacaacaagcctcgctccaggtctcaaggacgcctggatggaaccggatgggccacagccgggggcattaacagcaccgtaagcctgccaggaggcggaagcggtccccccgaagatgtcaagccccccgtgctgggcgtgagaggcttgcactgcccccctcctcccggcggccccggcgccggaaaacgtttatgcgctatttgcggcgatcgatcgagcggtaaacattacggcgtgtattcttgcgagggatgcaagggcttcttcaagaggacaatccgcaaggatctgacatattcctgtagagataataaagattgcacagttgacaaacgccagcggaatcgctgtcagtactgcagatatcagaagtgcctggcaacgggcatgaagcgagaggctgtgcaagaggaacggcagcggggtaaagacaaagatggagacggcgagggggcaggaggagcccccgaggagatgccggtggacagaatcctcgaggcggagctggctgtggaacagaaaagcgatcagggagtggagggcccggggggaacaggcggcagtggatccagcgtctcggtcggcgtcaaccctctgagctttgtcatgggcgtcggcggcggatccttaggcctgttctatatcccttccccttcatttcctcttatcactttcttaacactgttgggcacaggcggcgcggcaaagcaaggcctaagcaacatctag

SEQ ID NO: 132369 - DNA, 1392 bp, synthetic construct
  misc_feature 1..1392: note = Description of Artificial Sequence: Synthetic coding sequence
  source 1..1392: mol_type = other DNA
atgtatggcaattactcccacttcatgaagttcccggccggttatggaggatccccggggcacaccggcagcactagtatgtcacctagcgccgcactgtctacagggaagccaatggattctcacccctcatataccgacactccggtgagtgcccccagaacactgagcgccgtcggcaccccactgaatgctctcggtagtccgtacagggtcatcacctccgccatggggcccccttccggcgccttggcagctccaccaggcatcaatttagttgctccgccttcatcgcagttaaatgtggtcaactctgtctcctcttcagaggacataaagccattgcctgggcttcccgggattggcaatatgaactatccatctacttcgcctggcagtcttgtgaaacatatttgcgcgatctgtggtgacagatcctcgggcaagcattacggagtgtacagctgtgagggatgcaaaggtttttttaagagaacaatcaggaaagacttgatatatacctgcagagacaataaagattgcctcatcgataagagacagaggaaccggtgccagtactgtaggtaccagaagtgtctcgttatgggcatgaagagggaggctgtacaggaggaacgtcagcgcagccgggaacgtgccgaatctgaggctgagtgcgccacgtccggtcacgaggatatgcctgtcgagagaatcctggaggccgagctggccgtggagcctaagaccgagtcctatggagacatgaatatggagaactcaactaatgacccagttactaatatctgccatgctgcagacaaacagctcttcactctggtggagtgggcgaagagaataccccatttttccgacctgaccttggaagatcaggtgattcttcttagggccggctggaatgaactgctgatcgcctctttctcccatagatccgtgagtgtgcaggacggcatcctactagctactggtttgcacgtgcaccgaagttccgctcacagcgccggcgtgggctctattttcgaccgcgtcctgaccgagttggtgtcaaagatgaaggatatgcaaatggataagagcgagttaggctgtttaagggctatcgtgctgtttaatccagacgctaaaggcctgagcaatccatcggaagtggagacactgcgcgaaaaagtatacgcgactttggaggcttatactaaacaaaaatatccagagcagcctgggaggtttgccaagcttctgctccggttgccggctctgcggagtatcggacttaaatgcctcgagcacttattttttttcaaacttatcggcgatacccccattgacacttttcttatggaaatgctggagacccccctccagattacttag

SEQ ID NO: 132370 - DNA, 2619 bp, synthetic construct
  misc_feature 1..2619: note = Description of Artificial Sequence: Synthetic coding sequence
  source 1..2619: mol_type = other DNA
atggccacagcctgtaaacgatccggtgagcctcagtccgatgacattgaagctagccggatgaaaagagcagcggcaaagcatctaatcgagagatattatcaccaactcaccgaaggatgcggcaacgaggcgtgtacaaatgagttttgtgctagctgccccaccttcctgcggatggataataacgctgctgcgattaaagcgctcgagctctataaaatcaacgcaaagctgtgtgatccgcacccatccaaaaaaggggctagtagtgcctatttggaaaatagtaagggcgcgcctaataatagttgtagcgagatcaaaatgaataaaaaaggcgcacggatcgacttcaaagacgtgacttatctgactgaagaaaaagtttatgaaattctcgaattgtgtcgcgagagggaagactattcccctctgatcagagttatagggcgagtcttctctagtgctgaggcccttgtgcagtcttttcgtaaggtgaagcagcacactaaggaggaattgaagtctctgcaggccaaagatgaggacaaggacgaagacgaaaaggagaaggccgcatgtagtgctgctgccatggaggaggattccgaggcttctagcagcaggataggagatagttcccaaggcgacaacaacctgcaaaaactgggcccagatgatgtgtccgtcgacattgacgcgattcgccgggtgtacaccagactcctgtctaatgaaaaaatagaaacggcattccttaacgccttggtttatctttctccaaatgtcgagtgcgacctgacttaccataacgtgtatagtagggacccgaactacctgaatctgttcatcattgtgatggagaaccggaatctgcacagccctgaatacctggagatggccttgccactgttctgcaaggccatgtccaaactgccactggcggcacagggcaagctcatcaggctttggtcaaaatacaacgccgatcaaattagacgtatgatggaaacatttcaacagctgataacttataaagtaataagtaatgagttcaattcacgtaacctcgttaacgatgacgatgcgatagtggccgctagtaagtgtctgaagatggtgtattatgcaaacgttgtcggaggggaagtggatactaatcataatgaagaagacgacgaagagccgatccctgaaagttcggagcttactctacaggagctcttaggcgaagagagacgcaacaagaagggaccgcgggtggatcccctggagacagagctaggtgtaaaaactctggattgcaggaaaccactcataccctttgaagaatttattaatgaacctttaaacgaagttctagagatggataaggactatactttctttaaagtggagactgaaaataagtttagcttcatgacttgtcccttcatactcaatgccgtaacgaaaaacctgggcctctattatgacaatcggatacgaatgtactccgaacgcaggatcacggtcctgtactctctggtccagggccagcagctgaatccatatttaaggctgaaagtgagaagagatcacatcattgacgatgccctggtcagacttgagatgatcgccatggagaacccagcagatctgaaaaaacagctctatgttgagtttgaaggcgagcaaggagtggacgagggcggcgtcagcaaagaatttttccagctggtcgtcgaagagatcttcaatcccgacatcggcatgtttacctacgatgaatcaacgaagttattctggttcaatccaagttccttcgagaccgagggccagttcaccttaatcggaatagtgttggggttagctatttacaataattgtatcctagacgtccactttcccatggtggtatatcgcaagcttatgggtaaaaagggcacgttcagagatctaggggacagccacccagtgctgtatcagtctctgaaagatctcttagagtacgagggcaacgtggaagacgacatgatgataacgttccaaatatcccagactgacctgttcgggaacccgatgatgtacgaccttaaagaaaatggagataagatccccattaccaatgaaaaccggaaggaattcgtgaatttatatagcgattacattttgaataaatcggtggaaaaacaatttaaagcctttcggagaggatttcacatggtcactaacgaatctccactgaaatatctgtttcggcctgaagagatagaactcctgatttgcggatctcgcaacttggatttccaggcactggaggaaactaccgagtatgacggaggttacacccgtgactccgttttaatcagggagttctgggaaatagtgcatagcttcaccgatgagcagaagcgcctgttcctgcagttcaccacaggaaccgatcgcgcccctgtcgggggcttgggcaagctcaagatgatcatagcgaagaatgggccagacactgaacggctgccaaccagtcatacctgctttaatgttctactcttgccagaatactccagtaaagaaaaactcaaagagcggctgttgaaggcaatcacttatgcaaaaggatttggaatgctgtag

SEQ ID NO: 132371 - DNA, 75 bp, synthetic construct
  misc_feature 1..75: note = Description of Artificial Sequence: Synthetic coding sequence
  source 1..75: mol_type = other DNA
atgactagggaccagaatggaacctgggaaatggagtccaacgaaaattttgaaggctatatgaaggcactctag

SEQ ID NO: 132372 - DNA, 312 bp, synthetic construct
  misc_feature 1..312: note = Description of Artificial Sequence: Synthetic coding sequence
  source 1..312: mol_type = other DNA
atgacgcgtgatcaaaacgggacgtgggaaatggaaagcaatgagaacttcgaaggttacatgaaggccctggatattgattttgcaacacgcaagatcgctgtgagacttacgcagactaaggtaattgaccaggacggagacaactttaaaaccaaaacgacttctacgttcagaaactacgatgtggactttactgttggcgttgaatttgatgagtacactaaatctttggacaatcggcacgtaaaggcactcgttacatgggagggagacgtgctggtgtgcgttcaaaaaggcgaaaaggaatag

SEQ ID NO: 132373 - DNA, 1494 bp, synthetic construct
  misc_feature 1..1494: note = Description of Artificial Sequence: Synthetic coding sequence
  source 1..1494: mol_type = other DNA
atgggtctgcctgcattgttggcttcagctctgtgcacattcgtgctccctttactattgttcctcgctgccattaagctatgggatctctactgtgtgtctggtcgggataggagttgtgcactgcccctgccgccaggcaccatgggctttccttttttcggggagaccttgcagatggtgctgcagcggcggaagtttctccagatgaaacggcgtaagtatggtttcatttataagacccatctgttcggccgccctaccgtgcgggtcatgggtgcagataacgttcgcaggatcttgcttggcgagcatcgcctggtaagcgtccattggcctgcctcagtaaggacgatcctgggatcaggatgcttgagtaatctgcacgatagctcacacaagcagcgcaaaaaagtgattatgcgcgcgttcagtcgggaagccctggaatgttatgtgcctgtgattacagaggaagtcggaagctcgctcgagcaatggctctcctgtggagaacgcggactgctggtgtaccctgaggttaaacgtctgatgtttcgcatcgccatgagaatcctgctcggttgcgagccacagctggcaggagacggagattcagagcagcagctggtggaagcctttgaggaaatgacgcgcaatctgttttccctgcccatcgatgtgcccttcagcgggctctatcgaggaatgaaggcaagaaatctgatccatgccaggattgagcagaacattagggctaagatctgcggcctgcgggccagcgaggccggacagggctgcaaggatgcattgcagctcctcatagagcactcctgggagcgtggtgaacgtctggacatgcaagcgctgaagcaatctagcaccgagctgctgttcgggggccacgagacgacagcatccgcagcgacgtccctgattacctacctagggctgtaccctcacgtgcttcagaaggtgagggaagagctcaaatcaaaaggtttgctgtgtaagtctaatcaggataacaaattggatatggagattctcgagcagctgaagtacattggatgtgtaattaaagagactctacgcctcaatccacctgtgcctgggggcttccgggttgctttaaaaaccttcgagcttaatggttatcaaattcccaaaggctggaacgtcatctactcaatctgtgacactcatgacgtcgccgaaatcttcacgaacaaagaggaatttaatcccgatcgattcatgttgcctcatccggaagacgcgagcaggttttcttttataccattcgggggagggcttcggtcctgcgttggaaaggagttcgcaaaaatccttctcaagatttttaccgtcgaactggcccggcactgcgactggcagcttctcaatggtcctcctaccatgaaaacttctcccaccgtttatcccgtggacaacctcccagcccgcttcactcacttccacggcgagatttag

SEQ ID NO: 132374 - DNA, 600 bp, synthetic construct
  misc_feature 1..600: note = Description of Artificial Sequence: Synthetic coding sequence
  source 1..600: mol_type = other DNA
atgaactattccaaaatcccagcccaggttgatctgaggcgacagactgaacgtgattgtcgggtgtccagcttcagagtcaaagagaattttgataaggctagattcagtggtacatggtacgccatggccaagaaggacccggaaggcctgttccttcaggacaacatagtggccgaattctccgttgacgagaccggacagatgtctgccaccgctaaaggccgggttcggctgctgaataattgggatgtttgcgcagatatggtcggaacatttactgataccgaagacccggctaaattcaagatgaagtattggggcgtggccagtttcctacagaaaggaaacgatgaccattggattgtggacaccgactacgatacctacgccgtgcagtactcctgtcgcctcctgaatttagacgggacatgcgccgattcctatagtttcgtgttctccagagaccctaatggtctgcccccagaagcacaaaagatcgttaggcagcgacaggaggagctgtgcctggctcggcagtatcgattgatagtgcacaacggatactgcgatggcaggtccgaaagaaacctgctatag

SEQ ID NO: 132375 - DNA, 606 bp, synthetic construct
  misc_feature 1..606: note = Description of Artificial Sequence: Synthetic coding sequence
  source 1..606: mol_type = other DNA
atgaaatgggtgtgggcccttctgttactcgcagctctgggctccggtcgtgccgagagagattgtagagtttccagcttccgcgtaaaagagaactttgataaggcaagatttagcggtacgtggtacgccatggctaaaaaggaccctgagggtctgtttcttcaggataacatcgtagcagaattttctgtggatgagactggacagatgagcgcaactgccaagggtagggttcgtcttttgaacaactgggatgtgtgcgctgacatggtgggaaccttcactgataccgaagatccggcaaaattcaagatgaaatattggggggtggccagttttttgcaaaaaggtaatgatgatcactggattgtggacaccgattacgacacgtacgccgtccagtattcatgtaggcttttaaatctggacggaacgtgtgctgattcctattcttttgtgttttcacgcgatcctaacgggctgcctccagaagcacaaaaaatcgtacggcaacgccaggaggagctgtgtcttgccaggcagtatcgcttgatagtgcataatggatactgtgatggaaggtccgagcggaacctcctctag

SEQ ID NO: 132376 - DNA, 606 bp, synthetic construct
  misc_feature 1..606: note = Description of Artificial Sequence: Synthetic coding sequence
  source 1..606: mol_type = other DNA
atgaaatgggtatgggccctcctgctgctcgcggcactcggcagcggtcgcgctgaaagagattgccgggtctcctccttccgagtcaaggagaactttgacaaggctcgtttctctgggacctggtatgccatggcaaagaaagatcccgagggtttatttcttcaagacaacattgtggccgagttctccgttgatgagacgggccagatgagcgccaccgcgaaaggccgagtgcggcttttgaataactgggatgtgtgcgctgatatggtcggcacattcacagacaccgaggaccctgccaagtttaaaatgaagtactggggcgtggcatcctttctgcagaagggaaatgacgaccattggatcgtggacacagactacgatacctacgctgtgcaatactcctgccgactgctcaacttggatggaacctgcgccgatagctacagcttcgttttctcaagagatccaaatggactgcctcctgaagcccagaagatcgtcaggcagcgacaggaagagctgtgtctcgcgagacaatatcgactgatcgtgcacaacggatactgtgacggcaggtcagaaaggaatctgctgtag

SEQ ID NO: 132377 - DNA, 600 bp, synthetic construct
  misc_feature 1..600: note = Description of Artificial Sequence: Synthetic coding sequence
  source 1..600: mol_type = other DNA
atgaactactctaagatcccagctcaggtcgacctccgcagacaggctgagcgagattgccgcgtgagctcgttccgggtgaaggaaaatttcgacaaagcacgtttctccggaacgtggtacgctatggctaaaaaggacccagagggactgtttttacaagataacatagttgccgagttttctgtagatgaaaccggacagatgagcgccactgctaaggggagagttcggctgctgaataattgggacgtttgtgccgacatggttggcactttcactgatacggaagatcccgcgaagtttaagatgaaatactggggcgtggcaagcttcctgcagaaaggtaacgacgatcattggatcgtcgatacggattacgacacatatgcagttcaatattcatgtagactcctcaacctggatggtacctgtgctgacagttattctttcgtcttttctcgagatccaaacggccttcctcccgaggctcagaaaattgtgaggcagaggcaggaggagctctgtttggctcgtcagtataggctcattgtgcataatgggtactgcgatggccggtctgaacggaatctgctgtag

SEQ ID NO: 132378 - DNA, 408 bp, synthetic construct
  misc_feature 1..408: note = Description of Artificial Sequence: Synthetic coding sequence
  source 1..408: mol_type = other DNA
atgcccccgaatctgactgggtattaccgcttcgttagtcagaagaacatggaggactacctccaggccctgaacatcagtcttgctgttcggaagattgcattacttctcaagcccgacaaggagattgagcatcagggcaaccacatgacggtacggaccctctccaccttccggaattatactgtccagttcgacgtgggcgtggagttcgaagaggatctaagatcagtggacggaaggaagtgccagacgatcgtcacctgggaagaagagcatctggtctgtgtgcagaaaggagaggtccctaaccgcggctggaggcattggctcgaaggtgaaatgctttatctcgaattgactgctagggatgctgtgtgtgagcaggtttttagaaaggtacgctag

SEQ ID NO: 132379 - DNA, 1026 bp, synthetic construct
  misc_feature 1..1026: note = Description of Artificial Sequence: Synthetic coding sequence
  source 1..1026: mol_type = other DNA
atgaacatcgtcgtagaatttttcgtggttaccttcaaagtgttatgggccttcgtcctggccgccgctcgctggctcgtgaggccaaaagaaaaatccgtggctggacaggtttgcctgatcactggcgcgggaagcgggctggggagactgtttgcactcgagtttgcccgccggcgtgcgttactagtgctgtgggacatcaatacacagtccaacgaagagaccgccggcatggtacggcatatatacagagacttggaagccgctgacgcggccgccttgcaggcgggcaacggtgaggaagaaatactgcctcattgcaatttgcaggtgttcacgtacacgtgcgacgttggcaaaagggaaaacgtctacctgaccgccgagagggtccggaaggaggtcggagaagtttccgtgctggtcaataacgcgggcgttgtgtcaggccaccatttgcttgagtgcccggacgagctcattgaaagaaccatgatggttaattgtcacgcccacttctggaccacaaaggcatttctcccaaccatgttagagattaatcacgggcacattgttactgtcgctagctctctcggcctcttttccacagccggtgtggaagactattgtgccagcaaattcggtgtcgtgggctttcatgaaagcctctcacatgagttgaaggcggctgaaaaggacggcattaagacaaccctggtgtgtccatatctggtggacaccgggatgttccgagggtgtcgaattcggaaggaaattgaaccttttctacccccactgaagcctgactattgtgttaaacaggctatgaaggccatcctcaccgaccaacccatgatatgcacaccccgacttatgtacatagtgactttcatgaaatctatcctcccattcgaagcggttgtctgtatgtacagattcctaggcgctgacaagtgtatgtatccgttcattgcccagaggaagcaggctactaacaacaatgaggctaagaatgggatatag

SEQ ID NO: 132380 - DNA, 957 bp, synthetic construct
  misc_feature 1..957: note = Description of Artificial Sequence: Synthetic coding sequence
  source 1..957: mol_type = other DNA
atggtggaattgatgttccccctcctgctgctgcttctgccttttctcctgtatatggcagcccctcagattcggaagatgttgtcttcaggcgtctgcacaagcactgtgcagttgccagggaaagtggtagtcgtgactggcgccaacacgggcatcgggaaggaaacagccaaagagctggcccagcggggtgcaagagtgtacctcgcttgtcgggacgtggagaaaggggaattggtcgccaaggagatccagactactaccggcaatcagcaagttcttgtacgtaaattggacctgagcgacactaaatcaattagggcctttgccaaagggtttctagctgaagaaaaacacctgcacgtgttgatcaacaacgccggagtgatgatgtgcccttacagcaagactgctgacggattcgaaatgcatatcggagtaaaccatctgggccacttcttactcacccacctgctcctcgagaaattgaaggaatctgcgcccagcagaatcgttaacgtcagttctctggcccatcacctggggagaattcacttccacaatctgcagggagaaaagttctacaacgctgggcttgcctattgtcactcaaagctggcaaatattcttttcacccaagaactggcccggaggctcaaaggaagcggcgtaacaacttattccgtgcaccccggaaccgtccagagcgagctggtgcggcacagcagcttcatgaggtggatgtggtggctcttcagttttttcatcaagacccctcaacagggcgcacagaccagtctgcactgtgcactaaccgagggcctggagatactcagcgggaatcatttttcagattgtcacgtagcctgggtgtctgcccaggcccgtaacgaaacaattgctcggaggctatgggatgtttcctgtgatctcttggggttgccaatcgattag

SEQ ID NO: 132381 - DNA, 918 bp, synthetic construct
  misc_feature 1..918: note = Description of Artificial Sequence: Synthetic coding sequence
  source 1..918: mol_type = other DNA
atggtggagcttatgttccctctgctgttgctccttcttcctttcctactgtacatggctgctccccaaatacggaaaatgctttcaagcggggtttgtacgtccacagttcagctcccaggtaaggtcgtggtagtaacaggcgctaacacaggcgctagggtgtaccttgcctgccgtgacgtggaaaaaggcgagctggtggcaaaggagatccagacgactacgggcaatcagcaggtgcttgtaaggaagctggatctgtcagacacaaagtcaatccgcgcattcgccaagggttttctggcagaggagaaacacttgcacgtattgattaacaacgctggggtcatgatgtgtccatattcaaaaacagctgatgggtttgagatgcacatcggggtaaaccatctaggacactttctactgactcatctgttgctggagaagctgaaggagtccgctccaagccgcatcgtgaatgtctcatctctggcccaccatttaggccgcatccattttcacaacctgcagggggagaagttttataacgcagggctggcctattgccactccaagctggccaacattctgttcacgcaggagctcgcacgaaggctgaaaggctctggtgtgacgacttattcagtacatcctggcaccgtccagagcgaacttgtgagacattcttcattcatgagatggatgtggtggctgttctccttttttatcaagaccccccagcagggcgcccagacaagcctgcactgtgccctgacagaaggattagagattcttagcggaaaccattttagtgactgtcatgtggcttgggtgtccgcccaggctaggaatgaaacgatcgcccgcaggctgtgggatgtgtcctgcgatttgttgggcctgcctatcgattag

SEQ ID NO: 132382 - DNA, 951 bp, synthetic construct
  misc_feature 1..951: note = Description of Artificial Sequence: Synthetic coding sequence
  source 1..951: mol_type = other DNA
atgcttgtgaccctaggcctcctcacttccttcttcagctttctttacatggtagcgccctccattcgcaagttctttgctgggggcgtgtgtagaaccaacgtgcagctgcccggcaaggtggttgtgatcactggggccaacacgggaattggcaaagaaacggctagagagctcgcctctcgaggcgctcgagtctatatcgcatgccgagacgtcctcaagggagagtctgctgcatcagaaatcagggtagataccaagaatagccaggtgctggtgcgcaagctggatctgtcagacaccaaatctatccgtgcatttgcagagggtttcttggctgaggaaaagcagcttcacattttgattaacaacgcgggagtgatgatgtgcccttactctaagacagctgatggatttgagacgcacttaggagttaatcatctcggccattttctgctcacctatctgctcctcgagagacttaaagtctcagctcctgcgcgtgtcgttaatgttagctccgtggcccatcacattggcaagattccatttcacgacctacagtctgagaaacgctacagtaggggcttcgcgtactgtcacagcaaactggcaaacgtgctgtttactcgcgaactggccaagcgcctgcaggggaccggcgttacaacttacgcggtccaccctggtgtggtgcggtccgagcttgttcgccactcatccctgttgtgcctactgtggcggctgttctcaccgtttgtgaaaacagcaagagaaggggcgcaaacatcactgcactgtgcattggcagagggtttagaaccgctcagcggcaagtacttcagcgactgcaagaggacatgggttagtccacgcgctcggaataataagacagctgaacggctttggaatgtgtcctgtgagcttctgggaattcgctgggagtag

SEQ ID NO: 132383 - DNA, 951 bp, synthetic construct
  misc_feature 1..951: note = Description of Artificial Sequence: Synthetic coding sequence
  source 1..951: mol_type = other DNA
atgttagtgacattgggcctgctgacgtcttttttttcctttctgtacatggtcgctccttccatcaggaagttctttgcaggcggcgtgtgccgcactaacgttcaactgcctggcaaggtggtggtgatcactggcgctaatacaggaatcgggaaggaaacggcccgagagctggcctctaggggagcgagggtctatatcgcctgccgagatgtactgaaaggtgagtccgccgcttctgagatccgggtggatacaaagaactctcaggtactggtcaggaagctggacttgtccgatactaagtccatacgggcatttgctgagggctttctagcggaagaaaagcagctccacatcctcatcaacaatgctggcgtgatgatgtgtccctacagcaaaacagctgatgggttcgaaacccacctgggtgtcaaccatcttggacacttcctcttgacctacctccttttggagagactcaaggtatcggctcctgctcgagtcgtgaacgtatcaagcgtcgcacatcacataggaaagatcccattccacgacctccagagcgagaaaagatactcccgagggttcgcatactgtcacagtaagctcgccaatgtcctttttacaagggagctcgcgaagagattacaggggactggagtgaccacatacgctgtacacccaggtgtcgtaagaagcgagctcgtgaggcacagctctctgctgtgcctgctgtggcgtctcttttcccccttcgtcaaaaccgctagggaaggggcccagaccagccttcactgcgccctcgccgagggactggagccactctcgggcaaatactttagcgattgtaagcgaacttgggtgagcccccgagcaaggaataataaaacagctgagcgtctgtggaatgtcagttgcgaattgctggggattcgctgggaatag

SEQ ID NO: 132384 - DNA, 951 bp, synthetic construct
  misc_feature 1..951: note = Description of Artificial Sequence: Synthetic coding sequence
  source 1..951: mol_type = other DNA
atgctggtgactctcggtttactaactagctttttttcgtttttgtacatggttgccccctccattcggaaattttttgcgggaggtgtatgccggaccaacgtgcagctgcctggtaaagttgtcgttattactggcgccaacaccggcataggaaaggagacggcccgcgaactcgcgagccggggagccagagtatacattgcttgtcgcgatgttctgaagggagagtctgcggcctccgaaatccgcgtggacactaaaaactcacaagttctcgtccgtaagctcgacctgtcagatacaaagtcaatccgggctttcgccgagggcttcctagcagaggagaagcaactccatattttgattaacaatgccggagtgatgatgtgtccatacagtaaaactgccgacggttttgaaactcatctcggcgtgaatcacctggggcactttttgttgacttatctcctgctcgagaggctgaaggtgtctgcgccggcgcgggtggtgaacgtgagctctgtcgcccaccacattggaaaaatcccatttcacgacctgcagtccgagaagcgctacagccgtgggtttgcctattgtcacagtaaactggccaacgtgctattcactcgtgagttagcgaagcgcttgcagggaaccggagtgactacctatgctgtccaccccggggttgtccgcagcgaattagtgcggcattcttccttgctctgccttctttggcggctcttttcaccgttcgtcaaaacagccagagagggagcacagacctccctgcactgtgcgctggccgaaggattggagccattaagtggaaaatacttttctgactgcaagcgtacatgggtgtctcctagggcaagaaataataagactgcggagagactgtggaacgtaagctgtgagttgttaggtatacgttgggagtag

SEQ ID NO: 132385 - DNA, 957 bp, synthetic construct
  misc_feature 1..957: note = Description of Artificial Sequence: Synthetic coding sequence
  source 1..957: mol_type = other DNA
atgtggctcccactcctcctgggagccctgctgtgggcggtgctatggctattaagggatagacagtcactccccgcaagcaacgcctttgtgtttatcacaggttgtgacagcggattcgggagactgctggctctgcagcttgaccagcgcgggttccgcgtgctcgcctcttgcttgaccccttccggcgcggaggacttgcagcgagtcgcctcttcccgactgcacaccaccctgctcgatatcacagaccctcagagtgtacagcaggcagccaagtgggtcgagatgcacgtcaaggaggcaggtctgttcggactcgtgaataatgctggagtagccggaatcatcggtcccacaccctggctgacacgagacgactttcagcgcgtgctgaatgttaacacgatgggccccatcggggtgaccttggctctattaccccttcttcaacaggctcgagggcgggtcataaacatcacatcggtgctgggcagattggccgccaatggcggaggctactgcgtgtcgaagttcgggctggaagcctttagcgacagtctacggagagacgtggctcacttcggcatcagggtttcgatcgttgagccagggttcttcagaactcccgtcacaaacctggaatccctggaaaaaaccttgcaagcttgttgggcccgcttgccgcctgctacccaggcgcactacggaggcgctttcctcaccaagtacctgaaaatgcagcagcgcatcatgaatctgatctgcgatcccgaccttacaaaggtgtcccgatgccttgagcacgccctgactgcgagacatccccgtacacgttactcccctggctgggacgctaagctgctgtggctgcccgcaagctacctgcctgcctccctcgtggatgctgtgctgacctgggtcctcccgaagccggctcaggccgtctactag

SEQ ID NO: 132386 - DNA, 957 bp, synthetic construct
  misc_feature 1..957: note = Description of Artificial Sequence: Synthetic coding sequence
  source 1..957: mol_type = other DNA
atgtggttgcctctgctgttgggggcgctactgtgggccgtcctctggctcttacgcgacagacagtctctccctgcatcaaatgcattcgtgttcattaccggttgcgattcaggatttggcagactgctggcactgcagctggaccagcgggggttcagagtgctcgcaagctgtctgacaccttccggcgcagaggaccttcagagggtggcctcaagcagactgcatactacccttcttgatattaccgatccacagagcgtgcagcaggccgcaaaatgggtggagatgcacgtgaaggaagcagggcttttcggtctcgtgaataatgccggagtagctggaatcatcggccctactccttggctcacaagggatgacttccaaagagtgctcaatgttaacactatggggcctattggggtgacactggccctcctacctctgttgcagcaggcgcggggccgggtgataaacatcacaagcgtcctgggaagactcgcagcgaacggtggcggatactgcgtgagtaagttcgggctggaggccttctccgatagtcttcgcagagatgtggcacacttcggaatacgcgtgagtatcgttgagccaggttttttccggacaccagtaacaaatctggaaagccttgaaaagaccctgcaagcttgctgggcacgtctgcctccagcgacacaggctcattatgggggcgccttcctgactaaataccttaaaatgcaacagaggatcatgaacctcatttgtgatccagatctgacgaaagtaagcaggtgtctggagcacgcattgacagctcgacacccacgaacccgttattcaccaggatgggacgccaagcttctgtggctccccgcctcgtacctgcccgcctctttagtcgatgcagttctgacgtgggtgttgccaaaacccgcccaggccgtatattag

SEQ ID NO: 132387 - DNA, 936 bp, synthetic construct
  misc_feature 1..936: note = Description of Artificial Sequence: Synthetic coding sequence
  source 1..936: mol_type = other DNA
atggccgctgccccccgcaccgtgctaatttccggatgcagctccgggattggtctggagcttgcagtccagttggcacacgacccaaagaagaggtatcaggttgttgccactatgcgggatctgggaaagaaagagaccctggaggccgccgccggcgaagcacttggtcagacactgacagtggcccagctggacgtgtgctcagatgaatcagtggcccagtgtttgtcatgcattcagggcgaggttgacgtgctcgttaacaacgcagggatgggcctggtcgggcctctcgagggtttgtctttagccgccatgcagaacgttttcgatacgaattttttcggcgccgtccgcctggtgaaggccgtgctccctggaatgaagagacgcaggcagggtcacattgtggtaatctcaagcgttatgggattacagggcgttattttcaatgatgtctacgcggccagtaaatttgcacttgaggggttctttgagtcactggccattcagctgttacagtttaatatatttatcagcttggttgagcctggtcctgtggtaacagaattcgaggggaagcttctcgcccaggtgtccatggctgagtttcccggcactgatcccgagaccttgcattacttccgcgatctgtatctgccggcatccagaaagctgttttgctccgtggggcagaatccacaggatgttgtacaggccatagttaacgtgataagctccacgcgacccccactgaggagacagaccaacatcaggtattcccccctgacaaccctcaaaactgtggactcgtccggatctctgtacgttcgaactacacatcgactgctcttcaggtgtccccgacttttaaatctcggacttcagtgccttagctgcggatgtctgcctacccgggtccgacccaggtag

SEQ ID NO: 132388 - DNA, 675 bp, synthetic construct
  misc_feature 1..675: note = Description of Artificial Sequence: Synthetic coding sequence
  source 1..675: mol_type = other DNA
atgagccgcaagatcgaaggattcttgctgcttttactgtttggctatgaggccaccctcgggctgtcctccaccgaagatgaaggggaagatccctggtaccagaaggcttgtaagtgtgactgtcagggaggccctaacgctctctggagcgccggagccacgagcctggattgcatccctgaatgcccatatcataaaccactcgggttcgagtccggggaggtgacaccggaccagatcacatgcagtaatcccgagcagtacgtgggttggtactcaagctggacagcgaacaaggcacgcctgaattcccaaggcttcgggtgcgcttggttgtccaagttccaggattcatcacagtggctccagattgacctcaaagaaatcaaggtgattagcggaattctgacccagggaagatgtgacatcgacgagtggatgacaaaatacagcgttcaatacaggacagatgagaggctgaattggatttattacaaagatcagacaggcaataatcgggtattctatggaaatagtgatcgtacctcaacagtgcagaacctgctgcgacccccgatcatttccaggttcatccggttaatccccctgggctggcatgtgagaattgcaattagaatggagttactggaatgcgtgtcaaaatgcgcgtag

SEQ ID NO: 132389 - DNA, 4077 bp, synthetic construct
  misc_feature 1..4077: note = Description of Artificial Sequence: Synthetic coding sequence
  source 1..4077: mol_type = other DNA
atgatcgaaccaagcgaggatagcttcgaaaccatgatggagcacaaaaatccgagttccaagcaaatggagagttctgagggctccagcaatacgacagaggctacctctggttccggggttcggggcgaggcaggccccgcttccggccccgctcaagagaagaaagagcctcccagtggacccctgcaggagatggaggagctgcctactgacctgctccaggacatggaggagccctcttccgggcccagaaaagagattgaagacccacccaacgaccttctgcaggacctggaggagtcatgcaatggctctcaccaggctcggggagatccgctctccggagcaagcgaccgcatgaaggaggccagtgtaaatccatccggcgcgcgcgaagaacaggaagctcataccgacctgaaggagagcgggagagaggagacaccacaggaacagaatcaaaccgaacattccacagcagaattgatggcaatggtgcgaagcatcatttcattgtattttcggatgcaagatctaaaggagcaacagagggttgccgaagagatcttgataaagggcataaacgccgggcaattgcctgccccaaagcatttctcgggagatcggagagagttccacgaattcatcgtgctgtgccagctcacactgcagagctatccaagaatgttctacaatgatcgcctgcgcgtgggatacgtaatcaatcatttgtctggtttggcccttgagtgggctaaagctttgcttcaggagaacagccctctgattggggacttccccgcattcttagaagcaatgtccgaggtttttgaataccggcaggccctcagggtggccgaagaagctatgttcaccatccgtcagggcggcaggtctgctactgaatatatcgatgaatttcagagcctagtgccgatcttagggtggcctgatgaagtcctccaggcacatctctgtcagggacttaacgaggagatccgacactacctattccgagtcccccagcctgatagcttggactctctgatagtgttgatcctccaaatagaagaaaaattggccgagcgcagggccatgctgcggttacctcccgaagcaagaccacggaatctcacttggatagactcaccagctccggaacggtggatggtctctagctggctgccaagcgaggtgcatcctgacatcaacagagcccacctcttcctactcctcatggttagggtgaatccctaccacagcgtggcagttcaggcactggtcgattcaggagccgacggcaactttatggacgagaagttcgcccaggagcactacgtggaactttacgaaaagccataccctcagcccgtgcagtccgtggatggatctttaattggaaatgaacctgtctggttgtatacagaaccgctagtttgcattcatcagaatcatcaggagagtatcgagttcgatatagtgcccagtccaaattttagtgtggtgctgggtatccggtggctcagagtgcacgcccccgaagtggactggatcaaagggagatgtacctttcactcgccttattgcctcaagaactgtttcaggccccctccgccctgcattgccttggagaggcacggaatgtccctcctgccaggcctgccccacccctactccgacttggccgacgtttttaaccccaaagaagcggatgacgagactagcgatcaaccgtcatccgacgggtccgacgacctctcagagtccgagcctagtgagcttcaacaggctggggactctgatcattccgaaaccttttatgaatgccccagtacagcaccttgggaacccgttggtgcacgcatgcaagagcgcgccagactgcaagaagaatattgggatctccaggatatgctcacgaatcgacaggattacatccagatgatacctgaactctttgaccaattgcacggggccgagtggttcacaaagttagagttgcgcggcacaatcgtggaagagagcgtgaatggccatcggaccgaggatgtgtggaaagctgctttcggcttggagctagaggagatgaaatcctatcaaccgtttgcgttatctcccgatcccatcatacctcaaaacgtgatccactttatcttgaaggacatgcttgggttcttcgtgctgagctatggccaggaagtcctcatctatagtatgtctcaagaagaacacctccatcatgtccgccaggtcctggtgagatttagacatcacaatgtctactgcagtctggacaaatcgcagtttcacagacagaccgtggagttccttgggttcgttgtaactccgaagggggtcaagctcaacaagaatgtgatgacaatcatcacgggatatcctacccctggctcaaagttgtcactgagaaactttatcgagtttgtttttccctacaggcatttcgtcgagcgtttcagcatcatcgccgaacccctggtgcgtcagctcctatcttcataccaattttactggggcgtcgaagaacaagaagcatttgagtgcctaaagcgggcgtttcggaaggctccgctgttacaccatccaaagcctcagaatcccttttacttggagaccggagtgaccggtacagctctgcatgcttccctgatccagattgatgaccagacggggaaacgcgcatgctgtgcattctactcccgaaacatcagtcctattgaagtggaatattcccaagcggagatgaagatattgcctattagggctgctttcatggtctggtgtcgctacctggaaaatactgaagagcctatcatgattctgctgaacaccgaagaccttgcctccctgaataatgacaggttaacagtcttactacccgggcactgggttttctttttttctcacttcaatttcgacgtgatggaactgcccgaacaggacggcggtcgcgctttaccgccagtgaggaatttgagatggaggcgtgctttccaaaggaacactgccgcacggcagacacttttgttggcctctagaggatttcccagagacccatctactgaatccggggaggaagagaatgaagaacaggacgaattgaatgagcagatattaagacaggaactgttggctatgattcccattgaccagatcctcaatagtttcctggcacacttctccatggcccagattcgcgctgtgatactgcatttttttcgcggcctcctatattggaaaaatacattggcactggccgccatccttgtcctgctgagggtgagacagtgcctgagcttgaggccggcgcctgccatgcgagttgctcggccccagccacaaaggtctctccgcctgatccttgattcatctttaatcgccggctcctctatcactactgctatcactcagctacttacccagatgcccgccttggtgggggcaaacaccatccccgcgcaggaactagcggaactgttccttggcccaggaagatggcagaggaatgcgcttcacagccaagcccatcgtgggcttcagttcacccccgggttttggctgacactgtgcgaattttttggagtgcgcgtgaccccacaagaaggccacctgcctgctttgaggcaaaacagatatctcgagctgcatgtcgtcggggatgaagacgtggtgcttagggaggccctgcaggacgatctgcagcggtataggcagtgcgggctgcatgatggcttacaagacacctcacaggataagcaggataacgatgtccaggaggccccccccagtcacaccgccgcgacccacccaccgcgccctcgccatttaatggacccacaggtgctggagttcctggggagcagattgctgcacattcattctgccgatggacagttgcatctgctgagccgggaacaagcagccagagcattgtctcagttcttaacacttatctataggagggcgctgcctattccggcctgggagagccagccacgcgaacaagcgaggctcgaggagctgcccgatgaggatgaggatgctaaccttgattag

SEQ ID NO: 132390 - DNA, 9393 bp, synthetic construct
  misc_feature 1..9393: note = Description of Artificial Sequence: Synthetic coding sequence
  source 1..9393: mol_type = other DNA
atgttttcagttagaatcgtcaccgccgactattacatggctagtccattacagggcctggacacatgccaatccccattgacgcaagcgccagtgaagaaggtacccgtcgtacgtgtctttggagcgactcccgccggacaaaagacgtgcttgcatctgcatgggattttcccatacctgtacgtgccctacgatggttatggacaacaacccgagagctacctgtcgcaaatggcattctctatcgatcgtgcactcaacgtggctttgggaaaccctagcagtacagcacagcatgtgtttaaggtctccctcgtcagcggaatgccattctacggctatcatgagaaggagcggcacttcatgaagatctacctgtataatcccactatggttaagcggatttgcgagcttctccagtctggagcgataatgaacaaattctatcagccacacgaagcccatataccctacctgctgcaactgttcattgactacaacttatatgggatgaatttgattaatctggccgcagtgaagttcaggaaggcgaggaggaagagcaataccctgcacgccacaggatcatgcaagaatcatctcagcggcaatagtcttgccgacacactgttcaggtgggagcaggacgagattccatcctccttgattctggaaggcgtggaaccccaatccacttgcgagctggaggtggatgcggtggcagcagatattctaaatcgactggacatcgaggctcagattggtgggaaccctgggctgcaggctatttgggaggatgaaaagcagcgccgcagaaaccggaatgagacaagccagatgtcgcagcccgagtcccaggaccacaggttcgtacctgctaccgaatctgaaaagaaattccagaaacgattacaagagatcctcaaacaaaacgacttttctgttacgctgagcggttctgtggattattctgatggaagtcaggagttttctgccgagttgacactgcattccgaggtgctgagtcctgaaatgctccagtgtacacctgccaacatggtcgaagtacacaaagacaaagagtcgtctaaaggccacacccgtcacaaagtcgaagaggcgctcattaacgaagaggccatcctgaatttgatggaaaattcacagacattccagccacttacccaaaggttatctgagtcacccgtgttcatggactcttctcccgacgaagcactggttcacttgttggccggcctcgaatccgacggatacagaggtgagcgtaacaggatgcctagcccctgcagaagcttcggcaacaacaaatatcctcagaacagtgatgacgaggaaaatgaaccccaaatcgagaaggaggagatggagctctctctagttatgagccagcgctgggatagtaatattgaagagcactgtgctaagaagagaagcctgtgtcgcaatacacatagatcatccaccgaggatgacgacagtagttccggagaggaaatggaatggagcgacaactcacttttgttggccagcctaagtataccccagctggatgggactgccgatgagaacagcgacaatccactgaacaacgagaattcaaggacacactctagtgttattgcaacatccaagttgtcggttaaacctagtatttttcacaaggatgcggcaactctggaaccttcttcttccgcaaaaatcacctttcagtgcaaacacacaagtgcactctcttctcacgtgctcaataaagaagatttgatagaggacctcagtcagactaataaaaataccgagaaagggttagacaacagtgttacatctttcaccaacgaaagtacatactccatgaagtaccctggatcgctgtctagcacggtgcactctgaaaactctcacaaagagaattctaaaaaggaaatcctgcctgtcagtagctgcgagtctagcatcttcgactatgaagaggatattcccagcgtgacccgacaggtgccttccagaaagtacaccaatatccgaaagatcgagaaagattcacccttcattcacatgcacaggcatccgaacgaaaataccctgggaaagaactccttcaacttttccgacttaaaccactcaaagaacaaggtgtcctccgaagggaatgaaaagggaaattccacagccctttcctctctcttcccatcctccttcaccgagaattgtgagctattgtcctgctcaggcgagaatagaactatggtccatagccttaatagcaccgcggatgagtctgggctgaataagctgaaaatcaggtatgaggagttccaggagcacaaaaccgaaaagcctagcctgagtcaacaggctgcacattacatgttcttcccatccgtggtgctgtccaactgtctgaccaggccacagaaactgtcccccgtcacatataaattgcagccaggtaataaaccgagtcgcctgaaactcaacaaacgcaagctagcaggacatcaggagaccagcaccaagtcctccgaaactgggagcacaaaggataattttatccaaaataatccctgtaatagtaatcccgaaaaggataatgccttagccagtgatttaacgaagaccacacggggggccttcgaaaataaaacccctaccgatgggtttattgattgtcacttcggagatggtactctggaaaccgagcagtccttcggactgtacggcaataagtacactctcagagccaagcgtaaagttaactacgagactgaagactcagaatccagcttcgtgacccacaactccaagatcagcctaccacacccaatggagattggtgagtctttagatggcacattgaagtcacgaaaaagacggaagatgtccaaaaaactaccccctgtaataatcaaatacattataattaataggttccgcggtagaaagaacatgcttgtgaaactggggaagatagacagcaaggagaagcaagtgattctcactgaggagaagatggagctgtacaagaagctggctcctctgaaggatttctggccaaaagttcccgacagcccagctaccaaatatcctatttatcctctgacccctaagaaaagccaccggcgcaaatcaaagcacaagagtgccaaaaagaagacaggaaagcaacagagaactaataacgagaatataaagcgaacgttgagctttagaaaaaagagatctcacgctattctgtccccacctagtccgagctacaatgcagagaccgaggattgcgatctaaactacagtgatgtgatgtctaagctgggtttcttaagtgaacgttccacctcccccattaattcctccccacccaggtgctggagtcctacagatcctagggccgaagagatcatggctgctgccgagaaggaggccatgttattcaaggggcccaacgtctataaaaagacggtgaacagccggattgggaaaacctctcgcgcccgtgcacaaatcaagaagagcaaggcgaaactggcgaacccatcaattgtcacaaagaaacgaaataaacggaaccaaaccaataagctggttgacgacggcaagaagaagcctcgcgccaaacaaaagaccaatgaaaagggcacatctcgaaagcataccacactgaaagatgaaaaaattaaatcccagtctggtgcggaggtcaaattcgtgctcaaacaccagaacgtcagtgagttcgccagcagtagtggggggtctcagctcttgttcaaacagaaagacatgcctctcatggggagcgcagtggaccaccccctctctgcttcactgccgaccggcatcaacgcacaacagaagctgtcaggctgctttagttcattcttggaatccaagaagagcgttgacctccagactttccccagtagtagagacgacttacatccatcagtcgtgtgcaacagcattggccccggggtgtctaagatcaatgtgcagcgccctcacaaccagtccgccatgtttacactcaaggagagcacccttatccaaaaaaacatttttgatctttcaaaccacctctctcaggtggcgcagaatactcagatcagctccggcatgtcctccaagattgaggacaatgccaataacatacagaggaactatctcagttcgatcggcaaactgagcgaatatcgcaacagcctcgaaagcaagttggatcaggcttacacccccaacttcctgcattgcaaagactcacagcaacagattgtgtgtatcgccgagcagagtaagcacagcgaaacgtgttcacccggtaacaccgcttcagaagagtcgcagatgccgaacaactgctttgtcacgagcctgcgaagtcccattaagcagatagcatgggagcagaagcagcggggtttcatattagacatgagcaatttcaaacccgaacgggtgaagccgaggtcactatccgaagccatcagtcagactaaagcgctctcccagtgcaaaaatcgcaacgtaagtacgccgtctgcattcggggagggacagtccggtctggccgtgctgaaagaactgctgcagaaacgacaacagaaggcacagaacgctaatactacgcaggaccctctgtctaataaacaccaaccaaacaagaacatttcaggcagcctcgaacacaacaaggccaataagaggaccaggagtgtgacgagtccccggaagccacgaaccccacggtccacgaagcagaaagagaagatccccaaactgttgaaggtggattccttgaatcttcaaaattcttctcagctagacaattctgtctccgacgattcgcccatcttttttagtgatccaggattcgagtcttgctacagccttgaggacagcctctctccagagcacaactacaatttcgatataaacaccattggacagactggattctgctcattttacagtgggtcccagtttgtcccagcggatcagaacctccctcaaaaattcctcagcgacgccgtgcaagatctgtttcccgggcaggccatcgagaaaaatgaattcctgagtcacgacaatcaaaagtgtgacgaggacaaacaccataccactgattcagcctcctggattcgctccggtacactttcccctgagatttttgaaaaaagtactattgactccaacgaaaaccggcgccacaaccaatggaaaaattcgttccaccctctgactacgagatctaattccatcatggattccttttgcgtgcaacaggcggaagattgtctgtctgaaaaatcccggctgaatcgcagctccgtctcaaaggaggttttcctctcacttcctcagcccaacaatagtgactggattcagggtcacacacgaaaggaaatgggccaaagcttagattccgccaatactagtttcacggcaattctcagctcacccgatggcgagctggtcgatgtcgcttgtgaagatctggaactatacgtgtcccgaaacaatgatatgttaactcccacacccgacagttcaccacggtccaccagcagtccaagccagtctaaaaatggcagcttcacaccacggacagcgaacattctcaagccactgatgtcccccccttctcgtgaggaaatcatggctaccctgctggaccatgatttaagcgaaaccatttatcaggagccattctgcagcaacccctccgatgtgcctgaaaagcccagagagataggaggcaggctgttgatggtagagactcgcttggccaacgatctggcagaatttgagggggacttctccctggagggattgcgtttatggaagactgcattttctgccatgacgcagaaccctagaccaggatccccactgcgctctgggcagggcgtggtaaacaagggctctagcaacagtcccaaaatggtcgaagacaaaaagatcgtgatcatgccctgcaaatgtgctccaagccggcagttggtgcaagtttggctgcaggcaaaggaggagtacgagcggagcaagaagttgcccaagacaaaacctacaggcgtcgttaaaagcgcagaaaatttttccagtagtgtgaaccctgatgacaagcctgtggtcccaccaaagatggacgtgtcaccgtgcatccttcccactactgctcacaccaaagaagacgtggataacagtcaaatcgcgctccaggctcccacgactggctgtagccagaccgcgagtgagagccagatgttgccccccgtcgctagtgcctctgacccagagaaggatgaagacgacgacgacaactactatatcagctatagcagtccggattcccctgtgattcccccgtggcaacaacccattagccccgactctaaggctctgaacggtgacgacaggcccagttcccccgtggaggaactgccatccctggccttcgagaatttcttgaagccgattaaggacggcatccagaagtccccctgttcagagccgcaggagcccctcgtgatctccccgattaatacacgcgcacggaccgggaagtgcgagagtctttgcttccacagcacacccattatccagcggaaactgcttgaacgattgccagaagctcccggactgagtccgctgtccaccgaacctaagactcaaaaactctcaaataaaaaaggaagtaacaccgacaccctgagaagagtactgctgacacaagcaaagaatcaattcgccgcagtaaacacccctcagaaggaaacctcccagatagatggtccttcgttgaacaatacgtatggatttaaagtgagtatccagaacctgcaggaggcaaaggccctccacgaaatccagaatctcacgctgatctcagtcgaattgcacgcacggactcgcagggacttggaaccggaccctgaattcgatccaatctgtgctcttttctactgcatttcttccgataccccgctcccagacacggagaagactgagctcacaggcgttatcgtgatcgataaggataagacagtattctcgcaggatattaggtatcagactccgctcctgatcaggagcgggatcacgggcttggaagtgacctacgcggccgatgagaaagcactctttcacgagatcgctaatatcattaagcggtatgacccggacatcctgctgggctacgagattcaaatgcattcttggggatatctcttgcagagagctgccgctctgtccatcgacttgtgtcgcatgattagtcgggttcccgatgacaagattgaaaatcgctttgccgcagagcgggacgagtacggctcatacaccatgtcagaaattaacatcgttggtagaatcactcttaacctttggcggatcatgcgcaacgaggtcgcccttaccaactacacattcgaaaatgtcagcttccatgtgctgcaccagaggtttccacttttcaccttcagggtcctctccgactggttcgacaataaaacagacctataccgatggaaaatggtagaccactatgtatctagagtgagaggcaatctgcagatgctggaacagctggatctcataggcaagaccagtgagatggcccggctatttggcatccaattccttcatgtgcttacgagaggatcacagtacagggtggaaagtatgatgctccgaatagctaagcccatgaactacattcctgtgacgccgtccgtgcagcaacgatcccagatgcgtgctccacaatgtgtcccattgattatggaaccggagtcaaggttttactcaaacagcgtgctggtcctggattttcaatctttatatccgagtatagttattgcatacaattactgcttcagtacctgcctcggccatgtggaaaatctggggaagtacgatgaattcaagtttggctgtacgagcctccgggtgcctcctgacttgctgtatcaggttcgccacgatataaccgttagccccaatggggtcgcctttgtgaaaccaagcgtaagaaaaggggtgctcccccgcatgctggaagaaatcttgaaaaccagatttatggtcaagcagagcatgaaggcgtacaagcaggaccgggcccttagtcgtatgctggatgcaagacaattggggctaaaacttattgctaatgtcacctttggctacacctctgccaacttctcaggccgtatgccatgtatcgaggtgggggacagcatcgttcacaaggctcgtgaaacccttgagcgggctataaagttggtgaacgatactaaaaagtggggtgctcgggtggtgtacggtgacacagattctatgtttgtgctgctgaaaggtgccactaaggaacaatccttcaaaatcggccaagagattgctgaagccgtgacggcaacaaatcctaaacctgttaaacttaagttcgagaaggtgtatttgccatgcgtgctgcagacaaaaaagcgctatgttggctatatgtatgagacactcgaccagaaggaccctgtgtttgatgcgaaggggattgagactgttagacgcgatagctgtcctgccgtgagcaaaatcctggaaagatctctaaagttgctcttcgaaaccagggatatctcactgattaagcagtacgtgcagcgtcaatgcatgaaattacttgagggtaaagcttctattcaggacttcatcttcgcaaaggaatatcgcggaagcttttcttacaagccaggagcctgcgtgccagcactggaattgactagaaagatgctaacttacgataggagatcggagcctcaggtaggcgaacgcgtgccgtacgtgatcatctacggcactccaggggtcccactgatacaattggtgagaagacctgtggaagtactgcaagatcccactttaaggttaaacgccacctactacataaccaagcagatcctgcctcccttggctcgtattttctcactgattggtatagatgtgttttcatggtaccacgagctgccaagaatccacaaggcaacctcctcctctaggtcggaaccagagggtcggaagggtactatctctcaatactttaccactctgcactgccccgtttgcgatgacctcactcagcatggcatctgctcaaaatgcaggagccagccccagcacgttgcagtaattctcaaccaagaaatccgcgaactggagcgtcagcaagagcaattggtaaagatctgcaaaaactgcactgggtgtttcgaccggcacataccatgcgtctccttgaactgccctgtgctctttaagctgtcgcgtgtcaaccgggagctctcaaaggctccatatctgcggcagcttctagatcaattctag

SEQ ID NO: 132391 - DNA, 9393 bp, synthetic construct
  misc_feature 1..9393: note = Description of Artificial Sequence: Synthetic coding sequence
  source 1..9393: mol_type = other DNA
atgttttctgtaagaattgtgactgccgactactatatggcttcaccactccaggggctggacacatgccaaagcccgctgacccaagctcctgtcaagaaggtgccggtggtgagagtgttcggcgctactcccgcagggcagaaaacctgtctgcacctgcacggtatcttcccttacctctatgtgccttacgatggctacgggcaacagccagagagctatctgtcacagatggcattctctattgacagagcactgaacgtggcactagggaacccgagcagtactgctcagcacgtttttaaagtgagcctagtgtcgggcatgcctttctacggctaccacgagaaagaacgccactttatgaaaatctatctgtataaccctacaatggtcaagagaatttgcgagctgcttcagtctggagccattatgaacaagttttatcaaccacacgaggctcatataccatacctgctgcaactattcatagattataatttgtacggcatgaacctgatcaacctcgctgctgttaaattcagaaaagcacgtaggaaatccaatacgcttcacgccacaggcagttgcaaaaaccatctatctggcaattccctggccgatacactcttccgctgggagcaggatgaaataccctcatcccttatcctagagggggtggagccccagagtacctgcgagctggaggtagacgctgtggcagctgacatcctgaacagactggacatcgaggcgcagatcggcggaaaccccggactgcaggctatctgggaagacgagaaacaaagacgaagaaacaggaacgagaccagccagatgtcccagcctgaatctcaagaccatcgattcgttcctgcgactgagagcgaaaagaaattccagaagcggcttcaggagatcctgaagcagaacgactttagcgttacgctatccggtagcgtggattattcagatgggtctcaggaatttagcgccgagctcacccttcactccgaggttctctcccccgaaatgctgcaatgcactcctgccaatatggttgaagtgcataaagacaaagagagttccaaaggccataccaggcataaggtggaggaagccctgattaatgaggaagccattctcaacctcatggaaaattcgcagacgttccagcccttgacccagcgcctctcggagtcacctgtcttcatggattcgagccccgatgaagccctggtgcacctgctggccggtttggaaagtgacgggtaccgtggcgagagaaatcgcatgccatctccatgtcggagttttggcaacaataaatatccgcaaaattctgatgatgaggaaaacgagccccagatcgagaaggaagaaatggagctctccctggtgatgtcccagcgctgggacagcaatatcgaagaacactgcgccaaaaaaaggtcactctgccgcaatacccaccgaagcagcaccgaggatgacgattcctcttctggggaggagatggagtggagcgacaactctctgctgctggcctcgctatctatcccacaactggacggcacggccgatgagaacagtgacaaccctctgaacaatgagaattctcgcactcactcctctgtcattgcgacgtctaagctcagtgtcaaacctagtatttttcacaaggacgccgccacactcgaacctagcagttcagctaaaattaccttccagtgtaagcacacttcagcattatcctcccacgtgctgaataaagaagacctcatcgaggacctgagtcagacaaacaagaacacagagaagggactggacaatagtgtgacatctttcacaaacgaaagcacatacagcatgaaataccctggcagtctgtcttccaccgttcactccgaaaacagccataaagagaatagcaagaaggagatcctcccagtaagcagctgtgaaagcagtatttttgattacgaagaggacatcccaagcgtgaccaggcaagttccatctcggaaatacactaatatcagaaaaatcgagaaggacagcccttttatccacatgcataggcaccccaacgagaatacactcggtaaaaattcgtttaacttctcagatctcaatcatagcaaaaataaggtgagctcagaaggtaacgaaaaagggaacagcaccgccctgtctagcttattccccagctcattcaccgagaattgtgagcttttgtcctgctcgggggaaaaccgcactatggtgcattccctgaatagcactgctgatgagtctggattgaataaattgaagatccgctatgaggagttccaggagcacaaaaccgagaagccgtcactcagccagcaggccgctcattacatgttctttccaagcgtggttctctctaactgcctgactagacctcagaaactctcaccagtcacttacaaactacagccgggcaacaaaccttccaggctgaagctgaataagcgcaagcttgcgggacatcaggaaaccagtactaagtcaagcgagacaggttctaccaaagataatttcatccagaataatccgtgtaacagcaatcctgagaaagacaacgcactggcaagcgacctgacaaaaacaacgcgtggtgcatttgaaaataagactcccacggatggattcatagattgtcactttggagacgggaccctggaaaccgagcagtccttcgggctttatggaaacaaatacaccctgagggcgaaacgcaaggttaattacgagacagaggatagcgagtccagcttcgtgacacataacagcaaaatctcattacctcatccaatggaaatcggtgaatccctggatggcaccctgaaatcccgaaaaagacgcaagatgagcaaaaaattgccccccgtgattataaagtatatcatcattaaccggtttaggggaaggaagaacatgctggtgaagttgggcaagattgactcgaaagagaagcaagtgatcctcactgaagagaagatggagttgtataaaaaactggctcctctgaaggacttctggccaaaggtgcctgacagtcccgctactaagtatccaatatatccactcacacctaagaaaagccacagaaggaaatcgaagcacaagtcagcaaagaagaaaaccggaaaacaacaacgcacaaataacgaaaacataaaacgaacactgtccttcagaaaaaagaggtcgcacgctatcctgtcccctccatctccctcttacaacgccgaaaccgaggactgcgatcttaactactcggatgtgatgtccaaactgggtttcctgagcgagcgtagtactagccctattaactcatccccccctagatgctggagccctacagatcccagggctgaggagataatggccgccgccgagaaggaagccatgttgtttaaagggccgaatgtgtacaagaagaccgtgaattcgagaattggcaaaacctcaagagcccgggcacagatcaaaaagtccaaggcaaagttggctaatccttccatcgttactaaaaagcgcaataaacgaaaccaaacaaacaaattagtggacgatggcaaaaagaaaccaagagccaaacagaagacaaatgagaaaggaacaagtagaaagcatactacacttaaagatgaaaagatcaaatcccagtcgggcgctgaggtgaagtttgtgctgaaacatcagaatgtttcagagttcgcatccagtagcggagggagccagctgttatttaagcagaaagatatgccactaatgggctctgccgtggaccaccctctgtcggcctccctgcctacgggaataaacgcacagcaaaagttgagtgggtgcttttctagtttcctcgaaagcaaaaagtcagtggacctgcaaacttttcccagttccagagacgacctccacccctctgtcgtgtgcaactcaatcggtcccggcgtgtccaaaatcaacgtccagagacctcataatcagagcgcgatgttcacactaaaagagtcaaccctcatccagaagaatatatttgacctgtccaatcatctgtcccaggtggcccagaacacacaaatatcatccggcatgtcgtccaaaatagaagacaacgccaacaacatccagagaaactatctgtcttccatcggtaagctgtctgaatatcgtaattcgctcgaaagtaaactagatcaggcatacaccccaaattttcttcactgtaaggattctcaacagcaaatagtgtgtattgcagaacaatctaaacactcagagacttgctcccccggcaacaccgcaagcgaggaatcccagatgccaaacaactgcttcgtgacgtccctccgatcaccaatcaaacagattgcatgggagcagaaacaacgcggtttcattctggacatgtcgaacttcaagccggagagagtgaaacctcgctccctatctgaggccatatcccagacaaaggcactgtcccaatgcaagaatcgcaacgtgagtacccccagcgcctttggcgagggtcaatccggtctggctgtgttaaaggagctcctgcaaaagagacagcagaaggcccaaaacgcaaacactacccaggatcctttgtcaaacaaacaccagcctaacaaaaatatttcaggatccctagagcacaacaaggctaataagcgaaccagaagcgtgaccagtccccgaaagcctcgaactcctcgatcaactaagcagaaggagaaaatccccaagctgctaaaagtagacagcctaaatctgcagaatagcagtcagctggataattcagtgtccgacgatagccccatctttttctctgatccagggtttgaatcctgttacagcctcgaggactccctctccccagagcacaattataacttcgatatcaatacaattggtcagacaggtttctgtagcttctactctgggtctcaatttgtcccagcagatcagaatctgccccagaaatttctgtccgatgcagttcaggacttatttcccgggcaggccatagaaaaaaatgaattcctcagtcacgataaccagaagtgtgacgaggacaagcaccacaccactgattccgcatcctggattcgcagcggaacactgagcccagagatcttcgaaaaatcaaccatagattcgaatgagaacagaagacataaccagtggaaaaacagcttccatccactgacaaccagaagcaacagcatcatggatagcttctgcgtccagcaggccgaggactgcttaagtgaaaaatctcggttaaaccgcagctccgtaagcaaagaggtgttcctcagtcttcctcagcccaataatagcgattggatccaaggacacaccaggaaggaaatgggccagtctttagattcagctaacacctcatttacagccatcctatcctcacccgacggagaactggttgacgtggcatgtgaagaccttgaactgtacgtgtcacgaaataatgacatgctgacaccaacgcccgacagctccccccgtagtacatcttccccatcccagtccaaaaacgggtcctttactccccggaccgcgaacatcctgaagccgttgatgtccccccccagtagggaggagatcatggccaccctgctagatcatgacttgagcgagaccatctaccaggaaccattttgcagtaaccccagtgacgttcctgagaagcctcgtgaaatcggaggacgcctactcatggtggaaacgcggcttgccaatgacctggccgagttcgagggtgacttttccctcgagggactgcggctctggaagactgccttctccgcaatgactcagaatcctaggccaggcagccctttgcgtagcggccaaggtgtagtgaacaaaggatcctcaaattcgcctaagatggttgaggacaaaaagatcgtcataatgccctgtaagtgtgcccccagcagacagctcgtccaggtatggctccaggccaaggaggaatatgagcgctccaagaagctgcccaagacaaagcctaccggtgtcgttaagtcagcagaaaactttagctcatccgtaaaccccgatgacaaacccgtggtcccccctaagatggatgttagtccctgtatcctcccaactaccgcacataccaaagaagacgtggacaattcgcagatagctttgcaggctccaacaactggatgctcccagaccgccagcgagtctcagatgttacctccagtggcgtccgcttctgaccccgagaaagacgaggacgacgatgataattactatatttcatattcaagtcccgactccccggttatacccccctggcagcagccaatttctcccgatagcaaggccctgaacggggacgacaggccatcaagcccagtggaggaactgccatctctcgcattcgaaaacttcttgaagcccatcaaggacggaatccagaagtctccgtgctccgaaccacaggagccacttgtgatctccccaattaatactagagcccgcactggcaagtgcgaatccctgtgttttcacagtacaccaatcatacagagaaagttgcttgagagactgcctgaggctcctggcctttccccactatcaactgagccaaagactcagaagttgagcaataaaaaggggtccaacactgatactctgaggcgggtcctgctaacccaagcgaagaaccagttcgctgccgtaaatacaccccaaaaggaaacgtcgcagattgacgggccatcattgaacaacacatacggctttaaggtatctatacagaacttgcaggaggcaaaggcactgcacgaaatccagaaccttacccttatcagcgtcgagctacatgcccggacacggcgtgatctggaaccagatccagagttcgatccaatttgcgcattattttactgtatctcttccgatacgcctctgcccgacaccgaaaagacagaactcacgggcgtcatcgtgattgataaggataaaactgtgttttcacaggatatccgatatcagacacctttactgatcagaagcggcattacaggacttgaagtgacctatgctgcagacgaaaaagccttatttcatgaaattgcaaacattatcaaacggtatgaccctgatatcttactcggttacgaaattcagatgcattcatgggggtacttgctgcagagggcggccgccctgtctatcgacctgtgccgaatgatcagtcgggttcccgatgataaaatagagaacagattcgccgccgagcgcgatgaatatggatcctatactatgagcgaaattaatatcgtaggccgcatcactttgaatctgtggcgtatcatgcgtaacgaggttgctctgaccaactatacttttgagaatgtgagctttcacgtcctgcaccagaggtttcctctgttcaccttccgggttttgtccgattggttcgataacaaaacggacctgtaccgttggaagatggtggatcactacgtaagccgagtaagaggtaacttacagatgttggaacagctggacttgatcgggaagacctctgagatggccagactctttggtatccaattcttgcacgtgctgaccaggggctctcaatacagggtagagtctatgatgctgcgcattgcaaaaccgatgaactatattcccgtgactccgagcgtgcagcagcgctcccaaatgagagcccctcagtgcgtaccactcattatggagcctgaatcacgtttttacagcaacagcgtccttgtcctcgatttccagagcttgtatccgagtatagtaatcgcttacaactactgtttttcgacttgtcttggtcacgtcgaaaatttgggaaaatacgacgagttcaagtttggatgcactagtctgcgggtcccccctgacctgctgtaccaggtccggcatgatatcacagtctcacccaacggggtggccttcgtcaagccgagtgtgcgtaagggggtgttaccccggatgttggaggaaatactgaaaactcgtttcatggtaaaacagtctatgaaagcttataagcaggaccgagccctatctaggatgctggatgcccggcagctaggacttaagttaattgccaacgtgactttcggatacacatccgccaacttcagcgggcgaatgccatgcattgaagtgggggattctattgtacataaagcgcgcgagacacttgagcgcgctatcaagctggtcaatgacacgaagaagtggggagctcgagttgtatacggagacactgacagcatgttcgtcctgttgaagggtgccacaaaggagcagtccttcaaaatcgggcaggagatcgccgaagcagtgactgccactaatccaaagccagtcaagctgaagttcgaaaaggtatacttaccatgtgtcctgcaaaccaagaagcgatacgtcgggtacatgtacgaaacacttgaccagaaggatcccgtgttcgatgccaaaggaattgaaacggtgagaagagacagctgtcctgcagtgagtaaaattctggagcggtctctgaaactgctctttgagacgagagacataagcctgatcaagcagtacgtccagagacagtgcatgaaactgctggaggggaaggcctctattcaggattttatctttgcaaaggagtacaggggatcgtttagctacaaacccggggcttgcgtgcccgcactggaactgaccagaaagatgctgacctacgaccggcggtcggagccgcaggttggtgagcgcgtgccctatgtgatcatctatggcacgccaggagtgccgctcattcagttggtacgccgcccagtggaggttttacaagatcctaccttgcgtctgaacgccacatattacatcacaaagcagattctcccccctttagccaggattttttccctgatcggaatcgatgtgtttagctggtaccacgaactcccgagaatccacaaggccactagtagctccagaagtgaacctgaagggagaaagggaacgatctctcagtactttacaacccttcactgcccagtgtgtgacgatttgacacagcacggaatttgttccaagtgtcgttcacaaccgcaacatgttgcagtgatacttaatcaggaaatacgggaactagaaaggcaacaggaacagctcgttaaaatctgcaagaattgcaccggatgctttgatagacatattccatgcgtaagcctgaactgccctgtgttgttcaaactctctagggtgaaccgcgaactgtccaaggccccctatttgcgtcaactgctagaccagttttag

SEQ ID NO: 132392 - DNA, 9393 bp, synthetic construct
  misc_feature 1..9393: note = Description of Artificial Sequence: Synthetic coding sequence
  source 1..9393: mol_type = other DNA
atgttttcggttcggatagtcacagccgattactacatggcctccccactgcagggtctcgatacgtgtcagagtccactgacacaggcaccagtcaaaaaggttcccgtagtcagagtgttcggagccacccctgccggccagaaaacatgtctgcatctacacggcatctttccgtatctctatgtgccttacgatggctatggccaacagcctgaatcgtatctgtcccagatggcgttctctatcgaccgcgctttaaacgtggctctcgggaacccatcaagtaccgcccaacacgtctttaaggttagcctggtcagcggaatgcccttttacggataccatgagaaagagcgacactttatgaaaatatatctgtacaacccgaccatggtgaagcgcatatgcgaactcctccagagtggggcgataatgaataagttttaccagcctcacgaggcccacatcccttacctgctgcagctgtttatcgactacaacctgtacggcatgaacttaatcaaccttgctgccgttaagttccggaaagctcgacggaagtcaaacactctccacgccacaggatcttgtaaaaatcacttgtccggaaactccttggctgacaccttgtttcggtgggagcaggatgaaattccaagctcactcattctcgaaggcgtcgagccacagagtacctgcgaactggaggtcgacgccgttgctgctgacatcctgaacaggctggacattgaggcacaaatcggtggaaatcccgggctgcaggcgatatgggaggatgagaaacagagaagacgtaatcgcaacgagacctctcaaatgtcccagccagagtcgcaggaccatcggttcgtgccagcaactgaatcagaaaagaagttccagaagaggcttcaggaaatcttaaaacaaaatgacttctcagtgacactctccggcagtgtagattacagtgacggatcccaggagttcagcgcagaacttactctccattccgaagtcctgtctcccgagatgcttcagtgcaccccagcaaacatggttgaggtgcataaagacaaggaatcgagcaagggacatactcgccacaaagtcgaggaagccttgattaacgaagaggccattttgaatctgatggagaactcccagacttttcagccactgacccagcggctatctgagtccccagtgttcatggactctagcccggatgaggcgcttgtccacttgctggccggcctggaaagtgatggctataggggagaacggaacaggatgccttccccatgccggtcgttcggcaataataaatatccacagaattccgacgatgaagaaaatgagccgcagatcgagaaggaagaaatggagctctcactggtgatgtctcaacgatgggatagtaatattgaggaacattgcgccaaaaaaagatcactctgcagaaacacccatcgttcaagtaccgaggatgacgactcttcaagcggtgaggagatggagtggtccgacaattccctcctattggcttcgctctctatcccccagctcgatggaaccgccgacgagaatagtgacaatcccctgaataacgagaactccaggacacattcctccgtaatcgccacatcaaaactttcggtgaagccgagtatttttcacaaggatgccgcgactctggagccctccagcagcgcaaaaatcactttccaatgcaagcacaccagcgctctatctagtcatgtgctcaacaaagaagaccttatcgaagatttatcgcagaccaacaagaacactgagaagggtctggataacagcgttacatcattcactaacgagagtacctattcgatgaagtacccaggatccctatcatcaacagtccacagcgaaaactctcataaggagaacagtaaaaaggagatcctcccggtatccagctgcgaaagctctattttcgactacgaggaagatatccccagcgtcaccagacaggtgccctctagaaagtacactaatatacgcaaaattgagaaggactccccctttattcatatgcacagacaccccaatgagaacactctggggaagaactctttcaacttttccgatctgaaccacagtaagaataaggtgagcagcgagggtaacgagaaggggaattctacggctctgagttcacttttcccctcttcattcaccgaaaattgcgaactgctgagctgttcaggtgaaaatcgcacaatggtgcatagcctaaattccaccgctgacgagtcagggctgaacaagctgaagatccggtatgaggagttccaggagcacaagaccgagaagcccagcctatctcagcaggctgcccattatatgtttttcccctctgtggtgctttccaactgcctgacccggcctcagaaattgtccccagtgacatataagctccagcccggtaacaaacccagtcgccttaaattgaacaagcggaaactagccgggcaccaggagacatctacaaaaagctcagagacagggtccaccaaagacaacttcatacagaataacccttgcaattctaaccccgaaaaagacaacgccctcgccagtgacctgaccaagacaacacggggtgcgttcgagaacaagacccccacagacgggtttatcgactgccattttggggatggtactctggagaccgaacagtcttttggcttgtacggaaataagtacactctgagagccaaacgaaaagtgaattatgagaccgaggatagtgaaagctcctttgtaacgcacaattctaaaatctctctcccacatcctatggaaattggagaaagcctggacggtaccctgaaatcaagaaagaggagaaaaatgagcaagaagttaccacccgtgataatcaaatacatcatcattaacaggtttcgcgggagaaaaaacatgcttgttaagcttggaaagatcgactcaaaggagaagcaggtgatccttaccgaggaaaaaatggagctctacaagaagctcgccccgctcaaggacttctggcccaaggttcccgattcaccagccactaagtatccaatataccctctcacaccgaagaaaagccacaggcgtaaatctaaacataagagcgctaaaaaaaaaacaggtaaacagcaaaggacgaacaacgaaaacattaaaaggactctgagctttaggaaaaagcgctcccacgctatcctcagtccccctagtccgtcttacaatgctgagaccgaagattgcgatcttaactacagtgatgttatgtcgaagttgggatttctcagcgagcggtctaccagcccaatcaacagcagtccaccgcgttgttggtctcctactgatccgcgcgcggaagagataatggccgccgccgagaaagaggctatgctgtttaaaggccctaacgtctacaaaaaaactgtcaatagcagaattggcaagacgtcccgcgcgcgtgcgcaaataaaaaaatctaaagctaagctggcaaatccctctattgtcactaagaaacgcaacaagcggaaccagaccaataagctggtggatgacggcaaaaaaaagcctcgcgctaagcaaaagactaatgaaaagggaacgagtaggaagcataccacacttaaggacgaaaagataaaaagccagtccggagcagaggtcaagtttgtgctgaagcaccagaatgtgtcggaatttgcttcctcctcaggaggctcccagttgctgtttaagcaaaaggacatgccactgatggggtctgccgttgatcatcccttaagcgcctctctcccaacaggaattaatgcacagcagaagctatctgggtgtttttcatccttcttggagagtaaaaagtcagtggatcttcagacctttccatcttctcgcgacgatctgcacccatcagttgtgtgcaattcgattgggcccggtgtgtctaagatcaatgtccaacgtccccataaccagtcagccatgtttactctgaaggagtctaccctgatccaaaagaatatcttcgatctgtccaaccatctgagccaggtggcccagaacacacagatcagcagtgggatgtcatccaaaatcgaggacaatgccaataacatccaacggaactatctgagcagtatcggcaagctgtccgagtacagaaatagcttagagagcaaactggaccaggcctataccccaaattttttacattgcaaagacagccagcagcagatagtctgcatagctgagcagagtaaacacagcgaaacctgtagcccaggcaataccgcatcggaggagagtcagatgcccaataactgctttgtcacctctcttcgttccccaattaaacagattgcttgggaacagaaacagcgcgggtttatcctcgacatgtcaaatttcaagcctgagagggtaaaaccaaggagcctctctgaggctatctcccagacgaaagcattgagtcagtgtaaaaatagaaatgtgtccaccccctctgccttcggcgaaggacagagcggcctggccgtgctgaaggagcttttacagaaacgacagcagaaagcccagaatgctaacacgactcaggaccctttgtccaataagcatcagcctaacaagaatatcagtgggagtctcgaacacaataaagccaataaaagaactcgatcggtgacctctccccgcaagccgaggactcccaggtctacaaaacagaaagaaaagatcccaaagctcctcaaggtggactctctgaatctgcagaattcctctcaattggacaatagcgtgtcagacgatagcccaattttcttctctgaccccggctttgaatcctgctacagtctggaggattctttgtcacccgagcataactataactttgacatcaacacaattgggcagaccgggttctgtagtttctattccggctctcaattcgtccccgctgaccagaatcttcctcaaaaattcctgtcggacgcagtgcaggatctgttcccaggccaggcgatagagaagaatgagttcctgtctcacgacaaccaaaagtgtgacgaggacaaacaccacaccaccgacagtgccagctggataagaagtggaactttgagccccgaaattttcgaaaagtcgactatcgacagtaatgagaatcgaaggcacaatcagtggaagaatagcttccacccgctaactaccagatcaaactccattatggacagcttctgcgtgcagcaggctgaggattgtctcagtgagaagtcccggctaaataggtccagcgtaagcaaagaagtcttcttgagcctgcctcagccgaataactctgactggatccagggacacacgaggaaggaaatgggccaaagcctggactcggccaatactagtttcacggctattctgtcctcaccagacggcgaattagtcgatgtggcctgtgaggatttggaactatacgtcagtaggaataacgacatgttgacgcccacacccgatagcagcccccgtagtacatcatcgcctagtcaaagtaaaaacggaagcttcactccacgcacagccaatatcctcaagccgcttatgtccccaccctctagagaggagataatggcaacattattggaccacgacttatctgagaccatctatcaggagcctttttgttctaacccatcagacgtgcccgaaaaaccgcgggaaattggaggccgcctgctcatggtggagacccggctcgcaaacgatctggccgagttcgagggagatttttcactggagggattaaggctgtggaagactgcattcagcgcaatgacacagaacccacggcctggtagccccctgaggtcaggccagggcgtggtgaataaaggctcgagtaattcacccaagatggtggaggacaaaaagattgttattatgccctgcaagtgtgcccccagcagacagctcgtccaggtttggctgcaggccaaggaagaatacgagaggtctaagaaattgcctaaaactaaacctaccggagttgtcaaatccgctgagaacttttcatctagtgtgaatcctgatgacaaacccgtcgttcctcctaaaatggacgtgagtccttgcattctccccactacagctcacactaaggaagatgtagataacagccaaatagctttgcaggcacctacaaccggctgtagccagaccgcctctgagagccagatgctgccgcccgtcgctagcgcctccgacccagaaaaggacgaagatgacgacgataactattatatctcctatagcagccctgacagcccagtgattcctccttggcagcagcccatttcccctgacagcaaggcactgaatggagatgaccgcccaagcagtcccgtagaagaactaccttctcttgctttcgaaaacttccttaaacctattaaagacggtatccagaagagcccatgctccgagcctcaagaaccgttggtcatctcaccaataaatacaagagccagaacggggaagtgtgaaagtctgtgttttcatagcactcctataatacagcgaaaacttttagaacggctgcccgaagccccaggactgtcccccctgtctaccgaacctaaaacccaaaaactgagcaacaagaagggtagcaacacggataccctaaggcgggtgctcttgacccaagctaaaaatcagtttgccgcggttaacacccctcagaaggagaccagtcagatcgacggacctagtctgaataacacctatggattcaaagtctctatccaaaacttgcaagaagccaaagcattgcacgagatacaaaatttaaccctgatctccgtggaactacatgccagaacaaggcgagatctcgagcccgatcccgaattcgaccctatttgtgccctcttctactgcataagctcggacactccactcccagatacggagaaaacagaactgaccggagtgattgtaatagataaggacaaaactgtcttctcgcaggacatccggtaccagactcccctgctgattcggagtggcatcaccgggcttgaggtaacctatgctgccgatgagaaagcacttttccatgagatcgccaacatcataaaaaggtatgatcccgacatcctgttgggctacgaaatacagatgcacagttgggggtacctgctgcagcgtgccgcagcgctcagcatagacctgtgtcgcatgatctcgagagtgcccgatgacaagatcgaaaaccgattcgccgctgaaagggacgagtacgggtcctacaccatgtctgagataaatatcgtagggaggatcactctgaacttgtggagaataatgaggaatgaagtcgccctgactaattatacatttgaaaacgtgagtttccacgtgctgcaccaacgctttcctctcttcaccttccgagtgctgagcgactggttcgacaataagaccgatttgtaccggtggaaaatggtcgaccattacgtcagtcgcgtaagaggtaatttgcagatgttggaacagctggatttgatcggaaagaccagtgaaatggcccgactgttcggaatccaattcctgcatgtacttacccgcgggtctcaataccgtgtcgagagcatgatgctgagaatcgcaaagccaatgaattacatccccgtgactcccagtgtacagcagcgttctcagatgagggcaccacaatgcgtaccgttgatcatggagccggagtcccgcttttatagcaatagcgtgctcgttctggacttccagagcctgtatccttccatcgtcattgcctataactactgcttttccacctgtttaggtcatgttgagaacctcggcaagtatgacgagtttaagttcggatgtacctcgctgagggtacctccagatttgctttaccaggtgcgccacgacatcacagtcagcccaaacggcgtggcctttgtcaaacctagcgttagaaagggggtgctgccaagaatgctggaagaaattcttaaaacacgcttcatggtaaaacaatctatgaaggcctacaaacaagaccgcgccctgtcccggatgcttgatgctcgccaattgggcttaaagttgattgccaatgtgacattcgggtatacttccgcgaatttcagcggccggatgccctgtatcgaggtgggggactcaatcgtgcataaggcccgagagactctggagagagccattaaactggtaaacgacactaaaaaatggggcgctcgggtcgtgtacggtgacactgacagcatgtttgtgctgctgaaaggcgctaccaaagagcagagttttaaaatcggtcaggagattgcggaggccgtgacagccaccaacccaaaacctgtgaaactgaagtttgagaaagtctaccttccgtgcgttctgcagaccaaaaagcggtacgtgggttacatgtatgagactctggaccagaaggaccctgtttttgacgctaaggggatcgaaaccgttaggcgtgattcctgccctgccgtttccaagatcctagaacggagcttgaagctgttgttcgagacacgcgatatcagtctcattaagcagtacgtgcagagacaatgcatgaagctgctggaaggcaaggccagcatccaggatttcattttcgccaaggagtaccggggctcttttagttacaaacctggcgcttgcgtcccagcccttgaactgacacggaagatgttaacatacgaccgaagatcggaacctcaagtcggcgagcgggtaccttacgtcattatctacggaacacctggagtcccccttatacagttggtgcgcaggccagtggaggttcttcaagaccccaccctaaggttgaatgccacatactatatcacgaagcaaatactcccacctttggctcgcatatttagtctaatcggtatcgatgtcttcagctggtatcacgaactgcctcggatccacaaggccacatcctccagtcgctccgagcccgaaggtcgcaagggcactatcagccagtatttcactactctgcattgccctgtgtgcgatgatttgacgcagcacggaatttgttccaagtgccgcagccagcctcaacacgtggccgttattttaaatcaagagattcgggagctagagaggcagcaggagcagttggtgaaaatatgtaagaattgcaccggttgcttcgatagacacatcccgtgcgttagtcttaactgccctgtgctgtttaaactgtcaagggtcaaccgggagctcagtaaagccccttaccttcgtcaactgcttgaccagttttag

SEQ ID NO: 132393 - DNA, 9159 bp, synthetic construct
  misc_feature 1..9159: note = Description of Artificial Sequence: Synthetic coding sequence
  source 1..9159: mol_type = other DNA
atggcattctccatcgatcgagcactgaacgttgcattaggaaatcccagtagtacagctcagcacgtcttcaaggtgtcactggtttccggaatgcctttctacggttaccatgaaaaagaaagacactttatgaagatatatctgtacaatccaaccatggtgaagagaatatgtgaattactgcaaagcggggctatcatgaacaagttttaccagccccatgaagcccacatcccatacctcttgcagctgtttattgactacaacctttacggcatgaacctcatcaatctcgcggcagtgaagtttcggaaagcaagacgcaagtccaacaccctgcatgccacaggaagctgtaaaaatcacttatccggaaattctcttgctgacacactcttccggtgggagcaggacgagatcccatcttctcttatactcgagggagtagagccgcagtctacctgtgagctcgaggtagacgccgttgccgcagacatcttaaataggctggacattgaggctcagataggcggaaaccccggcctgcaggccatatgggaggacgaaaaacaaagacgccgtaaccgcaacgagacttcgcagatgtctcagccggagtcccaggaccaccgcttcgtccccgccaccgagagtgagaagaaattccaaaaaagacttcaagaaatcctcaagcagaatgacttcagcgtgaccctaagtgggtccgtggactatagtgatgggagccaagaattttcagctgagctaaccctacattccgaggtgctttccccagagatgctgcagtgtactcctgccaatatggtggaagtgcacaaggacaaggagtcaagtaagggccataccagacacaaagtagaagaggcccttatcaatgaggaggccatcctcaacctgatggaaaattcacagacattccagcctctaacacagaggctctccgagagtccggtatttatggatagcagtccagatgaagccctcgtccacctgctggcgggtttagagtccgacgggtacagaggtgagaggaataggatgccttccccttgtagaagctttggtaataataaatacccccagaattctgacgatgaggaaaatgagccacagattgaaaaggaagaaatggagctttcactggttatgtctcagcgctgggactctaacatagaggagcactgtgctaaaaagaggtccctgtgccgaaacacccaccgaagctcgaccgaagacgatgacagctcatctggtgaggagatggaatggagcgacaactctcttctgctggcatccctaagcataccacagttagacggcaccgcggatgaaaattccgacaatcccctgaacaacgaaaactcgagaacacactctagcgtcatagccacctcgaaactctctgtgaaaccttccatcttccacaaagacgccgctacactggagccctcttcctccgcgaaaatcaccttccagtgtaagcatacttcagcattgagctctcacgtcctaaataaggaagatctgatcgaggatcttagtcagactaacaaaaacaccgagaagggcttagacaacagcgtcactagtttcaccaatgagtctacctactcaatgaaataccccggatctctgtcctccacagtgcatagcgagaatagccataaggaaaattctaaaaaagaaatcctgcccgtgagtagctgtgagagctctatcttcgattatgaagaggacattccttcagttacacggcaagtcccatcacgtaaatataccaatataagaaaaatcgagaaagacagcccctttatccacatgcataggcatccaaatgaaaacacactaggcaaaaactcatttaacttttctgaccttaatcactccaaaaataaggtgtcttcagagggaaacgagaaggggaactccactgcattatcatcactgttcccttctagcttcaccgaaaattgcgagcttctaagttgttcaggcgagaatcggaccatggtgcattcactgaattcaaccgcagatgaaagtggactaaacaagcttaaaatccgctatgaggagttccaggagcataaaactgaaaagccctctttgtcgcagcaggccgcacattacatgttcttcccttccgtcgttctgtcgaactgtctgacaaggcctcagaaattgtcaccagtgacttacaagctgcagcctggaaataagccaagtagactaaagctcaacaaacgaaaactggccggacaccaagaaacttctaccaagtcctccgaaacgggcagcaccaaggataacttcattcaaaacaacccctgtaactctaatccagagaaagataacgctcttgcatctgacctgaccaagaccacgcgcggggccttcgagaacaagacacctactgacggtttcatagactgccactttggagacgggactctggagactgaacagagcttcggcctttatgggaataaatacaccctgcgggctaaacggaaagttaactacgagaccgaggacagcgagtcctcattcgttacacataatagcaagatttctttaccccaccccatggaaattggtgaatcccttgacgggaccctcaagagcaggaaacgacggaaaatgtccaaaaagttaccacccgtgatcatcaaatacatcattattaataggtttagggggcgtaagaacatgctggtgaagctcggtaagattgacagcaaagagaagcaggtgattctgaccgaagagaaaatggaactgtataagaagttagcacccctcaaagatttctggcccaaagttccagactcacccgctacaaaataccccatatatcctcttaccccaaaaaagagccacaggcgtaagtccaagcacaagagcgcaaagaaaaaaacggggaagcagcagaggaccaataacgaaaacatcaaaaggacactcagttttagaaaaaagcgcagtcatgccatactcagtcccccaagccccagctacaacgcggaaacagaggattgcgatttaaactattcagacgtgatgagcaagctgggattcctttccgaaagatccacatcacctattaattcaagtccaccgagatgctggagcccgacggatccccgagctgaggaaattatggcagctgcagaaaaggaggctatgctatttaagggccccaatgtgtacaaaaagactgtgaactcccgaatcggcaagactagtcgagctcgagcccaaatcaaaaagagcaaagcaaagctcgccaacccttcgatcgtgaccaagaagagaaacaagagaaaccagactaacaagcttgtggacgatggtaaaaaaaagccacgcgccaagcaaaagacaaacgagaaggggacctctaggaaacacaccactctcaaagacgagaaaataaagagccagtcaggagccgaggtgaaattcgtcctgaagcatcagaatgtgagtgaatttgctagcagtagcgggggctcccaactcttattcaagcagaaagacatgcctctaatggggagcgcggtggatcatcccctgagcgcctcgctaccgacaggtattaacgctcagcagaagctgagtggctgctttagctcgtttctagagtccaagaagtctgtggatctgcagacctttccttcatcacgtgacgatctacatcctagtgtagtttgcaactcaattggtcccggcgtctctaaaataaacgtacaacgtccccataaccagtccgctatgtttactttgaaggagtccaccctcatccagaaaaacattttcgatctgtcgaatcacctctcacaggtcgctcaaaatacccagatctcttcaggaatgtcatcaaagattgaagacaacgctaataatatccagcgcaactacctgagtagcataggtaaactgagcgagtataggaattctctggaatcaaaattggatcaagcatatacgcccaattttcttcattgcaaggattcccaacagcaaattgtatgcattgccgagcaaagtaagcactccgagacatgctcacctggtaatacagcatcagaagagtcccagatgccaaataactgcttcgtgaccagcctaaggtcacctataaaacagatcgcttgggagcagaagcaacggggcttcattctggacatgagcaactttaagcccgagagggtgaaaccgcgaagcctgtcggaagcaataagtcagaccaaggcactgagtcagtgtaagaaccggaacgtgtctactcccagtgccttcggagaagggcaatcgggtctagcagtccttaaagaacttttgcagaaaagacaacagaaagcccaaaacgccaataccacacaggacccactatcaaataaacaccagcccaataagaatatcagcggctcgctggagcacaacaaagccaacaaaaggactcggagcgtgacatcaccccgcaagccgcggacaccaagaagtactaagcaaaaagagaagataccaaagttgttaaaagtcgatagcctcaacttgcagaactctagccaacttgacaacagtgtgagcgacgattctccaattttcttctctgaccctggcttcgaatcctgttacagtctggaggactctttatcccccgagcacaattacaatttcgacataaatacaatcggccagaccggtttctgctcattctactctggcagtcagttcgtccccgccgaccagaacctgccgcagaagtttctgtcggacgcagtccaggatctgttccctgggcaggctatagagaaaaatgaattcctgtcccacgacaatcaaaagtgcgacgaggacaaacaccacaccaccgacagcgctagctggatccgaagcggcacactgtcacctgaaatcttcgaaaagtcaaccattgattctaatgaaaatcgcaggcacaaccagtggaagaactccttccatcctttaacaacccggagtaatagcatcatggattctttctgcgtgcagcaggctgaggactgtttatccgaaaagtctcgcttgaatagaagctcagtgagtaaggaggtgtttcttagcctgcctcagcccaacaactctgattggatccagggccacacccgaaaagagatggggcagagtctggactccgccaacactagctttacagccatactgtcttctcccgacggagaactagtggacgttgcttgtgaggatctggaactttacgtgagtagaaacaatgatatgttgacgccaactcccgattcaagccccaggagcactagtagtccgagccaaagtaagaatggctcctttaccccgcggaccgccaacatcttgaagccactgatgagcccccctagccgagaggagattatggccacactcttagatcacgatctgtctgagactatttaccaggaacctttctgttccaacccatctgatgtgcctgaaaagccacgggagatcggcggcagactgttgatggttgaaactcgactggccaatgatttggctgagttcgagggcgactttagtttagaagggttaagactgtggaaaactgccttcagtgctatgacccagaacccccgccccggatcacccctgagatccgggcaaggagtggtgaacaagggttcatcaaattcacccaaaatggttgaagacaaaaaaatcgtgatcatgccttgcaaatgtgctccttcaagacagctcgttcaggtgtggttgcaggcaaaggaggagtacgaacgaagcaagaaactgcctaaaactaaacctaccggggtcgtgaagtctgcagagaacttcagcagctcagtgaaccctgatgacaagccagtggttcctcctaagatggacgtcagtccttgtatcttgcctaccaccgctcacactaaagaggatgtggataactcacagattgcacttcaggcccctaccacaggttgctcccagaccgctagcgagtcccagatgcttcctcctgtggcttccgccagtgacccagaaaaagacgaagatgatgatgataattactatatatcatactcctcgcctgatagccctgttatccccccatggcagcagcccatttcccctgatagcaaagccctgaacggggacgaccggccaagttcacctgttgaggaactgccttccttagctttcgaaaactttctcaagcccatcaaggacggaatccagaaaagtccctgctccgaaccgcaggagccactggtcatcagccccatcaacacaagggcgcgtacgggtaaatgtgaaagtctgtgtttccattcaacccctattatccagcgcaaactgctggaaaggctcccagaggcaccaggtttatcaccattaagtaccgagcccaagacacagaagctgtccaacaaaaagggttccaacacggatacactgagaagagtcttattgactcaggctaaaaaccagttcgctgccgtaaacacaccccagaaggagacctctcagatcgacggcccatccctgaataatacctacggatttaaggtgtcgattcaaaacctgcaggaggctaaggctcttcacgagatacagaacctcacactgatctccgttgagctccacgcacggacacgtagggatctggaacccgacccagaatttgatcccatttgtgcactgttttattgtatcagcagcgatacaccactccctgacaccgagaagaccgaactaactggcgtgatagtgatcgacaaagacaagaccgtgttctcacaggacatcagatatcagacccccctgctgataaggtctggaataacagggctcgaggtcacttacgctgctgatgaaaaggctttgttccacgagatcgccaatataatcaagaggtatgatcctgacatcttattaggttatgaaatacagatgcatagctggggctatctgctccaacgcgccgccgcgttgtctattgatctctgcaggatgatctctcgggtgccagacgacaagattgagaatcgtttcgctgcggaacgagatgaatatggttcttacacaatgtctgagattaatatcgtgggtcgaataactctgaacttgtggcgcattatgagaaatgaagtggcgcttaccaattacacattcgagaacgtgagctttcacgtactgcaccagcgctttccacttttcactttcagagtgttaagcgattggttcgataacaaaactgacctgtatcggtggaagatggtcgatcactacgtcagtagagtccgagggaatctccagatgctcgagcaattagacctgatcggcaaaacgtccgagatggctagactgtttggaattcaattcctgcatgtcctcaccaggggaagtcaatatagagtcgaaagcatgatgttgagaatcgctaaaccaatgaattacatcccggtcacaccctctgtccagcagcgctctcagatgagagccccacagtgtgtgccgctcataatggaaccagaaagccgattctactctaattccgtgctcgtgcttgactttcagtcattatacccatccattgtcatcgcttacaactactgtttcagcacgtgccttggccacgtggaaaatctgggtaaatacgacgagttcaagtttggatgcacgtccctccgcgtccctccggatctcctttaccaggttagacatgacattaccgtgtcccctaatggggtggcctttgtgaagccgagtgtgaggaaaggtgttctgcctaggatgctggaagagatactcaagacacgtttcatggtcaagcagagcatgaaggcctacaagcaggaccgcgcattatcccggatgctcgatgcacggcagctaggcttgaaactgattgccaatgtaacttttgggtacacaagcgcaaacttcagcggtcgtatgccatgcatagaagtaggagactccatagtgcacaaagcaagggagacattagagcgggctattaagctggtgaacgacactaaaaaatggggcgccagagtcgtctacggagataccgactctatgtttgttctgttgaaaggggccactaaggaacagagtttcaagattggccaggaaattgccgaggcggtgacagcaactaatccaaaaccggttaaactgaagttcgagaaagtctatttgccttgcgtgctccagacaaagaaacgctatgtgggctatatgtacgaaacactggatcaaaaagacccagtcttcgatgccaaaggtatcgagactgtccgcagagattcttgccctgctgtttctaagatcctggagcggagcttaaagctcctgttcgaaaccagggatattagcttgatcaaacagtatgtgcagcggcagtgcatgaaactgctcgaggggaaggcctctatccaagattttatattcgcgaaggaataccggggtagtttcagctacaagcccggagcctgcgtgccggccctcgagttaacaagaaagatgctgacctacgataggagaagcgagccccaggtcggagaacgcgtgccttacgtcatcatatacggaacccctggagtgccgctcattcaactggtgaggagaccagttgaggtactccaagacccaactttgcggctgaacgctacctactacattaccaagcagattctaccccctctcgcccggatcttctcgctaatcggcatcgatgttttcagttggtatcacgaactgcctcgcattcataaggcaaccagctctagccgcagtgagcctgagggcaggaaagggacaatctctcagtatttcactaccttacactgccctgtctgtgatgaccttacacagcacgggatctgttccaagtgtcggtctcagccgcagcacgtggccgttattctgaaccaagagatacgcgaactcgagaggcaacaggagcagttggtgaaaatctgcaagaattgcacaggctgttttgaccggcatatcccatgcgtcagccttaactgccccgtgctgtttaagctgtcccgcgtgaatcgggagctgtctaaggcaccttatttgaggcagctcctcgatcagttttag

SEQ ID NO: 132394 - DNA, 2289 bp, synthetic construct
  misc_feature 1..2289: note = Description of Artificial Sequence: Synthetic coding sequence
  source 1..2289: mol_type = other DNA
atggttgaaaccagactggcgaatgacctggccgaattcgagggcgacttttcactagagggacttcggctgtggaagaccgccttcagtgccatgacgcaaaatccaagacctggaagccccctcaggagtgggcagggcgtggtgaataaaggttcaagcaattccccgaaaatggtggaggataagaaaattgtgatcatgccctgtaaatgtgcccccagcaggcagttggtgcaggtgtggctgcaggctaaagaagaatacgagcgatctaaaaaattgcctaagacgaagcctacaggagtcgtgaagagcgcggaaaacttctcctcctctgtaaatcctgacgacaagcctgtagtgcctccaaaaatggacgtttccccatgtatcttgcctaccaccgctcacaccaaggaggatgttgacaactcgcagatagctctccaagcccccactacaggttgcagccaaactgctagtgagtcccagatgttgcctcctgtggccagtgcctcagatccagagaaggacgaagatgacgacgacaattactacatctcttatagttctcccgacagtcctgtgattccgccatggcagcagccgattagcccagacagtaaggcgctgaacggcgacgacaggccaagttctcctgttgaagagctcccatcccttgcattcgagaattttctcaagccgattaaagatggaatccagaagagtccttgcagtgaacctcaggaacccctggtgataagtcccattaacactcgcgcacggacaggtaaatgtgaaagtctatgcttccactccaccccgatcatccaacggaaactgctcgagcgcctgcctgaagccccgggacttagcccactgtccactgaacctaagactcagaagttgagtaacaagaagggcagcaatactgacactctgcgcagagtactcttgacccaagctaagaatcagttcgccgctgtaaacacgccccagaaagaaaccagccagatagacggccctagtctgaataacacatacggatttaaggtgagcatccagaacctccaagaagcaaaagccctacacgaaattcaaaacctgactctgatctctgtggaacttcatgcccggactcgaagagatctagaacccgatcctgaatttgacccaatttgcgctttgttctactgcatctcatccgatacacccttgccagacacagagaaaaccgagctcactggcgtgattgtaattgataaagacaagacggtttttagtcaagacattcgctatcagacccccctgttaatccgatcaggcattacagggctagaggtcacctacgcggccgacgaaaaggctttgttccacgagatagctaacattataaagaggtacgaccctgatattctgctgggctatgagatccagatgcatagctgggggtacctcctgcagcgggcagctgccttgtctatcgacctgtgtcgtatgatcagtcgggtccctgacgacaagattgagaacagattcgccgccgagagagacgagtacggtagctacactatgtccgagatcaacatagttgggaggatcactctgaatctttggcgaatcatgagaaatgaggtcgcgttgacaaactacacgtttgagaatgtaagctttcacgtgctgcaccaaaggtttccactctttaccttcagagtgctgtccgactggtttgacaacaagactgatctgtacaggtggaaaatggtagaccattatgtaagtagagtgagggggaatctccagatgctcgaacagctggacctgattggtaaaaccagtgagatggctaggttatttggcatccagtttctgcacgtcctgacgcgtgggagccagtacagagtggagagtatgatgctgcggattgccaaaccgatgaactatattccggtgacgccctctgtgcagcagcgcagccagatgcgggcccctcagtgcgtcccccttattatggagccggagtctcggttttatagcaatagtgtcctcgtcctggacttccagagcttgtaccccagcatagtgatagcctataactactgcttctccacttgtctggggcatgtagagaatcttggtaaatacgacgaattcaaatttgggtgtacatccttgcgagtgccccctgatctgctctaccaagtcaggcacgacatcacagtgtcccccaacggcgtggctttcgttaagatcgccaacaagtgtagaccggaagggatggcttag

SEQ ID NO: 132395 - DNA, 3666 bp, synthetic construct
  misc_feature 1..3666: note = Description of Artificial Sequence: Synthetic coding sequence
  source 1..3666: mol_type = other DNA
atgctgaggtctactggcttctttcgggcgatcgactgcccttattggtccggcgcacccggaggtccctgtagaaggccgtactgccattttcgacatcggggcgcgcggggtagcggtgcacccggcgacggcggagaggccccaccagcagccggactcggttatgatccctacaatccagagctgcctaaacctccggctcagcgcgagaatggcacactgggcctcggcgaagagcccaggcccgatgtgctggagctggagctggtcaatcaggccattgaagcggttaggtccgaggtagaattggagcagcggcgataccgggagctgttagaaacaacgagagaacacaggagcgccgaggcgcctgccttggctccccggggaccaaacgcttctcctactgtgggccctgacgaggacgcctttcccctcgcctttgactactctcccggctctcacggactgttgagtcccgacgccggttatcaacccactccgctggcagcacccgcggagcctggcagcaaatactccttggcatccctggatagaggccagggaagggggggaggaggtgggggcgcgttagagtacgtgcctaaggccgtgtcccaaccgcgacgacatagccgccctgtcccaagcggtaagtacgtggtcgataattcaaggccccctacggatttggaatacgaccccctgtcaaattactccgctaggcacttgagccgagcctcatccagggacgagcgggccgcgaagcgaccgagaggctccaggggttcggaaccttacacaccagcacccaagaaattgtgcgatcccttcggctcctgcgacgctagattctccgactctgaggatgaagccgcaacggtgcccggaaatgaacctaccactgcaagcaccccaaaggcccgagcggaccctgagatcaaggctaccggccaaccaccatcaaaagaaggcctcgaggcagaagggggcggtcttagggagaccaaagaaactgccgttcagtgcgacgtgggagacctgcagcccccacccgctaagccagcttcccccgcacaggtgcagtccagtcaggatggcggctgtcccaaagaaggcaaacccaagaagaaaaaaactggcgctcctcccgcgccttcatgtaaggatggcgctcaggggaaggataagaccaaagacaagggcagaggcaggcccgtagaaaaacccagggccgacaagaaagggcctcaggcgtcctctccacggagaaaggctgaacgacccgaggggactaaaaagaagcccagttctgcgacacccgtcgccacttctggaaaaggccgtccagatagaccggctcggcggccatcacctacatcaggtgattctcggcctgctgctgggcgggggccgccccgcccgctgcagctgccggatcgaaagagcacgaaagcaccgagcggcaagctggtggaaagaaaggccaggtctttggacgaaggcgcctctcaggacgctccgaagctcaagaaacgggcgcttagtcacgcggatttgtttggtgacgagagcgaagatgaagcggccggacctggcgtgccttccgtgtggccctccgctctgccgtccctcagcagcgactctgatagtgattccgactccagccttggatttccagaggcacagggaccaccgaaaagactgaaagctagtcctcccccaagccccgcccccagcagcagctcttccagcagttcctcaacatcatccgctggagctgacgtagactacagtgcactggaaaaagaagtggatttcgatagtgatccaatggaagagtgccttagaatcttcaatgaaagcacctcagtcaaaacggaggaccggggtagactggccagacaacctccgaaagaggagaagagtgaagaaaaggggctttctggtctgacaacattattccctggacagaaaagacggatcagccacctgagcaaacaaggacaggaggtcgagccacccaggcgcgggcccgcagtccccccagctcgacctccgacagcccaagaggtgtgctacctgcgcgctcagcaggctcaacgagcctcagccagcctgcttcaggctccggctcgcttggcagagaaatctcctagcgtccacatcagcgctcccggggaaaagcgccggattgcacacatcccaaatcccagacttgccgccgcccccaccggggccaagcgcaccttggctgcatccggtagccagagtagtaacgggcctgaacctggcggacagcaactgaagacacgaaccctgtcaggtatggcaagcaagaccactaccaccatcatccctaaacgcattgcccatagtcccagcctgcagagtctgaagaaacccattattcctaaggagttcgggggcaaggtgccaactgttatacgacagcgctaccttaacctgttcatcgaggaatgcctgaagttctgtacaagcaaccaagaggcgatcgaaaaagctctgaatgaggagaaggttgcgtatgataggtccccctctaaaaatatatatctcaatgtggcggttaacacactcaagaagttgagaggcctcgccccctcagccgtaccaggattatcaaagaccagcggccgccgcgtcgtgagccacgaagtggtcctgggaggcaggctagctgccaagacctctttttccctttcccggccttcctctccaagggtggaggatctaaaaggtgccgccctctattcgcgcctgcgggagtacctgctcacacaagaccagcttaaagagaacggatacccattcccacatcctgaacggccaggtggcgccattatctttaccgcagaagagaagcggccgaaagatagttcttgtcgcacatgctgtcggtgtggcacggagtacctggtctcttcctccggcaggtgtatcagagacgaagagtgttactatcattggggtaggctaagacgaaacagagtcgccgggggttgggaaacccagtatatgtgttgctctgccgccgccggatcggtgggctgtcaagtcgccaagcagcatgtgcaggacggcagaaaggagaggctggaagggttcgttaagactttcgaaaaggagctgagcggagatactcaccctgggatctatgcacttgactgtgagatgtcatacactacatatggactggagctgacccgtgtgaccgttgtcgacacagacgtgcacgtggtctatgacacatttgtcaaacccgacaacgagattgttgattacaacaccaggtttagcggagttaccgaagccgacctcgcggacacatctgtgacccttcgtgatgtgcaggctgtcctcctatccatgttttccgctgataccattctgataggccattctctggagtccgatctgctagctcttaaggtgatacatagcactgtggttgacacctctgtgcttttcccacaccggctcggcctgccctacaaacggagcctgcgtaatctaatggcagattatctgcgccagatcatccaagataacgtggacggacattcctcgtctgaggacgctggagcctgtatgcacctcgtcatctggaaagtgagagaggacgcaaagacaaagagatag

SEQ ID NO: 132396 - DNA, 1014 bp, synthetic construct
  misc_feature 1..1014: note = Description of Artificial Sequence: Synthetic coding sequence
  source 1..1014: mol_type = other DNA
atgttaccatccagtactcggttgggatatgatccctataaccccgagctgccaaaaccgcctgcccaaagggagaacgggaccctggggttgggggaggagcctcggcccgatgtgctcgagttagaactggtcaatcaagcgattgaagctgtcagatccgaggtggagcttgagcagcgaaggtacagggagctgctcgagacaactcgtgaacaccgctccgccgaggccccagcactcgcccccagaggcccaaacgcaagtcctacggtgggccctgacgaagatgcctttcccctcgctttcgattactccccaggctcccacgggctgctgtcccctgatgctggctaccaaccaacgccactagctgcaccggcggaaccggggagcaaatactctttggcttctctggatagaggacagggccgggggggtggcggggggggtgctctggaatatgtgcctaaagccgtgagtcaaccgcgccgacatagtcgccctgttccaagtgggaaatatgtcgtcgacaacagccgacctccaactgatttggagtacgacccgctctctaactactcagcgaggcatctttctagagcgagcagccgtgatgaacgcgctgccaagcgtccgcgtggttcccgcggatctgagccttacaccccagcccccaagaagctctgtgatccgttcgggagctgcgacgcacgctttagcgactcagaagatgaggctgcaactgtcccaggaaatgagcctacaacggcgtcaacaccaaaggcccgggccgacccggaaattaaggccacggggcagccccctagcaaggagggcctagaggccgaggggggaggcctgcgtgagacaaaagaaacagccgtccaatgtgacgtgggcgacctgcagccaccccctgctaaaccagcttcaccagcacaggtgcagtcgtcccaggacgggggctgtccaaaggagggtaagccaaagaaaaagaagaccggagcatag

SEQ ID NO: 132397 - DNA, 1482 bp, synthetic construct
  misc_feature 1..1482: note = Description of Artificial Sequence: Synthetic coding sequence
  source 1..1482: mol_type = other DNA
atggggtctcattctccctgcgcacatacaccatgtgccccacccgctcctacaggtgctaaaaggacattggcagcctccggtagtcagagtagcaatggtccggagccaggtggccagcaattgaaaaccagaaccctaagcggcatggctagcaagacaactacaaccattatcccgaagaggattgcacatagcccttccctgcagtccctcaaaaagccaatcattccgaaggagtttggcgggaaggtccctacagtaattcgccagagatatttaaatctctttatcgaggagtgcctgaagttctgtacttctaaccaagaggctatagagaaggctctgaacgaggagaaggtggcttacgacagatcaccaagcaaaaacatctatttgaatgttgccgtgaataccttaaagaagttgaggggcctcgcacctagcgctgtgcctggcttgtcaaaaacttctggtcgtcgcgtcgtctcccatgaggtcgtgctggggggtcgattggctgctaagacgtctttttcccttagcaggccctcttcgccacgcgttgaagacctgaaaggggctgccctatactccaggttgcgcgaatacttgcttacacaggaccagttgaaggagaacggttaccctttcccccacccagaacgacccggtggggccatcatttttaccgcagaggagaagcggccaaaggacagtagttgcagaacttgctgtaggtgtggtaccgagtatctggtttcatcctcggggcgctgtattcgtgacgaggagtgttactaccattggggtcgtctaagaagaaatcgagttgcaggtggatgggagacacaatatatgtgctgtagtgcggcagctgggtccgtgggctgtcaagtagccaagcagcatgtacaagacggtcgcaaggagcggctggaggggttcgttaagacttttgagaaagagctttccggggacacccacccaggcatatacgctctggactgcgagatgtcttatacaacttatggtctggaattaacaagagtgacagtggttgacaccgatgtgcacgtggtgtacgatacatttgttaagccggataacgaaatagtagactataatacccgtttcagtggagtaactgaagcggacctggccgacacttcagtgactctcagggacgttcaggcagtactgctctctatgttttccgccgatactatcctgattgggcactccctcgaaagcgacctactggcgctgaaggtcattcattcaaccgtggtggatacatctgtattgtttccacaccggctggggctgccctataagaggagcctgcgcaatctaatggccgattacctcaggcaaatcattcaggataacgtggacgggcactcgtcctcagaggacgcaggggcgtgtatgcacctggtcatctggaaggtcagagaggacgctaaaacaaagaggtag

SEQ ID NO: 132398 - DNA, 714 bp, synthetic construct
  misc_feature 1..714: note = Description of Artificial Sequence: Synthetic coding sequence
  source 1..714: mol_type = other DNA
atgttaggaggaagtttagggagccggctgctcaggggggttggcggatcccacggccgcttcggagccagaggagttagagaggggggtgccgcgatggccgccggggaatcgatggcccagaggatggtttgggtggatctggaaatgacagggctggacatcgagaaggaccagattatcgagatggcttgcctaatcaccgacagtgaccttaatatcctggctgaaggaccgaatctcattataaagcaaccggacgaattgcttgattccatgtctgattggtgtaaagagcatcatgggaagagcggcctcacaaaggctgtcaaggaaagcaccataactctgcagcaggctgagtatgaatttctgtcttttgtcaggcagcagacaccacctgggctttgtcctctggctggaaatagcgtgcatgaagacaaaaagttccttgacaaatatatgccccagttcatgaaacatcttcactatcgcatcatcgatgtgagtaccgtcaaagaactgtgtagacgctggtaccctgaggaatacgagttcgcccctaagaaggcagcctctcaccgcgccctggacgatatatccgagagcatcaaagagctccagttctaccggaataatatttttaagaaaaagatcgacgagaagaagcgaaagattattgagaacggcgagaacgaaaagaccgtctcctag

SEQ ID NO: 132399 - DNA, 753 bp, synthetic construct
  misc_feature 1..753: note = Description of Artificial Sequence: Synthetic coding sequence
  source 1..753: mol_type = other DNA
atggggaaggcaaaggtgcctgcttctaaaagggcaccttcatccccagtggccaagcctggacccgtcaagaccttgacaagaaaaaaaaacaaaaaaaaaaaaaggttttggaaaagcaaggccagagaggtctccaagaaacctgcatccgggccaggcgccgtggttcggcctcctaaagcgccggaagatttctcccagaattggaaagccttgcaggaggtgcctcgctggaccggggggaggcagtaccttgctccacggcctgtggagcagagtacaattcgcaaagagcctcgtaagggtcagatggtgatcctcttccagaatgaaggtaccagctcaattcgctcaggaaaactgcgccggcaaccccaaccccaccctccacgggaagagctagaagtggtgcaaaaagaggtagctgaaatgttgaaggggcgcatccttgtcgggcacgctcttcacaacgaccttaaagtgctcttcctcgaccaccctaagaagaaaattagggatacccagaaatacaaaccttttaagtctcaagtgaaaagcggcaggccctcattgcggctgttatcggagaagattctaggtctgcaggttcagcaggccgagcactgctctatacaggatgctcaggctgcgatgcggctgtacgttatggtgaaaaaagagtgggagagcatggcacgggatcgcagaccacttctgacagccccagatcactgcagcgatgacgcgtag

SEQ ID NO: 132400 - DNA, 1269 bp, synthetic construct
  misc_feature 1..1269: note = Description of Artificial Sequence: Synthetic coding sequence
  source 1..1269: mol_type = other DNA
atgggaaaggccaaggtgcctgctagcaagcgagcaccctcgagcccagtggctaagccgggccccgtgaaaaccctgacacggaaaaagaacaagaaaaagaagcggttctggaaatctaaggcaagagaggtaagcaagaagccagcctcaggcccaggagctgtggtgcgccctccaaaggctccagaagattttagtcagaattggaaggccctgcaggaatggctattgaagcaaaagagccaggctcccgagaaaccactggtgatctctcaaatgggctccaaaaaaaaaccaaaaattattcagcaaaataagaaagagacctcgcctcaggtcaaaggagaggagatgcccgcaggtaaggatcaggaggcctcaaggggaagcgttcctagcggcagtaagatggataggcgggcccctgtcccccgtacaaaggctagtggaaccgagcataataagaagggaaccaaggagcggacgaacggggatatcgtccctgaaagaggggacattgaacacaagaaacgaaaggccaaggaggctgcacctgcaccgccaaccgaggaggacatttggtttgacgatgtggatcccgccgatattgaagctgccattggcccagaggcagcaaagatcgcccggaagcagctggggcagtcagaaggctccgtctctctctcgttggtgaaagagcaggctttcggtggactgacgcgagccctcgccctggactgcgagatggttggggtcggtccaaagggcgaggaatcgatggcggcgcgagtcagcatcgtgaaccagtacggcaaatgtgtctatgacaaatacgtcaaaccaactgagccagtgacagactaccgtacagctgtttcgggtatacgtccagaaaacttgaaacagggagaggagctggaggtggtgcagaaggaggtggcggaaatgttaaaagggaggatactggtcgggcatgcacttcataatgacttgaaggtcctcttcttggaccaccctaaaaagaagatccgggacacccagaagtataaaccttttaagtcccaggtgaagagtgggcgcccctccttacgcctgctaagtgagaaaattctgggcctgcaggtgcagcaagccgagcactgctcaatccaggacgcccaagctgctatgagactgtatgtgatggtaaagaaggagtgggaatcaatggctcgcgatcggcggcctttgctgactgcaccagaccactgctccgatgatgcatag

SEQ ID NO: 132401 - DNA, 570 bp, synthetic construct
  misc_feature 1..570: note = Description of Artificial Sequence: Synthetic coding sequence
  source 1..570: mol_type = other DNA
atgggctccaagaagaagcctaagataattcagcagaataaaaaggaaacctctccgcaggtgaaaggcgaggagatgcccgccgggaaggaccaagaagccagccggggctccgtgccctcaggtagcaagatggatcggagggcccccgtccctagaacaaaggccagtgggacagagcacaacaaaaagggcactaaagaaagaactaatggcgatatcgtgccagaaagaggcgatattgagcacaagaagcggaaagcaaaggaggccgcacctgcaccacccacagaggaggacatatggtttgacgacgtcgaccccgccgacatcgaagccgcaattggccctgaagctgctaagatcgccaggaaacagctgggtcagagtgagggttccgtcagtctgagtttggtgaaagaacaggcattcggcggtttgacccgtgcactcgcactggactgcgagatggtcggggtgggaccaaagggcgaagaatcaatggccgctcgcgtgtcaatcgttaatcagtacggcaagtgcgtatacgacaagtacgtcaagccttag

SEQ ID NO: 132402 - DNA, 1125 bp, synthetic construct
  misc_feature 1..1125: note = Description of Artificial Sequence: Synthetic coding sequence
  source 1..1125: mol_type = other DNA
cccgtggccaagcctgggcccgtaaaaacattaacacggaagaagaacaaaaagaagaaacgattctggaaatccaaagcaagagaagttagcaaaaagcccgcctcagggcctggggcggtcgtcagaccaccgaaggcccctgaggatttctcccagaattggaaggcgctgcaggagtggctgctgaagcagaaatcccaggcccctgagaaacccctggtgatatcccagatggggtcaaaaaaaaagccgaaaatcatccagcagaataagaaagagactagcccccaagtgaaaggggaggaaatgcccgccggtaaagaccaggaggctagccgaggctctgttccatctggttccaagatggatcggagggcaccggtgcctcgtaccaaggcaagtggcacagagcataacaagaagggaactaaggaaagaaccaatggcgatattgtgcctgaacggggggacatagaacacaagaagagaaaggccaaggaggccgcgcctgcaccccctaccgaagaggatatttggtttgatgatgtcgatcctgcggatattgaagctgctatcggtcccgaagcagctaaaattgcaagaaagcagttgggacagtctgaaggaagtgtgagtctatccctcgtaaaagaacaagcatttggtggtctgacccgcgccttggcactagactgcgagatggtaggagtaggaccgaagggagaggagagtatggctgctcgggtcagcattgtaaaccagtacggtaaatgtgtgtacgacaagtatgttaagccaacagaacccgtgacagattacagaacagccgtctctggcattcggccagagaacctcaaacagggcgaggaactggaagtcgtccaaaaagaggtagcagagatgttgaagggaaggatcctcgtgggccacgccctgcacaatgacctgaagtccggaaggccgtcgctgaggctcttgtcagagaagattcttggacttcaggtacagcaggattcaggctgccctggttccaatgaagctgtgcggcacggcgaggaaggggttggagagcacggcccccgtcaagctccgccagctgattgctcaaggcccctccagtag

SEQ ID NO: 132403 - DNA, 702 bp, synthetic construct
  misc_feature 1..702: note = Description of Artificial Sequence: Synthetic coding sequence
  source 1..702: mol_type = other DNA
atggggaaggcaaaggttcctgccagtaaacgggccccctcaagtcccgttgctaagcccggaccagtaaaaaccctgacaaggaagaagaataaaaaaaagaaaaggttttggaagtctaaggcgcgagaagtgtccaagaagccggctagcgggcccggtgccgttgtgagacccccaaaggcccccgaggatttctcccaaaactggaaagctctccaggaggtcccccgatggacaggcggccgacagtacctggccccacgacctgtggaacaatccacaatcaggaaagaaccccggaagggccaaatggtaatcctgtttcagaacgaaggcacttcatctatccgctcgggaaaactcaggagacaaccccagcctcatccaccccgagaggagcttgaggtcgtccagaaggaggtggcagagatgctcaaaggaaggattctggttggacacgccctgcataacgatttgaaggtgttatttctcgaccacccaaaaaagaagatcagagatacacaaaagtataagccctttaaatcccaagtgaagagcgggcggccttctttgcgcctgttaagtgaaaagattctcggtctgcaggtgcaacaagccgagcactgcagcattcaggatgcacaggcggctatgcggctgtacgtcatggtgaaaaaggaatgggagtctatggcctag

SEQ ID NO: 132404 - DNA, 996 bp, synthetic construct
  misc_feature 1..996: note = Description of Artificial Sequence: Synthetic coding sequence
  source 1..996: mol_type = other DNA
atgtcccgcgctagaggggccctttgtagagcgtgtcttgcccttgccgcagcattagcagcactccttctgcttccccttcccctcccccgcgcacctgctcccgcacgcactcccgctccagctcctcgcgcacccccaagcaggccagctgccccctcactgcgcccggatgatgtttttatcgccgtcaaaaccacacgcaagaaccatggtccacggctgcgtttgctgttacgcacttggatctcccgggcacgacagcaaacctttattttcaccgatggagatgacccagagctagagctccaagggggcgatcgcgtgatcaatacgaattgctccgccgttagaacacgccaggctctatgttgtaagatgtctgtggagtatgacaaatttatagaaagtggaagaaaatggttctgccatgttgatgacgataattacgtcaatgcacgctccttgctccacttactctcttcattcagtccgtctcaggacgtttacctgggacgacccagcttggatcatcccattgaagccacggagagagtacaaggaggacgaaccgtgactacagtaaaattttggtttgccaccggcggtgcagggttctgcctttccagaggacttgccctaaagatgtctccttgggctagtctgggttccttcatgagcacagccgagcaggtgcgactccccgacgactgtaccgttggttatattgtggaaggccttttgggggcccgccttctccacagtcctttattccacagtcatctcgaaaatctacagaggctgcctccagatacactgttgcagcaggttacactctcccatggcggtcccgagaacccgcataatgtcgtcaatgttgctggaggattcagtcttcaccaggatccaactagatttaaatccatacactgtctgctgtatccagataccgattggtgcccacgccagaagcaaggagcccccacctctcgctag

SEQ ID NO: 132405 - DNA, 873 bp, synthetic construct
  misc_feature 1..873: note = Description of Artificial Sequence: Synthetic coding sequence
  source 1..873: mol_type = other DNA
atgtcccgggcccctccatcacgtccagccgccccctctcttaggcccgatgacgtctttatcgccgtgaagactacccggaaaaatcatggtcctcggcttagactgttgctgcgtacgtggatctcccgggcccggcaacagacattcatttttaccgacggcgacgacccggagctggagctccaaggaggtgatagggtaattaataccaattgttcagccgtgcggacgagacaggctttatgttgtaagatgagcgtggagtacgataagtttatagaaagcggacggaaatggttctgtcatgtggacgacgacaactatgtgaacgctcgtagtctcctccatcttctctctagcttctcaccctcccaggatgtctacttaggaagaccgtccttggatcacccaatagaggctaccgagagggtgcaggggggtaggactgtgaccaccgtgaaattttggttcgcaaccgggggcgccgggttttgtctttctcgaggccttgcccttaagatgtcgccgtgggcgagtctgggctctttcatgtctaccgcggagcaggtgcgactccccgacgactgcactgtgggttacatagttgagggtttactgggagcccggctgctgcattccccactcttccactctcacctcgagaacctgcaaaggcttccaccagataccttacttcagcaagtgaccctgtctcatggcggccctgaaaacccccataatgttgtgaatgtcgctggcggcttctctctgcatcaggaccccacccggttcaagagcatccattgtctgctctatccagacaccgactggtgcccccgacaaaaacagggggctcctaccagcaggtag

SEQ ID NO: 132406 - DNA, 1626 bp, synthetic construct
  misc_feature 1..1626: note = Description of Artificial Sequence: Synthetic coding sequence
  source 1..1626: mol_type = other DNA
atggggagccaggaggtgttggggcacgctgccagactcgccagcagcggactcctgttgcaagtgttgttccggctgattacatttgtgctgaatgcctttatcctgcgttttttgtccaaagaaatcgtgggggtggtgaatgtccggctcactctcctgtactcgaccacactgtttttggcaagggaggcattccgccgtgcttgcttgagtgggggaacacagagagactggtcacagactttgaacctgctgtggctgactgtgccacttggcgtgttttggtcactgttccttggctggatctggttacaattgctggaagtcccagatccaaatgtggtcccacactatgcgacgggggtagtactgtttggcttgagtgccgtagtcgagctgttgggcgaacccttttgggtgctcgcacaggcccacatgttcgtgaaactgaaagtcatagcggagtcactaagcgtcatcctgaagagtgtgcttacagcctttctggtgttatggcttccgcattggggtctgtacatcttttcgctggcacagctgttctacacaactgtgctggtactttgctatgtcatttacttcactaagctgcttggatctccagaatccacgaagctgcagacgttaccggtgagccgcatcacagacctgctccctaacattacacgtaacggtgcgtttatcaactggaaagaggctaaactgacatggagtttttttaaacagtcctttttaaagcagattctcaccgagggtgaacggtatgtgatgacatttctgaatgtgctgaacttcggagaccagggtgtttacgacattgtcaataatttaggctccctggtggcccgcctgatctttcaaccgatcgaagaatccttctacattttcttcgctaaagttctggagaggggaaaagacgctactttgcagaagcaggaggatgtcgccgtggcagccgctgtcttggagtcactccttaaacttgccctcctcgccgggctcaccattacagtatttggttttgcttactcacaactcgctctcgacatttacggtgggacaatgcttagttccggctccgggcccgtgctgctgagatcatattgcctttacgtcctcctccttgctatcaacggcgtgaccgaatgctttacatttgcagcaatgtcaaaagaggaggtggaccgttataattttgtgatgctggcattgagctccagcttcctggtgcttagctatttgctgacaaggtggtgtgggtccgtggggttcatactggctaattgtttcaacatggggattaggatcacccagtctctgtgttttatccatcgttactaccgtaggtctccccacaggcccctagccggacttcatctgtcccccgtgctgcttgggaccttcgcactgagtggcggcgtgacagctgtaagcgaagtctttctttgctgtgagcaaggctggcctgcgaggcttgctcacatcgccgtgggagctttttgcctgggagccactctggggaccgcattcctcacggagacaaagctcattcacttcttgcgcacccagctgggcgtgccacgacggactgataagatgacttag

SEQ ID NO: 132407 - DNA, 1509 bp, synthetic construct
  misc_feature 1..1509: note = Description of Artificial Sequence: Synthetic coding sequence
  source 1..1509: mol_type = other DNA
atggggtcccaggaagtgctgggccacgccgccagactcgccagtagtggattacttctgcaggtgcttttcagattgatcacttttgtcctgaacgcatttatcctccgtttcttgtcaaaggaaatcgtcggcgtggtaaacgttcgggtgccgttgggcgtcttctggtccctgttcttgggatggatatggctacaactgttggaggtgccagatcccaacgtagttccgcactatgcaacaggcgttgtattattcggtttgtctgccgtcgtcgaactcctgggagaacccttctgggtgctcgcgcaggctcatatgttcgtcaagctaaaggtcatcgcagaatcacttagcgtgatactcaagagtgtgttgacagccttcttagtgctgtggctgcctcattggggcctttacattttctccttagcacagctgttctacacaaccgttctggtgctgtgctacgtcatttattttaccaaactgctcggaagtccggaatctactaagctacagactctgcctgttagccggattacagacctcctgcctaatattacccgtaacggcgcgtttataaactggaaggaggcaaagttaacttggtcattctttaagcagagcttcctgaagcagatcctcactgaaggcgagcggtatgtgatgacatttctgaatgtgttaaacttcggcgatcaaggcgtctatgacattgtaaataacctgggaagcctggtcgcacgcctcattttccaacccattgaagagtctttttatattttctttgccaaagtccttgagagagggaaggatgctacattgcaaaagcaggaagacgtggcggtcgccgccgctgttcttgagagcttgctgaaattggcacttttagcaggtctcactatcaccgtgtttgggttcgcctacagccagctggcgctggatatttatggcggaacaatgctgtcctctggtagtggccccgtacttctgaggtcctattgtctctatgtcctgctcctggccataaatggtgtgactgagtgtttcacattcgcagccatgtcaaaagaggaggtcgatcggtacaatttcgtaatgttagctctatccagctcattcctggtcctgtcatacctgctcacaagatggtgcgggtcagtaggatttattctggcaaactgctttaatatgggcatccggataacgcagagcctgtgctttattcatagatattataggaggtcccctcatcgtccactcgctggcctccacctttcccctgtgctgcttgggacctttgctttatctggaggagtgacagcggtttctgaggtttttctgtgctgcgaacaagggtggccagccagactagcgcacattgctgtcggcgcattctgtttgggtgccactctgggcactgctttcctcaccgaaactaagctaatccacttcctgagaacccagctgggcgtccccagacgcaccgataaaatgacctag

SEQ ID NO: 132408 - DNA, 4308 bp, synthetic construct
  misc_feature 1..4308: note = Description of Artificial Sequence: Synthetic coding sequence
  source 1..4308: mol_type = other DNA
atggctcaaacccccgacgggattagttgcgagctgaggggggaaattaccagattcttgtggcctaaagaagtcgagctcctgctgaaaacctggctacctggagagggcgctgtgcagaatcacgtgctcgcactcctgaggtggagggcttacctcctccatacaacctgcctccccctccgcgttgactgcacattttcctacctggaagtccaggccatggctctgcaggagactcccccacaggtcacttttgaattggaaagtctgagagagttagtgctggagttcccgggcgtagcggccctggagcagctggctcagcacgtggctgcagctattaaaaaagtgttcccacgctctacacttggtaagctgttccgcaggcctacaccagccagcatgcttgctagactggaaagatcatccccgtccgagtccaccgatccatgttcaccatgcggcggatttctggagacgtatgaagcactgtgtgactacaacggctttccatttcgagaggagatacaatgggatgtagataccatttaccatagacaaggctgtcgccattttagtttaggtgacttttcacatctcgggagcagagatcttgccctcagcgttgccgcgctgtcttataacttatggtttcggtgtctcagctgcgtggacatgaaactgagcttggaggtgtccgagcaaatactgcacatgatgtcccagagtagtcatctggaggaactcgtcctagaaacttgttctctgcggggtgatttcgttcgtcgactggcccaggctttggctggtcattcgagttcaggcctccgagaactgtccctagccggaaatttgctggacgatcgcggtatgacggccttgtctcgacacctcgagcgttgtcccggtgctttgcggaggcttagtctggcccagacgggtctcactcctagagggatgagagccctgggtagggctctggctacaaacgccgccttcgacagtaccttgacgcacttagacctgtccggcaatccaggagccttgggggcctcagaggatagcggaggactgtacagctttctgtctagacctaatgtcctgtcattcctcaatctagccggaacggacacagccttggacactgtacgcggatgtagtgttggcggatggatgaccggacgcgctgattggagagctggcaggggggggctggggcctcccgctggcgtcgcaaattcgcttccgccacaactctttgcggctgtctccagaggatgctgcaccagtctcactcacttagacgcgtctcgaaatgtgttctcccggaccaaatcacgagccgcaccagcagctctgcagctgttcttatcccgagctagaactcttagacatttgggcctggcagggtgtaaactccccccagatgcactgagagctttattggatggcctcgctctgaacactcatctacgggacttgcacctggatctgagcgcatgcgagcttcggtctgctggtgcccaggtgattcaggacctcgtttgcgacgccggcgctgtgagcagtcttgatttagctgacaacggctttggcagcgatatggtgactcttgttctggctatcggcagatcacggagtctgaggcacgttgcgctgggccgaaattttaacgtccggtgcaaagaaacactggacgacgtgctgcatcgcattgtgcagctgatgcaggacgacgattgtcctctgcagtctctatccgtggccgaatccaggttaaaactgggtgcaagtgtgctgctgcgtgcactggctacaaaccccaacctgactgccctggacatcagcgggaacgccatgggagacgcaggggccaagctactggctaaggctctcagggttaatagtagactgcgctccgttgtgtgggatcgcaaccatacaagcgccctggggctgctggatgttgctcaggcattagaacagaaccattctctgaaagctatgccactgcctctcaatgacgttgcgcaagcccaacgctccagacctgaactgaccgcaagagccgtgcaccagattcaggcttgtctgctgcgtaacaaccgcgccgaccctgcctcatctgaccatacaacccgtcttcagccactggggctggtatccgatccgagcgagcaggaggtgaacgaactgtgtcagtccgtgcaggagcatgttgagctgctcggttgtggggccgggccccagggggaagccgctgtaaggcaggcggaagacgccatccagaacgctaatttcagcctatctatacttcctatcctgtatgaggctggctcctctcccagccatcattggcaactcggtcagaaattggaaggattgctgcggcaggtgggcgaagtttgccgacaggacatccaggactttacccaggccaccctggatactgcacggtcgctttgcccccagatgttgcaaggcagctcttggcgggagcaactggagggtgtactggcgggatccagaggactgcccgagctgcttcccgagcagctgcttcaggacgcgttcaccaggttgcgcgacatgaggctttcgatcactggcacactcgccgaatcgatcgtggcccaagctttggctggcttatcagcagcgagggaccagctcgtcgagtcattggcgcagcaagccaccgtaacaatgcctcccgccttgccagcccctgacggcggtgaaccttccctgcttgaacccggagaactcgaagggctcttctttcccgaagagaaggaggaggagaaggaaaaagatgattctcctccacagaagtggcccgaactcagccatggcctccatctggttccttttatccacagtgccgcagaggaggctgaaccggagccagagcttgcagcccccggcgaggatgcagaacctcaagccggcccaagcgcccgagggtctccaagtccagccgcacctggccctccagctggtcccctgcctagaatggatctcccactcgctggtcaacccttaaggcacccaaccagggcacgaccccgtcctcgaaggcagcaccaccatcgcccaccacctggcggtccccaggtgccacccgccctgccacaagaggggaatgggcttagcgcaagagtggacgagggtgtggaagaattcttctccaagcggctgatacagcaagacaggctgtgggcccccgaggaggaccctgcgacagaagggggcgctacacctgtgccccggaccctgcgaaaaaagttaggaacgctgtttgccttcaaaaagccacgctctactcgcgggcctagaacggacctagagacatctcccggagccgccccacggacccggaagactactttcggcgatctgcttcgaccccccacaaggccctccaggggggaggagctcgggggggccgagggagataccagttcaccagatcccgcaggacggtcaaggccgaggtataccagagacagcaaagcctattccatgatactcttgccggcggaagaggaagccacgctgggcgcaagacctgataaaaggaggcccttagaacggggggagactgagcttgctccatcgtttgagcagagggtgcaggtcatgcttcaacgtatcggcgttagccggggcagtggcggcgctgaaggcaaaaggaaacagtcaaaagacggtgagatcaaaaaggccggttcagacggcgacattatggatagcagcacggaagcgcctcctatctccatcaaatcccggacccactccgtcagcgccgaccctagttgccgacctggtccgggatcccaagggcctgagtcggcaacatggaagaccctaggccagcagctaaatgctgagttgcgcagcaggggatggggccaacaggacggcccaggcccaccatcccctggacagtccccttctccgtgcaggactagtccgtcccccgacagtctgggactcccggaggatccctgcctgggtccccgtaacgaggatggccagctgcgccccaggcctctctccgccggacgccgagctgtgtcggtgcacgaagaccagcttcaggcccccgccgagaggccattacgccttcagaggagccccgtgttgaaaagaagaccaaagctggaagcccccccttccccatccctcggctcaggactggggaccgagcccctgcctcctcagcctactgagccgagttcccccgagaggtcgcccccctcgcccgctactgaccagaggggggggggcccaaacccatag

SEQ ID NO: 132409 - DNA, 1335 bp, synthetic construct
  misc_feature 1..1335: note = Description of Artificial Sequence: Synthetic coding sequence
  source 1..1335: mol_type = other DNA
atgcccccagcactccccgcccccgatggcggcgagccaagcctgctcgagcccggtgaactcgagggactattcttcccagaggagaaggaagaagaaaaagagaaagatgacagtcctcctcagaaatggcccgaactcagccacggtctgcacctggtcccgtttatccatagcgctgcggaagaggccgaaccagaacctgaacttgcggccccaggtgaggatgctgagccgcaagccggaccctctgcaaggggctcaccctctcccgcggctcctgggcctccggccggacccctgccacggatggacctgcccctggccgggcagcctctacggcaccctacccgggcacgccctagaccacgaagacagcatcatcacagaccaccacccggcggcccccaggttcctccagccctcccccaagaggggaatggcctgagtgcgcgggtggacgagggcgtagaggaattttttagcaaacggttgatccagcaggaccggctgtgggcacccgaggaggaccctgcaaccgaaggtggggcgactcccgtccccagaaccctccgcaaaaaattgggaaccctgtttgcatttaaaaaaccgagaagcacacggggtccacggactgacctcgagacaagcccaggtgccgcccccagaacccggaaaaccactttcggggacctgttgcgtcctccgactcgcccctcacgaggtgaagagttgggtggagccgaaggagataccagtagcccagaccccgccggacggtcacgtccgaggtacacccgagactcaaaggcctattccatgattttacttccagcggaagaagaggctaccttgggggctcgccccgacaaacggagaccactcgagcggggcgaaacagaactagcccctagcttcgagcaacgggtccaggttatgttgcaacgcattggcgtctcccgcggcagtggcggcgccgaaggaaagaggaagcaatccaaggatggggagattaagaaagctggatctgacggagacatcatggacagctcaaccgaagcccccccaatatccattaagagccgcacacatagcgtgagcgcagacccctcttgtcggcctgggccaggcagtcaaggcccagaaagcgcgacctggaagacactcggccaacagctaaacgccgagctgcggagtaggggatgggggcagcaggacgggcccgggcctccttcccccggccagtctcctagtccttgcagaaccccgccacagaccgcttgggccagtcagagaacgttagcttgggcccccgagatgaagaatgggccgtag

SEQ ID NO: 132410 - DNA, 4119 bp, synthetic construct
  misc_feature 1..4119: note = Description of Artificial Sequence: Synthetic coding sequence
  source 1..4119: mol_type = other DNA
atggcccagacgccagatgggatatcatgtgagttgaggggggagatcacgagatttctctggcctaaagaagtggaactcttacttaaaacctggctgcctggagaaggggccgtgcaaaatcatgttctcgccctccttcggtggcgagcgtacttacttcacacaacctgtctcccactgcgagtggattgcacctttagttatttggaagtgcaggcaatggcattacaggaaacacccccccaggtgacattcgaactggaatccctaagggagctggtactggaatttcccggtgtcgccgccttagagcagctcgcccagcatgtggcagcagccataaagaaagtgttccctaggtccaccttgggaaagttatttagaaggccaactcctgcgagcatgctggctagattagagagatcttcacctagcgaatcaacggatccctgcagcccctgtggcggattcctcgaaacttatgaggccttgtgtgactacaatggttttccctttagggaggagattcaatgggacgtggataccatctatcaccgccagggatgtagacacttctctctaggagacttttcccatttgggatcgcgggacctcgcattgagcgtcgccgccctttcctataatctgtggtttcgctgtctgtcatgcgtggacatgaagctgagcctggaagtgtcggagcaaatccttcacatgatgtcgcaatcctcgcacctagaggagctggtgctggagacatgcagccttcgcggggactttgtgcgaaggctcgctcaggccctcgccggccattcctccagcggcttgagagagctgagtctggcaggcaatctgcttgatgatcgggggatgacagccctgtctcggcaccttgagaggtgcccaggagcgcttcggagactgtcattggcgcagaccgggctcacccctcgcggcatgagagcccttggtcgggccctggccaccaatgccgccttcgactctactctgacccacttagacttgtctggaaacccaggagcactgggcgcctctgaagattctggcgggctttactccttcttatcaagaccaaacgtgctcagcttcttgaatctcgctggaacagacaccgcactcgatactttgtttgctgcggtgtcacgcggctgctgtacaagcttgactcacttggacgccagtcgaaacgttttctcccgtaccaaaagtcgtgccgctcccgcagcactgcagttgttcttgtcacgggctagaacgctgaggcatctcggcttagccggatgcaagttgcctcctgacgcgttacgggctctgctcgacggtttagccttaaatactcacctccgggatctccacctcgacctgagtgcatgtgagctgaggtctgccggcgctcaagtgatccaggatctggtgtgcgacgcaggcgccgtaagttcactggatcttgctgataatggcttcggctctgatatggtgactctggtgttggccatcggcaggtcaaggtctctgaggcacgtcgcactcgggcgaaactttaatgtgcgatgcaaggaaacactggatgatgtgctacatcggatcgtccagttgatgcaggatgacgattgtcctctgcagtctctgtcagtggccgaatcaagacttaaacttggggccagcgttctgctgcgcgccctagccacaaatcctaacctgaccgccttggacatctctggaaatgccatgggagatgccggagctaagctactggccaaggctctccgggtgaactcccggctgcggtcagtggtttgggaccgcaaccatactagcgcactgggtctattagacgtggctcaggcactcgagcagaatcacagcctcaaggccatgcccttgccactgaatgacgttgcccaagcacagcgaagtcggccagagctgacggcccgcgcagtacaccagattcaggcatgcctcctgagaaacaatagggctgaccctgccagtagcgatcatacaaccaggctccagccattgggcctggtctccgatccttccgaacaggaggttaacgaactgtgccaatccgtccaggaacatgtggaattgctgggctgcggagccggccctcagggggaagcagctgtaagacaggccgaagacgccattcaaaacgccaacttttcgctgtccatcctccccatcctgtacgaagctggcagttctccttctcaccattggcagctgggtcaaaagctcgaggggctcctgcgccaagttggagaggtctgccggcaggatatccaggactttactcaagctacactggacacagcaaggtctttatgtcctcagatgttacaggggtcctcttggcgagagcagctggagggagtactggcaggcagccgtggtctcccggagcttctcccagagcagcttctccaggacgcattcacccggctcagggatatgaggctgtccataacgggaacgctggccgagagcattgttgcgcaggccctggctggcttatctgccgcgagagaccagttggtggaaagtctggctcagcaggccaccgtaaccatgcctccggcacttccggccccggatggaggcgagccgtcactccttgaaccaggagagctcgagggactgttctttcccgaggaaaaagaagaggagaaggagaaagacgattctccccctcaaaaatggccagagctttcacacggcctgcatctggtgccttttatacacagcgctgccgaagaggctgagcctgagcccgagctggccgcacccggggaagacgccgagccccaggccgggccttcggcccgaggaagcccctcccctgcagccccagggcctcccgcaggaccccttccaaggatggaccttcctctggccggccagccccttcgacatccgacacgggctcgtccccggcccagaaggcagcaccatcacagacccccaccaggcgggccccaggtgcctccggctctgccccaggagggcaacgggctctccgctagggtcgacgaaggggtagaagagttcttttccaaacggttaattcagcaggacagattgtgggcccctgaggaagacccagcaacagagggtggggcgacacctgtccctagaacattgcgcaaaaagctagggactctgtttgctttcaaaaagccccgatcaacgcgggggccaaggacagacctggaaacttcccctggtgctgcacccagaaccagaaaaaccacattcggtgatttgctgaggccccctactcgtccctcacgcggcgaggagctgggaggggccgaaggggacacaagttccccagaccccgctggaaggagccgccctcggtacactcgagacagtaaggcatacagcatgattcttctgcctgctgaggaggaggcgacactgggggcaagacctgacaagaggcggccattggaacggggggaaactgaattggcccctagctttgaacagcgcgtccaagttatgctccagaggatcggagtctcaagaggtagcggaggagcagaaggaaagcgtaaacagagcaaagacggagaaatcaagaaggcaggaagcgatggcgacatcatggacagttccaccgaagccccacccatttccattaagagcaggactcactctgtgtctgccgacccaagctgcagacctggtcctgggtcccagggccccgaaagtgccacgtggaagaccctgggccaacagctgaacgcggaattacgctctcgagggtgggggcagcaggacggacccgggccgccttctcccggacagtccccttcgccatgccgaacttcccccagccccgactccctcggactcccggaagacccttgtctgggcccccggaacgaggaacggcctttacgtttgcagagaagccccgtgctcaagcggaggccaaaactcgaggccccacccagtcccagcctgggctcaggcctcggtaccgagcccctccccccccagccaaccgagccgtctagtcccgagcgttcccctcccagtcccgccacagatcagcgagggggaggccccaatccctag

SEQ ID NO: 132411 - DNA, 1305 bp, synthetic construct
  misc_feature 1..1305: note = Description of Artificial Sequence: Synthetic coding sequence
  source 1..1305: mol_type = other DNA
atggggatgggcagaggcgctggcagatcggctcttggattctggcctacgctcgcgtttctgttgtgtagttttcccgcagcgacatccccgtgcaagattctcaagtgtaatagcgagttttggagcgcgacctccggctcccatgcacctgctagtgatgacacaccagaattctgcgctgctctgagatcctatgcactctgtactcgaagaaccgcgcggacttgtaggggtgacctggcatatcactctgccgttcatggtatagaagacctgatgagccagcacaattgttccaaagacggacctacaagccagcccaggttgaggacactcccccctgcaggcgattctcaggaaaggagcgacagccccgagatctgccactatgagaagtcttttcacaagcatagcgcaactcccaactatacccattgcggtttattcggagatcctcacctgaggaccttcacagatcggtttcagacctgcaaggtccagggcgcttggccactgattgataataactatctgaatgttcaggtgacaaacactccggtgctacccggttcagcagccacggcaacctcaaagttgacaattatctttaagaacttccaagaatgcgtcgaccagaaagtttaccaggcagagatggacgagctaccagctgccttcgttgatggatcgaagaacggaggagataagcatggcgcaaatagtttgaaaatcactgagaaggtgtcaggacagcacgtggagatccaagccaaatacataggtacaaccatcgtcgtgagacaagtcggtaggtaccttactttcgcagtccgcatgccggaggaagtggtcaatgccgtcgaggattgggactcccaggggctgtacttgtgcctgagaggctgtccattgaatcagcaaatcgacttccaagccttccatactaatgccgaggggacaggcgcacgacggctggcggcagcgtccccagccccaactgccccagagactttcccatatgaaaccgcagtggcgaaatgcaaggaaaaactacccgttgaagacctatattaccaggcctgcgttttcgacctcctgacaactggagatgtgaattttactcttgccgcctattacgccctcgaagacgttaagatgctgcacagcaacaaggacaagttgcacctgtacgacaggactagagatctgcccggacgcgccgctgccggcctccctctcgccccacggccgctgctgggcgcactggtgcctctattagcgcttctgcccgtgttttgttag

SEQ ID NO: 132412 - DNA, 1353 bp, synthetic construct
  misc_feature 1..1353: note = Description of Artificial Sequence: Synthetic coding sequence
  source 1..1353: mol_type = other DNA
atgcagcctccccgagagcgattggtcgtgaccggccgagcaggctggatgggtatggggagaggtgccggcaggagcgctctgggcttctggcccacgttggccttccttctgtgcagcttcccagccgcgacctccccttgcaagattctgaagtgcaacagtgaattctggagcgccacctccggctctcatgcacccgccagtgacgatacccctgagttttgtgctgcacttaggtcttatgcactctgcactagacggactgctagaacctgtcgcggagaccttgcctatcactccgccgtacacggcattgaggacctgatgtcgcagcataattgctccaaagacggccctacctctcagccaaggctcaggactcttccacccgcaggagactcacaggaaagatccgatagtccagagatatgccactacgaaaagtctttccacaagcacagcgcaactcccaattatacccactgtggcttgtttggcgacccacatctacgcactttcactgaccgcttccagacctgcaaggttcagggcgcctggcctctgattgataacaactatttgaacgtgcaagtcactaacactccagtgctgcctggctccgcggcaacagctacttccaagttgacgattatatttaagaattttcaggaatgcgttgatcagaaggtttaccaggctgagatggatgagctaccagctgcttttgttgatggctctaagaatggtggggataagcacggagccaatagcttaaaaatcactgaaaaagttagcggccaacacgtcgagatccaggctaaatatatcggcacaacgatagttgtgcgccaggtcgggcgctatctgacttttgctgtgagaatgcccgaagaagtagtgaacgccgtggaagactgggactcacagggtctgtacttgtgcctgagaggctgtcctctcaaccaacaaattgactttcaagcctttcacaccaacgcagagggcacaggcgctcgtcggctcgccgcggccagtccggccccgacggccccggaaacatttccctatgagacagctgttgcaaagtgcaaggagaagctacccgtggaagatctgtactaccaagcatgtgtgttcgatttgctgacaacaggagacgtcaactttacgcttgcggcttattacgcgttggaggacgttaagatgcttcactctaataaggacaagctccatctgtacgacagaacccgcgatctccctggtagagcagccgccggccttccgttggctccaagaccactgctgggcgccctggtccctctgctggcgttgttgcccgtgttttgctag

SEQ ID NO: 132413 - DNA, 1305 bp, synthetic construct
  misc_feature 1..1305: note = Description of Artificial Sequence: Synthetic coding sequence
  source 1..1305: mol_type = other DNA
atgggcatggggaggggagctgggagaagtgccctcggattctggccaaccttagcattcctcctatgttccttcccagcagctacaagcccatgcaaaattcttaagtgcaattctgaattctggtctgctaccagcggctcccacgctcctgcttctgatgacacccccgaattctgcgccgccttacgctcctacgctctgtgcaccaggagaaccgccaggacatgcaggggagatctggcctaccactctgcagtgcacggaatcgaggacctcatgtcgcagcataattgctccaaagatggtcccaccagccaaccccggcttcgtacactcccccccgccggcgactcacaagagaggagcgattcccccgaaatttgccactatgaaaagtccttccataaacactccgcgacccctaattatacccactgtggattatttggggaccctcatctgcgcactttcacggaccgcttccagacttgcaaggtccagggggcctggcctctcattgataataactacctaaacgttcaggtgacgaacacacccgttttgcccggaagcgccgcaaccgcaacctccaaactgaccataattttcaagaacttccaggagtgcgttgatcagaaagtatatcaggccgaaatggacgaactccccgcagccttcgtggacgggagcaagaatggcggcgacaagcatggagctaatagcctgaagattactgagaaggttagcggccagcacgtcgagatccaggccaagtacatcggcactaccatcgtcgtgaggcaagtgggccgctacctcacctttgctgtccggatgccagaggaagtcgtgaatgcagtggaagattgggactctcaaggcttgtacttgtgcttgcgcggatgtccgctgaatcagcagatcgattttcaggctttccacacaaacgccgagggaaccggagccaggcggctggcagcggctagcccggcgcccacggcgccagagactttcccatacgagactgcagtggccaagtgtaaggagaagttgcccgttgaagatctgtactaccaggcctgcgtctttgatctgctcacaacaggggatgtgaatttcactcttgctgcttattatgccctggaggatgtgaagatgttgcactctaataaggataagctgcacctgtacgatcgcaccagggaccttccaggaagagctgcggctggtttgcctctagctcccaggccactcctgggcgccctggtgccgctgctggccctgcttcccgtgttctgctag

SEQ ID NO: 132414 - DNA, 1026 bp, synthetic construct
  misc_feature 1..1026: note = Description of Artificial Sequence: Synthetic coding sequence
  source 1..1026: mol_type = other DNA
atgtcacaacacaactgttccaaggacggacctaccagccagcctcgcttgcggaccctccctccagcaggcgattctcaggagcggtctgactcccctgagatatgccactatgaaaagagcttccataagcacagcgcgacccccaattatacccactgcggcctgttcggggatccccacctcaggacattcactgaccggtttcagacatgtaaagtgcagggcgcatggcccctaatcgataacaactacctgaacgttcaggtcactaacactccagtactgccaggcagcgctgccaccgctacatctaagctgacaataatattcaaaaatttccaggaatgcgtcgatcagaaggtataccaagctgaaatggacgaactgccggcagcatttgtagatggctccaaaaacgggggcgacaagcatggcgcaaactctcttaaaattacagagaaggttagcggtcagcatgtcgagatccaggcgaagtatattggtactactatcgttgttcgtcaggtaggccggtatctgactttcgccgtcaggatgcccgaagaggtggtgaatgccgtggaggattgggactcgcaagggctgtacctctgccttcgtggatgccccctcaatcagcagatcgatttccaggccttccataccaacgcagaaggcaccggtgcccggaggcttgccgccgcaagcccagccccaaccgcgccagaaacattcccctacgaaacagccgtcgccaagtgtaaagaaaagcttcccgtagaggatctctattatcaagcttgcgtgtttgatcttctgactacgggcgatgtcaacttcacactggcggcctactatgcactggaagatgtaaagatgctccactccaacaaggataagttgcacttgtacgataggaccagggatctgcccggtcgggccgctgctgggctgcctttggcccctaggcctctgttaggagctttggtcccactgttggccttgctgccggtgttctgctag

SEQ ID NO: 132415 - DNA, 1305 bp, synthetic construct
  misc_feature 1..1305: note = Description of Artificial Sequence: Synthetic coding sequence
  source 1..1305: mol_type = other DNA
atgggcatgggaagaggcgccgggcggtcagcccttggattttggccgaccctggcatttctgctgtgcagctttcccgcggctactagtccttgcaagatcttgaagtgcaactctgagttttggagtgcgacaagtggctctcacgcccccgcttcagatgacaccccagagttctgcgccgcactgcgctcctatgcgctatgtacgaggcggactgccagaacttgtaggggggacctggcgtatcatagcgcagtgcacggcatcgaagacctcatgagtcagcataattgtagcaaagatggtcctacgtcccagccgcgactgcgcacgctcccaccggccggggactctcaggaacgatctgattctcccgagatctgtcattatgagaaatcttttcacaaacatagtgccactcccaactatacccactgcggcctgttcggcgacccccatctcaggacgtttaccgaccggtttcagacctgcaaggtacagggtgcgtggcccctgatcgacaacaactacctcaacgtccaggtgactaatacacctgtattgcccgggtccgctgctacagcgactagcaaactgaccattatatttaagaacttccaggagtgtgtcgatcaaaaggtttaccaggccgagatggatgagctgcctgctgccttcgtggatggcagtaagaacggaggggacaagcacggcgcaaactccttgaagatcacggaaaaggttagcgggcagcacgtcgaaatacaggcaaagtatatcggaaccacgatcgtggtgagacaagtgggacggtacttaaccttcgccgtaaggatgcccgaggaagtcgtgaacgccgtagaggattgggactcacagggactgtacctctgcctgagaggctgccccctgaatcagcaaatcgattttcaggcgtttcacacgaatgccgaaggcacaggtgcaagacgattagccgctgcctctccagcacctaccgcccctgagacttttccatatgagactgcagtggcaaagtgtaaggaaaaacttcccgtggaggacctctattatcaagcctgcgtgtttgatctcctcacaacaggcgatgtgaacttcacgctggccgcctattatgccctggaagatgtaaaaatgcttcacagcaacaaggacaagttgcacctgtacgacaggactcgcgatttacccggcagggcagccgcaggcctcccattagcaccacgtcccctgcttggagccctggtacccttactggcactgttgccggtgttttgttag

SEQ ID NO: 132416 - DNA, 1377 bp, synthetic construct
  misc_feature 1..1377: note = Description of Artificial Sequence: Synthetic coding sequence
  source 1..1377: mol_type = other DNA
atgggtggattggggcctcgccgggcaggcacgagtcgagagcgattagtagtcacagggcgtgcgggatggatgggcatgggcagaggagctggtaggagcgctctgggattttggcccactctggcttttctgctgtgttcttttcctgccgccacaagcccctgtaagatactgaagtgcaacagcgaattctggtcagccacttccggtagccatgcacctgctagcgacgatacccccgagttttgtgccgcattaagaagctacgcgttgtgtaccagacgaactgcccggacatgccgcggagacctggcctaccactcggcagtgcatggcatcgaggatctcatgtcccagcataattgcagcaaggatggtcccacctctcagccacgtctgcgcacacttccacccgccggggacagtcaggagaggagtgacagcccagagatttgccattacgagaaatccttccacaagcactccgccactcctaactacacacactgtggactctttggagacccccatctacgcactttcacagaccgcttccaaacctgcaaggtgcaaggcgcctggccgctgatcgataacaactatctgaatgtccaggtcaccaataccccagtgcttcccggcagcgcagccaccgctacctccaagctcactatcattttcaagaatttccaagaatgcgtggaccaaaaggtctaccaagccgaaatggatgagttaccagctgcttttgtggatggctcaaaaaatggcggcgataaacacggagccaacagtctaaagattactgaaaaagtcagcggccaacacgtggagatacaggccaagtatatcggcactaccattgtggtgaggcaggtgggtcgatacctgaccttcgcagtgagaatgccagaggaagtggtaaacgccgttgaggactgggacagccaaggcctgtacctctgccttcgcggatgccctctgaatcagcagatagattttcaggcgttccatacaaatgcggaagggactggcgcccgacggctggcggctgcctcaccggcacctacagcccccgaaacgtttccttacgaaacagctgtggcgaagtgcaaggaaaaactgcccgtggaggacctgtattaccaggcatgtgtgtttgatctcctgactactggtgatgttaacttcacgcttgcggcatattatgctctggaggacgtgaaaatgttgcacagtaataaggacaagctgcacttgtatgataggacacgggacctgccaggacgggccgccgcaggcctcccacttgcccctagacccctgcttggagcactggtgcccctccttgcactgctgcccgtgttttgttag

SEQ ID NO: 132417 - DNA, 1437 bp, synthetic construct
  misc_feature 1..1437: note = Description of Artificial Sequence: Synthetic coding sequence
  source 1..1437: mol_type = other DNA
atgataagaaaaaagcgtaagagatcagcccctccaggtccctgccgaagccacggtccaaggcctgctaccgcacctgcccctccaccctcacccgaacccacccgcccagcttggacgggcatgggcctccgagctgccccttcctctgcggcagctgcggccgccgaggtggagcagaggcgtagccctggactatgccctcccccgttggagctgttactgctcctgctattctcccttgggctcctgcatgctggtgattgccagcagccagcgcagtgccgaatccagaagtgcacaacggattttgttagtttgacatctcatttaaatagtgccgtggacggattcgactccgaattctgtaaagccctgcgcgcctacgcaggttgcacgcaacgcacaagtaaagcatgccgtgggaacctggtctaccacagcgctgtgctagggataagcgacctaatgtcacagagaaactgctccaaggatggccctacgagctccactaacccagaggtaactcatgatccatgcaattatcactctcacgctggtgccagagaacaccggcgcggcgatcagaaccctccaagttaccttttttgtgggctgttcggcgatccccacctccgcacatttaaagataatttccagacttgcaaggtggagggtgcttggcccttgattgacaacaactatttgagcgttcaagtcaccaatgtacccgtggttccaggcagttccgcaacggccactaacaagatcactataatcttcaaggcacaccatgaatgcactgatcagaaagtctaccaggcagttactgatgacctgcccgccgcttttgtcgatggaacaactagcggaggcgacagtgatgcaaagagcctgcggatagtggagcgcgagtcagggcactacgtagaaatgcacgccagatacattggcactacagtgttcgttcgacaggtcggtcgctatctgacactcgcaattaggatgccggaggacttggcaatgtcatacgaggagagccaggacttgcagctctgcgtcaatggttgccctctgtctgagaggatcgacgatgggcaggggcaggtttctgccatactaggtcactcactgccaaggacttccttggtgcaggcgtggcccggttacacactcgagacagcgaacacacagtgtcatgagaagatgcctgtgaaggatatctatttccagtcatgcgtgtttgatttgctgaccacaggtgatgctaactttacggccgccgcacacagtgccttggaggacgtagaggccctccatccacgaaaggagcgctggcacatttttccaagttccggaaacggcacacccagaggcggcagtgacctgtcagtctccttgggacttacctgcctgattctgatcgtatttctgtag

SEQ ID NO: 132418 - DNA, 1314 bp, synthetic construct
  misc_feature 1..1314: note = Description of Artificial Sequence: Synthetic coding sequence
  source 1..1314: mol_type = other DNA
atgggtcttcgagccgctccttccagcgctgctgccgcagccgccgaggttgagcagcgaaggtccccaggcttatgtccacccccccttgagctgctgcttttgctcttgttcagcctgggccttttacacgcaggcgactgccagcaacctgcccagtgtaggattcaaaagtgcacaacagactttgtgtctctgacatctcatttgaatagtgcagtagacggctttgactctgaattttgcaaggcactgagagcctatgcaggttgtacccagcggacaagcaaggcctgcagaggaaacctggtttatcacagcgcagtcctgggcatttcagaccttatgagtcagaggaactgctcaaaagacggtcctaccagctctaccaaccccgaagtcacacatgatccatgtaattaccactcacacgcaggagcaagggagcaccggagaggggaccagaacccgccctcttacctgttctgcggcctgttcggagacccacacctcaggacgttcaaggataattttcagacttgcaaagtggaaggggcttggccgctgattgataacaattatctgtctgtgcaagttacaaatgtgcctgtcgtacccggatcgagtgccactgcaacaaacaagattacaataattttcaaggctcaccacgaatgcactgatcaaaaagtgtatcaggctgtgaccgacgatctgccggctgcttttgtcgatgggaccacctccgggggagacagtgacgccaagtccctccggatcgtcgaacgtgaaagcggacattacgtcgaaatgcacgccaggtacattggcactaccgtctttgtaagacaggtcggcaggtatttaacgctggccatccgaatgccagaagacctggctatgagttacgaggagtcacaggatttacaattatgcgtgaacggatgccctctttcggagaggattgatgacggccaaggacaggtaagcgccattctcggacattcgttgcctaggacatccctcgtccaggcttggcccgggtatactcttgagacagcgaatactcaatgccacgaaaaaatgccagtgaaggacatatactttcagtcttgcgtgtttgatctcttgaccacaggcgatgctaattttacggcagcagcccactccgcactggaggatgtcgaagcattgcaccctcgcaaggagaggtggcacatattcccttcgtctgggaacggcacaccacggggcggctccgaccttagtgtgtccttagggttaacctgtctgattctgatcgttttcttgtag

SEQ ID NO: 132419 - DNA, 1176 bp, synthetic construct
  misc_feature 1..1176: note = Description of Artificial Sequence: Synthetic coding sequence
  source 1..1176: mol_type = other DNA
atgatcgaggttgtagctgaactgagccgaggcccggtatttctcgcaggtgaagctcttgaatgcgtggttacggtcaccaaccctttaccaccaaccgccacttctgcctccagtgaggccctagcctgggcaagcgcccaaatacactgccagttccacgcctctgagagccgcgtagctctcccacctcccgacagttcacaacccgatgtgcagccagattctcagacagtcttcttaccacatcggggcgagcgagggcagtgtatcctgagcactccccctaagattctgttttgcgacctgcgcctagaccccggggagagcaaaagctactcatactctgaagttctgccaatagaagggccaccttcctttcgagggcagagcgtgaagtacgtgtataagcttaccatagggtgtcagagagtaaacagtcctattaccctcctgcgtgttccactgagagtcctggtgctgaccggcctgcaggacgtgagatttccccaggatgaagcagtggccccttcttctcccttccttgaagaggacgaaggaggcaaaaaagattcctggctggccgaattggccggtgaaagactaatggcagccacctcatgtagaagtttgcatctctataatattagcgacggccgcggcaaagttggtaccttcggaatttttaaatctgtgtaccgcctgggggaagacgtcgtaggcacgctaaatctcggagagggcaccgtggcttgtttgcaattttctgtgtccctacaaacagaagagcgcgtacagcccgagtaccaaaggagaaggggggccggtggcgttccaagcgtctcacacgtgacccatgctcgccatcaggagtcttgcctgcacactacgaggacgagcttttcccttccgatcccactgtcctccacccctggcttctgcacagcaattgtgtccctgaagtggaggttacatttcgaattcgtgacttcgagggaacctgggctagtccttttgccacccgtcgagcagcccgaacctaccacctggaccggtccagaacaggtgccagtggatactttctcatgggatctacccatcaaggtactgcctaccagccctaccttggcgagctacgccgcgccgggtccttcaacctctacaatcacaatttag

SEQ ID NO: 132420 - DNA, 1296 bp, synthetic construct
  misc_feature 1..1296: note = Description of Artificial Sequence: Synthetic coding sequence
  source 1..1296: mol_type = other DNA
atgactcgtgctttgtcgggcttggcctgcagagcactgcctgctggccgagacagcgccgaagggcttggagtgccaattcccagtgtagactatgccagaagcgattccggggctgccatgatagaggttgtggcagagttatcgcgcggtcctgtattcctggccggcgaagccctggaatgtgtggtgactgtaaccaatccacttccaccgacagcaacctccgcctccagcgaggcacttgcgtgggcctccgcccagatccactgtcagtttcacgccagcgagtctagggtggccctgccgcctccagactccagccagccagacgtgcaacctgattcccaaaccgtgttcttgccgcacaggggggagaggggccaatgtattctctccacgccacccaaaatcctattttgtgacctgcggttggacccaggcgagtcgaagagctatagctactccgaagtcctgcccatagagggaccccctagtttccgcggccaaagcgtgaagtatgtttataaactgacgattgggtgccagcgcgtaaatagtcccataacactcttgagggtgcccttaagggtgctggtgctgaccgggctacaggacgtgcgattcccacaggatgaggccgtcgccccctcctctccttttctagaggaagacgagggaggtaagaaagacagctggctggctgaactcgcgggggagaggctgatggcggccaccagctgccgctctctgcacctctacaatatctccgatggcaggggcaaggtcggaacctttggtatttttaagtccgtataccgtctgggggaagacgttgttgggacgctgaatctgggcgaggggacggtagcctgtctgcagtttagtgtctccttacagactgaggagcgggtgcagcctgaatatcagagacgccgtggagcaggtggggtacccagcgtcagccacgttacacatgcccgacaccaggaatcctgtcttcacacaaccagaacaagcttctcactgcccatccctctgagtagtactcctggcttttgtaccgccattgtgtccctaaagtggagactacacttcgagtttgtgaccagccgtgagccgggcctagtcctgttgccccccgtggaacagccggaacccaccacgtggaccggacctgagcaggtgcctgttgacaccttcagttgggatctccctatcaaagtgttacccacttctcccacactcgccagttatgccgcccccggcccgagcacctcgaccatcactatttag

SEQ ID NO: 132421 - DNA, 1119 bp, synthetic construct
  misc_feature 1..1119: note = Description of Artificial Sequence: Synthetic coding sequence
  source 1..1119: mol_type = other DNA
atgagcagtaaatatcccagaagcgtccggaggtgcctgccactctgcgctcttacattggaggcagcattgattctgcttttctattttttcacccactacgatgcatccctggaggatcagaaaggactcgtggcttcataccaggttgggcaggacctcaccgtgatggctgcattgggcttaggattccttacttccaacttcaggaggcattcttggtcttctgtggccttcaatttgtttatgttggctttgggcgtgcagtgggccatcctgttagatggcttcctatcccaattcccccctggaaaggtcgtgataaccctattctccatccgcctggccaccatgtccgccatgtctgtgttgatttcagcgggcgcagtactcggcaaggttaacctggcacagctggtggtgatggtgctcgtcgaagtgacagctctgggtaccctacgtatggtgatttcaaacatttttaataccgactatcacatgaatctgaggcatttttatgtgtttgcagcctacttcgggttaacagtggcttggtgtctgccaaagccacttccaaaaggaacggaggacaacgatcagagagctaccattccctcactttccgccatgctgggagctctcttcctttggatgttctggcccagcgtaaattccgcccttcttcggtcacctattcagcgtaaaaacgccatgttcaacacgtactatgcgcttgccgtttccgtggtgacagcgatatccgggagctcgttagcccatccccaaagaaagatttccatgacctacgtgcacagcgctgtgcttgcaggaggcgtagctgtggggactagttgtcacttgatcccaagcccctggttggctatggtgctcggcctggtggcaggactcatctcaataggcggcgctaagtgccttcctgtctgttgtaatagagttcttggcatacaccacatatcagtgatgcattctatattttcactattaggcctgctgggcgaaataacctatatagtcctgctggtgcttcatacagtttggaatggcaatgggatgtttgcccccaagtcccaaaacatggagagtacctcctgcggttag

SEQ ID NO: 132422 - DNA, 1254 bp, synthetic construct
  misc_feature 1..1254: note = Description of Artificial Sequence: Synthetic coding sequence
  source 1..1254: mol_type = other DNA
atgtctagcaagtacccccgcagcgtgcgtagatgcctgccactgtgcgcactcacgttagaagccgcgctcatcctactcttttacttttttactcattatgacgcctctttggaggatcaaaagggcttggttgccagttaccaggtgggccaggatttaacggtgatggcagcactgggactgggcttccttacatccaacttcaggcgccactcctggtcaagcgtggcctttaatctcttcatgttggcactgggcgtgcagtgggcaatcttgctcgacgggtttttgtctcagtttccccccggaaaagtcgtaattactctctttagcattcgactggccacgatgtctgccatgtctgtactcattagcgctggcgcagtactgggcaaagttaatctggctcagcttgtggtgatggtcctcgtagaggttaccgccttaggaacgctacggatggtgatctccaacatttttaataccgactatcatatgaacctccgacacttctatgttttcgctgcttatttcggactaaccgtggcatggtgtctgcccaagccgctgccaaaggggaccgaagacaatgatcaaagagctacaattcccagcttgagtgccatgttgggtgctctgttcctgtggatgttttggccatccgtaaacagcgctctgctccgctcccctatccagcgcaagaacgcaatgttcaatacctactatgcccttgccgtttccgtcgtgacagctatctctggatcttccctggcgcatccccagcgaaagatctccatgacctatgtgcacagcgcagtactcgcaggaggcgtggctgtgggcacttcgtgccatctgattcctagcccatggctcgccatggtcttggggcttgtagcaggccttataagcattggcggggccaagtgcctgccagtctgctgtaatagagtgcttggcattcaccatatctccgtaatgcactccattttcagtcttctgggtctgctcggagaaatcacatatattgtgctcctggtcttgcacactgtttggaacggcaatggaatgattggcttccaggtgctgctcagtatcggagagctgtctctggccattgttattgccctgacctcagggctcttgaccggcctgctgcttaacctcaagatatggaaggccccgcacgtggccaagtacttcgacgaccaggtattttggaagttcccacatctggcggtaggtttttag

SEQ ID NO: 132423 - DNA, 804 bp, synthetic construct
  misc_feature 1..804: note = Description of Artificial Sequence: Synthetic coding sequence
  source 1..804: mol_type = other DNA
atgagtagcaagtatccgcgtagcgtgcgccgatgccttccgttatgcgcactgaccctcgaagcagctctcattcttctgttctatttcttcacgcactatgatgcttctctcgaggaccaaaagggcttggttgccagctatcaggttggtcaggacctaacggtgatggcagctttgggcctggggtttctcacgagcaacttccggcgtcacagctggagtagcgtcgcattcaacctcttcatgttagctctcggtgtgcagtgggcaattctacttgacgggtttttgtcccagtttccgcctggtaaagtggtaataacgcttttttccataagactcgccaccatgtcagccatgtccgtgctaatctccgctggcgcagtgctggggaaggtgaatctggcgcagcttgttgtaatggttctagttgaggttactgccctgggcactcttcgtatggtcatctctaacattttcaacacatatgtgcactctgccgtgctcgccggcggggtcgctgtgggaacatcgtgccatctgataccttcaccatggctggcgatggttctggggcttgtcgctggattgatcagcattggaggagctaagtgtctccccgtgtgctgtaatcgcgttctgggcatccatcatatcagcgtcatgcatagcatcttctctcttttagggcttctgggagagattacatacattgtgctattagtgctgcacacggtgtggaatggcaacggaatgttcgccccaaaatcacagaatatggagtcaaccagctgtggttag

SEQ ID NO: 132424 - DNA, 801 bp, synthetic construct
  misc_feature 1..801: note = Description of Artificial Sequence: Synthetic coding sequence
  source 1..801: mol_type = other DNA
atgtctagtaagtaccctcgcagcgtcaggcggtgcctgccgctctgtgccctcaccctagaggccgctcttatcttgctgttttactttttcactcactatgacgcatccttggaagatcagaaagggctggtggcctcatatcaggtcggacaggacctgaccgttatggctgccctagggcttggattcctgacaagcaacttccgccggcacagctggagctccgttgcgtttaacctttttatgcttgctctgggtgtgcagtgggccattctcttagatggattcctgtcacaatttcctcccggaaaggtggtgatcacactgtttagcattcggctggctacaatgagtgccatgagcgtgcttatcagcgccggggccgtcctcggtaaagtcaatctcgcgcagctggtggttatggtcctagttgaggttacggctctcggaacgctgcgcatggttatttcaaacatttttaacgtttgctgcaacagagtactcggtatccatcacatatccgtcatgcattccattttctcactcttagggctgctcggggaaatcacctatatcgttctgctagtgctccataccgtgtggaacggaaatggaatgattggcttccaggtcctgctttccattggcgagctgtcattagcaattgttatcgccctgacttccggattactgacgggattgctgctgaatttgaaaatttggaaggccccccacgtcgctaagtactttgatgatcaggtgttttggaaatttcctcacctggccgtggggttctag

SEQ ID NO: 132425 - DNA, 1206 bp, synthetic construct
  misc_feature 1..1206: note = Description of Artificial Sequence: Synthetic coding sequence
  source 1..1206: mol_type = other DNA
atgtacttcattaaccagagactcttcctgcgtctatggcgagtgccggtgatgcgggcatcacactgttatcagtcacagggctggagaccagtcgcagtcggacaggacctgacagttatggctgctctcggccttggttttttgacatccaatttccgacgacatagctggagcagcgtcgcctttaatctgtttatgctagcactgggcgtacagtgggccatcttgttggatggatttctctcccagtttccccccgggaaggttgttataaccctctttagtattagactcgctacaatgtctgcgatgtccgttctcatctccgcaggggctgtgctgggcaaggtgaacttagcccaactcgtggtcatggtgcttgtagaagttactgccctgggcaccctccggatggtcatttccaacatatttaatactgactaccatatgaatcttaggcacttttatgtgtttgctgcttactttggactcacagtggcttggtgccttcctaaaccattacctaagggaaccgaagacaacgaccagagagctacaattcccagcctttccgccatgttaggggcgttattcctgtggatgttttggcctagcgtaaactccgctctgctgcgctcccctatccagcggaagaacgctatgttcaatacctactacgcgctagctgtgtcagttgtgacagccatttccggctccagcctggcccacccccagcggaagatcagcatgacctatgtccacagcgcagtcctcgccggcggtgtggccgtgggtacatcatgtcacctgattccttccccttggcttgccatggtgctggggctcgtcgctggactgatctcaattgggggagctaaatgcctgcctgtgtgctgcaaccgcgtcttagggatacatcacatatcagtgatgcattctattttctcactcctgggactactgggggagatcacatacatcgtccttctggtgctgcacactgtctggaacgggaatggaatgattggatttcaggtgcttctgtcaatcggcgaattgtcactggctattgtaattgccttgacatcaggattgctcaccggtctcttgctgaatctgaagatctggaaggctccccacgtagctaaatatttcgacgatcaagtgttctggaagttcccccacctggcagtgggcttctag

SEQ ID NO: 132426 - DNA, 1065 bp, synthetic construct
  misc_feature 1..1065: note = Description of Artificial Sequence: Synthetic coding sequence
  source 1..1065: mol_type = other DNA
atgagttctaagtatccccggtcagtgaggaggtgcttgcctctgtgcgctctcaccttggaggccgccctgattctgctcttttatttcttcacccactatgacgcgtcgctggaagaccagaaaggcctcgtggcatcgtaccaagtggggcaggatctgaccgtcatggccgcgctgggcctgggctttttgacctcaaatttccggagacacagctggtcatccgttgcgtttaacctgtttatgctggctctcggcgtgcaatgggccatcctgctagatggcttcctgagccagtttcctccaggtaaagtggtgatcaccctcttttctattcgcctggctacgatgtcagccatgagcgtactcatttccgctggcgctgtcctcggaaaggtaaatctggctcaactggtggttatggttctggttgaagtaactgctctcgggactctccgaatggtcatttccaacatctttaataccgactatcacatgaatctgagacatttttacgtgtttgcagcatacttcgggttgaccgtggcctggtgtctccccaagcccctgcctaagggaaccgaggataacgaccagcgtgccactataccctccttgagcgcaatgcttggcgccctgtttctgtggatgttctggccatctgtgaacagtgcactcctgcgctctccaattcagcgcaagaatgcaatgttcaacacgtattacgccctggccgtcagtgtggtgaccgcgatcagtggcagcagccttgcccacccccaaaggaagattagcatgacctacgtgcactccgccgtcctcgccgggggcgtggccgtgggaacatcttgccatctaatcccctccccatggctggccatggtgctgggtctggttgccggcctcataagcataggtggagctaaatgtctccctgactggcttcccgggcctcctcaacattggggtacccagctggggcaccgcgacagctctcacgtgtggagcccagatcgattcgctccaaagtctcagaacatggaatccaccagttgcggttag

SEQ ID NO: 132427 - DNA, 1206 bp, synthetic construct
  misc_feature 1..1206: note = Description of Artificial Sequence: Synthetic coding sequence
  source 1..1206: mol_type = other DNA
atgtacttcattaaccaacgcttgtttttgagactgtggcgagtgcctgttatgcgagccagtcactgttaccagtcacaaggctggcggcccgtggctgtcggacaggatctgactgtcatggctgctctgggcctgggattcctgacaagcaatttccgcaggcactcatggagttcggtggcctttaatctgttcatgctggccctgggggtacagtgggccatacttctcgatggattcctgtcacaatttccgcccgggaaggttgtgatcaccctgttttctatcagattagccacgatgtctgcgatgtccgttctgatcagcgctggcgccgtcctgggaaaggtcaacctcgcacaacttgttgtgatggtgctggtcgaagttactgctttggggactctgcgtatggtaatctctaatatctttaacactgactaccatatgaacctcagacacttctatgttttcgcagcttacttcggcctcactgtggcctggtgcttgcccaagccccttcctaaggggaccgaggataacgaccaaagggcaaccattcctagtctgagtgccatgcttggagcgctgtttttgtggatgttttggcccagcgtgaatagcgccttactcagaagtcccattcaacggaaaaatgcaatgttcaacacgtattatgctctcgctgttagcgtggtaacagctatctctgggtctagtctggcacatccacagcgcaaaatcagcatgacttacgttcatagcgctgtgctggccgggggtgtggctgtagggaccagttgccatctcatcccatcaccctggcttgctatggtgctggggctggtagctggactgatttctatcggcggcgctaagtgcttacctgtgtgttgtaacagggtgttgggaattcatcatatctcggtgatgcatagcattttctccttgctcggcctcctgggggagatcacttacatcgtattgttggttctccacaccgtgtggaatggcaacggtatgattgggttccaagtgcttctttctatcggcgagttatcgctggctatcgtcattgcactgacttctggcttgctcaccggactgttactgaacctgaagatctggaaggccccccacgttgccaagtactttgacgaccaggtgttttggaagttcccgcacctggctgtggggttctag

SEQ ID NO: 132428 - DNA, 1191 bp, synthetic construct
  misc_feature 1..1191: note = Description of Artificial Sequence: Synthetic coding sequence
  source 1..1191: mol_type = other DNA
atgtcctccaaataccctaggagcgttaggcgctgcctgcctctttgcgctctgaccttggaagcggccctgatccttctgttttactttttcacccactacgatgctagcctagaggaccagaaggggctagttgcctcataccaggtcggtcaggatctcacagtgatggccgcgttggggctggggttccttacctccaacttccggaggcactcctggtcctctgtggcgttcaatctgttcatgctcgccttgggggtgcagtgggctattctgttggacggtttcctgagccagttccctcctggcaaagtggtgatcacactttttagtattcgcctggccacaatgagtgccatgtccgtgctaatctcagccggagccgtcttaggcaaggtaaacttagctcagctggtggtgatggtgctcgtggaagttaccgccttgggaacattaagaatggtcatttctaatattttcaacacagactatcacatgaatctgcggcatttctacgtcttcgcagcctacttcggacttacagtggcgtggtgtctgcctaaaccactgccaaagggcaccgaagacaatgaccagcgggccacaattccctccctgagcgctatgttgggtgctctgtttctgtggatgttctggccctctgtgaatagcgcactcctgcggagtcccatccagcgaaaaaacgctatgttcaacacttattacgcactggcggtgtctgtcgtcaccgctatcagcgggtcttctcttgcccatccccagcggaagatttctatgacatacgtacactctgctgtgttagctgggggggttgctgtaggcacatcatgtcacttaatcccaagtccatggctggctatggttctggggctcgttgcaggacttatttctattgggggcgcaaaatgcctgcctgtttgttgcaaccgggtgttgggtattcatcatattagcgtgatgcattccattttctctctcctggggctgttgggcgaaattacttacattgttctgttggtgctgcatactgtgtggaacggtaacggaatcttcctgatctggctgctggactttaaacagaaacacccacggaagactaggccagtgcagaagcaggacaacttcttgtccctactcccagctttcgtgagagagaaacggtcctag

SEQ ID NO: 132429 - DNA, 927 bp, synthetic construct
  misc_feature 1..927: note = Description of Artificial Sequence: Synthetic coding sequence
  source 1..927: mol_type = other DNA
atgtcctccaaatatccccgctctgtgaggcgctgtcttccattatgcgctctcacattggaagcagccctcattctacttttctactttttcacccactacgatgcctcgctcgaagatcagaagggccttgtggcctcctaccaggtggggcaggacctgaccgtgatggccgccctaggcttaggattcctaacttctaattttagacggcattcctggtcctccgtcgctttcaaccttttcatgctggcgctcggggttcaatgggcaattcttctggacggcttcctgtcacaattcccacccgggaaggtcgtgattaccttgttctccatccggttggccacaatgagcgcaatgtctgtcctgatcagtgctggtgccgtactcggaaaggtcaaccttgctcagttggtcgtgatggtgcttgttgaagtgacagcgttaggtactctgcgcatggtgatatccaacatcttcaatacggattatcatatgaatctgcgccacttttatgtctttgcagcctacttcggcctgacggtggcttggtgcctgcccaagcctctcccaaagggcacagaggataatgatcagagagccacaatcccgtccctaagtgccatgctgggcgccctgttcctgtggatgttctggccttctgtgaattcagccctgctgcgctctcccatccaacgaaaaaatgcaatgttcaacacttattatgccttggcggtaagcgtcgttacagctatctccgggagtagcttagcgcacccgcagcgtaagatcagcatggactggctcccaggtccgccccaacattgggggacacagctggggcatagggattcatcacatgtatggtcacctgatcggtttgctcccaagtcccagaacatggaatccacttcatgcggttag

SEQ ID NO: 132430 - DNA, 1197 bp, synthetic construct
  misc_feature 1..1197: note = Description of Artificial Sequence: Synthetic coding sequence
  source 1..1197: mol_type = other DNA
atgagctcaaagtacccacgtagcgtgagaaggtgcctgccattatgtgccttgactcttgaggcggcactgattctgctcttttacttcttcacacactacgatgcctcgctcgaggaccagaaagggcttgtagcatcatatcaggtggggcaggatctgactgttatggccgctcttggactgggattcctgacctcgaacttcagacgccattcttggtccagcgtggcattcaacctgttcatgcttgccctgggtgtgcagtgggccattctgctcgacggatttttgtcccagttccccccgggcaaggtggttatcacactgttttctattcggttagccacaatgagtgccatgagcgtcctaatctccgcgggagccgtgttaggaaaggtgaacttggcccagttggtcgtgatggtgttggtcgaggtaaccgcactgggcacactgcgaatggtaatatcaaacatattcaataccgactatcacatgaatctgcggcacttctacgtgtttgcagcttactttggcctcacagtggcttggtgcctcccaaagccattgcccaaaggcaccgaggacaatgatcagagagctacaattccctccttgtctgccatgttgggcgctctgttcctgtggatgttttggccatctgtcaactctgctttgttgcgctctcctatccagcggaagaacgccatgtttaatacgtattacgctcttgcggtttcagtggttaccgccatcagtggatcatcactggcccatccacagcggaaaatcagtatgacttacgtgcactccgctgtcctggcgggcggcgtcgcagtgggcacttcctgtcacctgatcccatcaccttggctggccatggtattaggtctcgttgccggtctgatcagtatcggtggggccaaatgtctgcctgtatgttgcaatcgagtccttggaatcccccacctgcggcatgctctgcatttgcagttggccgggtcggcatggcgcgaccatcttcactgcgcggctggtgcttcctattgtctggagcggcagtggcacgattggttgcccgggccccctcagcattggggaacacagttaggccatagagactccagtcacgtctggagtcccgatcggttcgcacccaaaagtcaaaacatggagagcaccagttgtggctag

SEQ ID NO: 132431 - DNA, 939 bp, synthetic construct
  misc_feature 1..939: note = Description of Artificial Sequence: Synthetic coding sequence
  source 1..939: mol_type = other DNA
atgagtagcaaatatccaaggtcggtgcgcaggtgtttaccactgtgcgccctaacgttggaggctgctttgattctgttgttttacttctttacacattatgatgctagtctggaggaccagaaaggactcgtggcctcttatcaggtaggccaggacctgacagttatggccgccctgggtttagggtttctcacctcaaactttaggcgtcatagctggtcctctgttgcctttaaccttttcatgctggctctcggcgtgcagtgggctatactcttggatggatttctgtctcagttccccccgggcaaagtcgtgattaccttgtttagtatcagattagccacaatgtctgcaatgtccgtgctgatctccgccggcgccgtgctgggtaaagtcaatttagcgcagctggtggtgatggtgttagtggaggtcacagccttgggcaccttaagaatggtgatctctaatatttttaacacttatgtgcatagtgcagtgctggcaggtggggtggccgttggaacaagctgccacctgatccccagcccttggctcgctatggtgctagggctggtggccggcttgattagtatcgggggagccaaatgcctacccgtatgttgcaaccgggtcttgggaatccaccacataagcgtgatgcattctattttctcgttgttgggcctgctcggggaaatcacgtacattgttcttttggtactgcacaccgtttggaacggcaacggaatgataggatttcaggtcctgctgagcattggggaactgtccctggccatcgtcattgcccttacatccggcctgcttaccggcttactgctgaatttgaagatatggaaagcccctcacgtggctaagtatttcgatgatcaggtgttttggaaattccctcatcttgctgtgggtttttag

SEQ ID NO: 132432 - DNA, 1041 bp, synthetic construct
  misc_feature 1..1041: note = Description of Artificial Sequence: Synthetic coding sequence
  source 1..1041: mol_type = other DNA
atgagcagcaagtacccacgcagcgtgcggcgttgtctccctttgtgtgccctgacccttgaggccgcactgattctgctgttttacttttttactcactatgacgcttccctggaggatcagaaaggactggtcgcaagctaccaagtcgggcaggaccttaccgtaatggcggcactgggactgggtttcctgacaagcaattttcgacgccacagttggagtagtgttgcgtttaacctgttcatgctggcacttggcgtgcagtgggccattctgctggacggctttctgtcacagttcccacctgggaaagtggtgattactctcttttccatccgcctagcaacgatgtctgccatgagcgtgctgatctcggcgggcgcagtgctgggaaaagtaaatctcgctcagttggtggttatggttttggtcgaggtgactgcactcggtacccttaggatggtaatttctaacatattcaaccccagcgtcaattccgccctattgagatcacccatccagcgcaaaaatgctatgttcaatacatactatgcccttgccgtttcagtcgtcaccgctatatccggatcatccctagcacatcctcagagaaagatctccatgacatatgttcatagcgctgtgctggctgggggagtcgccgttgggacatcatgtcacctgatcccttctccctggctcgccatggttctcggactcgttgtatgttgtaatcgggtgctcgggattcatcacatctccgtcatgcactccatcttctcattgctaggtcttctcggtgaaatcacatatattgtgctcttagttttgcataccgtatggaatggcaacggcatgatcggattccaggtcctgctgagcatcggcgagctgtcgctcgcaattgtgatagccctgactagcggacttcttactgggttgctgttaaacctgaagatctggaaagcgccgcatgttgccaaatacttcgacgaccaggtattttggaagtttccccacctagcggtcggattttag

SEQ ID NO: 132433 - DNA, 1254 bp, synthetic construct
  misc_feature 1..1254: note = Description of Artificial Sequence: Synthetic coding sequence
  source 1..1254: mol_type = other DNA
atgtcttctaaatatccccgtagcgttcggcggtgcctgcccttatgggcactgactctcgaggctgctctaatattgttattttacttcttcactcattatgatgcttcattagaggaccagaagggactggtcgccagctatcaggtcggccaggacctcaccgtgatggctgccatcggactgggttttctcacttcttccttccggcggcactcttggtcatctgtggccttcaacctgtttatgttagcgttgggtgtccagtgggctatcttgctcgacgggtttctgagtcagttccccagcggaaaggtcgttatcacactgttcagcattcgccttgcaactatgagcgctctgagcgtcctgatctcagtggatgccgttttgggcaaggtgaacctcgcccagctggtggtcatggtgttagttgaagttactgcgctgggaaacttgaggatggtgatttcaaatatattcaataccgattatcacatgaacatgatgcacatatatgtgttcgctgcgtattttggactttcggttgcttggtgcttgccaaaaccactccctgaaggaaccgaagataaagatcagacagcgactatcccaagtctgtccgctatgctgggcgcattattcctttggatgttttggccctcattcaatagcgccctgttacggtccccaatcgaacggaagaacgcagtgttcaatacgtattatgcagtcgcagtcagtgtggtaactgccatcagtggctcttctctcgcacacccccaaggtaagatctctaagacttatgtgcactcggcggtactcgcaggtggagtggcagttggaacaagttgtcatcttattccatctccttggttggctatggtgctagggttggttgctggcctgatttctgtaggcggagccaagtatctgccaggatgttgcaaccgtgtactaggaattccacacagcagcattatgggatacaactttagccttttggggcttctgggcgaaattatctatatcgtgctgctggtgttggacactgttggggcaggtaacgggatgatcgggttccaggtgttgctcagtattggtgaactgtctctggcaatcgttattgctctcatgtccggactcctaaccggcctgctgcttaacctcaagatctggaaggccccccacgaggccaagtatttcgatgaccaggtgttctggaagtttccccacctggcagtcgggttctag

SEQ ID NO: 132434 - DNA, 1482 bp, synthetic construct
  misc_feature 1..1482: note = Description of Artificial Sequence: Synthetic coding sequence
  source 1..1482: mol_type = other DNA
atgagctcaaagtatccccggtccgtaagaagatgtctgcctttgtgggccctgacactcgaagcagcactgattttactattctacttcttcacccactatgatgctagcttggaggatcaaaaaggtctggtagcaagttatcaggtcggtcaagatctcactgtcatggcagctatcggtttgggcttcttgacctcctcctttagacgccattcttggtcgtctgttgcattcaaccttttcatgctcgctcttggggtccagtgggccattctgctggatggcttcctttcccagtttccctcaggcaaggtggtgatcactttattctccatccgactggcgactatgagtgcactaagcgttcttatctcagtggacgctgtgctcggcaaggtcaatctggctcagttagttgtcatggtactcgtagaggttacggcacttgggaacctgcgaatggtgattagcaatatatttaatactgattatcacatgaatatgatgcacatctatgtctttgctgcctacttcggtttaagcgtagcctggtgcttgcccaagcctctcccagaaggtaccgaggataaggatcagactgctacaatcccctcactatccgcgatgctcggcgccctgttcttgtggatgttctggcccagcttcaattcagcccttctgcgcagcccaattgagaggaaaaacgccgtatttaacacgtattacgcagtagcggtatccgtggttaccgccatctccggatcctcactggcacacccccagggcaaaattagtaaaacatacgtccatagcgcagtgctggctggcggtgtggccgtgggaacctcatgccaccttatccctagcccctggcttgccatggtcttggggctggttgcaggtctgatctcggtgggtggagcaaagtacctccctggctgctgcaacagggtgctggggattcctcactcgtctatcatgggatataatttttctcttcttggcctcctgggggaaattatttatatagttctgcttgtgctggatactgtaggggccggtaacggcatgtcattaggctggaatctggccgtcaagatggccgaggccggagacgaggaactgatgcgcttggacgtgtcacagcggaaccatggcggcgctgcggtaccaaccgggtcctggatgcccagtaccgaaacaacaattgctcccaactatagagatcacattagcgtcgtttctagcttcggttgttggattttgtccaaaagcatccaggagaagcaaggcttgttcaagaacaagaccacatccagccattgctgtcttcacctgtacgtcaggaacgctcacgactcgaaggtaagtaatgtgcgggccgggacaggcgtgcgcgaaaatggggttgagtcatttctctgccattccctgagacgaatcagcccatttatcatgcattgcaggatccagcagtag

SEQ ID NO: 132435 - DNA, 1191 bp, synthetic construct
  misc_feature 1..1191: note = Description of Artificial Sequence: Synthetic coding sequence
  source 1..1191: mol_type = other DNA
atgtctagcaaatatcccagatccgtccgacgctgcctgcccctgtgggctctgacactcgaggccgccctgatattgcttttctatttctttactcactatgatgccagcttggaggaccaaaaaggactcgtcgcctcctaccaagtagggcaggacttgactgtcatggccgcaatcggcctgggcttcctcactagcagctttagaagacattcatggagctcagtggcgtttaacctattcatgctggccctgggggttcaatgggcaattctgctcgatggcttcctgtcacaatttccaagcgggaaagtcgttattacactcttttccatccgcctagcaacaatgagcgctctgtccgtcctcatctcagtggacgcagtgctgggtaaggtgaacctggcccagcttgtggtcatggtcctggtggaggtcactgccttgggaaatctgaggatggttatctctaatatctttaataccgactatcatatgaacatgatgcatatctacgtctttgcagcctatttcgggctcagtgtggcctggtgtttgcctaagcctctgccagaaggtaccgaagacaaggaccagactgctacgatcccttccctttcagccatgctgggtgctctgtttctttggatgttttggccctccttcaattctgccctactcagatcgccgatcgagagaaaaaatgcggtgttcaatacctattatgcggtggctgtgagcgtggtcacagcgatttccgggtcctccctggcacatccccagggaaaaatcagcaaaacatacgtccacagcgcagtcctcgccggaggcgtcgcagtcgggacttcttgccacctgattccctccccgtggctggccatggtgctcggcctcgttgccggcctgatttctgtagggggcgctaaataccttcccggatgctgcaatagggtgttagggatcccccattcatccatcatgggatataacttctccctcctaggcctgctgggtgaaattatatacatcgttctgctggttctagacacagttggcgccggcaacgggatttttctcatctggctcctcgactttaaacaaaagcacccccgcaagacacggcctgtgcagaaacaggataacttcctgtccctactgccggcatttgtgcgggaaaaacgctcctag

SEQ ID NO: 132436 - DNA, 1137 bp, synthetic construct
  misc_feature 1..1137: note = Description of Artificial Sequence: Synthetic coding sequence
  source 1..1137: mol_type = other DNA
atgtcgagtaagtacccccgtagcgtccgtcgctgtctgcccctgtgggcccttacgctggaggccgctctcatcttactgttctacttcttcacccactacgacgcgtcactcgaagaccaaaagggcctggtggcctcatatcaggtggggcaggatctgacagtcatggctgcgatcggcctgggatttctgacgagttccttccggcgccacagctggagttccgtggcattcaatctgtttatgctggcactcggggttcaatgggctattctgctggacggattcttgagccagtttccttcaggcaaagtggtgattacactcttctcaatacggctggccaccatgtcggccttgtctgttctgatctctgtcgacgccgttttgggtaaggtcaatctcgcccagctggtcgtaatggtgttagtagaggtcaccgcacttggtaatctgcgtatggtaatcagcaacattttcaatacggattatcacatgaacatgatgcatatctatgtgtttgctgcctattttgggttgagtgttgcctggtgtctacctaagccgctgcccgaggggacagaagataaagaccagactgcaacaatcccaagtctgtcagctatgctgggggccctgttcctgtggatgttttggccttcatttaattcagcccttcttcgctcacccatcgagcggaaaaatgccgtgttcaacacctactatgctgttgcagtgagcgtcgtgaccgccatttccggatccagcctcgcacatcctcagggcaagatctccaagacttatgtacattcagcggtgctcgcgggcggcgtggcagtggggacttcatgccaccttatccccagcccctggctcgccatggtattgggactggtagcgggattaattagcgtaggcggcgccaaatatttgcccgactggctgccaggacctcctcaacactggggaacccagcttggacaccgagattccagccatgtgtggagccccgatagcttcctgatctggcttttggactttaagcaaaaacatccacggaagactagacctgtgcaaaagcaggacaacttcctgtctctgctacccgcgtttgtccgtgagaaaagaagctag

SEQ ID NO: 132437 - DNA, 1464 bp, synthetic construct
  misc_feature 1..1464: note = Description of Artificial Sequence: Synthetic coding sequence
  source 1..1464: mol_type = other DNA
atgagtagcaagtacccgaggtccgtgcgtcgttgtttacctctgtgggccctcacacttgaggcggccctaatccttctgttctacttctttacgcactacgacgcaagcctggaagaccagaagggtctggtggccagttaccaagtgggtcaggatcttacagtcatggccgcaattggcttgggttttcttactagctcttttaggcggcactcttggtcgtcagtggccttcaatctttttatgctcgccctgggggtgcagtgggccatcctgcttgatgggttcctgagccagttcccctctggcaaagtagtgatcactctgtttagtattcggctcgcgaccatgagcgccctctccgttttaataagcgtagacgccgtgctaggaaaagtgaaccttgcacagctggtagtgatggtcctggtcgaggtgactgcgctcggcaacctgaggatggtgattagcaatatctttaacactgattaccacatgaatatgatgcatatttacgtattcgccgcatactttggcttaagcgtagcttggtgcttgcccaagccactgccggagggcacggaggacaaggaccagactgcaacgatcccctctttgagcgcaatgctgggcgcgcttttcctgtggatgttctggccctccttcaatagcgctctgctgcggtcaccaatagagcgaaagaacgctgtgtttaacacttattatgccgtggccgtgtccgttgtcactgccatctctggcagctctctcgcacatcctcagggaaaaatttccaagacatatgtgcatagcgctgtgttagccggtggcgtcgccgtgggaaccagctgtcatctgatcccctccccatggctggctatggttctgggtctggtggcaggcctcatctctgttggtggagctaagtacctgccagggtgctgtaatagggtcctgggcattccacattcttctatcatggggtacaacttttctttactgggactgctgggggagatcatctacattgtattgttagtcttagacacagttggtgccggcaacggtatgatcggattccaggtcctcctgagcatcggcgagctcagtctcgcaattgtcatcgccctgatgtcggggctgctgaccgggctcttactaaatctgaaaatctggaaagcacctcatgaagctaaatattttgacgaccaagttttttggaagttcccccacctggccgtaggattctctaaatctatccaggagaagcaaggactgttcaaaaacaaaacaacctctagccactgttgcctccatctgtacgtgaggaacgctcacgattcaaaggtaagcaatgtacgtgccggaacaggcgtgagagagaacggcgttgaatccttcctgtgccatagcctgcgaaggattagcccctttattatgcattgtaggatacaacaatag

SEQ ID NO: 132438 - DNA, 1296 bp, synthetic construct
  misc_feature 1..1296: note = Description of Artificial Sequence: Synthetic coding sequence
  source 1..1296: mol_type = other DNA
atgtcgtccaagtatccacgctcagtgaggcggtgtctgcccttatgggctctgacgctggaggcggccctaatccttcttttttacttcttcacccattacgatgcaagcttagaggaccagaaaggcctggtggcctcttaccaagttggacaggacctcactgttatggctgctatcgggctgggctttcttacttcttcatttcgaagacatagctggagcagtgtggccttcaatttatttatgctcgcactaggtgtgcagtgggcaattctgctggacggattcctcagccagttcccatctggcaaagtcgtcatcacccttttctcaatccggctggccaccatgagtgctttgagcgtcctgatctcagtggacgcagtgctgggaaaagtcaacctcgcccaactcgtcgttatggtactcgtggaggtgaccgccctggggaaccttcgcatggtgatttcaaatatctttaataccgactaccacatgaatatgatgcatatttatgtatttgctgcttactttggactttccgtcgcctggtgcctgcccaaaccactacccgaaggcactgaagacaaggatcagacagcaactatcccatccttgtccgcaatgctcggcgcgctctttttgtggatgttctggccgagttttaactctgcattgctgaggtcaccgatagagcgcaagaatgccgtgtttaatacttactacgccgtcgccgtgtctgtggtgacagcgatctctggttcatccctcgcacatccccaggggaagatcagcaaaacctatgtccacagcgctgttttggccgggggcgtcgcggtgggcacttcctgccacctgataccgagtccatggctggccatggtgttaggtcttgtagccgggttaataagcgtaggcggagccaagtatcttccagggtgttgcaatagagtgttgggcatcccacattcaagcatcatgggctataatttcagcctcctcggtctgctcggtgagattatctacattgttctgctggtactcgacaccgtaggggccgggaatggcatgtcattgggctggaatcttgcagtgaaaatggccgaggctggtgatgaagaactcatgcgcctggatgtgagccaaagaaaccacgggggcgcagcagtgcccaccgggagctggatgccatctaccgaaacaacaatcgcacctaactatagagatcatatctccgtggggttagcctcccggtcctcttcagcgctgggcaattcagcttggcctagctag

SEQ ID NO: 132439 - DNA, 966 bp, synthetic construct
  misc_feature 1..966: note = Description of Artificial Sequence: Synthetic coding sequence
  source 1..966: mol_type = other DNA
atgagtagcaagtaccccagatcggtgcgacgctgtttaccactctgggccctgaccctggaagccgccctcatccttttgttttacttctttacccactacgatgcttcactggaggaccagaaaggcttggtagcctcgtaccaggtgggccaagacctcacagttatggctgctatcggcctgggttttctgacctccagtttccgaagacactcctggagctctgttgccttcaatttatttatgctggcgttaggagtgcaatgggcaatcctgctggacggttttctcagccagtttccctcaggcaaggtcgttattaccctgttttctattaggcttgctaccatgagcgccctaagtgtcctgatatccgtggacgcagtgctcggtaaggttaatctggctcagttagtggtgatggtgcttgtggaagtgacagccctaggcaacctgcggatggtcatctccaacattttcaacacagattatcatatgaatatgatgcacatttatgtcttcgccgcgtatttcgggctgagtgtcgcctggtgcttaccaaagcccctaccagagggtacggaggataaggaccagaccgcaaccataccctccctgtccgccatgttaggagctttgtttctctggatgttttggccatcatttaatagcgctctactccgaagccctattgagcgcaaaaacgctgtgttcaatacttactatgccgtggctgtcagcgttgtgacagcgatctctggctcttccttggcacacccacaggggaagatcagcaagacttacgtccacagtgccgtgttggccgggggagtggccgtaggcactagctgccacctcataccatcaccatggctggctatggtactggggttggtggctggcctcatcagcgtcggcggtgcgaaatacctcccttttccccatcttgcagtcggtttctag

SEQ ID NO: 132440 - DNA, 294 bp, synthetic construct
  misc_feature 1..294: note = Description of Artificial Sequence: Synthetic coding sequence
  source 1..294: mol_type = other DNA
atggccgggtccccgagtcgcgctgcaggtcgccgtttgcagctcccccttctgtgtttatttctccaaggagccactgcagttcttttcgccgtgttcgttcgctataatcataagacagacgctgctttatggcatagatccaatcactctaacgctgacaatgagttctatttccgttacccaaatggagtttctctgctgctgccccggttagaatgtaacgggactatcagcgcacatcataacttgtgcctccccggctcttcggattcccctgcgtcggtatcctag

SEQ ID NO: 132441 - DNA, 462 bp, synthetic construct
  misc_feature 1..462: note = Description of Artificial Sequence: Synthetic coding sequence
  source 1..462: mol_type = other DNA
atggctgggagcccatcgagggcggccggcagaagattgcagctgccactactctgccttttcctccagggggccacagccgtcctatttgccgtttttgtgagatataaccataagacagacgctgctctgtggcatcgctccaaccattccaacgctgacaatgagttctactttcgctaccctaaagaaagccattccgtagctcaggccggagtccagagacgaaacctggggtctctgcaaccctcccccccacgactccctgggagggcatgccacgggcttaggggtctctggttgccccacggcctgcccgccgcccttaggctacagcagaggggcctgcatttaccacccggaagactatgccctgccgtggtgcatactggacccgggctttctcctctgctgcccagatggccgcacccttgctggaggggtgaacacgatcagtgttag

SEQ ID NO: 132442 - DNA, 1119 bp, synthetic construct
  misc_feature 1..1119: note = Description of Artificial Sequence: Synthetic coding sequence
  source 1..1119: mol_type = other DNA
atggtgtttgtgggctttgggttcctgatggttttcttgcaacggtacggcttctcgtccgtgggctttaccttcctgctggctgcattcgcattgcaatggagtactctggttcagggctttctccacagctttcacggtggccacatccatgttggcgtggaatctatgatcaacgccgatttttgtgcaggagctgttctgatttctttcggcgctgtgctggggaaaacaggaccaacacagctccttttgatggcccttctcgaagtggtcctattcggaattaacgagttcgtgttgctccacctgctgggagtccgcgatgccggaggctcaatgacaatccatacattcggagcttacttcgggttagtactgtctcgcgtcctgtatcgcccacagcttgagaagagtaaacaccgccaaggcagcgtgtatcacagcgatttatttgctatgatcgggactatttttttatggatattttggccgagtttcaacgccgctttgaccgctctgggcgctggccagcaccgcacagccttgaatacctactactctctggcagctagcactcttggcactttcgctctgtctgcccttgtgggcgaggacggccgtctcgacatggtccatatccagaacgccgcccttgccggtggcgtcgttgtgggcacatcaagcgagatgatgttgactcccttcggcgctcttgctgcagggttcctggcagggacagtcagcacgttgggatataaattcttcacgccaatcctagaaagtaagtttaaggttcaagatacctgtggggttcacaatctccatggtatgccaggcgttctcggcgcattgttgggcgttcttgtcgcgggactagcgacccacgaagcctacggagatgggctggaatccgtctttccccttatcgccgagggccagcgctccgctacatcccaggctatgcaccagctgttcggcctgtttgtgacacttatgtttgcttcagtaggtgggggcctgggagggttactgctcaaattgccgttcctggactcacctcctcggctgccggcgctccggggccccagttctcttgcgggcgcgtggcgcgcctag

SEQ ID NO: 132443 - DNA, 1374 bp, synthetic construct
  misc_feature 1..1374: note = Description of Artificial Sequence: Synthetic coding sequence
  source 1..1374: mol_type = other DNA
atggccggttcaccttcccgggcggccggaagacggcttcagctccctctattgtgccttttccttcagggagccacagccgtgctattcgccgtgtttgttcgatacaatcacaaaactgatgctgcgctgtggcatagaagtaatcactctaacgccgacaacgagttttattttaggtacccttcttttcaagacgtgcatgctatggtcttcgttggctttggttttctgatggtcttcctgcagcgctacggcttcagctcagtgggtttcacatttctgctggccgccttcgcactgcagtggagcactctggtgcagggctttttgcattcctttcacgggggacacattcacgtgggggtggagagcatgattaatgctgatttctgcgccggtgccgtcttgatctcttttggggctgtcctgggcaagaccgggcctacccagctgctcctcatggcactcttggaagttgtgctgtttggcatcaatgagtttgttctgctccacctgcttggtgtgagagatgcaggaggaagcatgactatacacaccttcggcgcctacttcggcctggtgctgtcaagagtactgtatcggccccagctggagaagtccaagcaccgtcaggggtcggtttatcacagcgatctatttgcaatgatcggtacaatttttttatggatcttttggccttcctttaatgctgcactcactgcactgggcgctgggcagcacaggacagcacttaacacttattactctctcgcagcctcgaccctcgggacctttgctctgagtgccctcgtgggcgaggacggaagactcgatatggtgcacatccaaaacgcagctctggcaggcggagttgtggtcggcacttctagcgagatgatgctaaccccattcggtgcactggctgctggcttcctggccggcaccgtgtccaccctcgggtacaaatttttcactcccatcctggaaagcaagttcaaagtgcaggacacttgtggcgtccataacttgcatggaatgccaggagtacttggggcattactgggcgtactcgtagctggtttggccacccacgaggcctatggagacggtctcgagagcgtcttccctctcatagcagagggacagcgttccgccacctcccaggccatgcaccagcttttcgggttgtttgtgactttgatgttcgcatcagtgggaggtggtctgggaggcttgcttctcaaactcccctttctggatccacctgatagccaacactacgaagaccaggtgcactggcaggttcctggggagcacgaagataaagcgcagaggcccttgagggtggaagaagctgacacgcaggcgtag

SEQ ID NO: 132444 - DNA, 1326 bp, synthetic construct
  misc_feature 1..1326: note = Description of Artificial Sequence: Synthetic coding sequence
  source 1..1326: mol_type = other DNA
atggctggcagtcccagccgggctgctggtcggcggctgcagttacctttgctctgcctgtttctccagggcgcaaccgctgttctattcgcagtgtttgttaggtataaccataagactgatgctgcgctctggcatcgatccaaccacagcaacgccgataacgagttttatttcagatatccatcatttcaagatgtgcacgcaatggtgttcgtaggattcggtttcttaatggtctttctgcagaggtacggcttcagctccgtgggttttacattcctcctcgctgcttttgcactgcagtggagcacccttgtgcaaggctttttgcattccttccatgggggccatattcacgtgggcgtagagtcaatgattaatgcagatttctgcgctggcgctgtgctgattagcttcggggcagttctggggaagaccggcccaacccagctgctgctgatggctctcctagaagttgtgctgtttggaataaatgagttcgtgctgctgcacctcctcggagtgcgggacgcaggcgggagtatgaccattcacaccttcggcgcttactttggcttggtgctgtcgcgagtgctgtaccggcctcagctggagaagagtaaacacagacagggaagcgtctaccactctgacttgttcgccatgatcggaactatttttctgtggatattctggcctagctttaatgctgcgctgaccgcacttggagccggccagcataggactgccctaaatacctattattccctggctgcgtctaccttggggaccttcgctttgagcgcacttgtgggggaagacgggcggctggatatggtgcacatccagaacgccgctctcgcgggcggggttgtggttgggacatccagcgaaatgatgctgacgcctttcggggccctagccgcgggcttcctggctggaactgtttctactctgggctataaattcttcacccccatacttgaaagcaagttcaaggtgcaggacacatgtggggttcacaacctgcacggcatgcccggagtactaggcgctcttttgggggtgctggtggccggactggctacacacgaggcttacggcgatggtctggagagcgtctttcctctgattgccgaaggtcagcgcagtgctacatctcaggccatgcaccagctgtttggcctgttcgtgacactcatgttcgcatctgttggagggggtctcggcggtttgctacttaagctgccttttttagattcacctcctcggctccctgcccttcgaggccccagcagcctggctggggcatggcgggcctag

SEQ ID NO: 132445 - DNA, 1230 bp, synthetic construct
  misc_feature 1..1230: note = Description of Artificial Sequence: Synthetic coding sequence
  source 1..1230: mol_type = other DNA
atggtctttgttggcttcgggtttctcatggtattcctgcagcgatatggatttagctccgtcggatttacttttcttctggctgctttcgccctgcagtggtctactctggtgcagggattcctgcattcttttcacggtggacacatacacgtcggagtggaatctatgattaacgcggatttctgcgcaggcgcggtgttaatctctttcggggccgtgctcggtaaaaccgggcctactcaactgctcttaatggcattgctggaggttgtgctgtttggcattaatgagtttgtgctacttcacctacttggcgttagagtgtggggcggcatggagtctggggtgggtggcggccagggccaacccctgtcacaggagaggggaggcggtggtggggtgttgcctctgactccgccccctcaggtgcgagatgcagggggcagtatgaccatccacacctttggagcatattttggtcttgtactcagccgcgtgttgtataggccccaactggagaagagcaaacataggcagggctccgtgtaccattccgatctgttcgctatgatcgggacaatcttcctttggatattttggcctagcttcaatgctgcgctgacagccctgggtgccggacaacacaggacagcattaaatacctattactcgctggccgcatccacattggggaccttcgcactgtctgccctggtcggagaagacggccgcttggatatggttcacattcagaatgccgcccttgccgggggggtggtggtaggtacctcctcagagatgatgctgaccccgtttggagctcttgctgcgggattccttgctgggaccgtctctacgctgggatacaagttttttacccccatcctggaatctaagttcaaagtgcaagatacctgtggcgtgcacaaccttcatgggatgcccggggtactgggtgcacttctaggagttctggttgctggcttagctacccatgaggcttacggggatggactggaaagtgtattccctcttatcgccgagggacagaggtcagctacttcgcaagctatgcaccagctgttcggtctgttcgttacgctgatgtttgcatctgttggcggaggattaggggggcttctcctaaaactgccatttctagacagtcccccacgcctgccagccctccggggaccatcatcattggcaggggcctggcgtgcctag

SEQ ID NO: 132446 - DNA, 1125 bp, synthetic construct
  misc_feature 1..1125: note = Description of Artificial Sequence: Synthetic coding sequence
  source 1..1125: mol_type = other DNA
atggtgttcgtcggctttggcttcttaatggtcttcttacagagatacggattttctagtgtcgggtttacatttctgctggccgcatttgccctgcagtggtcaacccttgtgcagggcttcctgcacagcttccatggcggacacatccatgtgggggtggagtctatgatcaatgcagacttttgcgctggcgccgtgctaatctccttcggggcggtgctggggaagactggtccgactcagttactgcttatggcattgctcgaggtcgtcctctttggtatcaatgaatttgtcctgcttcacctcctgggggttcgagtctggggaggcatggagtccggggtggggggcgggcagggacagcctctctcacaggaacgagggggcggcggtggcgtgctgcctctgacacccccgccccaggtaagagacgccggcggttctatgaccattcacacgttcggagcatacttcggactggtacttagtcgggtactgtacagaccgcagttagaaaagagcaaacaccgtcagggatccgtgtatcacagcgacctgttcgccatgatcggaactatctttctgtggattttttggccttccttcaatgccgccctgactgcgttgggagcagggcagcacagaaccgcacttaatacctactattctttagctgcttctacattaggcaccttcgctttgtccgctctggtgggtgaggatgggcgcctggacatgcctatattggagtcgaaattcaaggtgcaggacacgtgtggtgtccacaatctgcacggaatgccaggtgttttaggggccctgctcggggtccttgtggcgggtttggctactcatgaagcttacggagatgggctcgaaagcgtctttcctctcatcgccgaaggtcagagatcagccaccagtcaggctatgcatcaactgttcggactcttcgtaacactaatgttcgcctccgtcgggggcggcctgggtggcattatactggtactctgcctcctggacccttgcgctctctggcactgggtcgctccatcctcgatggtcggcggacgagaggcttcccagatactgccgtatcaccaccaggggtcctgctag

SEQ ID NO: 132447 - DNA, 687 bp, synthetic construct
  misc_feature 1..687: note = Description of Artificial Sequence: Synthetic coding sequence
  source 1..687: mol_type = other DNA
atggcaggttctccaagcagggcagccggacgccgccttcagttgcctctgctatgtctgtttctgcagggagctaccgcagtgctgttcgccgtttttgttagatataatcataagacggacgccgccttgtggcataggagcaaccattccaacgccgacaatgaattctattttcgatatcctcgaactatctttctatggatcttttggcctagtttcaatgctgcattgacggcgctaggcgctggacaacatcgaaccgcactcaacacatactacagtctcgcagccagcacgctcggcacctttgctctgtcagccttggtcggggaggatggtagattggacatggtgcatatccagaatgcagccctagccgggggcgttgtggttgggacttcttcagagatgatgctcacaccgttcggcgcgctcgccgcaggcttcttggctggtaccgtctccaccttgggacctagcctgaatcaaaactccaaaagcaagacccacgtggagagtaccaccagtatgggttgtaggggttcctggggtccctcttggggcagtctatggctggacctgccgcctatgaagctgacagagatgggggaatttccgccaaatccgtattgctcacgacatcccagcggtatgacctctgtaatcctgttccattgtgtgtag

SEQ ID NO: 132448 - DNA, 1440 bp, synthetic construct
  misc_feature 1..1440: note = Description of Artificial Sequence: Synthetic coding sequence
  source 1..1440: mol_type = other DNA
atggcctggaacaccaacctgcggtggagactgccactgacctgtctcctgctacaggtaataatggtcatcttatttggcgtcttcgtccgttacgacttcgaagcagatgcacactggtggtctgagcggacacataagaatcttagcgacatggagaacgaattttactaccggtatccaagctttcaagatgtgcacgtcatggtttttgtcggattcggcttccttatgacatttttgcaacgttacggcttcagtgcagtggggttcaattttctgctcgccgcctttggtatccagtgggccctgctcatgcagggctggtttcatttcctccaggatcgctacatcgttgtgggagtcgaaaacttgataaacgccgacttctgtgttgccagcgtttgtgttgcattcggcgccgtcttagggaaggtgagccctattcaactcctcatcatgacgttcttccaagtcaccctctttgccgtgaatgagtttattctgctaaacctcttgaaagtgaaggacgcaggaggctcgatgacgatccacaccttcggggcttactttgggcttactgtcacccggattctgtataggcgcaacctggagcagagcaaagaacggcagaacagcgtttaccagagtgacctgttcgctatgataggcacactgttcctttggatgtactggccctcatttaacagtgcaatcagttaccacggggacagtcagcaccgtgcggctataaatacatattgcagcctcgcggcatgtgtgcttacttccgtggccatatcctccgcactacacaaaaaaggcaaattagatatggtgcacattcaaaacgctactctggccgggggtgtagccgtgggtacagccgcggaaatgatgttaatgccatacggcgccctgattataggattcgtttgcggtatcatcagcaccctcggttttgtttacctgaccccttttttggagagcagactccatatccaggatacctgtgggatcaacaatctgcacggtatccccgggatcattggaggcatcgtaggcgctgtcacagctgcctctgcatcccttgaagtctatggcaaagaagggctcgtgcactcgttcgatttccaaggcttcaacggagattggacagcgcgcacgcagggcaagtttcaaatttacggactgttggttacattggccatggctttgatgggaggcattattgttggcctcatcttgcggttgccgttttggggacagcccagcgacgagaactgcttcgaagatgcggtctactgggaaatgcccgagggcaactccaccgtgtacatcccagaagatccaactttcaagccctcaggtccgtccgtaccatctgtgcctatggtgagtcctttgcccatggcctcgagtgtcccgctggttccatag

SEQ ID NO: 132449 - DNA, 1413 bp, synthetic construct
  misc_feature 1..1413: note = Description of Artificial Sequence: Synthetic coding sequence
  source 1..1413: mol_type = other DNA
atggcttggaacacgtgcctgctgctgcaggttatcatggtgatcctgtttggcgtattcgttcgttatgattttgaagcagacgcccactggtggtctgagcgaacccacaaaaacctgagtgacatggagaatgaattttattataggtacccttcttttcaagacgtccatgtgatggtctttgtgggatttggatttttaatgactttcttacaaaggtacggcttctctgctgtgggatttaatttcctgctcgcggcgttcgggattcagtgggcacttctgatgcaaggctggttccacttcctccaggaccgttatatagtggtcggcgtagagaacttaatcaacgctgatttttgtgtagcctccgtgtgcgtggcgttcggcgccgtcttaggcaaagtcagtcctatccagctactcatcatgaccttcttccaggtcacactcttcgctgtcaacgaatttatccttctcaatctattgaaagtcaaggacgcaggcggaagcatgactattcacaccttcggggcctactttggcctgaccgtgacacgcatactgtatagacgaaatctggagcagagtaaagagagacagaatagtgtctaccagtcagatctctttgcgatgatcggcaccctgtttttgtggatgtactggccatcttttaatagcgccatcagctaccacggagactcacagcatcgggctgcaataaatacctattgctccttagctgcgtgtgtgctgacatccgtcgccatttcttcagctctacacaagaagggcaaactcgatatggtccacatccaaaatgctaccctagcaggtggggtggctgtgggaacagccgcagagatgatgttgatgccatacggcgctctaataattgggtttgtgtgcggcataatctcaaccctgggtttcgtgtacctaactccctttctggagagtcgtctgcatatccaagatacgtgtggaataaacaatctgcacggcattccaggaatcatcgggggcattgtgggcgctgtgacggctgcctctgccagcctggaagtgtacgggaaagaaggtctggttcactcgtttgacttccagggattcaatggcgattggaccgcacgcacgcagggcaaattccagatttacggtcttttggtcaccctggcaatggctcttatgggtggaattatcgttgggctgattcttcggctgccgttctggggacagccatcggacgaaaactgtttcgaggacgctgtgtactgggagatgcccgagggcaattccacagtgtacataccagaggacccaacctttaagccatccggccctagcgttccctctgttcctatggtttcccctcttccaatggcctcatccgttccactcgtgccctag

SEQ ID NO: 132450 - DNA, 1338 bp, synthetic construct
  misc_feature 1..1338: note = Description of Artificial Sequence: Synthetic coding sequence
  source 1..1338: mol_type = other DNA
atggcctggaataccaacttaagatggagactgcccctgacatgcctgctccttcaggttattatggtcatcctgtttggcgtttttgtgaggtacgatttcgaggcggatgcacactggtggtccgagagaactcacaaaaacttgagcgacatggaaaacgagttctattatcggtacccgtctttccaggacgtacatgtgatggttttcgtgggtttcggatttcttatgacgttcctacagagatatggattttctgccgtaggctttaactttctgctggccgcctttgggatccagtgggcccttttaatgcagggttggtttcactttcttcaggaccgttacattgtggtgggtgtagagaacttaatcaacgcagacttctgcgtggcaagcgtctgtgtggcgtttggtgcagtgctcggtaaggtgagtccaattcaactgctgatcatgactttcttccaagtcacgctttttgctgtgaatgaatttatcctgctgaatttgcttaaagttaaggatgcaggtgggagcatgactatacacaccttcggcgcctactttggactcaccgtgacccgaatcctctacagacggaacctcgaacagtcaaaggagaggcagaatagcgtgtaccaaagtgacctctttgccatgatcggaacactgttcctatggatgtactggcccagctttaacagtgcaatctcgtaccacggcgactctcagcacagagccgcgataaacacatactgttcactcgcagcctgtgtgctgacctctgtcgcaatctcttccgctctccataagaaggggaaactcgacatggttcacatacagaacgcgacgcttgctgggggggtcgccgttgggacagctgctgagatgatgcttatgccctacggggcattgatcatcggttttgtgtgcggaataatctctaccctggggttcgtctacctcacaccctttctcgaaagtaggctccacatccaagacacttgtgggatcaataacttgcacggtattccagggataatcggcggcatcgtgggtgcagtcaccgcggccagtgctagccttgaagtctatgggaaggagggcttggtccacagtttcgacttccagggctttaatggcgattggacggcccgcactcaggggaagttccagatctacggactgctggtgacgctagcgatggctttgatgggaggcatcattgtgggattgatcctgagattgcctttctggggacagccctccgatgagaattgtttcgaggatgcggtatattgggaagacctggagctggcaccaaatcagtag

SEQ ID NO: 132451 - DNA, 714 bp, synthetic construct
  misc_feature 1..714: note = Description of Artificial Sequence: Synthetic coding sequence
  source 1..714: mol_type = other DNA
tgagacagtcaacaccgcgcagccattaacacatactgctcgctggccgcgtgcgtcctcacatcagtcgcgatcagctcagctctgcacaaaaagggcaaacttgatatggtccacatccagaacgccacccttgccgggggggtcgctgtcggcaccgccgccgagatgatgctgatgccatatggagcactgataatcggctttgtttgcggaattatctccactcttggatttgtctatctgactccatttctcgaatccagactacacatccaggacacatgtgggattaacaacttgcacgggatccccggcattatcggaggaatcgtgggtgccgtcacagcggcaagcgcaagcctggaagtttacgggaaagagggactggtgcattccttcgattttcaggggtttaacggggactggactgcccggacgcagggcaaatttcaaatctatggcctgcttgttacactggccatggccctgatgggcgggattattgtgggcctgatacttcgcctaccattctggggccaaccctccgatgaaaactgttttgaagacgccgtatactgggagatgccggaggggaactcaaccgtctacatccccgaggatccaacttttaagccctctgggccaagcgtgccctcagtcccaatggtcagtcccttacccatggccagctcagtgcctttggttccttag

SEQ ID NO: 132452 - DNA, 429 bp, synthetic construct
  misc_feature 1..429: note = Description of Artificial Sequence: Synthetic coding sequence
  source 1..429: mol_type = other DNA
atggcagctgcagtagcagccgccggcgccggcgagccgcagtccccagatgagctactgcctaagggagatgccgaaaagcctgaagaagagttggaggaggatgacgatgaggaattagacgaaaccctcagcgagcggctgtggggtctgaccgaaatgttcccagagagggtccggtctgcagcaggggctacatttgatttatcactcttcgtcgcgcagaagatgtaccgcttctcgcgcgccgcactgtggattgggacaacgagcttcatgattttagtgctgcctgttgtgtttgaaaccgaaaagctgcagatggagcaacagcagcagcttcagcagcgccagatccttcttgggcccaataccggccttagcggaggaatgcctggcgctctacctagcctccctggcaaaatctag

SEQ ID NO: 132453 - DNA, 1083 bp, synthetic construct
  misc_feature 1..1083: note = Description of Artificial Sequence: Synthetic coding sequence
  source 1..1083: mol_type = other DNA
atgtcacaggagagacctaccttctatcggcaggagttgaataagacaatttgggaggtgcccgagagatatcaaaatctgtcaccagtgggctcaggggcttatggttcagtgtgcgcggccttcgacaccaagaccggactacgcgtcgctgtgaaaaagctgtccaggccctttcagtccatcatacacgctaagaggacctaccgggaacttcgcctcctcaagcatatgaagcatgagaacgtcatcggcttgctggacgtatttacccctgcccggagcctcgaagaattcaatgacgtttatctggtaacccatctcatgggtgcggacttgaacaatatcgtgaagtgccagaaattgactgatgaccatgtgcagttcttaatctaccaaatcctgcgtggcttgaagtatatccattctgccgatattatacatagggatctgaaaccttcaaacttggccgttaatgaggattgtgagttgaagattctcgacttcggccttgcccgacacaccgatgatgagatgactggctacgtggcaacaaggtggtaccgagctcctgaaatcatgctcaattggatgcactacaaccaaacagttgacatttggtccgtgggttgcataatggcggagttattgaccggcaggactctgttcccaggaacagatcacattaatcaactgcaacagataatgaggctaacaggtaccccccccgcttatctgatcaatagaatgccttcccatgaagcgagaaattatatccagagcctgactcagatgccaaagatgaactttgcaaacgttttcattggggcaaacccacttgctgtcgatctactggagaaaatgctggttctggactctgacaagaggatcaccgcagctcaggccctggcccatgcatactttgcccaatatcacgaccctgatgatgaacctgtcgcagatccttacgaccaaagctttgaaagcagagatcttctgatcgacgaatggaagtctttgacttacgacgaggtgatttcatttgtgccaccccctctcgatcaggaagaaatggagagctag

SEQ ID NO: 132454 - DNA, 1230 bp, synthetic construct
  misc_feature 1..1230: note = Description of Artificial Sequence: Synthetic coding sequence
  source 1..1230: mol_type = other DNA
atgagattcacctttccgttgatggctatagtgctggagatcgcgatgattgtgctgttcggactgtttgtggagtacgagaccgatcagaccgtgctggagcagctcaacattaccaagccgaccgacatgggcatattttttgaactgtatcccctgtttcaagacgtccacgttatgatttttgttgggttcgggtttttgatgaccttcctgaagaaatacgggtttagcagcgtggggatcaatctgctggtcgcagccctcgggttgcagtggggtaccatcgtccaggggatactgcagagccaaggacagaagttcaatataggaatcaaaaatatgatcaatgccgatttcagcgcagcaacagtactgattagctttggagcagtattgggcaagaccagtccaactcaaatgttgattatgaccatccttgagatcgttttcttcgcccacaacgagtacctggtgtccgaaatcttcaaagcgagtgacatcggtgcaagcatgaccatacacgctttcggggcatatttcggtttagccgttgccggaatcctgtatcgatctggcctcagaaagggtcatgagaatgaggaatccgcctattacagcgatctttttgccatgattggcacactgttcctttggatgttttggccaagctttaatagcgccatcgctgagcccggcgataagcagtgtcgggccattgtcaacacctacttctctcttgcagcctgcgtgctgaccgcatttgcgttcagtagtttagttgagcaccggggcaaattgaatatggttcatatccagaatgcaacactggccgggggcgttgcagtaggcacatgtgcggacatggctattcacccttttggctcgatgatcattggaagcatcgccgggatggtatctgtgctgggatacaaattcctcactcctctgttcacaacaaaactgaggattcatgacacatgtggggtccataacctccatgggctgcctggcgtcgtgggcggattagcgggaattgtagccgtggcaatgggggcaagtaatacctcgatggcaatgcaggcagccgcactggggtcttcaattggcactgctgtggtgggagggctgatgactggactgattttgaaactgcctttgtggggacaacccagtgatcagaactgttatgatgatagcgtatattggaaagtacccaagacacggtag

SEQ ID NO: 132455 - DNA, 1233 bp, synthetic construct
  misc_feature 1..1233: note = Description of Artificial Sequence: Synthetic coding sequence
  source 1..1233: mol_type = other DNA
atgcggtttaccttccccctaatggcaatagtactggagatcgctatgattgtgctgttcggcctcttcgtggaatatgaaacagaccagactgtgctcgagcaactgaatattaccaagcctacggacatgggtattttctttgaactgtaccctctcttccaggatgtccatgtgatgatctttgtcggcttcggcttcctcatgacatttctcaagaagtacggctttagcagtgtggggataaaccttttggtggccgcgctgggcctccagtggggcacaatagtgcaggggatccttcagagccagggccagaagttcaatattggaatcaaaaatatgattaacgctgatttttcagcagcaacggtcctgatttccttcggcgccgtgttagggaagacttctcctacccaaatgttgattatgacaattctggagatcgtgtttttcgcgcacaatgagtatttggttagtgagatctttaaagcctcagacattggggcctctatgaccatacacgcgtttggcgcatacttcggcctggccgtggccggcatactctataggtcaggactgcgtaagggccacgaaaatgaggaatccgcctactactccgatctgttcgctatgataggaactctgttcctttggatgttctggccctccttcaattccgccatcgcagagccgggggacaaacagtgccgtgcaatcgtgaacacctatttctcattggctgcctgcgttttgaccgcctttgccttcagtagtttggttgagcacaggggtaaactgaacatggtgcatattcaaaatgccaccctggccggcggcgtggcagtgggcacctgtgcagacatggccatccatcccttcggctctatgataatagggtcaattgccgggatggttagtgtactgggatataagtttttgactcccctgtttactacaaagttgaggatccacgacacctgcggcgttcacaacttacatggactgcctggggtagttgggggactggccggcattgttgccgttgccatgggagcaagcaacacttctatggcaatgcaggctgcagctctgggcagcagtataggtacagcggtggttggtggtctgatgacaggtttaatcctcaagctgccactctggggccagccctctgaccagaactgctacgacgacagtgtatactggaaggtgccaaaaacccgcgtatag

SEQ ID NO: 132456 - DNA, 1146 bp, synthetic construct
  misc_feature 1..1146: note = Description of Artificial Sequence: Synthetic coding sequence
  source 1..1146: mol_type = other DNA
atgcggttcacttttcctttgatggccattgttctggagatcgccatgatagttctattcggtttattcgttgagtatgaaaccgatcaaaccgtgcttgaacagctgaacatcactaagccaactgatatggggatcttcttcgaactgtacccgctgttccaggacgtgcacgtgatgatattcgtaggcttcgggttcttaatgacctttctcaaaaaatatggcttctcttccgtgggtatcaaccttctggtcgccgccctcggtttgcagtggggcaccatcgtccaggggatcttgcagtctcagggacagaagttcaacatcggcataaagaacatgattaatgcagatttctccgctgcaacagtgcttatctcctttggcgctgtattgggcaagacctccccgacacagatgctcatcatgaccattctggagatcgtgttctttgcacataacgaatatctggtgtcggagatctttaaggcctcagatattggagcgtcaatgactatccacgcattcggcgcgtacttcgggcttgccgtggcggggatcctataccgtagcggactccgtaaaggccacgaaaacgaagaatccgcctattattccgaccttttcgctatgataggcacactctttctgtggatgttttggcctagtttcaacagcgcaatcgcggagcctggagacaagcagtgcagagcaattgtgaacacttatttctctttggccgcctgtgttctgactgcgtttgccttttcctcgttggtggagcacagagggaagctcaatatggtgcacatccaaaatgctacactggcaggaggagtggccgtgggtacttgcgccgacatggccattcacccatttgggtctatgataatagggtctatcgctgggatggtctctgtcctcgggtataagtttctgacaccactgttcaccacaaaattgaggattcatgacacctgcggggtccataacctgcatggcctgccgggggttgtgggcggcctggccggaattgtggccgttgcgatgggggccagcaatacttctatggctatgcaggccgccgcactaggttcttcaatcggcactgcggtggtaggaggactgatgacagggacatag

SEQ ID NO: 132457 - DNA, 387 bp, synthetic construct
  misc_feature 1..387: note = Description of Artificial Sequence: Synthetic coding sequence
  source 1..387: mol_type = other DNA
atgaagtctctgatcctgctggccattctcgcggccctggccgtggtgaccctgtgttacggcgaatggcagaaagaggaaaattttgggttcgatattgtcagcgtactgagtctgaactggcacagagcacaggagtcacacgaaagcatggaatcctacgaactaaatccttttattaataggcgaaatgctaacacgtttatttccccccaacagcgatggcgggcaaaagtccaggagaggataagagaaaggtcgaaaccagtgcacgagctgaatcgggaagcgtgtgacgattatcggctttgtgaaaggtatgccatggtatatggctacaatgccgcttacaatcgatattttcggaagcggaggggcacaaagtag

SEQ ID NO: 132458 - DNA, 339 bp, synthetic construct
  misc_feature 1..339: note = Description of Artificial Sequence: Synthetic coding sequence
  source 1..339: mol_type = other DNA
atgacagagaaggcgcccgagcctcacgttgaagaagatgatgatgatgagctggacagcaagcttaattacaagccaccaccccaaaaaagcctgaaagaactgcaagagatggacaaggacgacgagagccttatcaagtacaaaaaaacccttctaggggacgggccagtcgtaactgacccaaaagcccccaacgtagtggtgaccagactcactctcgtttgtgaaagtgcccccggacccattacaatggatctcaccggcgatctcgaggccctgaagaaagagaccatcgtcctcaaagaaggaagcgagtaccgagtaaaaattcattag

SEQ ID NO: 132459 - DNA, 606 bp, synthetic construct
  misc_feature 1..606: note = Description of Artificial Sequence: Synthetic coding sequence
  source 1..606: mol_type = other DNA
atgactgagaaagcacccgagccccacgtggaagaggatgacgatgacgagctggattccaaactgaactacaagccaccaccacaaaaatcgcttaaagagttacaggaaatggacaaggatgatgagtctctgattaagtacaagaagaccctcctaggcgacggccctgttgtcaccgaccctaaggccccaaacgtggtggtaacccggttgacactggtctgcgagtccgccccgggccctatcactatggaccttacaggtgacctggaggcgctcaaaaaagagacaattgtcctgaaagagggctctgaatacagagtgaagatacatttcaaagttaatagagatatcgtaagtgggctcaaatatgtccagcatacttataggacgggggtcaaggttgacaaggctacatttatggtagggtcgtacggccctaggcctgaagaatatgagtttcttacaccagtggaggaggcacctaagggaatgctcgctcggggcacgtatcataataagtcttttttcacggacgatgataagcaggaccatctctcatgggagtggaatcttagcatcaagaaagaatggacagaatag

SEQ ID NO: 132460 - DNA, 606 bp, synthetic construct
  misc_feature 1..606: note = Description of Artificial Sequence: Synthetic coding sequence
  source 1..606: mol_type = other DNA
atgaccgaaaaggctccggagccccacgtggaggaagatgacgacgacgagctggactccaaactgaattataagccacctcctcagaaaagtctaaaagagctgcaggaaatggataaagatgacgaatctctcatcaagtacaaaaaaacactgctcggtgatgggcctgttgtcaccgatccaaaggctcccaacgtggtagtcactcgcttgacgctcgtgtgcgaatcggcccccggcccaatcactatggacctgaccggtgacctggaggctctgaaaaaggagaccattgtactgaaggagggctcagaatatagagtgaaaatccatttcaaggtcaaccgggatatcgtgagtggactcaagtatgtccaacacacttacaggacgggagtcaaagtcgacaaggctacctttatggtgggaagctacggaccacgccctgaggagtatgagttcttgaccccagtagaggaggccccgaaggggatgctagcgaggggaacttatcacaacaaaagtttcttcaccgatgatgacaagcaggatcacctctcctgggagtggaatcttagtattaaaaaagagtggaccgagtag

SEQ ID NO: 132461 - DNA, 267 bp, synthetic construct
  misc_feature 1..267: note = Description of Artificial Sequence: Synthetic coding sequence
  source 1..267: mol_type = other DNA
atgaccgaaaaagctcctgaacctcacgtcgaggaagacgacgacgacgaactggattcgaagctaaattataaaccacctccccaaaagtccctcaaagaactgcaagaaatggataaggatgacgaaagtcttattaaatataagaaaacccttctgggggacggccccgtcgtgaccgatcctaaggctccaaacgtcgttgtaacccgactaaccctagtatgcgaatcagccccaggtccaatcacaatggacctgacatag

SEQ ID NO: 132462 - DNA, 480 bp, synthetic construct
  misc_feature 1..480: note = Description of Artificial Sequence: Synthetic coding sequence
  source 1..480: mol_type = other DNA
atgactgaaaaggctccagagcctcatgtggaggaggatgacgacgacgaacttgatagtaaattaaattacaaaccgccccctcaaaaaagtctcaaagagctgcaggagatggacaaagacgacgagagcttgattaaatataagaaaactctactgggcgacggccccgttgtcaccgaccctaaggccccaaatgtagtggtgacacgacttactctggtgtgcgaatccgctcctggcccaattaccatggatctgaccggcgacctcgaggccctgaagaaggagacaattgttttgaaggaaggcagtgagtacagagtgaaaattcacttcaaggtgaatagggacattgtaagcgggttaaaatacgttcagcatacgtacagaaccggagttaaggtagataaggcaacttttatggtgggatcctacggacctaggccagaagagtacgagttcctcacccctgtctag

SEQ ID NO: 132463 - DNA, 1320 bp, synthetic construct
  misc_feature 1..1320: note = Description of Artificial Sequence: Synthetic coding sequence
  source 1..1320: mol_type = other DNA
atggaccctctctcagagttgcaggacgatttaacactggatgacacgagcgaggctctgaaccaactaaagttagcctccatcgatgagaaaaactggccttctgacgaaatgcccgactttccgaaatctgacgatagtaagtcatcaagccccgagctggtcactcacctgaagtgggacgacccatactacgatatcgcgcgacaccagatagtcgaagtagcaggcgatgataagtacggaagaaaaatcatcgtgttttcggcctgtcgaatgcccccaagccaccagcttgaccactccaaactcctgggatacctcaaacacaccctggaccagtacgtcgagagcgactataccctgctgtatctccaccacggactgactagcgacaacaagcccagtttgtcttggttgcgggatgcatacagagaatttgaccgcaagtataagaagaatataaaggcactgtatattgtgcatcctaccatgttcatcaaaacgctcctcatcctttttaagcctcttatctcattcaagttcggccagaaaatcttttatgtgaattacctatctgaattgtcagaacacgtgaagctcgagcagctggggatccctagacaggtgctcaaatacgacgacttcctcaagagtacccagaagagtcctgctactgcccccaagccaatgcccccccggccaccactccctaatcagcagtttggcgtgtctctgcagcacctgcaggagaagaatcccgagcaggagcccatccctatcgtgttaagagagacggtggcctacctgcaggcccacgccttgacgaccgagggtatctttagacgctcagccaatacccaggtggtgcgcgaggtgcagcaaaagtacaacatgggcctccctgtcgatttcgaccagtataatgagctacatctccctgcagtcattttgaaaactttcctccgcgagctgccagaacccctgttgaccttcgacttgtatccacacgttgtcgggttcttgaacatcgacgagagccagagagtgcccgccaccctacaggtcctgcagacactgccggaggagaactatcaggtcttgcgctttctcacagctttcctggtacaaatctctgctcactctgaccagaacaagatgaccaacaccaatctggccgtagtgtttgggcccaatttgctgtgggccaaagacgccgctatcactctgaaagccattaatcctatcaacacctttaccaaatttcttctggaccatcaaggagagttgttcccttcacccgatcctagcggactttag

SEQ ID NO: 132464 - DNA, 1377 bp, synthetic construct
  misc_feature 1..1377: note = Description of Artificial Sequence: Synthetic coding sequence
  source 1..1377: mol_type = other DNA
atggatcccctttctgagctgcaggatgacttgacgctggatgacacaagtgaggcactcaatcagctgaagctcgcctcaatcgacgaaaaaaattggccctcagacgaaatgcctgatttccctaaatctgatgacagcaagagcagctcacccgagctcgtaacccacctcaagtgggatgacccctattacgacatagccagacatcagatcgtggaggtggcaggcgacgataagtacgggagaaaaattattgtctttagcgcctgtaggatgccaccaagtcatcagcttgatcattccaagttactggggtaccttaaacacacgttggaccaatacgtggaaagcgattataccctactttatttacaccatggtctaacaagtgataataagccctctctcagctggctgcgggacgcttaccgagaatttgacaggaaatacaagaaaaatatcaaggcattatatattgtgcatcctacaatgtttatcaagacgctcttgatattatttaaacctctgatcagctttaaattcgggcagaagatcttctacgtcaattatctctccgagctgtctgagcatgtaaaattggagcaactaggtatacctagacaggttctcaaatacgatgacttcctgaagtccacccagaaaagtccagctactgcccctaaacccatgccccctcgtcctccactcccaaaccagcaattcggcgtaagtctccaacatcttcaggagaagaacccagagcaggagcccattcccatcgtgctgcgagagaccgtggcctatttgcaggctcacgccttgactacagaggggatttttcggcgctcagcgaacacacaagtggtgagggaggttcagcagaaatataacatgggactgcctgtggatttcgatcagtacaatgagctgcacctgccagctgtcatccttaagacgtttctgcgcgaattgcctgaaccactgttaacttttgacctctaccctcatgttgtgggctttctgaacatagacgagtcacaacgtgtgcccgctactctccaagtgctccagacgctgcctgaggagaattatcaggtcctcagatttctgacggccttcctcgtccaaatcagtgcccactccgatcagaataaaatgactaatactaatctggccgtggtgtttgggcccaatttgctttgggccaaggatgcggccatcacgctgaaagccataaaccctatggcaacattcttttttttctttctccgctggagcctcgccttatcccctggctggagcgctgtagcacgaagccgccatactagcgcattctgggtacaggctatcttgctgcctcaaccaccagagtag

SEQ ID NO: 132465 - DNA, 579 bp, synthetic construct
  misc_feature 1..579: note = Description of Artificial Sequence: Synthetic coding sequence
  source 1..579: mol_type = other DNA
atggaccctctctctgagctgcaggatgatctaaccctggacgatacatcagaagctctaaaccagctcaagttggcatctatcgacgaaaagaattggcctagcgacgagatgcccgatttcccaaagtctgacgatagcaagagttccagtcccgagctggttacccatctgaagtgggacgatccatactatgatattgctagacaccagattgtggaagttgcaggagatgacaaatacggaagaaagataatcgtgtttagcgcctgccgcatgcctccgtctcatcagctcgaccattcaaaattgctggggtatctgaaacatacactggatcagtatgtggagagtgactacacattattgtatctccaccacggactcacctcagataataagccaagtctctcgtggctgagggacgcataccgcgaattcgatcgcaaatataaaaaaaatatcaaggctttatacatagtacacccgactatgttcattaaaacactcttgattctgttcaaaccactcatcagtttcaagttcggacagaaaatcttctacgtgaactacttgtag

SEQ ID NO: 132466 - DNA, 2361 bp, synthetic construct
  misc_feature 1..2361: note = Description of Artificial Sequence: Synthetic coding sequence
  source 1..2361: mol_type = other DNA
atggggttacaaccactggaattttccgattgctacttagactctccctggttccgagagaggatcagggcacatgaggcagagttggagcgcaccaacaagtttattaaagaactgataaaagatggaaagaatttaatcgccgcaaccaagagccttagcgttgcccagaggaagtttgcccacagcctgagggactttaaatttgagtttattggcgacgctgtgactgacgacgagcgttgcatcgacgccagtctcagggaattttccaatttcctcaagaatttggaagaacagagggagattatggccctctccgtgactgaaacactcataaagcccctggaaaagttccgtaaggaacagctcggggccgtaaaagaagagaaaaaaaaattcgacaaggagactgaaaagaattactctctcattgacaagcatttaaatctaagcgctaagaaaaaagactcccacctgcaggaggccgatatccaagttgagcagaacagacagcacttctatgaactgagcttggaatatgtatgtaagctccaagagatccaagagcgcaaaaagttcgaatttgttgagcccatgctgagcttctttcagggaatgttcacattttaccaccaaggtcacgaactagcaaaagactttaaccactacaaaatggagctccagatcaatattcagaacacaaggaacaggttcgagggaacccgaagtgaagttgaggagctgatgaacaaaataaggcagaaccctaaggatcacaaaagagcgtctcagtttacagcagagggttacctgtacgtgcaggagaagaggcccgccccgtttggcagctcctgggtaaagcactactgtatgtatcgcaaggccgctaaaaaatttaatatgatccccttcgaacaccggtctggcggaaagctgggcgacggcgaggtattctttttaaaagagtgcactaaacgacatacagatagcatcgacagaaggttttgtttcgacatagaggccgcagacaggcccggagtgtccctcaccatgcaggcgtttagcgaagaggagaggaaacaatggcttgaagcgttaggagggaaggaagctttgtcgcactccttcaatacagccataataccgcgccctgagggaaacgcccagctcgataaaatggggttcaccatcatacgaaaatgcatttctgccgtagagaccagaggaatcaacgatcagggcctgtatcgtgtagtaggggtgagcagtaaagtgcaacgcttactctccatgctgatggacgtcaagacctgcaatgaagtggatttagagaactctgctgactgggaggtcaagaccatcacctccgcacttaagcagtatttgcgatccttgcccgaacctcttatgacttatgagctccatggggatttcatcgttcccgcgaaatccggcagcccagaatctcgcgtgaacgcgattcacttccttgtgcacaagctgccagagaagaataaggagatgctagatatcttagttaaacacttaacgaatgtgagtaatcactctaaacagaacctgatgacggtggctaacctgggggtagtgtttggacccacactcatgaggcctcaggaagagaccgtagcagctttgatggatctcaagttccaaaacattgtggtagagatccttatcgagaaccatgagaagattttccgaactcctcctgacacaacctttccagagcctacttgcctgtccgccagccctccaaatgcgccacccagacagtccaagcgccaaggtcagagaacaaaacggcctgtcgctgtttataacctctgcctggaactcgaagatggggacaacccctatccctccaaagaggatacacccacctcttccttggattccttgtcatctccttctcctgtcaccacagcagtaccagggcccccaggacccgacaagaatcatttgttggcagatggcgggtcttttggagattgggcttctaccatcccagggcagaccaggtcaagtatggtccagtggctaaaccctcagagcccaactacaactagctccaatagcgctgtcacacctctgtctcctggcagcagtccatttccattttctcctcctgcaactgtggcggacaagccacctgagtcaatacgatctaggaaggctcgggctgtctatccttgcgaggctgagcattccagtgagcttagctttgagatcggcgctatcttcgaagatgttcagacatcaagagagcccggttggctcgagggaacattgaatggaaaacggggactgattccacagaactatgtgaagttgttatag

SEQ ID NO: 132467 - DNA, 1155 bp, synthetic construct
  misc_feature 1..1155: note = Description of Artificial Sequence: Synthetic coding sequence
  source 1..1155: mol_type = other DNA
atgcaggctttctctgaagaagaacgtaagcagtggctggaggcactgggcggaaaggaggctctctcccactcattcaatacagccatcatcccaagacccgaaggaaacgcacagctggacaagatgggattcactattatcaggaagtgcatctccgctgtcgaaactcgcgggataaatgaccaaggtctctaccgcgtggtgggagtgagttcgaaagtccagcgattgctgagcatgctaatggatgtcaagacatgtaacgaggtggacctcgagaactccgccgattgggaagtcaagacaattactagcgctctcaaacagtacttgaggagtttgcccgagcctctcatgacctacgagttacatggcgatttcatcgtgccggctaaaagcggtagtccggagagtagggtcaacgcaatacactttctggttcataaactccctgaaaaaaataaagagatgttggatattctggtgaaacatttgaccaacgtgtccaaccattccaaacaaaacctaatgacagtggcaaatcttggcgttgtattcgggcctacgctcatgaggccacaggaggaaactgttgctgctttaatggatctgaagtttcagaacatcgtggttgagatcctgattgagaatcatgagaagatctttcgcacccctcccgatactacgttcccagaacctacttgtctcagcgcatcacccccaaatgccccgccccgacagtccaagcgccagggacagcggacaaagagaccagtggctgtctacaatctctgtctggaactcgaggatggagacaacccatatccctctaaggaagacactcccacttcgtcattggattcactgagctctccgagccctgtgacaaccgccgtgccagggcctcccggaccagacaagaaccatcttctggccgatgggggttctttcggtgattgggcttcaaccatcattagaagtcggaaggctcgcgctgtctacccttgcgaagcagaacactcatcagaactgagcttcgagatcggagcaatcttcgaggacgtacaaacatctcgcgagcccggatggctcgaaggaacccttaatggcaagaggggactgatcccccaaaactacgtgaagttgctatag

SEQ ID NO: 132468 - DNA, 3072 bp, synthetic construct
  misc_feature 1..3072: note = Description of Artificial Sequence: Synthetic coding sequence
  source 1..3072: mol_type = other DNA
atgtgggatcagcgccttgtgcggctggctttactgcagcacctgagggctttttacggaattaaagtgaagggagtacgaggtcagtgtgacagacgccgccacgagacagccgccaccgaaatcggtgggaagatattcggcgtcccctttaacgctctcccccatagcgccgtccctgagtatggccacatcccttcattcctcgtcgacgcctgcacaagtctggaggaccatattcacacagaggggctgtttagaaagagtggctctgtaatccgcttaaaagccctcaaaaacaaagtggaccatggcgaaggatgcctgagcagcgccccaccatgtgacatcgctggactcctgaaacagttttttcgagagcttcctgagccgatcttaccagcagacctgcatgaggcgctcctgaaggcacagcagctaggaactgaagaaaagaataaggcaacactgctgttgtcatgcctgctggctgaccacaccgttcacgtcctgcgctacttctttaactttctgcggaatgtcagtctgcggagcagtgaaaacaagatggattcttccaaccttgctgttatttttgctcctaatctgctgcagacctccgaagggcatgagaagatgagctccaacaccgaaaaaaagctgcgtctccaggccgccgttgtgcagacactcattgattatgcctcagacatcggtcgggttcccgatttcatcctggaaaaaataccggctatgcttggtattgatggactctgtgccacaccgtccctggagggcttcgaggagggtgaatatgagacaccgggtgaatataagcgcaagcgtaggcagtctgttggggatttcgtttctggcgccctcaacaaatttaagccaaaccgcacccctagtatcacccctcaagaggagcggatcgcccaactttccgaatcccctgtaattttgacaccaaacgctaaacgcacccttcctgtcgattcttcacatggattttctagcaagaaacgcaaaagtatcaagcacaattttaactttgagctgttgccgtccaatctttttaactcgtcctccactcctgtgagtgtgcatatagatacctccagcgagggttcctctcagagctcactgagtccagtcctgatcggcggcaaccaccttatcactgcaggagtcccacgtcggtctaaaaggattgctggcaagaaagtttgccgagtggaatctggtaaagccggctgctttagcccaaagatcagtcataaagaaaaggtcaggagaagcctgcgcctcaaattcaatcttggtaagaatgggcgggaggtgaacggctgcagcggcgtgaaccggtacgagagcgtgggctggagactcgccaaccagcagtccctcaagaataggattgaatctgtaaaaaccggcctgctcttcagcccagacgtggatgagaaactacccaagaaaggcagcgagaagatttcgaaaagtgaggagacactcctaaccccagagaggctcgttggtactaattatcgaatgagttggaccggccccaacaatagttcattccaggaggtagacgctaatgaagcctctagtatggtcgaaaatctggaggtcgaaaatagccttgaacctgatatcatggtcgagaagagccctgcaacctcttgtgagctgacccctagcaatctcaacaacaagcacaacagcaacatcacaagcagtccactgtccggcgacgagaataacatgacaaaagaaactctcgtgaaggttcagaaggccttttcagaatccgggagcaatctgcacgctctcatgaaccaacggcagtctagtgttaccaatgtgggcaaggtaaaattaacggagccaagttatctggaggatagtcctgaggagaacctcttcgagaccaatgatttaaccatcgtggagtccaaggagaaatacgaacatcacaccggcaaaggtgagaagtgcttctcagagcgggattttagcccgctgcagacccagacattcaaccgagaaactacaattaagtgttattctacacaaatgaaaatggaacatgagaaggacattcactctaacatgcccaaagactatttgtccaagcaggagttcagcagcgacgaagaaatcaagaagcagcagtctcccaaagataagttgaacaataaattgaaagagaacgagaatatgatggaaggaaacctgccaaagtgcgctgctcacagtaaagacgaagctcgaagctcattttcacaacagagtacctgtgtcgtgacaaacctttccaagccgcggcccatgcgaattgccaagcaacagagtctggagacttgtgagaaaaccgtgtcggagtcttctcagatgactgagcacaggaaagtgtccgatcatatccagtggttcaataagctgagcctgaatgaaccgaaccggatcaaggtgaagtcccccttgaaatttcagcgaaccccggtccgtcaaagcgtccgccgcatcaattccctcctcgagtactcccgtcagccaaccgggcacaagctcgcttctcttggagatactgcctctccactggtgaaatccgtgtcttgcgacggggcactgagttcgtgcatagaatccgcatccaaggatagcagcgtgtcctgtatcaagtcaggcccgaaggagcagaaaagtatgtcgtgcgaagagagcaacataggcgccatctccaaatcttcaatggaattgccctcgaagagctttcttaagatgcggaagcatccagatagcgtgaatgcatccctgcggtccaccactgtttataagcagaaaatcctttctgatggacaggtaaaggttccgttggatgacttaaccaatcatgatatcgtgaagcctgttgtgaataataatatgggtatttcgagcggaattaacaaccgcgtgcttcgccgccccagcgagaggggaagggcatggtataaaggatctcccaagcatcctatcggtaagacacagctactgccgaccagcaagccggtcgatctgtag

SEQ ID NO: 132469 - DNA, 2505 bp, synthetic construct
  misc_feature 1..2505: note = Description of Artificial Sequence: Synthetic coding sequence
  source 1..2505: mol_type = other DNA
atggacagctctaacctggccgtaatatttgccccgaacctgttacaaacatctgaaggccacgagaagatgtccagtaataccgaaaagaagctgagactgcaggccgcggtggtgcagacactgatcgattacgcctccgacatcggccgtgtgcccgacttcatcttggagaaaattcctgccatgctcggaatagatggactgtgtgccacacccagccttgaaggttttgaggaaggtgagtacgagacccccggggagtacaagagaaagcggcgtcagagtgtcggagattttgtttcaggagctttgaacaaattcaagccaaatcggactccctctattactccccaagaggaaagaattgcccagctctcagagtccccagtaatcctgaccccgaacgcaaagaggacacttcccgttgatagcagccacggcttttcgagcaagaagaggaagtcaataaagcacaattttaacttcgaattgctcccatctaacttattcaattctagctctacccccgtctccgtgcacattgacacctcctctgaggggtcctcccagagctctctgtcccctgttttgataggcggcaaccacctcattaccgccggtgtgcctagaaggtccaagcgtatcgccggaaagaaagtgtgtagagttgagtccggaaaggcggggtgtttctcacctaaaatcagccataaggagaaggtccgacggagtttacgactcaaattcaatctcggcaaaaacggtagagaggtgaacggctgtagcggcgtgaatagatatgaaagtgttggttggagacttgccaaccagcagagtttgaagaatcgcatcgaatcagtgaagaccggtttactgtttagcccagatgttgatgagaagctaccaaagaaagggtctgagaagatttcaaagagtgaggaaaccctgctgacaccagagaggcttgttgggacgaattacagaatgtcatggacaggaccaaacaactcatcttttcaggaagtggatgctaatgaggcgtcatccatggtggagaatcttgaggtagaaaacagtttggagccggacatcatggtggagaagtcacccgcaacctcttgtgaattgacacccagcaacctgaacaataagcacaactctaatattacatcttcgccgctgtccggcgatgaaaacaatatgaccaaagaaactttggtaaaagtgcagaaggccttttcggagtccggctcaaatcttcacgctctcatgaatcagaggcagagctccgtcactaacgtcggcaaggtgaagctcactgaaccttcctatctggaagatagcccagaggagaatctcttcgagacaaacgacctaacgattgtggagagtaaggagaagtatgagcaccacacgggaaaaggtgaaaagtgctttagcgaacgtgacttctctcctcttcagacacagaccttcaaccgggaaacaacaataaaatgttattctactcaaatgaagatggagcatgagaaagacatccactctaacatgcccaaagactatttatccaagcaggaattttcttctgacgaagaaatcaaaaagcagcaatcacctaaagacaaactcaataataaattaaaggagaatgagaacatgatggaaggaaacctgccaaaatgtgctgcccatagcaaggatgaggcaagatcctccttctctcagcaaagtacctgcgttgtgaccaaccttagcaaacccagaccaatgagaattgccaaacagcaatccttagagacctgcgaaaagaccgtgagcgaatcgtctcagatgacagagcatcgcaaggtaagcgatcacattcagtggttcaacaaactgtccctgaatgagcctaatagaattaaggtgaaaagtccactgaagttccagaggactcccgtcagacaatctgtgagacgtatcaactctcttcttgaatatagtcgacagccaacagggcacaaactggcaagcctgggcgacaccgcctctcctcttgtgaagtcggtatcctgcgatggagccctatctagttgtattgaatctgcatctaaggattcttcggtatcgtgcattaaaagcgggccaaaggagcagaagagcatgtcctgtgaggagagtaacatcggggccatcagtaaaagcagcatggagttaccctctaagtcttttcttaagatgcggaagcatcccgattcagttaatgcctcattgagatcgaccacggtgtataaacagaagattttgagcgacgggcaggttaaggttccactggacgacctgaccaaccatgacatcgtcaagccagtagtaaataacaatatggggatcagcagtgggattaacaatagagtcctgcgacggccttcagaacgtggaagagcgtggtataagggttcaccgaagcaccctatcggaaagacacagctcctaccaaccagcaaaccagtggacctttag

SEQ ID NO: 132470 - DNA, 1506 bp, synthetic construct
  misc_feature 1..1506: note = Description of Artificial Sequence: Synthetic coding sequence
  source 1..1506: mol_type = other DNA
atgtgggatcagcggctcgtccggcttgctcttctgcagcacctaagagctttctatggaataaaagtgaagggcgtgcgaggacagtgcgatcgaagaaggcacgagacagctgccaccgaaatcggaggtaagatattcggcgtgccattcaacgccctccctcactccgccgtaccagaatatgggcatattccatcatttttagtggacgcgtgtacatccttagaagatcacatccataccgaagggttgttccgaaagtctgggagcgtcattcgattgaaagcactgaagaataaggtcgatcatggagaaggctgcctcagttccgcccccccctgcgacatcgcaggactcctcaaacaattctttcgcgagttgccggaacctattttacctgctgatctgcatgaggctctattaaaagcccagcagctgggtacggaggaaaagaataaagccacacttttgctctcctgtttgctggccgatcatactgtgcacgtactcagatatttttttaatttcctgagaaacgtgtcactgcggtccagtgagaacaaaatggactccagtaacctggctgttatcttcgctcctaacctgttgcagacttctgaagggcacgagaagatgagttccaataccgagaagaagctaaggttgcaggccgcagtcgttcaaactctaatcgattacgcatcggacattggtagggttccagacttcattttggagaagattcccgccatgttgggcatcgacggcctgtgcgcaaccccaagcctggaagggtttgaagaaggggagtacgagacccccggagaatacaagcggaaacgccgccagagcgtaggagatttcgtctcgggtgccctgaacaaatttaaacccaacaggactccttcaatcacacctcaagaagaaaggattgcacagttgtctgagtcaccggtgattctcaccccgaatgcaaaacggacattgcctgtagatagctcccacgggttctcatccaagaaacgcaaaagcattaagcataactttaacttcgagcttctgccatcgaatctctttaactcttcttcaaccccagtgtccgtccacattgatacctctagcgaaggtagtagccaaagttcactctccccagttctgattggcggaaatcacctcatcaccgcaggcgtccctcggaggtccaagagaatcgcaggtaagaaagtctgccgggtggagagtggtaaggccgggtgttttagtccgaagatctcgcataaagagaaggtccggcggtcccttcggctgaaattcaaccttggcaaaaacggcagggaagtgaatggctgcagcggagtaaacaggtacgagagtgtgggttggcggcttgccaaccaacagagcctgaagaacagaatcgagtcggttaagacaggactgttgttttcccccgacgtggacgagaaactgccgaaaaaagggacctttacatattactgctag

SEQ ID NO: 132471 - DNA, 2385 bp, synthetic construct
  misc_feature 1..2385: note = Description of Artificial Sequence: Synthetic coding sequence
  source 1..2385: mol_type = other DNA
atgaagatggccgataggtcaggcaagatcattcctggacaggtgtatatagaagtagagtacgactatgaatatgaggctaaggatagaaagattgtcatcaagcagggtgaaagatatatcttggtgaaaaaaactaatgacgactggtggcaggtgaaacctgatgagaacagcaaggcattctatgttccagctcagtacgttaaagaggtcactagaaaggccctgatgccgccagtcaaacaggtagcgggactgccaaacaattctaccaagattatgcaaagtcttcacctgcagaggagcaccgagaatgtaaacaaactccctgagctgtccagctttggtaagccttcatctagcgtgcaggggaccgggttgataagagatgccaatcagaatttcggaccatcatacaatcaaggccagaccgtcaacctgagccttgatctcactcacaataatggaaagttcaacaatgactctcacagtccgaaggtgtcgtcccagaacagaacgcgaagcttcggacatttccctggcccagagttcctggacgtagaaaaaacctccttctcacaggagcagagctgtgacagtgcgggagaaggatctgaacgaatacaccaggattccgagtctggggatgaactttccagtagctctacagagcagatcagagctactactccccccaatcaggggcggcctgatagtcctgtgtatgctaacctccaggagctgaaaatcagtcagtcggccctgccaccactgcctgggagtcccgcaattcagataaacggagaatgggagacgcacaaagattcgagcgggagatgctactactacaacaggggcacacaggagaggacatggaagcctccacggtggacaagggatgcttccatctcaaagggtgatttccagaaccccggcgaccaggagtggttaaagcacgtcgacgaccaggggcgtcaatactactatagcgcggatggaagcaggagtgagtgggaactccctaaatacaacgccagttctcagcagcagcgtgagattattaagtctcggtcacttgacagaagactccaggaacccatcgtattaaccaagtggcggcactctacgatcgttctggataccaatgacaaggaaagccctaccgcctccaaaccctgtttccccgagaacgaaagcagcccaagcagccccaagcaccaagacaccgaccaagagaaatacgggctcctgaatgttaccaagatagctgagaacggcaaaaaagtgcggaagaattggcttagctcatgggccgttctccaaggaagctccctgctttttacgaaaacccaaggatcctctactagctggtttgggtccaaccagtctaagccagagttcaccgtggatctcaaaggcgccaccattgagatggcatcaaaagataagtcttccaaaaaaaacgtcttcgagttgaagactaggcagggaaccgaactcctgatacagtccgataatgacacagtaattaacgattggtttaaggtgctctcttcaaccattaacaaccaagctgtcgagacagacgaaggaatcgaagaggagattcctgactcacccggtattgaaaagcatgacaaggagaaggaacagaaggaccctaagaaactccgctcattcaaggtcagcagcatagactcatctgaacagaaaaagaccaagaaaaatctcaagaagttcttgacacgaaggcccactctacaagctgtccgggaaaaagggtacatcaaagatcaggtgtttggaagcaatctggctaacctgtgtcagagggaaaatggaacagtccctaaattcgttaagctctgtatcgagcacgtggaggaacacggcctcgacatcgatgggatataccgcgtgagcggcaatctggccgtgatccagaagctgagattcgctgttaatcatgatgagaagctagatctgaatgactccaagtgggaggacatccatgtgatcaccggagctttaaaaatgttctttagagaactgcctgaaccattatttacttttaatcactttaacgatttcgtgaatgcaattaaacaggagcctcgccaacgggtagcggcagttaaggatctaattcgccagctgcccaagccaaatcaagacaccatgcagatcctgttcaggcacctgcgtcgggtaatcgagaatggcgagaaaaaccgcatgacttaccagagcattgccattgtgttcggccccactttgctgaaacctgagaaagagaccgggaacattgctgtgcacaccgtgtatcaaaatcagattgtagagctcatcctgttagagctttctagcatatttgggcggtag

SEQ ID NO: 132472 - DNA, 2541 bp, synthetic construct
  misc_feature 1..2541: note = Description of Artificial Sequence: Synthetic coding sequence
  source 1..2541: mol_type = other DNA
atgaagatggctgaccgaagtggtaaaattatccctgggcaagtctacatcgaggtggaatatgactatgagtatgaggccaaagacagaaaaatcgtaataaagcaaggcgaacggtacatactggtaaaaaagaccaatgatgattggtggcaagtcaagcccgacgaaaactccaaagctttttatgtccctgcccagtatgtgaaggaagtaactcgcaaagctctgatgccacccgtgaaacaggtcgccggcctacccaataactctacaaagatcatgcagagtctgcatctccagcggtctacggagaatgtcaacaaactccctgagctgagcagttttggtaaacccagctcatctgtccagggcacgggattaatccgcgatgcaaatcagaacttcggcccatcttacaaccaaggccagacagtcaacctttctctggacctgacccataacaacggcaaattcaataatgatagccacagcccaaaggtctcaagccaaaaccggaccagatcattcggccactttcccgggccagaatttctcgacgtagaaaagacgtctttctcacaagagcagtcttgcgattccgctggggaggggagcgagagaatccatcaggactcggagtcaggtgacgagctcagttctagtagtaccgaacagatccgtgccactactccacccaatcagggccggcccgactcccccgtctatgccaatctgcaggaactcaagattagccagagcgcactgccacccttgcctggcagtcccgccatacaaattaacggtgaatgggagacccataaggattccagcggccgctgctattattacaacagagggactcaagagcgaacgtggaagcctcccagatggacacgggacgcctctatctctaaaggcgacttccagaacccaggagatcaggagctgctttcatccgaggaaaattactactcaacgtcttacagccagtccgactcccagtgtggatctcctcccaggggttggtctgaggaactcgatgagaggggacatacactatacacatccgattataccaacgaaaagtggttgaaacatgtggatgaccagggaaggcaatattactattctgcagacgggagtcgctccgagtgggagctccccaagtataacgcaagctcacaacagcagagagaaatcatcaagtctagaagtttagaccgaaggttgcaggagcccattgtgttgactaaatggaggcattcgaccatagtgcttgatacaaacgacaaggagagtcctaccgccagcaagccttgcttccccgagaacgagagtagcccatcttccccaaagcaccaggacactgccagtagtcctaaggatcaggaaaagtacggcttgctaaatgtgacaaagattgctgagaacggaaagaaggtgagaaaaaattggttgagcagctgggccgtcttgcagggctccagccttctcttcacaaagacacaggggtcctcaacatcctggttcggatctaaccagagcaagcctgagttcaccgttgatcttaaaggcgccacaattgagatggccagtaaggacaaatcaagtaagaagaacgtgtttgagctgaaaaccaggcagggcacggagttgctgatacagagcgacaacgatacagtcatcaatgattggttcaaggtactgagtagcactatcaataatcaggctgtggagaccgatgagggaatcgaggaggaaattccagattcacccgggatagagaagcacgacaaggagaaggagcagaaagacccgaagaaactccgatcttttaaagtgtcaagcattgatagttcggagcaaaagaagacgaaaaagaacctcaagaaattcctaacacgaaggccgactctgcaagctgtgagagagaaggggtatatcaaggatcaagtgtttggaagcaatctggccaatctatgccaacgagagaacgggactgtcccaaaatttgttaaactgtgtatcgaacatgtggaggagcacgggttggatattgacggaatctacagggtctcaggcaacctggccgtgatccagaaactgcgcttcgcagtgaatcatgacgagaaactggatctgaatgatagcaaatgggaagacattcatgtcattaccggtgctctcaaaatgttttttagggaactgccagagcctctctttacatttaatcatttcaacgatttcgtgaatgcaatcaagcaggaacctcgtcagcgcgttgccgccgtcaaagatttaatccgacaactcccgaagcctaatcaggacaccatgcaaatcttattccgacatttaagaagagtaatagaaaacggtgagaaaaaccgaatgacataccagagcattgcgatcgtctttgggcccacactgctgaagcccgagaaagaaacgggaaatatcgccgtacacacagtataccagaaccagattgtggagctcatcctgttagagctcagttccatttttgggcgctag

SEQ ID NO: 132473 - DNA, 2385 bp, synthetic construct
  misc_feature 1..2385: note = Description of Artificial Sequence: Synthetic coding sequence
  source 1..2385: mol_type = other DNA
atgaagatggcagataggtccggtaagattatcccagggcaggtatatattgaagttgagtacgattacgagtatgaagctaaagatagaaaaatagtgatcaagcaaggagagagatacatcctggtcaagaagactaatgatgactggtggcaggtgaaacccgatgagaattctaaagcattctatgttccagctcagtacgtgaaagaggtgactagaaaagccttgatgcctcccgtgaagcaggtagcggggcttcctaacaattccactaaaatcatgcagagtctccaccttcaacgaagtaccgaaaacgtgaataaactccctgaactgagttctttcggcaaacccagctccagtgtgcagggcaccgggctgatccgagacgctaatcagaacttcggtccctcctacaatcaagggcaaactgtcaacctgtctctggatttgacccataacaatgggaaatttaataacgacagccacagccccaaggtcagctctcagaacagaacccgatctttcggccactttcctgggcccgagtttctggatgtggaaaaaacttctttttcccaggaacagtcctgcgatagtgcaggagagggaagtgaacggatccaccaggatagcgagtccggtgacgaattaagctctagctctactgaacagattcgagctacaaccccccccaatcaagggaggcctgattcccccgtgtacgctaacctgcaggaactcaaaatcagccagtccgcgctacccccccttcctggttcccctgccatacagatcaatggggagtgggagacccataaagacagctcaggacggtgttactattataatcgaggcactcaggagagaacttggaagccccccagatggacccgggacgcaagcatctcaaaaggagattttcagaacccaggcgatcaggaatggctgaagcatgtggatgaccagggcaggcagtactactatagtgcagacgggtctcgcagcgaatgggagttacctaagtacaacgcttcttcacagcagcaaagagagatcattaagtcacgctctctcgacagaagacttcaagaaccaattgtactcacaaaatggcgccactccactatcgttctggatacgaatgataaggagtcaccaaccgcttcgaagccatgttttccagagaacgagagctccccctccagcccaaaacaccaggacaccgatcaggaaaagtacggactgctgaacgtgaccaaaatagcagaaaatggaaagaaagtgcggaaaaactggctttcctcatgggctgtcttacaaggcagcagtttgttatttacaaaaacccagggctcttccacatcctggtttggcagcaatcagtccaagccagagttcacagtggacctcaagggagccaccatagagatggcttctaaagataagtcaagcaagaagaatgttttcgagctcaaaactagacaggggaccgaactcctgatacagtccgacaacgatacggtcatcaacgattggttcaaagttctgtcaagcaccattaataatcaggctgttgaaacagacgaaggaatcgaagaggagatcccggatagcccgggcatcgaaaaacacgacaaggagaaggaacaaaaagaccccaagaagctccggagcttcaaagtatcgagtattgactctagcgaacagaagaaaactaaaaaaaacctcaagaaatttttgactcgtagacccactttgcaggccgtgcgcgagaagggatatattaaggaccaggtcttcgggagtaacctcgcaaacctgtgtcagcgtgagaacggaacagtcccaaaattcgtaaaactttgcattgaacatgtcgaggaacatggtcttgacattgatggcatttacagagtgtctggaaatctggccgtgattcagaaactgcgtttcgccgtcaatcacgacgagaaacttgacctaaacgattcaaagtgggaggatatccatgtgatcaccggtgctttgaaaatgttcttcagagagctgcccgagcccctgtttacatttaaccacttcaatgatttcgtcaacgctattaagcaagaaccaaggcagagggttgccgctgtgaaagacctcatacggcagctgcccaagcccaatcaggataccatgcagatccttttcaggcaccttagacgtgtcatcgagaacggcgaaaagaacagaatgacttaccagtctatagctatcgtgtttggcccaactctgctgaagcccgaaaaagagacgggtaacatcgccgtccacaccgtgtatcagaaccagatagtcgagctcatcttgctggagctaagcagtatttttggacgttag

SEQ ID NO: 132474 - DNA, 2451 bp, synthetic construct
  misc_feature 1..2451: note = Description of Artificial Sequence: Synthetic coding sequence
  source 1..2451: mol_type = other DNA
atgaaaatggccgataggtcaggtaagataatccccgggcaagtatatatcgaagttgagtacgactacgagtatgaagctaaagaccgcaaaatagtaatcaaacagggcgaaaggtacatacttgtaaaaaaaactaacgatgactggtggcaggtcaagcccgatgaaaacagtaaagccttctatgtgccagcccagtacgtgaaagaggtgacacgaaaagcactgatgccacccgtcaagcaggttgcgggcttgcccaacaacagcactaaaataatgcagtctctgcatctgcagcggtcaaccgaaaacgtaaacaagctccccgagctgtcgtcttttggcaaacctagttctagtgtgcagggcacaggcctgattagggatgccaaccagaacttcggcccgagttataaccagggacaaacggtaaacttaagcttagacctaacacacaacaacggcaaatttaataatgacagtcactcaccgaaggtcagctctcagaatcgaaccaggtcgtttggccatttccccggtccggagtttctcgacgtggagaagacaagctttagccaggagcaatcctgtgactcagccggggaaggctccgagagaatacatcaggactcagagtccggcgacgaactcagctcttcctccactgagcagattcgagctaccacaccgcccaaccaggggcgacctgattcaccggtctatgcaaacctgcaggagctgaaaataagtcagagtgcccttcctcccctccccggcagccccgcaatccaaataaatggtgagtgggagactcacaaagacagttcagggcgctgctattactataacagaggaacccaggagaggacctggaagccacctcggtggacgagagatgccagtatttccaaaggggacttccagaacccaggagaccaagagttgttatccagcgaggaaaattactatagcacttcatacagtcaatctgattcccagtgcggatctcctcccaggggatggagtgaggagctagatgagcggggccacaccctttacacatccgactacacaaacgagaaatggctgaagcacgtcgatgatcaggggcgacagtactactacagtgccgacggcagcaggtctgaatgggagcttcctaaatataatgcctccagtcagcagcagcgagaaattatcaaatctaggtccctggaccggcgtctccaagaaccgatcgtgctgactaagtggaggcactcaaccatcgtcttagataccaatgacaaggaccaggagaagtatggccttctgaatgtgaccaagatcgcagagaacggaaagaaggtgcggaaaaactggctcagctcttgggccgtgctgcagggatcaagtctgttgttcaccaaaacacagggcagctcgacctcttggtttggaagtaatcagtccaaaccggaatttactgtggatctgaagggggctactatcgaaatggcctcaaaagataaatcctccaagaaaaatgtattcgagttgaagaccaggcagggaacagagctactcatacagtccgacaacgacacagttataaacgattggtttaaagttctgtcttctaccattaacaatcaagccgtcgagacggatgagggcatcgaggaggagatccccgacagtcccggcattgagaaacacgacaaggagaaagagcagaaggatccaaagaaactccggtccttcaaggtgtcgtctattgattcatctgagcaaaaaaagaccaaaaagaatttgaagaagtttttaacccgacgacccacattgcaggccgtgcgtgaaaagggctacataaaagatcaggtctttgggtctaacctggcgaatttgtgtcagcgcgagaacggcacggtaccaaagtttgtgaagttatgcattgaacacgttgaggagcatgggcttgatatcgatggcatatatagggtaagcgggaatttagccgtgattcagaagcttaggtttgcagtgaatcacgacgagaaacttgacctgaacgattccaagtgggaagacatccatgtgattaccggcgcactgaagatgttctttcgcgaactacccgaacctctctttactttcaatcattttaacgactttgtgaacgccataaaacaggagccgcgtcaacgggtggcagccgtaaaggacttaataaggcagctgcctaagcccaatcaggacaccatgcaaatcctgttcaggcatcttcgccgggtgattgagaacggggagaagaaccgaatgacataccagtcaatcgccatcgtattcggacctacgctgctgaagcccgaaaaggagaccggaaacatagccgttcatactgtgtaccagaatcagatcgtcgagcttatcttactcgagctgtcttctatattcggccgctag

SEQ ID NO: 132475 - DNA, 2526 bp, synthetic construct
  misc_feature 1..2526: note = Description of Artificial Sequence: Synthetic coding sequence
  source 1..2526: mol_type = other DNA
atgaagatggccgaccgctccggtaagatcattcccggtcaggtatatatcgaggtggagtatgactatgagtatgaggcgaaggacaggaaaattgtgattaagcagggggaacggtatatcttagtgaagaagacgaatgacgattggtggcaagtgaaacccgacgagaatagcaaggccttctacgtgcctgctcagtacgtgaaggaggttacccgaaaggccctcatgccccctgtcaagcaggtcgctggccttcctaataattctactaagattatgcagagcttgcatttacagagatcaaccgaaaatgtaaacaaacttccagaactgagttccttcgggaagccatcttcttctgtgcagggcaccgggcttattagagacgctaatcagaacttcggcccctcgtacaatcaggggcagaccgtaaatctcagtctggacctcacgcacaacaatgggaagttcaataacgattctcacagccctaaggtctcgtcacagaataggactagatctttcggacactttcctggccccgagttcctggatgtcgaaaagacaagcttctctcaggagcaatcatgtgattctgcaggtgaagggtccgaacgaattcaccaggactctgaaagcggagatgaactaagcagcagttctaccgaacaaatccgcgccacgacacctcctaaccagggccgacccgatagccccgtgtacgccaatctccaggaactgaagatttctcagagcgctcttcctcctcttcctggctctccagctattcaaatcaacggtgagtgggagacgcacaaggactcaagcgggcgatgctattactataaccgcggtacgcaggaacggacctggaagccccctagatggacgcgcgatgctagtattagtaagggggactttcagaaccctggcgaccaagaattgctttcctcagaggagaactattacagcacaagctattctcagtcagatagccagtgcggcagccctcctaggggctggtccgaggagttggatgaaagaggccataccctctatacctccgactataccaatgagaaatggctgaagcacgttgacgaccagggaagacagtattactactccgctgatggatccagaagcgagtgggaattgcccaaatacaacgccagtagccaacagcagagggagattatcaaatctcgctctctcgatcgccgcttgcaggagcccattgtcctgaccaaatggagacactctacaatcgtgctggataccaatgacaaggagtcacctacagcctctaagccttgttttcctgagaatgaatcttcaccttcctcgccaaaacatcaggataccgatcaagagaagtacggcctgttaaatgtcaccaagatcgcagaaaatggaaagaaggtccgtaagaactggctttcttcatgggccgtgttacaaggctcaagtctgcttttcaccaagactcagggcagcagcacaagctggtttgggtcaaatcagagcaaacccgagttcaccgtggacctgaagggggcaaccatagagatggctagtaaggacaaatctagcaagaagaacgtttttgagctcaagacccgccagggcaccgagctcctcattcagtcagacaacgacactgtcatcaacgattggttcaaagtgctcagttcaacaattaacaaccaggcagtcgaaactgacgaagggatagaggaagagatacctgattctcctggcatcgaaaaacatgacaaagagaaggagcagaaagaccctaagaagctccgcagcttcaaggtgtcatcgatcgattcctcagagcagaagaagacaaagaagaatctgaagaagtttttaactcggaggcccaccctgcaggctgtgagggaaaagggatatattaaggatcaagtgtttggatctaatctagctaatttgtgtcagagagagaatggaacggtccctaaatttgtgaaactttgcattgagcacgttgaggagcatgggttagatatcgacgggatttatcgcgtctccggtaatcttgcggtgatccagaagctgagatttgcggtgaaccacgacgagaagttagacctgaacgacagcaagtgggaggacattcacgtgatcactggtgccctgaagatgttcttccgtgaacttcccgaacctttgtttacatttaaccactttaacgactttgttaatgctattaaacaagaaccgcgccagagagtcgcagcagtgaaagacctgatacggcagctgccgaagcccaatcaggacacaatgcagatccttttcaggcatctgagaagagtcatcgaaaacggggagaaaaacagaatgacctaccagagcatcgcaatagtgttcggccctacgctattgaaacccgagaaggaaactgggaacattgctgtccataccgtctatcagaaccagatagtggaactcatcctgcttgagttgtcttctatttttggcagatag

SEQ ID NO: 132476 - DNA, 591 bp, synthetic construct
  misc_feature 1..591: note = Description of Artificial Sequence: Synthetic coding sequence
  source 1..591: mol_type = other DNA
tgaagcactagctattctcagtccgatagtcaatgtggaagtccaccgagagggtggagtgaggagttggatgaacgtggccatactctgtacacaagtgattatactaacgagaaatggctcaagcacgttgatgatcagggtcgccaatattactatagcgctgatgggtctcgcagcgaatgggaactgcctaaatacaacgcctcttcacagcaacagagggagatcatcaaatcccgctcgcttgaccgaaggctccaagagccgatagttctgacaaagtggaggcacagcaccatcgtactggacaccaacgacaaggagagccctacagcatccaaaccgtgctttccagagaacgagtcgagcccttccagtcctaaacatcaggatacagatcaggagaaatacggccttctcaatgtgaccaaaattgccgagaatggaaaaaaagtgaggaaaaactggctctcatcctgggcagtgctccagggaagctctctgctttttaccaaaacccaggggtcttccacgtcttggttcggcagtaatcagagcaagcctgaatttactgttgacctaaagtag

SEQ ID NO: 132477 - DNA, 2646 bp, synthetic construct
  misc_feature 1..2646: note = Description of Artificial Sequence: Synthetic coding sequence
  source 1..2646: mol_type = other DNA
atgaagaagcagttcaatcggatgaaacagctggccaaccaaactgttgggcgagcggaaaagactgaagtcctgtccgaggaccttctgcagatagagaggagattggatactgtgagaagtatctgccaccatagccataagcggttagtcgcttgcttccagggacagcatggaaccgatgctgagagaaggcataagaaactgcctttaacggcactggcacagaatatgcaggaggcctcgactcagcttgaagactctctgttaggtaagatgcttgaaacctgtggcgacgccgagaaccaattggcccttgagttgagtcaacatgaagtcttcgttgagaaagagatcgtcgatcccctgtacggtatcgcggaagtagaaattccaaacatccagaaacaacgcaaacagcttgctcgtctggtgctcgattgggatagtgttcgcgcaaggtggaaccaggcacacaagtcatccggcacgaacttccaaggactgccctccaaaatcgacaccctcaaggaagagatggacgaggccggtaataaagtggagcagtgcaaggatcaattggctgctgatatgtacaatttcatggccaaggagggcgagtatggcaaatttttcgttacactgctggaggctcaggcagattaccacagaaaggccctggcagtgttagagaaaaccctgcctgaaatgagagcccatcaggataagtgggcggaaaagcccgcctttgggacgcctctagaagaacatctgaagcggtcagggcgggaaatagcccttcctatcgaagcttgcgtcatgctgctgctggagacagggatgaaggaagaggggctttttcgtatcggtgccggcgcctccaagttaaaaaagttgaaagccgccctggactgcagcacaagccatctggacgaattttatagcgacccccacgcagtggctggcgccctaaagtcatacctgcgcgagttgccggagcccctcatgaccttcaacctctacgaggagtggacacaggtagcctccgtgcaggatcaggataagaagctgcaagacctctggcgcacatgtcagaaactccccccacaaaatttcgttaacttccggtacctcatcaagtttctggccaaactcgctcaaaccagcgatgttaataaaatgacacccagtaacatcgcaatagttcttggacccaatctgctgtgggcccgaaatgagggcacgctcgcagagatggcggccgcaactagcgtgcacgtggtagctgtcattgagcccatcatccagcacgctgattggttttttccggaggaagtagagtttaatgtttccgaagcatttgttcctttaaccaccccttcatctaaccactccttccacactggcaatgattcagactcaggaacactcgaacggaagcgtcctgcttccatggctgttatggagggggatctggtgaaaaaggagagtttcggggtgaagttgatggactttcaggctcaccgccggggggggaccttgaacagaaaacatatcagtccggcgttccaacctcctctccctcccacagacgggtctaccgtagtgcctgccggaccagaacccccaccccagtcctctcgggcagaaagctcctctggcggaggaacggtgccgtcgtcggctggaatcctggagcagggacctagtcccggcgacggctcaccccctaaacccaaggatcccgtgtccgcggctgtccccgccccaggaagaaataactcccagattgcatccggccagaaccagccccaagccgcagccggcagtcatcagctgtctatgggacagccccacaatgccgctggcccgtctcctcatacccttagaagagctgtcaaaaagcctgcacccgctccacccaaacccggcaatccgcctcccggccacccaggcggacagagctctagtggcacctcacagcatccacccagtctctcgcccaaaccaccaacgcgctcgccttctccaccaactcagcacacgggacaacctcccggccagccttctgctccctcgcagctgtcagcccctcgccgttacagttcctctctgagtcctattcaggcaccaaaccatccgccaccacaacccccaacccaggccactcctttgatgcacacgaaacctaattcacaaggcccacctaaccctatggccctgccatctgagcatgggcttgagcagccttcacacacacctccacaaacccctactccaccatctactccgccactcggcaagcaaaatccatctctgccagccccccagaccctggctggcggaaaccccgagactgctcagccgcacgcaggtactctgcccagacctcggcccgtgccaaagcctaggaatcgcccctctgtgcctcccccaccgcagccgcctggggttcactctgcaggcgattcctctctgactaacacagctcctaccgcctcgaaaatcgtgaccgactcgaacagccgggtttctgaaccacaccgctctatatttcccgaaatgcactccgactccgcatctaaagatgtgcccggtcggatacttctggacattgacaacgataccgaaagtactgctctgtag

SEQ ID NO: 132478 - DNA, 2412 bp, synthetic construct
  misc_feature 1..2412: note = Description of Artificial Sequence: Synthetic coding sequence
  source 1..2412: mol_type = other DNA
atgaagaagcagtttaatagaatgaagcaactggcaaaccagaccgtgggccgagcagagaagactgaggtactgtcggaagacctgctccagatagagcggaggctggacacagtgcgatccatttgccatcatagccacaagagacttgttgcctgttttcagggtcagcatggcactgatgccgaacgcaggcataagaagttgccacttacagcattggctcagaacatgcaggaagcgtctacccagttagaggactctctgctggggaagatgctggagacatgtggagatgctgagaatcagcttgccttagaactgtcccagcatgaggtattcgttgaaaaggagattgtggatccactgtacgggatagctgaggtcgagatcccgaacatccaaaagcaacgcaagcagctagcgagactggtcttagattgggatagcgtgcgcgcccgttggaatcaggctcacaaaagctctggaactaatttccagggtcttcctagtaagatcgataccctgaaagaggagatggatgaagccggcaataaagtagaacagtgcaaggatcaattggccgccgatatgtacaattttatggctaaggaaggcgagtatgggaagttctttgtcactttgttggaggcacaagcagattaccacaggaaagctctggccgtcttggagaagacattgcctgagatgagagctcaccaggacaagtgggccgagaaaccagccttcggcactcccctggaggagcacttaaaacgcagtgggcgagagattgctctgcccattgaagcctgcgtgatgctgctcctggagacggggatgaaggaggaaggcctctttcgtatcggcgctggggcgagcaaactgaagaagctaaaggcagcactagactgcagtaccagccacctggacgagttttattctgatccccatgcggtggcaggagctttaaagtcatatctccgagaacttcccgaacctcttatgactttcaacctttatgaagaatggacacaggtggcttcagtccaggatcaggacaaaaagctgcaggatctctggagaacatgccaaaaattgcccccgcagaatttcgtgaactttagatacctcattaaattcctggccaagctagctcagaccagtgacgtgaataagatgactcccagcaacattgcaattgtactgggccccaacctgctctgggcgcggaacgagggcactctggcagagatggcagctgcgacatcagtacacgtggtggcagtgattgagcccatcattcaacatgcagactggttcttccctgaggaagtggaatttaacgtcagcgaggcgttcgttccgcttactactccttctagtaaccactcatttcataccgggaatgacagcgatagcggcactttggagcgtaaaaggccggcaagtatggcagtcatggagggggaccttgtcaagaaagaaagccctccaaagcctaaggaccccgtctcagccgccgtgccagcgccgggcagaaacaatagccagatcgcatctggacaaaaccagccccaggccgcagctggcagccaccagcttagtatgggccagccacataatgccgcgggtccgagtccgcacacccttcgtagagctgtgaagaagcctgcacccgccccgccgaagccaggcaacccacccccagggcatccaggcgggcagagctcgagcggaacttctcaacatccaccaagcctgtccccaaaacctcctacacggagcccatctccgcccacccaacatacgggtcagccacctggtcagccctcggctcctagccagctcagcgcccctaggcgctactccagtagcctgtcacccattcaggcgccaaaccaccctccacctcagccaccaacccaagctacacccttgatgcatactaagcccaattctcagggaccacccaatccgatggccctcccatctgagcacggcctggaacaaccctctcatacgccaccccaaactccaacgcctccctcaaccccacccctgggaaaacaaaatccctctctgccagcgccacagaccttggcaggtggaaatccggaaactgcccagcctcacgccggaacccttccgaggcccaggcctgtccccaaaccaaggaatcgtcctagtgtgcccccgccaccccagcccccaggagttcatagtgccggggactctagcctaactaacaccgctccaacagcctcaaagatcgtgactgattccaattcgcgagtttcagaaccccaccggagcatttttcccgagatgcacagtgatagcgcaagcaaggatgttccaggtcgtatcctcttagatattgacaacgatactgagtccaccgcactgtag

SEQ ID NO: 132479 - DNA, 681 bp, synthetic construct
  misc_feature 1..681: note = Description of Artificial Sequence: Synthetic coding sequence
  source 1..681: mol_type = other DNA
atgaagaaacagttcaacaggatgaaacagctggcgaatcagacagttggacgcgccgagaaaacagaagtgctgagcgaggatcttctgcagatcgaaagaaggcttgatacagtgcgatccatatgccaccactcacacaagaggttggtcgcatgctttcagggacagcatgggaccgatgcagagcgaaggcacaaaaagcttcccctaacagcccttgcacagaacatgcaggaggcaagtacgcagctcgaggatagcctcctaggcaaaatgctggaaacttgtggcgatgccgaaaatcagctggcactggaactgtcccaacacgaggtgttcgtggagaaggagatcgtcgaccctctgtacggaatcgcagaagtcgagatccccaacattcagaaacagagaaagcaacttgcacgacttgtgctggactgggacagtgttcgcgctagatggaatcaggcacacaaatcctccggtaccaacttccagggactgccttcgaaaattgatacactcaaagaggagatggatgaggccggcaataaggtggaacagtgcaaagaccaacttgcggccgacatgtacaatttcatggcaaaggagggcgaatacggtaaattctttgtgactatttcagggcgcaaaaatcagcccctgggcctcccctag

SEQ ID NO: 132480 - DNA, 2523 bp, synthetic construct
  misc_feature 1..2523: note = Description of Artificial Sequence: Synthetic coding sequence
  source 1..2523: mol_type = other DNA
atgaagaagcagttcaataggatgaagcagctggctaaccagacagtgggaagagccgagaaaactgaggtgttgagtgaggaccttcttcagattgagaggagactggacacggttagaagcatttgccaccacagtcacaagcgattagtcgcctgcttccagggtcaacatgggactgatgcagagcgcagacacaaaaagctgcccctgaccgccttagcacagaacatgcaggaggcgagcacacagttggaggattctttgctcggaaaaatgctggagacatgtggggacgctgaaaatcagctggccttggaactgagccagcatgaggtgttcgtggaaaaagagattgttgacccattgtatggtatcgctgaagtggagatcccaaacatccagaaacaacgaaagcagctcgcccgcctcgtcctcgactgggattctgtgcgagcccgctggaaccaagctcataaatcgtcagggactaattttcagggtttgccgagcaagattgatacactgaaagaagagatggatgaggcaggtaacaaagtcgagcagtgcaaagatcagttggccgcggacatgtataatttcatggcgaaagaaggggagtacggaaaattctttgtgaccctgctggaagcacaggcagattaccacaggaaagctctcgccgtcctggagaaaaccctgcctgaaatgagagcacaccaggacaagtgggcagaaaaaccagccttcggcaccccgttggaggagcacctgaaaaggtccggacgtgagattgctttacccatcgaggcttgcgtgatgttgctgcttgaaaccggcatgaaggaggagggcctctttcgtataggagcaggggcctctaagctcaagaagctgaaagccgccctcgattgttcaaccagtcacctggacgagttttattccgacccacacgcagtagcaggggccctaaagagctatctgcgcgaactacctgagcccctaatgacgttcaatctgtacgaggaatggacgcaggttgcgagtgtgcaagatcaggataaaaaactgcaggacctgtggcgcacttgccaaaaactcccaccccagaactttgttaatttccgatacttgataaagttcttggctaaactcgctcaaaccagtgatgttaataagatgaccccgtcgaacatcgccattgttctcggaccaaatttactatgggctcgcaacgagggcaccctggcagaaatggcagctgcgacctccgtgcacgttgtggctgtgatagaacccataattcagcatgctgactggtttttccccgaagaagtggagttcaacgtctccgaagcgttcgtgcccctaaccaccccatcctcaaatcactccttccacactggtaatgattcggactctgggactttggagcggaaaaggccagccagcatggctgtgatggagggggatttggttaaaaaggaatctttcggtgtaaagctcatggattttcaggctcaccggcgtggtggcaccctgaacagaaaacatatttcccctgccttccagccccccctgccaccaaccgacgggagcaccgtggtgcctgcgggccctgaacccccaccccaatcctctcgagctgagagtagctcgggtggcgggaccgttccaagctcagctggaattcttgagcagggccccagccctggggacggcagtccccctaagcctaaagatccagtatcagccgcagtccccgctccaggacgcaacaactcccagatcgcctccggccagaaccagccacaagcagccgccggatcacatcagttgtctatgggccagccccataacgccgccggcccttccccacatacactgcgaagggcagtcaaaaaaccagcacccgctccaccgaagcctggcaatcctccccctgggcaccccggtgggcagtcatcgtctggaacttcacaacatccgccctccctttcccctaagccaccgactagatcccccagtccccctacccaacacaccggccagccaccaggacagccctcagcccctagccaactgtctgctccaaggaggtactcctcaagtctgagtcctattcaggctccaaaccacccccccccccagcctcctactcaggccacacctcttatgcacactaagccaaactcacagggacccccgaaccctatggctcttccatccgagcacgggcttgaacagccctcccacactcccccacagacccctacgcccccctctacaccaccccttggaaaacagaatccgtccctccccgccccacagacgttggcaggaggcaatccagaaactgcccagcctcatgccggcactttgcccaggcccaggcccgtgcctaaaccgcggaataggccatcggtgccaccgcctcctcagccacctggcgtgcacagtgccggagattcatctcttaccaacaccgcacctaccgcaagcaaaatcgtgaccggggtctag

SEQ ID NO: 132481 - DNA, 1992 bp, synthetic construct
  misc_feature 1..1992: note = Description of Artificial Sequence: Synthetic coding sequence
  source 1..1992: mol_type = other DNA
atgtcttggctgagctctagtcagggcgtagtcttgacggcctaccaccctagtgggaaggatcagaccgtcggcaactctcatgcgaaggcaggggaagaagccacatcttctcggaggtacggccagtacacgatgaaccaggagtcaaccacaataaaggtgatggagaagccaccattcgatcgctcaatcagccaggacagtcttgatgaactcagtatggaagattactggatcgaactggaaaatattaaaaagtcctccgagaactcccaagaagaccaggaggtggtggtcgtgaaagaaccagatgaaggagaactggaagaagagtggctcaaggaggccggcttgtctaatctgttcggggaatctgccggagatcctcaggagtcaatcgtgttcctgagtacattaactcgcacgcaggccgctgctgttcaaaagcgcgtggaaacggtgtcccagaccctacgcaagaaaaacaaacaataccagatccctgacgtgagggatatatttgcccagcagcgggagtcaaaggagactgcaccaggtggcactgaatcccaatcattaaggaccaatgaaaacaaatatcaagggcgcgatgacgaggcgtccaatttggtgggtgaggaaaaactcatccctcccgaggaaacgcctgccccggagaccgacatcaacttggaagtgagtttcgcagagcaggccctgaaccagaaggagtcctcaaaggagaaaattcagaaaagtaaaggtgacgatgctacactccccagcttccgccttccaaaggacaagactggcacgactcgcattggcgacctggctcctcaggacatgaagaaggtttgtcacctggctttgatagaattgacggcgctatacgatgtgcttggaattgaactgaagcaacagaaggcagtgaagattaaaacaaaagacagtgggttattttgcgtcccgctgaccgccctcctggaacaagaccagaggaaggtgcctgggatgcgcattccgctcatcttccagaagctgattagtcgaattgaggaaaggggactggagaccgaaggactcttacgcatcccgggagcagccatccggattaagaacttatgccaggagctggaagccaaattttacgagggcacatttaattgggagtctgtgaagcagcacgacgcggcctcactacttaagctgttcatcagggagcttcctcagcccctattaagcgttgaatacttgaaggccttccaggccgtccagaatctgcccacgaaaaaacagcagctgcaggcgctgaacctgctcgtcatcctcctgcccgacgctaatcgggatacgctcaaggccctgctggagtttttgcagcgcgtcatcgataataaggagaaaaacaaaatgaccgtgatgaatgtcgccatggttatggctcctaacctgttcatgtgccacgcactggggctgaagtcttcggaacaacgcgaatttgttatggccgccgggaccgctaacactatgcaccttctcatcaagtatcaaaagttactctggaccattccaaaattcattgtcaatcaggtgaggaagcagaacacagaaaaccataagaaggacaaaagggctatgaagaagcttctgaagaagatggcttatgatcgggaaaaatatgaaaagcaagataaaagcactaatgatgccgacgtgcctcagggggtgatccgcgttcaggcccctcacctgagcaaggtgtcaatggcgatccagttaacagaagagctgaaagcctccgacgttctcgcgcggttcctttctcaggagagcggtgtggcccaaacactcaaaaagggcgaagtgtttttatacgaaatcggcgggaacattggcgagagatgtctggacgacgatacatacatgaaagacctttaccagctgaatcctaacgccgagtgggtcattaaaagtaaaccactatag

SEQ ID NO: 132482 - DNA, 1857 bp, synthetic construct
  misc_feature 1..1857: note = Description of Artificial Sequence: Synthetic coding sequence
  source 1..1857: mol_type = other DNA
atgaaccaagagagtaccacaatcaaggtcatggagaagcctccttttgacaggtcgatatcacaagatagtctcgatgagttgtctatggaggactactggatagagttggagaacatcaaaaagagctccgagaacagccaggaagaccaggaagtggtggtcgtcaaggaacccgatgagggcgaattggaagaggaatggctgaaagaggcaggtttgtcaaatctcttcggggaatccgccggggacccccaggaaagtatcgtgttcctgagcactctgacaaggacacaggctgctgcagtccaaaaaagagtcgagacggtgtctcagaccctgcgcaaaaagaacaaacagtaccagatccctgacgtacgcgacatatttgctcagcaaagagagagcaaggagactgcccctgggggcaccgagagccagtccttaaggaccaacgagaacaagtaccagggtcgcgacgacgaggcgagtaatctggttggcgaggaaaagctcattccccccgaagagaccccagcgccagaaacggatatcaacctggaagtgagctttgccgagcaagcccttaatcaaaaagagtccagcaaagagaagatccagaagagcaagggcgatgacgctaccctccccagttttcgtcttcccaaggacaaaacaggcaccacgagaatcggagatctggcacctcaggatatgaaaaaagtgtgtcaccttgcactaatcgaactcactgcgctctacgacgtcctgggtatcgagctaaaacagcagaaggctgtgaagattaaaactaaggattccggtctgttttgtgtgcctctgactgccctcctggagcaggatcagagaaaggttccaggcatgcggatacccttgatttttcaaaaactgatttcacgtattgaagagcggggcttagagacagaaggtcttctgcgtatcccgggggctgcaatcagaatcaaaaacctgtgtcaggaactggaggctaagttctatgaaggcaccttcaattgggagagtgtgaagcaacatgatgcggcgtcgctgcttaagctgttcattagagagttgccccaaccactgctgtctgtggaatacctgaaagctttccaggcagtgcagaatttgccaactaagaaacagcaactacaggctctcaatcttttggtgattttgctgcctgacgcgaaccgagataccttgaaggcactgcttgaattcctgcagcgggtgattgataacaaggagaaaaataagatgaccgttatgaatgttgctatggtcatggcccccaacttgttcatgtgccatgctctgggtctgaaatcatctgagcaaagggagttcgtgatggcagccggaacagcaaacacaatgcatcttctgattaagtaccagaagttgctctggactatccctaaatttattgtgaaccaggtgagaaaacagaatacagagaatcacaagaaagataagcgcgccatgaaaaagctgctcaagaagatggcttacgatagagaaaagtacgagaaacaggataaatccactaatgacgctgacgtacctcaaggcgtgatcagggtacaggcgcctcatctgtccaaggtgtccatggccatccagcttactgaggaattgaaggcatctgatgtactcgcacggttcctgagccaagaaagcggcgtggctcagacgctgaaaaagggcgaggtgttcctctatgaaatcggcggcaatatcggagaaagatgcctcgatgacgacacatacatgaaggacctttaccagctgaacccaaatgccgagtgggtgattaaaagcaaacctctctag

SEQ ID NO: 132483 - DNA, 1485 bp, synthetic construct
  misc_feature 1..1485: note = Description of Artificial Sequence: Synthetic coding sequence
  source 1..1485: mol_type = other DNA
atggcaacagaagctcagagcgaaggcgaagtgcccgcgcgcgagtccggcagatccgatgcaatatgctctttcgtgatatgtaatgattccagtttacggggacagcctatcatttttaatcccgacttctttgtggagaaactgcgacatgagaagccggagatctttacggaattggtcgtgagcaatatcactagactcatcgacctgcctggcactgagctcgctcagcttatgggggaagttgacctaaaacttccagggggggccggccctgcaagtgggttcttccggtctcttatgtcactaaaaagaaaggagaagggagtgatttttggctcgccattgaccgaggagggtatcgcacaaatctatcaactaatcgagtatctgcacaagaacttgagagttgaggggctgtttcgtgtgcccggcaatagcgtccggcagcagattctccgggacgctttgaataatggaactgatattgatttggagtctggagagttccattcaaatgacgttgctaccctgcttaagatgttcctcggcgagctgccagagcctctgctaacacataagcactttaatgctcatttgaagatcgccgacctgatgcagttcgacgacaagggtaacaagactaatatccccgacaaagacaggcaaattgaggcattgcaattgctctttcttatcctgcccccccccaatcgcaacctcctgaaactgctgctggacctgctctaccagacagcgaaaaaacaggacaagaacaagatgtcagcctacaaccttgctctcatgtttgcgcctcacgtcttatggcccaagaacgtaacagccaatgacttacaggaaaacattacaaaactcaattccggcatggcttttatgataaagcatagtcaaaaactgtttaaggctcccgcctacatccgtgaatgcgcccgcttgcactacttaggcagccgcacccaggctagtaaggatgatcttgatttaattgcgagttgccacacaaaatcctttcaactggctaagagtcagaaaagaaatagggtcgattcctgccctcatcaagaggagacacaacatcacactgaagaagctttgcgcgagctgtttcaacacgtgcacgatatgcccgagtctgccaaaaaaaagcagttgatcagacagtttaataaacagtcactgactcagacaccaggccgcgaaccctcaacctctcaggtccagaagagagctcgatcaagaagtttcagtggacttattaaaaggaaagtgctgggaaatcagatgatgagcgagaaaaaaaaaaagaaccccacccccgagtcagtggcaattggggagctgaaaggaacgtcaaaagagaatagaaatctgttattctctggcagcccagcagtcacaatgaccccgacacgattgaaatggagcgagggtaaaaaggagggcaagaaagtgttcctgtag

SEQ ID NO: 132484 - DNA, 1458 bp, synthetic construct
  misc_feature 1..1458: note = Description of Artificial Sequence: Synthetic coding sequence
  source 1..1458: mol_type = other DNA
atgccacaccagaagctgtcggccttgatcgatgccatctgcagcttcgtcatctgcaacgatagcagcttaagaggccaaccgattattttcaatcccgacttctttgtggaaaagctgcggcacgagaagcccgaaatcttcacggagctcgtggtctcaaacattacacgcctgatagatttaccaggcacagaactcgcacagctcatgggtgaggtagaccttaagctgccgggaggtgccgggcctgcatcaggattcttccggagtctgatgtctttgaagagaaaggagaaaggagttattttcgggtcacctttgacagaagagggcatcgctcagatatatcagctcatcgagtatctgcacaaaaacctaagggttgaagggttgttccgtgtgcccggtaattccgttcggcagcaaatcctgcgagatgctcttaacaacggaacggatatcgacctagaaagcggggagtttcactcgaatgatgtggcaacattactcaaaatgttcttgggtgagctcccagaacccttactgacccacaagcattttaacgcccatcttaagatcgccgatctgatgcagttcgatgataaaggcaataagacaaatatcccagacaaagacaggcagatcgaagcactgcaactgttgtttctgattctgccgcctcctaatcgcaatctcctgaagctactgctagaccttctttatcagaccgccaaaaaacaggataaaaataagatgtcagcctataacctggccttgatgtttgctccccatgtactgtggcccaagaatgtaacagcaaatgacctgcaggaaaatattacgaagctgaactccggcatggctttcatgatcaaacacagccaaaaacttttcaaggctccagcgtacattcgcgagtgtgcacggctccattatcttggctcacggactcaggcctctaaggacgatttggatctaatcgcctcctgccacactaagtcctttcagctggcgaagagtcagaaaaggaatcgtgtggatagctgtccacaccaggaggagactcagcaccatacggaagaagcactgcgggaactctttcagcatgttcacgacatgccagagtctgctaaaaagaaacagctaattaggcaatttaataaacagagcctgacccagacacccgggcgtgagccgagcacaagtcaggtacagaaacgagccaggtctcgttcgttctctggtttgattaaaagaaaggtgcttgggaaccaaatgatgtctgaaaaaaaaaaaaaaaaccccacgcctgagtcggtcgcaattggcgagttaaaaggtacctcaaaggagaatcggaatttactattctccggatcccctgcggtgacaatgactcctacacggctgaaatggtcagaaggaaagaaagagggaaagaaggtttttctctag

SEQ ID NO: 132485 - DNA, 1398 bp, synthetic construct
  misc_feature 1..1398: note = Description of Artificial Sequence: Synthetic coding sequence
  source 1..1398: mol_type = other DNA
atggccacagaagctcaatctgagggcgaagtcccagcccgggagagcgggaggtccgacgctatctgcagctttgtgatctgcaatgacagttcattgagaggacagcctattatcttcaaccccgatttttttgtcgaaaagcttcggcacgagaaacctgagatcttcacagagctggtggtatcaaatatcaccaggttaatcgatttgcccggaacggaactagcgcagctcatgggcgaagttgacctaaaattgccaggtggcgccggacccgcaagtggttttttcaggtcactgatgtccttaaagcggaaggaaaaaggagttatcttcggaagcccgctaactgaagaggggattgcccagatctatcagctgatagaatatctacataagaatctgcgcgtggaaggcctgtttcgcgttccggggaattccgtcaggcagcagatcctgagagatgcattgaacaacggcaccgatatcgacctcgaaagtggcgaatttcactccaacgatgttgctacactcctgaagatgttcctcggcgaactgcctgaacccctgttgacccacaagcacttcaacgctcacctgaaaattgctgacctcatgcaattcgatgacaaagggaataaaaccaatatccccgataaagatagacagatcgaggccctgcagctcttgtttcttatactcccccctccaaatcgcaatttactgaaactcttactcgatttactttatcagaccgccaagaaacaggataaaaataaaatgagtgcgtacaatctggccctcatgttcgctccgcacgttctgtggccaaaaaatgcccccgcgtatatccgagagtgcgcacgtctgcattacctgggcagccgcacccaggcctccaaggacgatctggacctgattgcctcctgtcacactaagtctttccaactggctaagtctcagaagcgaaaccgagtagacagttgcccccatcaggaagaaactcagcatcacacagaagaagccttgagggagttatttcagcacgtgcacgacatgcctgaaagtgccaagaagaagcagctcattagacagtttaacaaacagtccctgactcagactcccggacgcgaacccagcacaagtcaggtacagaagcgtgcaaggagccgatccttcagcggtcttatcaagcggaaagtactcggcaaccaaatgatgtcggagaagaagaaaaagaacccaaccccggagagcgtcgccatcggagaattaaaggggacatcaaaggaaaataggaatctgctgttttctgggtcgcccgctgtgaccatgacaccaactaggctaaaatggtcggagggcaagaaggagggtaagaaggcttttgtatag

SEQ ID NO: 132486 - DNA, 1485 bp, synthetic construct
  misc_feature 1..1485: note = Description of Artificial Sequence: Synthetic coding sequence
  source 1..1485: mol_type = other DNA
atggctacagaagcacagtccgaaggagaagtgcccgccagggagtccggtcggtcagatgccatttgcagcttcgtgatatgtaacgattcctctttgaggggacagccaatcatttttaatcctgacttctttgtagagaagctaaggcacgaaaagccggagatctttaccgagctggttgtcagcaacatcacccgcttaattgatctgccaggcacggagctggctcagcttatgggggaggtggacctcaagctcccaggcggtgccggacctgctagcggcttttttcggtctctgatgagtctaaagcggaaggaaaaaggggttatcttcggtagccccctgactgaagaaggaatcgctcagatttaccagttgatcgagtaccttcataagaacctgcgcgtggaaggactcttccgcgtcccaggcaatagcgtgcggcaacagatcctgagagacgcactgaataatggcacggacattgacctagaatcaggggagttccattccaatgatgtcgccacactcctgaagatgttccttggagagcttcctgagccattattgactcacaagcacttcaacgcccatctgaaaattgccgatctcatgcagttcgatgacaagggcaataaaacaaacattcctgataaggatagacagatcgaagctctacagctgctgttcctgattctgccaccaccaaacaggaatctgctcaaactgcttctggacttgctgtatcagaccgctaagaagcaggataagaataaaatgagcgcttacaacttggctctcatgtttgccccacatgtcctgtggccaaaaaacgtcactgctaatgatctacaagagaatattaccaagttaaatagtgggatggcctttatgataaagcatagtcagaaattattcaaagctcccgcctacattcgggaatgtgctcggcttcactacttgggctctagaacgcaggcttcaaaagatgacctggatttgatagcttcgtgccacactaagagctttcagttggccaagtcccagaaaaggaatagagtcgactcttgccctcaccaagaagagacccagcaccataccgaagaagctctgcgagagctgtttcagcacgttcacgacatgcctgagtctgcaaagaagaagcagctcatcagacagttcaataagcagagtttgacccaaacccccggcagagagccaagcacttcacaggtgcagaagcgggctagatcccgcagcttttccggcttgatcaaaaggaaggtgctgggtaatcagatgatgtccgagaagaaaaagaaaaatccaaccccagagtccgtcgctatcggcgaactgaagggaacgagtaaagagaacagaaacttgcttttttctggttccccagccgtgacaatgacccctacacgcctcaaatggagcgagggcaagaaggagggaaagaagggattcctgtag

SEQ ID NO: 132487 - DNA, 1458 bp, synthetic construct
  misc_feature 1..1458: note = Description of Artificial Sequence: Synthetic coding sequence
  source 1..1458: mol_type = other DNA
atgccacaccagaagcttagtgctctcatcgatgcgatctgctccttcgtgatctgcaatgacagctccctcaggggtcaacccattatatttaaccccgatttttttgtggaaaaactgaggcacgagaagccggagatcttcaccgagttggtggtgagcaacattacaaggctcatcgacttgccggggaccgagttggcacagctgatgggtgaggtcgatctgaaactcccgggaggagctggtccagcatccgggtttttcaggtccctgatgtcactcaaaagaaaggaaaaaggggtaatcttcggatcgccattaaccgaggaaggtatagcccagatctatcagttgatcgaatatctgcacaagaatcttagagtggaagggctctttcgtgtgcccggcaattccgtccgacagcaaatcctccgggatgccctcaacaacggaacagacatcgatctcgagtcgggagagttccacagcaatgatgtagccacgctgctcaaaatgtttctgggtgagctacctgaacccttgctgactcataaacacttcaatgcccatctcaagatagccgacctgatgcaattcgacgacaaaggcaacaaaaccaatatcccagacaaagataggcagattgaggcgttgcagctgctctttctcattctcccacctcccaataggaatctgttgaagctcctcctcgacctgctgtatcagaccgcaaaaaaacaggacaaaaataagatgagcgcatacaacctggcccttatgttcgctcctcatgtgctgtggcccaaaaatgtgacagccaatgacctccaggagaacattacgaaattgaattccggaatggccttcatgattaagcattcccagaagctgtttaaggctccagcctacatccgggagtgtgcgcggcttcactaccttggttcccgaacacaggcctccaaggacgacctcgacctcattgcctcctgccacactaaatccttccaactcgctaagtcccaaaagcgcaacagggtcgacagctgtccacaccaggaggagacccaacaccacaccgaggaagcgcttcgagaattattccaacacgtgcatgacatgccggaaagtgcaaaaaagaaacagctgatcaggcaattcaataaacagtccctgacacagacacctggccgagagcctagcacctcgcaagtccagaaaagggctcgcagccgctctttctccgggctcatcaaaagaaaggtcctgggcaaccagatgatgagcgaaaaaaagaaaaaaaatccaacacccgagagcgtcgccataggtgagctcaagggaactagtaaagaaaatagaaatctccttttcagtggatccccagccgtaaccatgacccccactcggctcaagtggagtgaaggtaagaaggaaggaaaaaagggattcctatag

SEQ ID NO: 132488 - DNA, 942 bp, synthetic construct
  misc_feature 1..942: note = Description of Artificial Sequence: Synthetic coding sequence
  source 1..942: mol_type = other DNA
atgtttctgggggaattaccagaacctctgctgacccacaagcatttcaacgcacaccttaaaattgctgacttgatgcagtttgacgacaaaggaaataaaacaaacataccggacaaagaccgtcaaattgaggcccttcagctgctgttcctaatcctgccaccccctaacaggaatctgctgaagttattgctggatttgttgtaccagacggccaagaagcaagataaaaataaaatgtctgcctataatctcgccctgatgtttgccccccatgttctgtggccaaaaaacgtgaccgcgaatgatctacaggagaacattaccaagctgaacagtgggatggcctttatgataaaacatagccagaagctgttcaaggcccctgcctatatcagggaatgtgcccgactccattatctcgggagtagaacacaagctagcaaagacgatctggatttgatcgctagttgccatacgaagtcttttcaattagcaaagtctcaaaagaggaatcgcgtggacagttgccctcaccaggaggagacacagcatcatacggaggaggcactaagagaactgtttcagcatgttcacgacatgccagaatcagccaagaaaaaacagctgatcagacagttcaataaacaaagcctgactcaaacacctggacgcgagcccagcacatcccaggttcagaagcgcgcaaggagccggtccttcagcgggctgatcaagcgtaaggtgttgggcaaccagatgatgtcagaaaagaagaaaaaaaatccaaccccagaatccgtggctattggagagctcaaaggtacatcgaaggaaaaccgcaacctgctgttttccgggagtcccgcggtcactatgactcctacaagactgaagtggtcagaagggaagaaggagggtaaaaaaggcttcctctag

SEQ ID NO: 132489 - DNA, 1554 bp, synthetic construct
  misc_feature 1..1554: note = Description of Artificial Sequence: Synthetic coding sequence
  source 1..1554: mol_type = other DNA
atggcgaccgaggcacaatctgagggcgaagtacctgcgagagaatctggacggtccgatgccatttgctcttttgtgatctgcaatgattcctcactgcgcggacaacccatcattttcaacccggacttcttcgtggagaagctgagacatgagaagccagaaatttttacggaactggttgttagtaacatcacccgactgatcgatctgcctggtaccgagctggctcagctgatgggcgaagtggatttgaagctgccgggtggagccgggccggcatccggatttttccgctctctgatgtctctaaagaggaaagagaaaggtgtgattttcggaagtccactcacagaggagggaattgcccaaatctaccagctgatcgagtacttgcataagaatctccgtgtcgaaggtctctttagggtgcctggtaacagcgtccgccaacagatcctcagagatgctttaaacaacgggaccgacatcgacttagagtccggagagttccactctaatgatgtagcaaccctgttgaaaatgtttctgggcgaacttccagagccacttttgacacataaacacttcaacgcccacctaaagatcgcggacttaatgcaattcgatgataaaggtaacaaaacgaatatccccgataaagataggcagattgaggccctgcagcttctgttcctgatactgccacctccaaatagaaatcttcttaaacttctgctggacctgttgtaccagacagccaaaaaacaagataagaacaaaatgtcagcctataatctggcactgatgttcgctccccatgttttgtggccaaagaacgttacagcaaatgatctccaggaaaacattacaaaactgaacagtggtatggcattcatgattaagcattcccagaaactgttcaaagcccctgcttacatacgagagtgcgctcggctacactacctggggtccaggacacaggcaagtaaagacgacttagatctcattgcttcctgtcacacaaaatccttccaactggctaaatctcagaagcggaatcgtgtagattcatgtcctcatcaagaggaaacccagcaccatacagaggaggctctgagggaattgttccagcatgtgcatgatatgcctgaaagcgccaaaaaaaagcaactgatccggcagttcaacaagcagagcctgacgcagacgcccggccgggagccctcaacctcccaagtgcagaaaagagctcgaagtaggtcgttcagtggtctgatcaaaaggaaggttcttggtaaccagatgatgagtgagaagaagaaaaagaatccaacaccagagagtgtggctatcggtgaactcaaaggaacgtccaaggaaaatcgcaacctcttattcagcggatcacctgctgtcaccatgactcccactcgacttaaatggtcagaggggaagaaggaagggaaaaaggggaatagtatggccaccactagcctcggttctatccgcatgacgttgcggggctcgagctcatgcgggtgctgttcatag

SEQ ID NO: 132490 - DNA, 3654 bp, synthetic construct
  misc_feature 1..3654: note = Description of Artificial Sequence: Synthetic coding sequence
  source 1..3654: mol_type = other DNA
atggctcagccagttgaaatctctccacctgactcatccctgagcaagcagcagacctcgaccccagttctaacccagcccggacgtgcctaccgtatggagatccaggttcctccgtccccgacagacgtggcgaaatccaacactgccgtgtgcgtatgtaatgaatccgtgaggaccgtaatcgtcccttccgagaaggttgtggacctgctgtctaacagaaataatcatactgggccatctcaccggactgaggaggtgcgctacggtgtgtcagaacagacctctctgaagactgtgtccagaacaacatctcccccgctttccattcctacaacccacctgattcaccagcccgccggatccagatctctggagccttccggaatccttctcaagtccggtaattatagcggacattccgacggaatttccagtagtcggtctcaggctgtagaggccccaagtgtttccgtgaaccattacagccccaattcgcatcagcatatcgactggaagaattacaaaacttacaaggagtacatcgataatcgcaggttgcatattgggtgtagaacaattcaggaaagacttgactctctaagggcagcttctcaaagcacgactgactacaatcaggtggtaccaaaccgaacaaccttacagggcaggcgacggtctacctcccatgacagagttccacagtcagttcagattagacagaggtctgtgtcacaggagagactggaggacagtgtgctcatgaaatactgtccccggtccgcatctcaaggcgccctgactagtccgagtgtatctttttcaaatcaccgcacccgtagttgggattatattgagggacaggacgagacactagaaaatgttaactccgggacaccgatcccagacagtaatggcgaaaagaaacagacctacaagtggtccggattcacagaacaagatgaccggaggggtatatgcgagaggccaaggcagcaggagattcataagtccttccgcggctcaaattttacagtggcaccctcggtcgtgaactctgacaacaggagaatgtccggtcggggagtgggttccgtttcccagttcaaaaaaatccctcctgacctgaagactttgcagtctaatcgtaactttcaaactacgtgtgggatgagcttgcctaggggaatctcccaagaccgctcacccctggtgaaagtgcgatctaattctctgaaggcgccatcaacccacgtcacaaagccaagctttagccagaagtccttcgtgtccataaaagatcagaggcctgtcaatcacctccaccaaaactctctcctaaaccaacagacctgggtgagaaccgacagcgccccagatcaacaagtggagacaggaaagtcaccttctctttccggtgccagcgcaaagcccgcaccccaatcttctgaaaatgccggcacaagcgacctggagttgcccgtctctcaacggaaccaggacctctccttacaggaagctgagaccgagcagtcagatactctagacaacaaagaggctgttattctgagagagaagcccccttctggccgccagactccccagcccttgcggcaccagtcttacatccttgcagtgaacgatcaagaaaccggatcagacactacttgctggttgcctaacgatgcacggcgtgaagtacatatcaagcgcatggaggaacggaaagcctcttctacatcaccacccggggatagcctggcaagtatccccttcatcgatgagccaactagcccctcaatagatcatgacattgcccacatccccgctagcgcagtgatcagcgccagcacatcacaggtgccgtctatcgccacagtgccaccttgtctgactacaagcgcccctctcataagaaggcagctgagccacgaccacgaatccgtgggcccaccttcactggatgctcagcccaattccaagacagaacgttcaaaatcttacgatgaggggttggacgactatcgcgaagacgctaaattaagcttcaaacacgtctctagccttaaaggcatcaagatcgccgactcgcagaagtcctctgaagattccggctcacgaaaggactcaagtagcgaagtgttttctgacgcggctaaggaaggatggttgcacttcaggccactcgtgaccgataagggaaagcgcgtgggtggatcgatacgcccctggaaacaaatgtatgtagtcctccggggacacagcctgtacttgtacaaagacaagcgggaacagaccaccccctccgaggaagagcaaccaatttctgttaacgcctgcctcatcgacatatcgtactcagaaaccaaaaggaagaacgtgtttcgtctcactacttctgattgcgagtgtctgttccaggccgaggaccgagatgacatgcttgcctggatcaaaaccatccaggagagctctaatctgaatgaggaggacaccggagtaaccaatcgcgaccttatatctagaaggattaaggaatataataaccttatgagcaaggcggagcagctgccaaagacacctcggcagagcctgagcattcgtcaaactttactcggagccaaatccgaaccgaagacccagagcccacactccccaaaggaggagtctgaacgaaagctgctcagcaaggacgacacctccccaccaaaggataagggaacctggcggaaaggcattccctctataatgaggaaaaccttcgagaaaaagcccaccgccacaggtaccttcggagtgaggttagatgactgccctcctgcacatacaaaccgctacatacccttaatagttgatatttgttgtaagctggtcgaagagcgcgggctagaatacacagggatctaccgcgtgcccggaaataacgccgctatttcttcgatgcaagaggaactgaataagggaatggctgatattgatatccaggatgataagtggcgggacttgaatgtgatcagctccttgttgaaatctttctttagaaagctgcccgaaccgctgttcacaaacgataagtatgcggatttcatcgaagctaaccgaaaagaagaccctcttgaccgactaaagacactgaagcgtctcattcatgacctcccggaacaccattacgaaacgctgaaattcctgtccgcccacctcaagactgtggccgaaaacagcgaaaagaacaagatggagccgcgcaatctcgctatagtgtttggccccacactggtgcgaacatcggaggataacatgacacacatggtcacacacatgcccgatcagtataagattgtggagaccctgattcagcaccacgactggttttttacagaagagggcgctgaggagccgttaactacagtccaggaagaaagtactgtcgatagtcaacctgtaccgaatatagatcatctgcttaccaatataggaagaaccggggtgtctcccggagatgtgagcggggaagtggggggcgtctatcacactgtaatgagtctggtagacagcgttatgtccctgatggattcatggaactgtcgaaaaaaagaggattgctgccctcactgctcatgtctggtctgccgaaatccgaggttcctgtag

SEQ ID NO: 132491 - DNA, 3498 bp, synthetic construct
  misc_feature 1..3498: note = Description of Artificial Sequence: Synthetic coding sequence
  source 1..3498: mol_type = other DNA
atgatggccacaaggaggacaggactgtctgagggcgatggcgacaaactcaaagcatgcgaggtctccaaaaataaagacggaaaggaacagtccgagacagtctctctcagcgaagatgagactttctcttggcctggccccaaaacggttacccttaagcggacgtcccagggcttcgggttcacgctgcgtcacttcattgtctatcccccagaatctgctatccagttctcctacaaggatgaggaaaatggaaaccggggtggaaaacagcgtaatagactagaacctatggacacaatcttcgtcaagcaggtgaaggagggtgggcctgcgtttgaggccgggttgtgcacgggtgataggatcatcaaggtgaatggagagagtgtaattgggaaaacatattctcaggttatagctctgatacaaaatagtgacacaactctggaattatctgtgatgcctaaggacgaagacattttacaggtcgcatactcccaggacgcctatcttaaggggaatgaagcttacagtggcaacgcaagaaacattccggaacccccccccatctgttacccctggctgccaagcgccccttcggccatggctcagccggtagagatttcccctccggattcgtctctgtcaaagcagcagacgagcactcctgtgttgactcagcctggaagagcctatagaatggagattcaggttccaccaagcccaacagatgtggcaaagagcaataccgccgtgtgcgtgtgcaatgagtcggtgcggacagtgatagtaccctctgagaaagtggtggatctcttgtccaaccgcaacaatcataccggtcccagtcacagaacagaggaggtacgatacggtgtttctgagcagacttctctgaagaccgtgtctcgtactacaagtccacccctgtccattcccacgacccacctgatccatcagcccgccgggagtcggtcactggaaccctctgggatccttctgaagagcgggaactactccggacactctgacggaatctcttcctctagatcccaggccgtcgaagctccttctgtatccgttaaccattatagccccaattctcaccagcacatcgactggaaaaattataagacgtacaaagagtacatcgacaaccgtaggttacacatagggtgcaggacaatccaggaaagactggactccctacgggcggcctctcagtccactacggattataaccaagttgtccctaacagaactacactgcagggtcgcagacgcagtacctcacatgatcgcgtgccacagagtgtacagattaggcagaggagcgtctcacaagagcgcctcgaagacagtgtgctgatgaaatattgccctcgatccgcctcccagggggccctcacatcaccttctgttagtttctcaaatcatcgaacccgctcttgggattacatagagggtcaggacgaaactctcgagaacgttaatagcggcacacccattcccgatagcaacggtgaaaaaaaacagacttacaagtggtcaggattcacggaacaagatgataggaggggcatctgcgagcggccaaggcaacaggaaatccacaagtcctttcggggctctaactttactgtcgctccttcagtggtcaactcagataaccgtcgcatgtctggacggggagtgggctccgtgagtcagtttaagaaaatacccccggatctcaagacgctgcaatcgaatcgcaatttccagacgacttgcggaatgtccctgccgcgtgggatctcccaggacagaagcccccttgtgaaagttagatctaacagcctgaaggctccttccacacacgtcactaagcccagcttcagccagaagagtttcgtgtcaatcaaggatcagaggcctgtcaatcatctgcaccaaaactcgttgctcaaccagcaaacctgggtgcggacagactcagcgccagaccagcaggtcgagacaggtaagtcaccaagcttatcaggagcttcagctaaaccagcccctcagagctctgaaaatgctgggacaagcgatcttgagctccctgtgagccaaagaaatcaggatctctccctccaggaggccgaaacagagcagtcagatactttggacaataaggaggcggtgatcctcagggaaaagcccccatccggccgccagacgccacagccactcagacatcagagttacattctcgcggtgaatgatcaggaaaccgggtctgacactacatgctggctgcctaatgacgcccgaagggaggtccacatcaaaaggatggaagagcgcaaggcgagctctacttctcccccaggcgacagccttgcatcaattcctttcatcgacgagccgaccagtcctagcatcgatcacgacattgcccacatccctgcttccgccgtgatctccgcctcaacgagtcaggttccatctatcgccaccgtgcccccctgtctcacaacatctgcaccactgattcggcgtcagctgtcccacgatcacgagagtgttggccccccatctctggacgctcagcccaactcaaagacagagcgtagcaaatcatacgatgaaggtctggatgactatcgcgaagacgcaaagttgtccttcaagcacgttagttccctgaaaggcataaaaattgccgattcacagaagagctcggaggactctggctcgaggaaggatagcagcagcgaagtctttagcgatgccgctaaggaagggtggctgcattttcggcctctggtgacagataagggaaaaagggtggggggatcgattcgcccctggaaacagatgtatgtcgtattgagaggtcattccctttacctctataaagataagcgtgaacagacaacgccttcagaagaagaacagcccattagtgtgaacgcttgtcttatagacataagttactccgaaaccaaacggaaaaatgtgtttcggctcaccacgagtgactgtgaatgtctgttccaggctgaagatcgcgacgacatgttggcctggatcaagacgatccaggaatcatccaatcttaacgaagaggacacaggagtgaccaatagagacctcatctcacggaggatcaaggaatataataacctgatgtcaaaagctgagcaactacccaaaacaccccggcagagcctgagtatcaggcagaccctgttaggcgcaaaatcggagcctaagacccagagcccacacagccccaaagaggaaagcgagaggaagctcctgagtaaagatgacacctccccccctaaagacaaagggacctggcgcaaaggaatcccatctattatgaggaaaacatttgaaaagaagccaacagcgactgggacatttggtgtgagactggacgattgtcccccagcccacaccaatagggttggggacacctccccacccgactttctaaaatccctgattcagttctag

SEQ ID NO: 132492 - DNA, 5877 bp, synthetic construct
  misc_feature 1..5877: note = Description of Artificial Sequence: Synthetic coding sequence
  source 1..5877: mol_type = other DNA
atgatggcaacacgcaggaccggcctgtccgaaggtgacggagataaactcaaagcctgcgaagtctctaagaataaagacggaaaagagcaatccgagacagtgtcactgtccgaagacgagacattctcctggcctggccccaagactgtaaccctgaagcggacttcgcaagggtttggttttaccctcagacacttcattgtctaccccccagaaagtgccattcagttttcttacaaagacgaggagaatggcaaccgcggggggaaacagcgcaaccgcctggaacccatggatacaatctttgtaaagcaggttaaagaggggggaccggctttcgaggcaggcctgtgcacaggcgaccggattatcaaggtgaatggggagtctgttatcggtaagacgtattcacaggttattgccttgatccaaaattctgatacaaccttggagcttagtgtcatgcccaaggacgaagacatcctacaggtactccagttcaccaaggacgtcacggcgctagcttattctcaagacgcttatctcaaaggaaatgaggcctattccggcaacgccaggaacatccctgaaccccctcccatctgctacccctggttgccttccgctcccagcgctatggctcagcctgtggaaatcagccctcccgatagttcgctctcaaaacaacagaccagcactcctgtcctgacacaacccggacgggcctaccggatggagatccaggtgccacccagtcccacagatgtagctaagagtaatacagccgtgtgtgtgtgtaatgagagcgtgcgcacagttattgtgccatccgaaaaagtcgttgacctccttagtaaccgaaacaaccacaccggcccttcccatagaacagaggaggtccggtacggcgtgagcgaacagacatctctcaaaactgtttctagaacaaccagtccacctctgtcaattccaacaacgcacctgattcatcagccagctggaagtcgctctctggaaccatcaggtattctgctaaaatcaggtaattattctgggcactctgacggcatctcctcaagtcgcagtcaggcggtcgaggccccgtccgtgtcagtgaaccactactccccgaacagccaccagcacatagactggaagaattacaaaacctataaggagtatatagataaccggcggctgcacatcggatgccggacaatacaggaacggctcgattcgctgagagctgcaagccaatccacgacagactacaatcaggtcgtcccaaatcgcacaacactgcagggccgcagacgttccacctcacatgaccgggttccacaaagcgtccagatcagacaaagatctgtcagccaggagagactcgaagactcagtgcttatgaaatattgtcctagatctgctagtcagggggcccttacaagcccctccgtttctttttctaaccataggacccgaagttgggactatatagagggtcaggacgagactctagagaatgtgaattcagggacgccaatacccgattccaacggggaaaagaagcagacatataagtggtctggttttacagagcaagatgataggagggggatttgtgagcggccgaggcagcaggaaatccacaagtcctttaggggcagcaattttacggtcgcaccatcagtcgttaattctgataaccgcaggatgtcaggcagaggcgtaggaagtgtcagtcaatttaaaaaaattcctcctgatctgaaaactctgcagagcaaccgaaacttccagactacctgcgggatgtctttgcctaggggaatttcccaggaccgcagtcccctggtcaaggtacggtccaattccttgaaagccccaagcacccatgtcacgaagccatcttttagccagaaatcgttcgtgagcatcaaagatcagcgacctgtcaaccatttgcatcagaatagcctgttgaatcagcagacctgggtgcggacggacagcgctcctgaccagcaggttgaaaccgggaagtcaccatctttgtctggcgcctcagccaagcctgccccccagagcagcgagaacgcagggacttctgatttggagcttccagtcagtcagcgcaatcaggatctgtccctccaggaggccgagacggaacagagtgacaccctggacaacaaggaggctgtgatattacgcgagaagccccccagtggtcgccagacgccccaaccgctgagacaccagtcatacatcctcgcagttaatgaccaggagaccgggtctgacactacatgttggctgccaaacgatgcgaggcgcgaggtgcatatcaaaagaatggaggaaaggaaggcttcctctaccagcccaccaggagattcactcgcgtccattccatttatcgatgagcctaccagtccgtctatcgaccacgatatcgcgcacatccctgcctccgctgtcatcagcgcaagcaccagccaagttccatccatcgcaacagtgcccccttgcctgactacatcagcccctctcataagaaggcagctcagccacgaccatgaatccgtaggaccccccagcttggacgctcagccaaactccaagactgaaaggtcaaagtcctacgacgaaggcttggacgattacagagaagacgctaaactgtctttcaagcatgttagcagtttgaaagggattaaaattgccgactcccagaagtcatctgaggactcagggagccgcaaagactcgagttcagaagttttctctgacgctgcgaaagagggctggttgcactttcggccattagtgacggacaaggggaagagagtgggagggtccataaggccctggaaacagatgtacgtcgtgcttcgcgggcacagcctgtacctgtataaagacaagcgagagcagacgaccccatctgaggaagaacagcctataagtgtgaacgcgtgcctgatcgatatcagttattccgagactaagagaaaaaacgtctttcggctaaccacatccgattgcgaatgcctgttccaagctgaagacagagacgatatgctggcatggatcaagactatccaggagtcaagtaacctcaatgaagaggacaccggtgttacgaatagagatctaatctcacgccggattaaggagtataacaacctaatgagtaaagccgagcagctcccaaaaacaccaaggcagtccctctctatcagacagacattactgggagctaaaagcgagcccaaaactcagtcaccacattcacctaaagaggaatccgaacggaaactgctcagcaaggacgatactagcccccctaaggataagggtacgtggcggaaaggcataccgtctataatgagaaaaacctttgagaaaaaaccaacagccacaggaacttttggagttaggcttgatgattgccccccagcccacaccaatagatacatacctctgatcgtggacatatgttgtaagctcgtagaggagcgcggtttagagtacaccggtatataccgggtacctggcaataatgccgcaatttctagcatgcaagaagagttgaacaaaggcatggccgacatcgacattcaagatgataaatggagggacctgaacgtaataagctcacttttgaaatccttcttcagaaagctgcccgagcctttgtttactaacgataagtacgccgacttcatcgaggctaacagaaaggaagatccactggaccgactgaaaacactgaagcgcctgatacatgatctcccggagcatcattatgaaactctgaaattcttgtcagcgcacctaaagactgtcgctgagaatagcgaaaagaacaaaatggaaccacggaacctagcgattgtcttcggacctacactggtgcggaccagcgaggacaacatgacccacatggtgactcacatgccagaccaatacaagattgtcgaaactctgattcagcatcatgattggttttttacagaggagggagcagaggagccccttacaaccgtgcaggaagaaagcaccgtggattcacagcccgtgccgaacatcgatcacctcctgactaatattgggaggactggagtctccccgggggacgttagtgactccgcaacctctgattcgactaaaagcaaggggtcctgggggtcaggtaaggaccaatacagccgggagctcctcgtctcaagtatctttgcggctgcctccaggaaacggaaaaaacccaaggaaaaggctcagccatctagctctgaggacgaactagataatgtgtttttcaagaaagagaacgtggagcagtgtcacaatgacacaaaagaagaatctaagaaagaatctgaaacgctcgggcgaaaacagaagatcataattgcaaaggagaattctactagaaaagatccctcaactacgaaagatgagaagatatccctgggcaaggagtcaacacccagtgaggaaccatccccaccacacaactctaagcacaataaatccccaacactgtcttgtcggttcgccattctcaaggaatccccccggagtcttctcgcacagaagagcagccatctagaagagactgggagcgattcaggcactttactgtctacctcatcccaagccagcctggccaggttttccatgaagaagtcaactagccccgaaactaagcacagtgaatttctcgccaatgtctcgaccatcacctccgactactctaccactagtagtgctacttatttaacgtcactcgattcctctaggctgtcaccggaggttcagagtgtggccgaatcaaagggcgacgaggcagatgacgagcgctccgaactgatatctgaaggaagacctgtcgagacagacagcgagtccgaatttccggttttccctacagcattaactagtgagaggttgttccggggcaagctgcaggaggtgacgaaaagttcaaggagaaatagcgagggcagtgagctcagctgcaccgaagggagtcttacttcatctttggattctcggcgtcaactgttctcctcacacaaattaatcgagtgtgacactctgtcccgaaaaaaatctgcaagatttaagtccgactcaggcagcctgggagacgcaaaaaacgaaaaggaagctccatcccttactaaagtctttgacgtcatgaagaaggggaaatcgaccggatccctgctgacccccacgcggggcgagtctgaaaaacaggagcctacgtggaaaacaaaaattgcagatcggttgaagctgcgtcccagagcccctgcagatgacatgttcggcgttggtaatcacaaggtgaacgcggagaccgccaagcgaaagagcattcgccgccggcacaccctggggggccatcgtgacgcaacggagattagcgttctgaatttctggaaggtccatgaacagtctggtgagcgcgagtcagagcttagcgctgttaacaggctcaagccaaagtgttccgctcaggatcttagcattagcgactggctagcgcgagagaggcttagaacgagcacctcggacctttcacgaggcgagattggtgatccccagaccgaaaatccaagcacccgggaaatcgccacaaccgatacccccctatctctgcactgtaatactgggtccagtagttcaacgcttgcttccacgaaccggccacttctgagcattcctccccagagcccagatcagatcaatggagagagtttccaaaacgtctcgaaaaatgcgagcagtgctgcaaatgcccagccccacaagttatccgaaaccccagggagcaaggctgagtttcacccctgcctgtag

SEQ ID NO: 132493 - DNA, 594 bp, synthetic construct
  misc_feature 1..594: note = Description of Artificial Sequence: Synthetic coding sequence
  source 1..594: mol_type = other DNA
tagaacaatgcagcaatcagctctatgcaagaggagctcaataaagggatggcggatattgacatccaagacgacaagtggcgagatctgaatgtgatctcctcccttcttaagtccttctttcggaagcttcccgagccgctattcaccaacgacaaatatgctgatttcatcgaagctaacagaaaagaggatccactcgacagactcaagactctgaaacggctcatccatgatctgcctgaacaccactacgaaacactgaagttcctctccgcccatctgaaaaccgtagccgagaactctgaaaagaacaagatggagccccgcaacttggcgatcgtgtttggccctacattggtgcgtacgtccgaggacaatatgacccacatggtgacccacatgccagaccagtacaaaatcgtcgagaccttaattcagcatcacgactggttctttacagaggagggcgctgaagaacctcttattcagctcttagttacccagcagaacctgcgcgttttaggcgacctggagcgaataagcatcgccgggaattgtctgtgccccccatctctgcagttactggtgtag

SEQ ID NO: 132494 - DNA, 342 bp, synthetic construct
  misc_feature 1..342: note = Description of Artificial Sequence: Synthetic coding sequence
  source 1..342: mol_type = other DNA
tacatcccacttatcgtcgacatctgttgcaaactagtggaagagaggggactggaatacaccggcatctatcgtgtccctggaaacaacgctgccatctctagcatgcaggaggagttgaataaaggaatggccgacatcgacatccaagatgacaaatggagggatttgaatgttatcagttccctcctaaaatccttcttccgcaagctccccgagcccttattcacaaatgacaaatacgcagactttattgaggcgaataggaaggaggatccattagaccgcttgaaaacccttaagcgtctcttcctgagcgcccacctcaaaactgtcgcttag

SEQ ID NO: 132495 - DNA, 2724 bp, synthetic construct
  misc_feature 1..2724: note = Description of Artificial Sequence: Synthetic coding sequence
  source 1..2724: mol_type = other DNA
atgcccaaagatgaagacattctgcaggtggcatattctcaggatgcgtacttgaaaggtaacgaggcttattccggcaatgctcgcaatatcccagaacccccacccatatgctatccctggctgccctcagcaccttccgccatggcccagcctgtagaaataagcccgcctgacagctctctgtctaagcagcagacctctacgccagtgctaacacaacccggtcgggcttacagaatggaaatacaagtgccgccctcgcctaccgatgtggcgaaatccaacacagccgtatgcgtgtgtaacgaaagcgtgcgtaccgtcatagtgcccagcgaaaaggtggtggatctgttaagcaacagaaacaaccataccggcccaagccatcgcacagaggaggtcagatacggtgtgtcggagcagacttccttgaaaacagtctcaagaacaacatctccaccactgtcaattcctaccacacaccttattcatcagccagcaggttcacggtcccttgaaccttcgggcattctcctgaagtcagggaactacagcggtcattcagacggtatttcctccagccgtagtcaggccgtggaggccccctccgtgtcagtaaaccattattctccaaactcccatcagcacatcgattggaagaactataaaacttataaagaatatattgataacagacgtctccacatcggctgtcgcaccatccaggaaagactggactcactccgagctgcatcacagagcactaccgattacaaccaggtcgtccctaaccggactactcttcaggggcgtagacggtctacatctcacgatagggtgccccaatctgtacagatccgacagcggagcgtgagccaggagcggctggaagattccgtgctaatgaaatattgcccgcggagcgcatcccagggcgctctgacaagcccttctgtatcattttctaaccacagaacacgatcttgggactacattgagggacaagacgaaaccttggagaacgtgaactctggaacacctatccctgactcaaacggcgagaaaaaacaaacctacaagtggtctggattcacagagcaggacgaccggcgaggtatatgcgaaagaccccgccaacaggagatccataaatccttccgcggaagtaactttacagttgcaccctccgttgtgaattctgacaacaggcggatgtccggacgtggagtgggaagtgtgagtcagttcaagaagatacctccagacctcaagactctccagagcaatcggaactttcagacaacgtgcgggatgtccttgcctaggggcattagccaggatcgcagccccttagtcaaagttcggtccaactctctgaaagcgccttccacccacgtcaccaagccctcattctcccagaagagttttgtttctattaaagaccagcgcccagttaatcatctgcatcaaaacagccttcttaatcaacagacctgggtccgcactgactcagcccctgaccagcaggttgagacaggaaagagtccctcattgtccggcgcctccgctaaacctgccccacagagtagcgaaaatgccgggaccagtgatctggaattgcctgtcagtcagagaaaccaggacctgtccctccaggaggccgaaaccgaacagtccgatactttggataacaaggaagccgtcatcctccgggaaaaaccacccagcggccggcagactccacagcccttacgccaccagtcgtatatcctcgcagtcaatgatcaagaaacaggctccgatactacgtgttggctgccaaatgatgcccggcgggaagtgcacattaaacgcatggaggagcgtaaagcaagctcaacatctcctcctggagatagtctcgcgagtattccttttatcgatgagcccacatcaccgagtatcgaccacgatattgctcacatccccgcaagcgcggtgatcagtgctagcaccagccaggtgcccagtatagcaacggtaccgccctgtcttaccacgagcgcacctttgatcaggcggcagctgagccatgaccatgaatccgtcggtccacctagcctggacgcacagcctaactctaagaccgaacggtctaagagctatgatgaggggctggacgattaccgagaggacgccaaactgtcttttaagcatgtctctagccttaagggcatcaaaatagcggactcgcaaaagagctctgaagatagtggctcacgcaaagactccagttctgaggtgtttagcgacgccgctaaggagggctggctgcatttccgccctctcgtaactgacaaaggcaagcgcgtcggcgggtcgatccggccttggaaacagatgtacgtggttttacgaggccatagtctgtatctctataaagataagagagaacagaccacaccctccgaagaggagcagcccatatccgtcaacgcctgtcttatcgacatatcctactctgagactaagaggaaaaatgtcttcaggctgaccacaagtgactgcgaatgcctttttcaggccgaggacagggacgatatgctagcctggattaaaaccattcaggagtcttctaacttaaacgaggaggacaccggcgtgacaaacagagacctgataagccgcaggatcaaggagtataacaacctaatgtccaaggctgagcagctgccgtag

SEQ ID NO: 132496 - DNA, 3396 bp, synthetic construct
  misc_feature 1..3396: note = Description of Artificial Sequence: Synthetic coding sequence
  source 1..3396: mol_type = other DNA
atgatggccacccggagaactgggctttctgagggagacggggataaattaaaagcatgcgaagtcagcaagaacaaagacggaaaggaacagagtgaaacagttagcctttctgaggatgaaaccttcagctggccaggacctaagaccgtaaccctgaagcggaccagccagggatttggattcaccctccgccactttatcgtttatccaccggaatctgctatccagtttagctacaaggatgaggaaaacggtaaccgcggcggcaagcagcgcaataggctagagcccatggacaccatcttcgtcaaacaagtgaaggagggtgggcctgctttcgaagctgggctctgtaccggcgaccggattatcaaggtgaacggcgagagcgttatcggcaagacctatagccaggtaattgccctgatccagaatagcgacactaccttggagctctcggtcatgcctaaagatgaagacattctgcaggtgctccaattcacaaaagacgtgaccgccctagcatactctcaggacgcctacttaaagggcaatgaagcctactccggaaacgcacggaacatccccgagccaccgccaatctgttacccctggttaccctctgccccttctgcgatggcgcaaccagtcgaaatctcacctccagatagtagcctttccaagcagcaaacatcaacgcctgtgttaactcagccaggtcgggcgtatagaatggagattcaggtgcccccctcacccactgatgtcgccaagagcaacaccgccgtctgcgtgtgtaatgagtctgtcaggacggtaattgtgcctagtgagaaagttgttgacctgttgagcaatcggaataaccacacaggaccctcgcatagaacggaggaagtgaggtatggggtgtctgagcagacaagccttaagaccgtgagccgaaccacatcaccacctctttccatacccactacccacctgatacaccaacctgccggctccaggtcactggaaccttctggaatcctgttgaaatctggcaactatagcggccactcggatgggatcagctcatcacggtcccaggccgtggaggccccatccgtttcagtgaatcactattcccctaactcccaccagcatatcgattggaaaaactacaagacttacaaagaatacatcgacaatcggagattacacataggctgtaggactatacaggagagacttgactctcttagagcggcatcacagagtacaacagattacaatcaagttgtgcccaacaggactactctgcagggtagacggagatccacctctcacgaccgggttccacaatctgtgcagatcaggcaacgctccgttagccaggagagactcgaagattcagtgcttatgaaatactgccctagatcagcctcgcagggagccctgacctccccatccgtgagcttcagcaatcaccgcaccaggtcgtgggattacatcgagggccaggacgaaaccctggaaaacgtgaacagtggcactcccattccagatagtaatggggaaaagaagcaaacctacaaatggtctggcttcacagagcaagatgatagacgcggaatatgtgaacgtcctcggcaacaggagatccacaagtcattccgaggttctaacttcacagtggcgccttccgttgtcaattccgataaccgccgcatgtctggcagaggcgtcgggagcgtgagccaatttaagaagattccccctgatctcaaaacattgcagtccaaccgtaacttccaaacaacgtgcgggatgtccctcccaagagggataagtcaggacaggtcaccgctcgtgaaggtgagaagcaacagtctcaaagccccatccacgcacgtgacaaagcccagtttctctcagaaatcttttgtgtcaataaaggaccagcgccctgtgaaccacctacaccagaacagcctgttgaatcagcagacttgggtccggaccgactctgcaccagatcaacaggtggagacggggaaatctccatcccttagcggggcttctgctaagcccgcccctcagtcgagcgaaaacgctggtacttcggatctggaactccccgttagtcagcgcaatcaggatctgagcttacaggaagcggaaacagagcagtcagacactctcgataacaaggaagctgttatcctccgcgaaaagcccccaagtggcagacaaaccccacagcccctcaggcaccagagttatatcttagcagtgaatgatcaagagaccggctctgacacgacatgttggttgcccaacgacgctaggcgcgaggttcacatcaagcggatggaagaacggaaagcctcctcaaccagcccccctggggattcgctcgcgtccatcccgttcatagatgaacccacttctccaagcatcgatcatgacatcgctcatatcccagcttctgcagtaatctctgcctcaacatcccaggtcccatctatcgccaccgtccctccctgtttgacaacatctgccccattgatcaggcgacaacttagccacgatcacgaaagcgttggtccccccagcctcgatgcgcaacccaacagtaagactgagagaagcaagagttatgatgaaggacttgacgactacagggaagacgcaaaattatcattcaagcatgtgtcctctctaaaggggatcaagatagcagattcacagaaaagctcggaggatagcggctcaagaaaagatagctccagtgaagtgttttctgatgcagcgaaagagggttggctacactttagacccttggtgaccgataaaggaaagcgggttgggggaagcatccgcccctggaagcagatgtatgttgtcttgagggggcacagcctctacctgtacaaagacaagcgggaacagaccactccatctgaagaggagcagcccatttccgttaacgcatgcctcatcgatatcagctactctgagaccaaaagaaagaacgtttttaggctgacgactagcgattgcgaatgcctgttccaagcggaggacagagacgacatgctggcttggatcaaaacaatccaggaatccagcaatctgaacgaggaggacacaggcgtgactaatagggaccttatctcaagacggatcaaggaatataataatctgatgagcaaagcagagcagttacctaaaacaccacggcagagtttgagcatcagacaaacactgctcggggcaaaaagtgaacccaaaacgcagagcccacacagccctaaagaggaaagcgaaaggaagctgcttagcaaggacgacacgtctccccccaaagacaagggtacctggcgaaagggcatcccatctatcatgtag

SEQ ID NO: 132497 - DNA, 4224 bp, synthetic construct
  misc_feature 1..4224: note = Description of Artificial Sequence: Synthetic coding sequence
  source 1..4224: mol_type = other DNA
atggccaccagacgcacaggactatcagagggggacggcgacaaactgaaggcttgtgaggtttccaaaaataaggacggcaaagagcagtccgagaccgtcagcctgtctgaagacgagaccttcagctggcccggcccaaaaacagtgaccctcaagcgaacttcgcagggcttcggctttacgttgcgacatttcattgtgtatccaccggaatccgctatacagttctcatacaaggatgaggagaacggcaatcgcggcggaaagcagcgaaaccggttggagcctatggatacgattttcgtgaaacaggtcaaagaaggcggccccgccttcgaagctggattatgcacaggggatcggatcatcaaagttaacggagaaagcgtgattggtaagacttactcccaggtgattgcgctcatccagaactcagacacaaccttggaactgtcggttatgccaaaggatgaggatattctccaggtggcctattctcaagatgcctatttaaaaggtaatgaggcatattctggcaatgcccggaatataccagagcccccgcctatttgttacccatggcttcctagtgctccttccgccatggcgcaaccggtggagatatccccaccggatagcagcttgagcaaacagcaaacttcgacaccagtgctgacccagccaggtagggcgtacagaatggagatccaggtacctcctagccctacagacgtggcgaaatctaatacggccgtctgcgtgtgtaatgagagcgtgagaaccgtcatcgtgccctctgagaaggtcgtagatctgctttccaaccgcaacaaccatacaggtccaagtcacaggaccgaggaggtccggtacggagtgagcgaacagacctccctgaagaccgtgagcaggaccacatctcctccactgtcaattccaaccacccatcttatacatcagcctgcaggcagccgctccctggaaccttctggcattctgcttaagagcggtaattattctggccacagtgacggcattagcagttcacggtcacaggccgtggaggcgccaagtgtgagcgtgaaccactactccccaaacagccaccagcacatagactggaaaaactataaaacctataaagagtacatcgataaccgcaggctccacatcggttgccgcaccattcaagaacgcctggacagccttagagcagcatcccagagcactacggactataaccaggtcgtgccgaaccgcactaccctgcaaggcagacggagatctacatcccacgacagggtaccccaaagcgtgcagatccgccagcgctctgtgtcacaggagcgcctcgaagacagcgtgctcatgaaatactgcccccgatctgcgtctcaaggtgccctgacttcccctagcgtctccttctctaaccatcggacccggtcgtgggattacattgaagggcaggatgaaaccctggaaaatgtcaattctgggaccccaatccctgattcgaacggagagaagaagcagacatacaagtggagcggattcaccgagcaggacgacagaagagggatctgcgagcggccgagacaacaggagatccataagtcctttcgtggctctaactttacggtcgccccctccgtggtgaactcagacaatcggcgcatgtccggcaggggcgtggggagcgtgtctcattggcgaaagggcatcccgtctattatgcgaaagaccttcgagaaaaagccaaccgctaccgggacattcggagttaggcttgacgactgccccccagcccatacaaaccgctatatcccactgatcgtcgatatctgttgtaagttggtagaggagagaggcctagagtacaccggaatctatcgtgtgcccggcaataacgcagcaatatctagtatgcaagaggagcttaacaagggcatggccgatattgacatccaggacgacaagtggcgcgacctgaatgttattagtagcctcctgaaatctttctttagaaaactgcccgaaccactctttactaatgataagtatgccgatttcatcgaagctaatagaaaagaggacccacttgacaggctgaaaaccctgaaaaggctgatccacgacctccctgagcatcattacgaaacattgaaattccttagcgcgcacttaaagaccgtcgctgaaaattccgagaaaaataaaatggagcctagaaatctggctatcgtgtttggcccaaccctagtgcgcaccagcgaagacaatatgacacatatggtaacccacatgcctgatcaatataagattgtcgagaccttaatacagcatcatgattggtttttcacagaggagggggccgaggagccccttactaccgtgcaggaggagagcactgtcgactcccagccagtacctaacatcgaccacctcttaactaatatcggaagaaccggggtatcacctggcgatgtgtccgacagcgctacctcagacagcaccaagagcaaaggttcctggggttcagggaaggatcaatattcaagagaactgttggtctccagcattttcgccgcagcctctcgcaaacgaaagaagcccaaagagaaggcacaaccttcgtcctcagaggatgagctcgataacgtatttttcaaaaaggagaacgtcgaacagtgtcacaacgacaccaaagaagaatcaaagaaagaatccgagacattgggaaggaaacagaagatcattattgccaaggagaacagtacacgtaaggacccaagcactacaaaagacgagaaaatctccctgggaaaagagtccaccccatcagaagagccttcccccccccacaattctaagcacaacaaatctcctactttatcttgccgctttgccatacttaaagaatccccccgcagtctgctggcgcagaaatcttctcacctggaggagacaggtagtgacagcgggaccctcctcagtacaagcagccaggccagccttgccaggttctcaatgaaaaaatctacgtcccccgagaccaagcatagcgaattcctggccaacgttagtacaatcacgtcagattattctactacctccagcgcaacctatctaacatcactggactcctctaggctgtcacccgaagtgcaaagcgtggccgaaagcaagggagatgaagcagacgacgagcggtccgaattgatctcggagggcagacctgtggagaccgacagtgaaagcgagttccccgtgttccccactgccctcacaagcgaacggttgttccgcggaaagctacaggaagttacaaagtcctctaggcggaatagtgagggctccgaactgagctgtactgagggcagtctaacatcctccctggacagcaggagacagctcttctcctcccataagctgatagagtgcgacactctaagtaggaagaaaagcgcacggttcaagtctgactccggatcactaggagacgctaagaatgagaaagaggccccaagtctgacaaaagtgtttgacgtaatgaaaaagggcaagtcaacgggctccctcctgacacctacacggggtgagagtgagaagcaggagccaacctggaagacaaagattgctgataggctgaaactgcgccccagggctcccgcggatgacatgttcggtgtcgggaaccataaggtgaatgcagaaaccgccaagcggaagtccatacggagaaggcataccttgggtgggcacagagatgccacagaaatctccgtactgaacttctggaaagtccatgaacaaagcggcgagagggaatccgagctgtcagctgtgaacaggctgaagccaaagtgttccgcccaggacctttcaatcagcgactggcttgccagggagcgcttaagaacctcaacaagtgacttgagcaggggagaaatcggggatccccaaactgagaatcctagcacgagagaaatcgcaactacagatacaccactttccttgcattgtaatacaggctccagcagttcgaccctcgcgtcaacaaatcggcctctactgagcattcccccccaatctcccgatcagatcaacggcgagagctttcagaacgtgtctaagaatgcatcttctgctgccaatgctcagccccacaaactctccgagacaccaggaagcaaagccgaattccacccttgtttgtag

SEQ ID NO: 132498 - DNA, 279 bp, synthetic construct
  misc_feature 1..279: note = Description of Artificial Sequence: Synthetic coding sequence
  source 1..279: mol_type = other DNA
atggacactatctttgtgaagcaggtgaaagagggaggacctgctttcgaggccggactttgcactggagataggattattaaagtcaatggcgagagcgtcataggaaagacctatagccaggtgatcgccctcatccagaattctgacactacattagagctctccgtcatgcctaaggatgaagacatccttcaagtgaacttagaattttccaccttctacaagaatacaatcgccaaattcctgcaactctctgacatggaaatgctttgctag

SEQ ID NO: 132499 - DNA, 4476 bp, synthetic construct
  misc_feature 1..4476: note = Description of Artificial Sequence: Synthetic coding sequence
  source 1..4476: mol_type = other DNA
atgaatggcgttgccttctgtttagtaggtattccaccccggcccgagccccgccctccccagttgccactcgggcctagagatggatgttccccccgccgcccgtttccctggcagggaccccgcaccctgctgctttataagagccctcaagatggctttggcttcacactgagacattttattgtgtaccctccggagagcgcagtccactgttctctcaaggaagaagaaaacggtggaaggggaggcgggccctctccacgataccgccttgagccaatggacacaattttcgtaaaaaatgttaaggaggatggcccagctcaccgcgctgggcttaggactggtgaccggctcgtgaaagttaacggggaaagcgtcattggtaagacatactcgcaagtgatcgccctgatacagaattccgatgacaccctcgagttaagcataatgcctaaagatgaagacattctgcagcttgcttattcgcaggatgcttatctcaaaggtaatgaaccttacagtggagaggccagatcaattcccgagccccctcctatttgctacccacgcaagacatacgctcctcctgcccgagcgtctactagagcgaccatggtaccagaacccaccagtgcgctgccatccgatccacgctcgcctgccgcctggtccgacccggggttgcgcgttcctcccgcggcacgagcacatctggataacagcagtctgggcatgagccagcctaggccctcccccggcgcctttccacatctgtcatcggagccaaggacccctagggcttttccagaaccaggttccagggttcccccctctcggttggagtgccagcaggccctgagtcactggctgagcaaccaggttccacgaagagctggggaaagacgatgtccagctatggctcctagagcacggtcagcttcgcaggaccgccttgaggaggtggccgcaccaagaccctggccctgtagtacatcccaagacgcactttcgcagctcggccaggagggttggcatagagctcgctccgatgattacttgtcacgagccaccagatctgccgaagccctggggccgggcgcccttgtatctccccggttcgagcgctgtggatgggctagtcagcgcagctctgcccggactcctgcatgccctaccagggaccttcctgggccccaagcaccacctccttccggcctccagggccttgacgacttaggatacataggatatcgcagctactccccttctttccagaggcgtacaggattattacacgccctgtcctttagggatagcccgttcggagggttgcccaccttcaatctcgctcagtctcccgcttcatttcctcctgaagccagtgaaccaccgagagtggtcaggccggagccctccacacgggccttagaacctccagccgaggatcggggcgacgaagtcgtcctgcgccagaagcctccaacaggcaggaaggtgcaactgaccccggcacgtcaaatgaacctcggattcggcgatgagtctcccgaaccagaagccagtgggcgcggcgagaggctgggccgcaaggtcgcccctctagcaacaactgaagattctttggcttccatccccttcatagacgagccaaccagcccatctattgacctacaagctaagcacgtgcccgcgtctgccgtggtatcttccgccatgaatagtgcacccgtgttgggcactagccctagctcacctacttttaccttcaccctgggccgccactactcccaggactgtagctccataaaagccgggcggaggagctcatatctgttggcaatcaccactgaacgaagcaaatcttgcgatgacggattgaatacatttcgggatgaaggacgtgtgctgagacgtctccccaaccgaattccgagtctgagaatgcttcggagtttcttcacagacgggtctctcgactcttggggcacctcagaagatgcagacgcgcctagtaagagacacagcacttcagatctgagcgatgcaaccttctctgacattaggagggagggatggctttactataaacaaattttgaccaagaaagggaagaaagctggctccggactgcgacagtggaaacgtgtctatgccgccttacgagcaagatccttgagtttgtctaaggaacgcagggagcctgggcctgccgctgctggggccgcagccgccggggccggggaagacgaggccgccccagtatgtatcggctcatgccttgtggacatcagctattcggaaacaaaaagacgtcacgtgttcaggctcacaactgccgatttctgcgaatatctattccaagcagaagatcgagatgatatgctggggtggataagagctattagagagaatagccgcgcagagggcgaagaccccgggtgtgctaatcaggccctgatttcaaagaaactgaatgattatcggaaagtgagtcactcatcggggccgaaggcagactccagtccaaaaggatccagagggctcgggggactgaagtcagagttcctgaagcagtctgccgctcgcggcctgcggacccaggatcttccagctggctctaaggacgattctgcggccgcgcccaagactccctgggggatcaacattattaaaaagaataagaaggctgccccccgagccttcggcgtgcggctggaggagtgccagccagccactgagaaccagcgggtgcctctgattgtggctgcttgttgccggattgtcgaggcacggggactcgagagcaccggaatctatcgagtccccggtaacaatgctgtggttagctcactccaagagcagctgaaccggggtccgggggacattaatctccaagatgagcgatggcaggacttgaacgtaatttcatccttgctgaaatctttctttagaaagctccccgaacctctgtttaccgatgacaaatacaatgatttcatcgaggcaaacagaatcgaggatgctcgggaacgtatgcgaacgttgcggaagctaatccgggaccttccgggacattattacgaaacgttgaagtttctagttggccatctgaaaaccatagcagatcatagcgagaagaacaaaatggagcctagaaacctggccctagtgtttggccctacacttgtccgcacctctgaagacaacatgactgacatggtgactcacatgcctgatagatacaagatagtggagacgctgattcagcacagcgactggttcttctccgacgaagaagataagggggaaaggacgccggtgggggataaggagccacaggccgtacctaatatcgagtacttgcttcccaatataggcagaaccgtcccgcccggagaccccggcagcgatagtacaacttgttcttctgcaaaaagtaaaggcagctgggccccaaaaaaggagccctacgctcgcgaaatgttggcgatcagttttatcagcgcagtgaatcggaaaaggaaaaagagacgggaggctaggggcttgggttcttccaccgatgacgactctgagcaagaggcacataaaccaggtgcaggagcaactgcacccggtacccaagagcggcctcagggacctttgcctggagctgtggcccctgaagctcccggccgactgtcacctcccgctgcgccagaagaaagacccgccgcagacacccgctctatcgtgtctggttactcgacgctgtcaaccatggatcgttccgtctgtagcggggcgagtggacgcagggccggagccggagacgaggctgatgacgagcggagcgagctaagccacgtggagaccgacacggagggagctgcaggcgccggacctgggggcagactgactcggagaccatcgttttccagccatcatctcatgccgtgcgatacactggcccggcggcggctggcccggggccgccccgatggcgagggcgccggacggggagggccccgggctccagaacctcctggcagcgcttccagtagctcccaggagagcctgagaccccccgcggctgctcttgcatctcggccttctcggatggaggcactcagactcagactgcgcggcactgctgatgatatgcttgcggtgcggctccgccgaccactgtcccccgagaccaggcggagacggagctcatggcggcgacacacagttgtggtccagtcgccccttaccgatctgaatttcaacgagtggaaggagttagggggtgggggcccacccgagcctgccggcgctagagctcactccgataacaaggactcgggcctgagttcactagaatcaaccaaagccagagcaccgtcctccgcagccagtcagccccctgctccaggggacaccggtagtctccagtcccaaccacctcgccgttctgcggccagcagactgcatcagtgcctgtag

SEQ ID NO: 132500 - DNA, 3435 bp, synthetic construct
  misc_feature 1..3435: note = Description of Artificial Sequence: Synthetic coding sequence
  source 1..3435: mol_type = other DNA
atgaacggtgtcgcattttgcctggtgggcatcccaccacgaccagaacccagaccacctcagttacccttgggcccccgcgacggttgctccccaaggagacccttcccatggcagggccctcgcactctgctgctatataaatccccacaggacggattcggctttactttgagacactttattgtctacccacccgaaagcgctgtgcattgttctctgaaggaagaggagaatggagggcgcggaggaggacccagccccaggtaccgtttagagcctatggatactatattcgttaaaaacgtgaaggaagatggccctgcacatcgcgcaggccttaggactggggacaggctcgtgaaagtgaacggggaatcggtgatcggcaagacatattcccaggtcatcgctctgattcaaaacagtgatgacacattggagttgtctataatgcccaaggatgaagacattctgcagctggcttatagccaggatgcttacctgaaggggaatgaaccctactcaggggaggcccgttcaatccccgaaccacctccaatctgctaccccaggaaaacatacgcaccacctgcccgcgcgtctacccgggccactatggttcctgagccaaccagcgcactgccctcggacccaaggtctcccgctgcatggtctgatcctggtttacgtgttccacctgcggcgagggcccatttagataactctagccttggtatgtcccagccccggcctagtcccggggccttcccacacttaagctccgagccacgtacaccccgtgcgtttcccgagcccgggtcgagggtgcctcctagtcgattggaatgtcagcaggccctgtcgcattggctgagtaaccaggtcccgcgacgcgctggcgagaggaggtgtccagctatggcgcctcgcgctcgttcggcctcacaagatcggttggaggaggtggcagctcctagaccatggccatgttcaactagccaggacgccctctctcagctgggacaagaaggctggcatagagcccggagcgatgactacctgtcccgagcaacacgatcagccgaggctctcggtcctggcgctctcgtgtcaccgaggttcgagaggtgtggctgggcgtcccagcgcagcagtgctcgaacgcccgcatgtccaacccgcgatctgcccggcccccaagcacccccaccttcggggttgcaggggcttgacgacctgggctacattggttaccgatcctactccccatcttttcagcgtagaaccgggcttctgcacgcgctgtctttcagggacagtccctttggggggttacccaccttcaatttagcgcaatcccctgcatcttttccccctgaggcttctgaaccacctagggtcgtcaggccggagccgtccacacgagctttggaacctcctgcagaggacaggggtgacgaagtggtacttagacaaaaaccccccactgggaggaaagtccagctgactcctgcgcgacaaatgaacttaggcttcggagatgaaagcccggaacctgaggcctccggccggggagagagactcggcaggaaagtcgcgcccttggccactaccgaagatagtctggcaagtatcccattcatagacgaaccgacctctccctcaattgatctgcaggccaaacatgttccggcgtcagcagtcgtttcatcagccatgaattctgctcctgtgctgggtacatcaccctcctctcccacattcacttttaccttggggcggcactatagtcaggactgctcctccatcaaggctggtaggaggagcagttacttgctagccataacgaccgagcggagcaagtcatgtgacgacggattgaatactttccgggacgagggcagggtgctccgaagactcccaaatcgtattccttcattgaggatgctaagatctttcttcactgacggctcactcgacagttggggaacgtcggaagacgctgatgctcccagcaagcggcacagtacctcagacctctccgacgcaaccttttcggatattaggagagagggctggctctactataagcagatactcactaagaaaggaaagaaagcggggtcaggcctgagacagtggaagagagtgtacgccgcactgcgcgctagatccctcagcttgagcaaagagcgcagagagcccggtcctgccgccgcaggcgccgcagctgcgggagcgggagaagatgaagccgctccagtgtgcattgggtcatgcttagtggacatcagctacagcgagactaagagacggcacgttttccggctaactactgccgatttttgcgaatacctgttccaggccgaggatagagatgacatgttgggatggattcgggccattagagagaattcccgggcagaaggcgaagatccggggtgtgccaatcaagctctcatcagtaagaagttgaacgattacaggaaggtcagccattcgtccggcccaaaggctgacagttcacccaagggctcccgaggtctgggcggactcaaatcagaattccttaagcagtccgcggccagggggttacggacacaagatctccccgccggatccaaggacgactctgcagcagcaccaaagacgccgtggggaatcaatataatcaagaaaaataagaaagccgcccctagggcttttggagtccgcctggaagaatgccaacccgccacagaaaaccagcgtgttcctcttattgtcgccgcctgttgtcgaattgtggaagcaagggggctggaatcaaccgggatatatcgagtgccaggcaataacgctgtcgtcagcagtttacaggagcagcttaacagaggacccggggacatcaacttacaggacgagcggtggcaggacttaaacgttatcagcagtcttctaaaatcgttttttcggaagttgccagagccactgtttacagatgacaagtataatgacttcatcgaggccaacagaatcgaagatgctagggagcggatgagaactcttcgcaaattaattagagacctgccggggcactattacgagacgctgaaatttctggtgggccacctgaaaactattgccgaccactctgagaaaaataagatggaacctcgaaatctggctttggtttttggacctacactggtccgcaccagtgaggataacatgaccgacatggtaactcacatgcctgacaggtataaaatagtcgagacactcatccaacattccgattggtttttcagcgacgaggaggataagggcgaaaggacccccgttggggacaaagagccacaggctgtccccaatatagaatatctgctgccaaatataggaaggaccgttcctccaggggaccctggaagcgctgacttgcttgagatatag

SEQ ID NO: 132501 - DNA, 4194 bp, synthetic construct
  misc_feature 1..4194: note = Description of Artificial Sequence: Synthetic coding sequence
  source 1..4194: mol_type = other DNA
atggacaccattttcgttaagaacgtgaaagaggacggaccagcgcatagagccggtttgcgcactggtgatcggctggtgaaggtcaacggggagtccgttatcggcaagacctacagccaggttatcgctctgatacagaacagcgatgacacactcgaattgtcaatcatgcctaaggacgaggacatcctacagctggcttattctcaggatgcttaccttaaaggaaacgaaccatattccggcgaggcaaggagtatcccggaaccgcctcccatttgctatcctcggaagacgtacgctccaccagctagagccagtactcgcgcgactatggtccccgagccaacttcagccctcccaagtgatccacggtcccctgccgcctggtccgatcccggtctgcgagttcctcctgcagctcgcgctcatttggacaattcctcccttggaatgtctcaacctcgtccaagtccaggcgctttcccccacctgtcttctgaaccacgaacaccccgcgccttcccagaacctggctccagggtccctccctctcgcttggagtgccagcaggctcttagccattggcttagcaatcaggtgcccagacgtgctggggagagaagatgcccggccatggctcctcgcgcccgtagtgcatcacaggacaggctagaagaagtggccgcccccagaccatggccctgctcaacttcccaagacgccttgagccagctggggcaggaaggttggcaccgggcccggtccgatgactacctctccagggccactagaagcgctgaggcattaggcccaggcgcgcttgtctcaccgcgctttgagaggtgtggttgggcatcgcagaggtctagcgcaagaacgcctgcctgtcctacacgggacctgcccggcccccaggctccgcctccctctgggctccaggggctcgatgacctcggttatattggctaccggtcatactcaccctctttccagaggagaacgggtctgcttcacgccttgtcctttagagattctccctttggcggattgcccacattcaaccttgcacagagtcccgcctccttcccgcccgaagccagcgaaccaccacgggtggtgagacctgaaccttctacaagggctttagagccccccgcggaggataggggagacgaggtggtcctgcgacaaaagccccccactggccgcaaggtacaactgacccccgccaggcagatgaacctagggttcggcgatgagagccccgaacccgaagcatctggtcgtggcgagcgactaggcaggaaagtcgctccattggccactacagaggacagtctggcctccatccctttcatcgatgagcccacaagtccatcaattgatctgcaggccaaacatgtccccgccagcgccgtggtctctagcgcaatgaacagcgcgccggtgttgggtactagcccgtcctcccctacgttcacattcactctggggcgtcattactcacaggactgctcctctataaaggccggcagaaggtccagttacctgttggctataaccaccgaacgttccaaatcttgcgacgatggactgaatacctttcgggacgagggaagagtactgagaaggctgcccaaccgcattccgagcctcagaatgctgcggtcttttttcactgacggcagtcttgatagttggggcacatccgaggacgccgatgcccccagtaaaaggcactcaacaagcgatctatccgacgctacattttccgacatacggcgcgaaggatggctatattataagcagatcctgactaagaagggaaaaaaagctggcagcggcctgcggcaatggaaacgagtctatgctgcattgcgcgctcggagcctgagcctgtctaaggagaggagggagccagggccggccgcagctggcgccgcagcggctggggctggcgaggacgaagctgcccccgtgtgcattggaagctgtctggtggacatctcgtactctgagaccaaaaggcgacacgtgttcagactgaccacagcagacttctgtgaatacctgttccaggcagaagatcgggatgatatgctggggtggattcgggctattcgcgagaattctcgggccgaaggcgaggatccgggctgtgcgaaccaggcactgatcagcaagaagctgaatgattacagaaaagtttcccactccagcggcccaaaggccgacagttctccaaaaggcagcagaggtctggggggattaaagagtgagttcctaaaacagagcgccgccagaggtctgcgtacgcaggatctgcctgcaggatccaaagacgatagcgctgcagccccaaagaccccatggggcatcaatatcataaagaagaataagaaagctgccccccgggcatttggagtaaggctggaagagtgccagcccgcaacagagaaccagcgcgtgccactgatcgttgccgcttgctgtagaatcgttgaggccagaggtctggagtctacgggcatctaccgtgtgcctgggaacaacgctgttgtgtcctctttgcaagagcaactcaaccgggggccaggagacatcaacctgcaggacgaacgctggcaggacctcaatgtgatcagttccttgctgaagtcttttttccgcaagctccctgaaccactattcactgacgataaatacaatgacttcatcgaagccaatagaatcgaagatgcaagggaacgcatgaggacactacggaagctgattagggacctcccaggccactactatgaaaccctgaagttcttagtcggacacctcaaaaccattgcagatcacagcgagaagaacaaaatggaaccaagaaatcttgcccttgtttttggccctactttggttcgaacatccgaagataatatgaccgacatggtaacacatatgcctgacaggtataaaattgtcgagaccctgattcagcacagcgactggttctttagtgacgaggaagataaaggggaacggacccccgtcggggacaaagaaccccaagctgtgccaaacattgaatatctacttcccaatatcggcagaaccgtaccccctggcgatcctgggtccgacagcacaacctgcagcagtgccaagtcgaaaggatcttgggcacctaaaaaggaaccatacgctcgtgagatgctggcaatctcctttatcagtgccgtgaacaggaagaggaaaaagcggcgcgaagctagaggtctggggagttctactgacgacgactccgaacaggaggcacataaaccaggagccggggctacagctcccggcacacaggagcggccacagggcccgctccccggcgctgttgcaccagaggcacccggcagactttctcctcctgccgcccccgaggaacgcccagcagccgacacacggtctattgtgtctggatacagtacactgtctacgatggacaggtctgtgtgtagtggggcaagtggtcgccgcgctggagctggagatgaggcagatgacgaacgctccgagctctctcacgtggaaactgataccgagggcgctgctggtgctggtcccggcgggaggctgacaaggcgccccagctttagctcacaccatttgatgccctgcgacacacttgcacggcgcagactggccaggggccgccctgacggggaaggcgcagggaggggcggcccaagggcaccagaacctccgggctccgcctcgagtagttcccaggaatccctacgccccccagcagcagcgttagcctcccgccctagtcgcatggaagccctgcggctacggctccgggggactgccgacgatatgctggcggtgaggctgcgtcgcccattgtcccccgagactcgaaggaggagaagctcctggaggaggcatacagtggtggtacagtctccattgactgacctgaattttaacgagtggaaggaactgggcgggggcggaccaccggagcctgcaggtgccagggcgcatagcgataataaagactcgggactttcatctcttgagtccaccaaggcccgcgctcctagttctgctgctagccagcccccggccccaggggacaccggctctctccagagccagcccccccgccggagcgccgcgtcccgactgcaccagtgtttgtag

SEQ ID NO: 132502 - DNA, 1968 bp, synthetic construct
  misc_feature 1..1968: note = Description of Artificial Sequence: Synthetic coding sequence
  source 1..1968: mol_type = other DNA
atgccagaagataggaattcgggcggttgtcctgcgggggcgctagctagcacccctttcattcccaaaactacttatcgccgtattaaacgttgctttagcttccggaaaggaatcttcggacagaaactggaagacaccgtgagatacgaaaaacgttacggaaatcggctcgcgcccatgttggttgaacagtgcgtggactttattaggcagcgcgggctcaaggaagaaggtctttttcggctgcctggccaggccaacctggtgaaagaacttcaggatgcctttgactgtggagagaaaccaagtttcgatagcaatactgatgttcacaccgtggcctcactcctcaagctctatctgagggaactgccagaaccagtgattccctacgctaaatacgaggatttcctcagctgtgcgaagctgctgagcaaggaggaagaagccggggtgaaggagcttgccaagcaagtgaagtctcttccggtggtaaattataatctcctgaagtacatttgtaggtttttggatgaggtgcagtcgtattcaggggtcaataagatgagcgtacagaatctggcaacggttttcggacctaacatactgaggcctaaagttgaagatcccctgaccatcatggaggggactgtggttgtacagcagcttatgagtgttatgatttcgaagcacgattgcctcttccccaaagacgcggaactccaatctaaaccacaagacggcgtctcaaacaataatgaaattcagaaaaaggcaacaatgggccaactgcagaataaggagaataataacactaaggactcccctagcagacaatgttcttgggacaagagcgagtctcctcagcgctcttccatgaacaatggatcacccactgccttaagtggcagcaagactaatagcccaaaaaattccgtgcacaaattagacgtatcaagatcaccaccattgatggtgaagaagaatccagcattcaacaaggggtctggcattgtgactaatggctcttttagcagcagcaatgctgagggactcgagaaaacccagacaactccaaatggcagcctgcaggcacggcgctcctcatcactgaaggtgtcaggaaccaagatgggcactcatagcgtgcaaaatggcaccgtgaggatgggcattctgaacagcgataccctcgggaatcctacgaatgtgcgaaatatgagctggctacccaacgggtatgtgacacttagggacaacaagcagaaggagcaggccggcgagctggggcaacataacagactgtctacgtacgacaacgttcaccagcagttctctatgatgaatctggatgacaagcagtctatagattcggcaacttggagcacatcttcttgcgagatcagcttgccagaaaacagtaattcctgccgaagttccacgaccacttgccctgagcaggacttttttggcggaaacttcgaggacccagttctggatgggccacctcaagatgatctgagccatccccgggactacgaatctaaaagtgaccataggtctgtcggcggaagaagctcccgcgcgacctccagctccgataatagcgagacatttgtcggaaacagctcatctaaccacagcgctctgcattccctggtgagttcgctgaagcaggagatgacgaagcaaaagatagagtacgagagtcgcatcaagtccctcgaacagcgtaaccttacactggaaactgaaatgatgtctttgcacgatgagctggatcaggaacgaaagaagttcactatgattgaaatcaagatgaggaacgccgagcgagcaaaggaggacgccgaaaaacgcaatgatatgctgcaaaaggagatggagcagttcttctcgacatttggcgaacttaccgtggaaccccggcgcactgagcgtgggaatacaatctggatccagtag

SEQ ID NO: 132503 - DNA, 1962 bp, synthetic construct
  misc_feature 1..1962: note = Description of Artificial Sequence: Synthetic coding sequence
  source 1..1962: mol_type = other DNA
atgacggccaaccacgaatcatacttgttgatggcgagtacacagaatgatatggaggactgggtcaagagtattcgccgcgttatttggggtccattcgggggcggcatcttcggccaaaagctggaggatactgttaggtatgagaaaagatatgggaatcgacttgccccgatgcttgttgagcagtgtgtggattttattagacaacgggggttgaaggaagaaggtcttttcaggctccctgggcaggctaatctggtgaaggagctgcaggacgcatttgactgtggcgagaaaccttcatttgactcaaacactgacgttcatacggtcgccagcttactcaagctctacttgcgcgaactgcccgagccggttattccatacgctaagtacgaggactttttaagctgcgccaagcttctttcgaaggaggaggaggcgggcgtgaaagagctcgctaagcaggtcaaaagcctaccggtggtcaattacaatctgctgaagtacatctgtcgcttcctggatgaagtgcagtcgtattctggggtcaataagatgagcgtacagaatctcgcgacggtgtttggtcccaatatcctgaggcccaaagttgaagaccccctaacaatcatggaaggtactgtcgtcgtacagcaattgatgtctgtgatgatatcaaagcacgactgcctcttcccgaaggatgctgagctgcagtccaagccccaggacggggtttcgaacaataacgagatccaaaagaaggccacaatgggccagctgcaaaacaaagagaacaacaatacgaaggacagcccatctagacagtgtagttgggacaaatctgaaagcccacagcgcagcagtatgaacaacgggtcgccgactgcactgtccgggtccaagacaaattcccctaagaacagcgtccataaactggatgtgtcccggagccctcctttgatggtaaaaaagaacccggcattcaacaaaggctcgggcattgtgactaatggctcattctctagctccaacgctgagggactggaaaagacacagacgacgccaaacgggtccctccaggcccggcggtcctcaagcctgaaagtaagtggcacaaaaatgggaacccactctgtgcagaatggcacagttcggatgggtatccttaactcagacaccttaggcaatcccaccaacgtacggaacatgtcttggctccccaatggctacgtgaccctgcgggataataaacagaaggagcaagcaggcgaactaggtcagcacaatcgcctgagtacctatgacaatgttcaccagcagttctcaatgatgaacttggacgacaagcagtctatagactctgctacttggagtacttcgtcttgcgagatttcgctacctgagaacagcaactcgtgtagatcctccaccactacttgtccagagcaggacttcttcggagggaactttgaagatcctgtgctggacggaccccctcaagacgatttgtcccaccccagagactacgaatcaaaatccgatcaccggagcgtggggggtaggtcatccagggccacctcatcttctgataatagcgagaccttcgtggggaatagtagtagtaatcactccgccctgcactccctcgtctcgagcctgaagcaggagatgacaaaacagaaaatcgaatacgagagccggattaagagtctggaacagaggaatctgacactcgagactgagatgatgagtttgcatgatgagctggatcaggaacgcaagaagtttacaatgattgagatcaagatgcgcaatgcagaacgtgcgaaagaggatgctgaaaaacggaatgatatgctccaaaaggagatggagcagtttttctccacgttcggcgaacttaccgttgaacctagacgcactgaaaggggcaatacgatctggatccagtag

SEQ ID NO: 132504 - DNA, 2247 bp, synthetic construct
  misc_feature 1..2247: note = Description of Artificial Sequence: Synthetic coding sequence
  source 1..2247: mol_type = other DNA
atggaagagaacaatgacagcaccgaaaacccccagcaagggcaggggcggcagaacgctattaaatgcggctggctgcgtaagcagggcgggtttgtgaaaacctggcacactcggtggtttgttctgaaaggtgatcagctgtattactttaaggacgaggatgagacaaagcctcttggaacaatattcctcccagggaacaaagtaagcgaacacccatgcaacgaggagaaccccggtaagttcttatttgaggtggtccctggaggggatcgcgaccgaatgaccgctaatcatgaatcctatctcttgatggcaagtacccagaacgacatggaggactgggtcaagtccatacgaagagtcatttggggcccattcggcggcggcatctttggccaaaagctggaggatacggtgcgctacgagaagaggtatggcaatcgccttgcccccatgctcgtggaacagtgcgtcgactttatccggcagcggggactcaaggaggaaggactgttccgtctgcccggtcaggctaacttggtcaaggagttgcaggacgcctttgactgtggcgaaaaacctagcttcgactctaacacagacgtgcatactgtggcctctttgctgaaactgtacctccgggaattgccagaacctgtaattccctatgcaaaatacgaggacttcctatcctgtgccaagctgctgagtaaagaggaggaagccggcgtcaaagaattggcaaaacaggtgaaatctttgcctgtagtgaactataatttgctgaagtatatttgccgctttctggacgaagtacagtcctactccggggtgaataagatgtccgtgcagaacctggctaccgtgttcgggccaaacattctgaggccaaaggttgaagatccactgacgatcatggagggcacagtcgtcgtgcagcagctgatgagcgtcatgatttcaaagcacgactgtcttttcccaaaggatgcagagctccaatcaaaaccccaggacggcgttagcaataacaacgagatccagaagaaggcaaccatgggccagttgcagaataaagagaacaacaataccaaagattccccgtcacggcagtgctcttgggataaatccgagagtccacagagatcctcaatgaataatggttctcccacagctttatctggcagcaagacaaatagccccaaaaattcagtccacaaactggacgtgtcccgttctccaccactgatggtcaaaaagaaccccgcctttaacaagggaagcgggattgtgaccaacggctccttttcttcgtccaacgctgaaggattagagaagactcagacaacacctaacgggtccctgcaggctaggcgctcatctagtcttaaggtgagtggcactaaaatgggcactcactctgtgcagaatggaacggtgaggatgggaattctcaactcggacaccctcgggaatcctaccaacgttcgcaacatgagctggctcccgaacggttacgtgacactcagggacaataagcagaaagaacaagccggagagctcggccaacataataggcttagtacatatgataacgtccatcagcagttttccatgatgaatctcgacgacaaacagtcaatcgactccgcaacatggagtaccagtagttgcgaaatatccctccctgagaattcgaactcctgtcggtcatccacaacgacctgccccgagcaagatttttttggaggcaactttgaagaccccgtgctggatggtccccctcaggatgacctgtctcacccccgcgattacgaatctaagtccgaccacaggagcgttgggggcaggtcttcaagagccactagttcgtcagacaactctgaaactttcgttggtaacagcagttccaaccacagcgctcttcacagcctcgtgtcaagcctcaagcaagagatgacaaagcagaaaatcgagtatgagtcacgaattaaatcgctcgagcaacggaaccttaccctcgaaacagaaatgatgtctctgcacgatgagctagaccaagagagaaaaaagtttaccatgatagagatcaaaatgcgcaatgccgagagagcaaaagaggacgccgagaaacggaacgatatgctccagaaagaaatggagcagttttttagcacattcggcgagctcaccgtggagcccaggcgaacagagcgagggaataccatttggatacagtag

SEQ ID NO: 132505 - DNA, 741 bp, synthetic construct
  misc_feature 1..741: note = Description of Artificial Sequence: Synthetic coding sequence
  source 1..741: mol_type = other DNA
atggaagagaacaatgactccacggagaatccacagcaaggccaggggcgccagaatgccattaagtgtggatggttgaggaagcagggtggctttgtcaaaacctggcatacccgctggtttgtattgaagggagaccagttgtattatttcaaggatgaagacgagactaaaccacttgggacaattttcttaccaggcaataaggtgtctgagcacccatgtaacgaagagaatcctggtaaattcctctttgaagtggtacccgggggggaccgagatcggatgacagctaaccacgaatcatatctcttgatggcctctacgcagaacgatatggaggactgggtgaagtcaatacgccgggtgatttgggggcctttcggcggaggcatattcgggcaaaaactggaagacacggtccgatacgagaaaaggtacgggaatcgtctcgcgccgatgttggtagaacaatgcgtggactttatccgtcagagaggcctgaaagaagagggactcttcaggttgcctggtcaggccaacttggtgaaagagctgcaggatgcattcgattgcggcgaaaagccaagcttcgacagcaatactgacgtgcacacggttgcgagtctgctgaagctatatctgcgagagctaccggagcctgtgattccctacgctaaatatgaggactttctgagctgcgcaaagctgctcagcaaagaggaggaggctgtgagttag

SEQ ID NO: 132506 - DNA, 249 bp, synthetic construct
  misc_feature 1..249: note = Description of Artificial Sequence: Synthetic coding sequence
  source 1..249: mol_type = other DNA
atgacagccaatcatgagtcctacttactcatggcctcaacacaaaacgacatggaggactgggtgaaatccatcagacgtgtcatttggggcccgtttggaggcggcatcttcggccagaagctggaggataccgtgcggtatgaaaagcggtatggtaacagactggcccctatgcttgtggaacagtgtgttgacttcatccggcagcgcgggctcaaagaggagggcttgtttcgcctcccatag

SEQ ID NO: 132507 - DNA, 1938 bp, synthetic construct
  misc_feature 1..1938: note = Description of Artificial Sequence: Synthetic coding sequence
  source 1..1938: mol_type = other DNA
atgagtctgaaattgccccgtaattgggactttaacctgaaggtggaggccgccaaaattgcgcgaagtaggtctgtcatgacgggagaacaaatggctgcttttcacccctcatcgacaccaaatcccctcgagagaccaattaagatggggtggctgaagaagcaacgatctattgtcaagaattggcagcagaggtactttgtgctgcgagctcagcaactatactactataaagatgaagaggatacaaagccacagggatgcatgtacttacccggatgtactattaaggaaatcgcaacgaatcctgaggaagccggcaagttcgtgttcgagattatacccgcaagctgggaccagaatcggatggggcaggattcctatgtactgatggcctcttctcaagccgagatggaagagtgggttaagtttctcagaagagtcgcaggcacgccatgcggagtatttggacagcgacttgacgagaccgtcgcttacgagcaaaaatttggcccccacctggtgccaatcctggtggaaaaatgcgcggagttcattctggagcatggccggaatgaggagggcatctttagattgcctggccaggacaatctggtgaagcaattacgcgacgcattcgatgcgggtgagcgcccgtctttcgatcgggatactgatgtgcacacagtggcctcacttttgaaactatatctgagggatctccctgaacctgtcgtgccttggtcccagtacgagggttttctcctgtgtggtcagcttacgaacgccgacgaggcaaaggcccagcaggagctgatgaaacaactgtcgatcctcccaagggacaattacagtctgctctcatatatttgtcgcttcctgcacgaaatccagctcaactgcgccgtcaataagatgtcagtggataacctggctacggtgataggggtcaaccttatcagatctaaggtcgaggatcccgctgtgatcatgcgggggacccctcagattcaaagagtgatgaccatgatgatccgcgaccacgaagtattatttcctaaatccaaagacattccactgtcaccacccgctcagaaaaatgacccgaaaaaagccccagtagctagatccagcgtaggatgggatgccaccgaggacctgcggatatcaaggaccgattctttttctagcatgacctccgacagcgacacaacctctcccaccggccaacagccatccgacgccttccctgaagactccagtaaagtgccacgggagaagccaggtgactggaagatgcagtcaagaaagcgaacgcaaacattaccgaacaggaagtgtttcttgactagtgcctttcaaggcgccaacagtagtaagatggagatatttaaaaatgaattctggtcgccttcttctgaagcgaaggctggggaaggccacagacgtaccatgagccaagacctccggcagctgtccgattcacagaggaccagcacttatgacaacgttccgagcctgccaggatctcccggcgaagaagcttctgctctgagcagtcaagcctgtgacagcaagggggatacattggcatcccctaactccgaaaccgggcctggtaaaaagaacagtggcgaggaggagatcgactccttgcaacgcatggtgcaagaactacgaaaggaaattgaaacgcagaagcagatgtatgaggaacagattaagaatcttgagaaagagaattatgacgtctgggcaaaggtagtgcgtctaaacgaagagctcgagaaggagaaaaagaaatcagctgccctggaaataagcttgcgcaatatggagcgtagccgcgaggacgtcgagaagcggaacaaggccctggaagaggaagtgaaggagtttgtgaaatcaatgaaggaacctaagacagaagcatag

SEQ ID NO: 132508 - DNA, 1917 bp, synthetic construct
  misc_feature 1..1917: note = Description of Artificial Sequence: Synthetic coding sequence
  source 1..1917: mol_type = other DNA
atgtcgcttggtcagtcagcctgcctctttctgagcatagcacgaagccgcagtgtcatgacaggagagcagatggctgccttccatccttctagcacccctaaccccctggagagacctataaaaatgggttggcttaagaagcagcggagcatagtcaaaaattggcagcagcgatatttcgtgctgcgcgcccagcagctgtactattacaaagatgaagaggacactaagccacaaggatgcatgtacctgcctggttgcaccattaaagaaattgccactaaccccgaagaggctggaaagttcgtttttgaaatcattccggcctcctgggaccagaataggatggggcaggactcttacgttctgatggcctcaagtcaggctgaaatggaagagtgggtgaagttcttgcgaagggtggctggaaccccctgtggtgtgttcgggcagaggctggatgaaaccgtggcttacgagcagaagttcggaccacacctggtacctatccttgtggagaaatgcgccgagttcattctagaacacggcaggaatgaggagggtatcttcaggctgccaggtcaagacaaccttgtgaaacagctccgggatgccttcgatgcaggggagaggccatcctttgatcgcgataccgatgtgcacaccgtggcttcattgctgaaactgtaccttagagatttgcccgaacccgtggtgccctggtcacagtacgaaggctttctattgtgcggtcagctgacaaacgccgatgaagccaaggctcagcaggagctgatgaaacagcttagcattttgcctcgggacaactactctctgctttcctacatctgtcgattcctgcatgaaattcagctgaactgtgctgtgaataaaatgtctgtcgacaaccttgccacagtaatcggcgttaacctgattcgctctaaggttgaggatcccgcggtaatcatgcgtggcactccccagattcagcgcgtgatgactatgatgattagagatcacgaagtactgttccccaaaagcaaggatatcccccttagtccacctgcacagaaaaatgatccgaaaaaagccccggtcgcacggtccagcgtaggctgggatgcaacagaagacctgaggatcagtcgaaccgatagtttctcctcaatgacaagcgacagcgatactaccagcccaaccgggcagcagccttccgatgcattccctgaggacagctccaaagttccgcgagaaaaaccaggcgactggaagatgcagtcaaggaagaggacgcagaccctgcctaacagaaagtgcttcctgacctcagcgttccaaggggcaaatagcagcaaaatggagatttttaaaaatgaattttggtccccaagctctgaggcaaaggctggagagggacatcggaggaccatgtcgcaagacctgaggcagctgagcgactcccagcggacctcaacatacgataacgtaccgagcctgcctgggagccctggagaggaggcctccgccttatccagccaggcttgcgacagtaagggcgataccctggcttcacccaatagcgagacagggcctggaaaaaagaactcaggagaggaggagatagacagcctgcagcgcatggtgcaggaacttcggaaagaaatagaaactcagaagcagatgtacgaagagcaaatcaagaatttagaaaaggaaaattatgacgtttgggcgaaggtggtgcgcctcaacgaggaacttgagaaagaaaaaaagaagagtgccgcgctggaaataagtctgaggaacatggagcgtagccgggaggacgttgaaaaacggaacaaagccttagaagaggaggtcaaggaattcgtgaaaagcatgaaggaacctaaaacagaggcctag

SEQ ID NO: 132509 - DNA, 1941 bp, synthetic construct
  misc_feature 1..1941: note = Description of Artificial Sequence: Synthetic coding sequence
  source 1..1941: mol_type = other DNA
atgagtctgaaactgcctcggaattgggatttcaacctgaaagtggaagctgctaagatagccagatcaaggtctgtgatgacaggcgagcagatggcagcattccatccttcctccacaccaaaccctttagagcggccaatcaaaatgggatggcttaagaagcaacgatccatcgttaaaaactggcagcaacgctatttcgtgcttcgagctcagcagctctactattacaaggatgaagaggacaccaagccccagggctgtatgtatctgcctgggtgcacaattaaggagattgctactaaccccgaggaggccggtaagtttgtgttcgaaattatcccagcatcctgggatcagaataggatgggacaggattcatacgttctgatggctagttcgcaggctgagatggaggaatgggttaaattcctcagaagggtggccggaactccttgcggggccgtgtttggtcagagacttgacgagacggtcgcatacgagcagaagttcggaccccatctggtgccaattctcgtggaaaagtgtgcagagttcattcttgaacacggacggaatgaagaaggcatcttcaggctgccgggtcaggacaatcttgtgaaacaactccgggatgcctttgatgctggcgagcgcccaagctttgaccgtgatacagacgttcacacagtcgcctccctgcttaagttgtacttgagagatttgcccgaacctgtggtaccctggtcccagtatgagggcttccttctttgtgggcaactgacaaacgccgacgaagcgaaggcacagcaggagcttatgaagcagttaagtattctgcccagagacaactatagtcttttgtcctacatctgtaggttcctgcatgagattcagctgaactgtgcagttaacaagatgagtgtcgataacctggctacggtcattggcgtgaatctgatacggagcaaagtggaggatcccgctgtcatcatgcggggcacacctcaaattcagcgtgtgatgaccatgatgattagggatcacgaggtgctgttccccaaaagtaaagatatcccgttatccccaccggctcaaaagaatgacccaaaaaaggctcccgtggcccggtcttccgtgggctgggatgcaaccgaagatctcaggatttcgaggactgactccttttcaagtatgacatcggattcagatacaacctctcccacaggtcagcagccctctgatgcgttcccagaggactcttctaaggtacctcgggagaaaccaggagattggaagatgcagagtcggaagcgcacccagacccttcctaatcgcaagtgcttcctcacatctgcttttcaaggggcaaactcctccaagatggagatatttaagaatgaattttggagcccttccagtgaggcgaaagccggagaggggcatcgacgaaccatgagccaagacttgcgccagctgtccgattctcagcggactagcacttatgacaatgttcctagtctccccggaagtccaggggaggaggccagcgccctctcaagtcaggcttgcgatagcaaaggtgatacattggcctcacccaattctgaaaccggccctgggaaaaaaaactcaggtgaggaagagatcgattcactgcagagaatggtgcaagaacttcgaaaggaaattgagacgcagaaacagatgtatgaagagcaaatcaaaaacttagagaaagagaactacgacgtttgggccaaagtggtcaggctgaacgaggagctcgagaaggagaaaaagaagagcgccgctcttgagatctctctcaggaatatggaacgatctcgagaggatgttgagaagagaaataaagcccttgaagaagaggtgaaagagttcgtgaagagcatgaaggagccaaaaacagaggcttag

SEQ ID NO: 132510 - DNA, 1920 bp, synthetic construct
  misc_feature 1..1920: note = Description of Artificial Sequence: Synthetic coding sequence
  source 1..1920: mol_type = other DNA
atgtccttgggtcagtccgcttgcctttttttgtccattgcaaggagcaggtcagttatgacaggagaacagatggccgcatttcatccttcatccactccaaacccactcgaacgtccaatcaagatgggatggctaaagaagcagcggtcaatcgtcaagaattggcagcagagatattttgtactgcgggctcaacagctgtactattataaggacgaagaagacactaagccgcaaggttgtatgtatttgcctggttgtaccatcaaggagatagccaccaacccagaggaggcgggcaagtttgtgtttgagattatcccagcctcatgggaccaaaatcggatggggcaggacagctacgtcctgatggcctcttcccaggcagagatggaggagtgggtgaagttcctgaggagagtggcaggcaccccctgcggagcggtcttcggtcaaaggctggacgaaacagtggcatacgagcaaaaatttggcccccacctggtgccaatcctggttgagaaatgtgcggagtttattctagaacacgggcgcaacgaagagggcatcttcagactgcctggtcaagacaatttagtgaagcaattgcgtgacgcgtttgacgcaggtgaacgccccagtttcgatcgagacacagacgtacacacggtggcatccttgcttaaactctacttgcgagatctgccggagccagtggttccctggtctcagtatgaagggtttttgctttgtggacaactgacaaacgcagacgaggctaaggcacagcaagaacttatgaaacagctctcaattctcccccgagacaactactccctcctgtcttatatatgtaggtttttgcacgaaatccagctgaactgtgcggtgaacaagatgtcagtagacaacctggcgactgtcattggagtcaatctgataaggtccaaggttgaagaccccgccgtgatcatgcggggcacacctcagattcagagggtgatgaccatgatgatcagagaccacgaggtcctgtttcccaagtccaaagacattccattgtccccgcccgctcaaaagaatgaccccaagaaagctcccgtggctaggagctccgtgggatgggatgcgacagaagatcttagaatatctcgcaccgatagcttttcaagcatgacctctgatagcgataccacaagccccaccggccagcaaccctccgacgcattccctgaggacagcagcaaagtccctagagagaagccgggagattggaagatgcaatcaaggaagcggacacagacccttcccaaccggaaatgcttccttacatccgcttttcagggtgccaacagcagcaaaatggaaattttcaagaatgagttctggtctccctctagcgaggccaaggcaggagaaggtcatagaaggaccatgagccaggacttgaggcagctctccgactctcaacggactagcacatacgataacgtgccctccctgccaggtagccccggtgaggaagcttccgctctgagctcgcaggcttgtgactctaaaggcgacactttggcttcccccaactcagagacaggaccgggcaaaaaaaattccggtgaggaggagatcgattccctccagcggatggtgcaggagctgcgcaaagagatcgaaactcagaagcagatgtatgaggagcagatcaaaaacctggagaaagagaactacgatgtttgggcgaaagttgttaggctaaatgaggagctcgaaaaggaaaaaaaaaagtccgccgccctcgaaatcagcctgcggaatatggagcgctcgcgggaggatgtcgaaaaaaggaataaagcattagaagaggaagtcaaggagttcgtgaagtcaatgaaggagccgaaaacagaagcctag

SEQ ID NO: 132511 - DNA, 852 bp, synthetic construct
  misc_feature 1..852: note = Description of Artificial Sequence: Synthetic coding sequence
  source 1..852: mol_type = other DNA
atgaccggggagcagatggcagcctttcacccttcatccaccccaaacccactggagaggccaatcaagatgggatggttgaaaaagcagcggtctatcgttaagaactggcagcagcgatacttcgttctaagagcccagcagctttactattacaaagatgaagaggacacgaagccccagggctgcatgtacctgccagggtgtactataaaggagatcgccaccaatccagaggaggcagggaaattcgtctttgagatcatcccagcgtcttgggaccagaatagaatggggcaggattcctatgtcctgatggcaagttcccaggccgagatggaggaatgggttaagtttctgcgacgcgtggctggaactccttgtggggcagtattcggccagcggctggatgaaacagtggcttacgagcagaaatttggtccacatctcgtgcccattcttgtggaaaagtgcgcggagttcatactggaacacggtagaaatgaggaggggatatttcgactgcccggacaagataatctagtgaagcagttgcgagacgcctttgacgccggggagcgccctagctttgatagggacaccgacgttcataccgtggcttccttgctgaaattatacctccgtgatctgcctgaaccggtcgttccatggagccagtacgagggattcttactgtgtggtcagcttacaaacgctgatgaggccaagaactatcgaaaccggaacgactgtcagtccgttgtttcagcacagatacaccagttttgcccacgggtgtcactgttagcgcatggccaggctcacctgctcgtgaacgacctactagtttag

SEQ ID NO: 132512 - DNA, 1776 bp, synthetic construct
  misc_feature 1..1776: note = Description of Artificial Sequence: Synthetic coding sequence
  source 1..1776: mol_type = other DNA
atgtcgctaggacagagtgcatgcctgtttctgtcaatcgcccgtagtcggtcggtgatgaccggtgaacagatggccgcttttcatccttctagcacaccaaatcctcttgagcgccccatcaaaatgggctggctcaagaagcagcggtcaatcgtgaagaattggcaacaaagatattttgttttgcgggcccagcagctgtattactacaaggacgaagaggatactaagcctcagggatgtatgtacttacctggttgcacgatcaaagaaatagccacgaaccccgaagaggctgggaaattcgtgtttgaaatcatacctgcgagctgggatcagaataggatggggcaggacagctatgttttgatggctagcagccaggcagaaatggaagagtgggtcaaatttcttcgccgcgtcgcaggcacaccctgcggagctgtcttcggccagcggctcgacgagaccgttgcatatgagcagaagttcgggcctcacctggtgcccatacttgtggagaagtgcgccgaatttatactggagcacgggcgaaacgaggagggtatttttagactgccaggccaggataatctggtgaaacaattgcgcgacgccttcgatgccggggaaaggcccagttttgaccgtgacacagatgttcacactgtggcctcattgctgaaactgtatttgcgggaccttcctgagcccgtcgtcccgtggagccagtacgaaggttttttgttgtgcgggcaactcacgaatgcggatgaggcaaaagcccagcaagaactaatgaagcaattgtccatcctgcctcgtgataattattcccttttgtcttacatctgccgatttctgcatgaaattcagctgaattgtgcggtaaataagatgtcagtggataacttggcaacagttatcggtgtgaatttaatcaggtccaaagtcgaagaccctgctgtgatcatgcggggtacccctcagatccagcgagtgatgactatgatgatccgcgatcacgaggtattattcccaaagtccaaagatatccccttaagcccccctgctcagaagaatgaccccaaaaaggcgccagtagcccgcagtagcgtgggctgggatgcaacagaggatctgcggatctcaagaacggactccttttcatccatgacgagcgactctgacaccacctctcccacgggccaacaaccttcggatgctttccctgaggactcttccaaggtgccgcgcgagaagcctggagattggaagatgcagagcagaaagcgcacacaaacactgcccaatcggaaatgttttctcacaagcgcctttcagggggccaatagcagtaaaatggagattttcaagaacgagttctggtcgcctagttcagaggctaaggcgggggagggacatcgtaggactatgtcccaggacttaagacagctgtcggacagccagaggacctcaacctatgataacgttccaagccttcctggctctccaggtgaagaagcctcagccctgagcagccaggcttgtgatagtaagggggataccctcgcctccccaaactcagagacgggccccggaaaaaaaaactccggcgaggaagagattgacagtctccaaaggatggtacaggagctgcggaaggagattgagactcagaaacagatgtacgaagagcaaattaagaacctggagaaggagaactatgacgtctgggccaaggtagttcgtccttttttatcagccatctag

SEQ ID NO: 132513 - DNA, 1377 bp, synthetic construct
  misc_feature 1..1377: note = Description of Artificial Sequence: Synthetic coding sequence
  source 1..1377: mol_type = other DNA
atgtccctgggacaaagtgcgtgcctgttcctgagcatagcacgtagtaggagcgtgatgactggcgagcagatggctgcgttccacccatcgagcactcctaatcccctcgagcgccctatcaaaatgggctggcttaagaagcagagaagtatcgttaaaaactggcagcagcgatatttcgtgcttagggctcagcaactgtactactacaaggatgaggaggacactaagccacaaggctgcatgtacctgccaggttgcacgattaaagagatagcaaccaatccggaagaggctggcaagttcgtctttgaaatcatccccgcctcatgggatcaaaacaggatgggccaagactcatatgttttaatggcatcatcccaagctgaaatggaggaatgggtgaaatttctgagaagggtagcggggaccccatgtggggccgtattcggccaaaggcttgatgagaccgtggcttacgagcaaaaattcggcccgcacctcgtgcctattctagtggagaagtgtgccgagtttattctggaacatgggaggaacgaagaaggtatatttaggttgccagggcaggacaatcttgtgaagcagctgagagacgccttcgacgcgggggagcgcccttcttttgaccgcgacacagatgtccacaccgtcgcttctctgctcaaactgtatctccgcgacctgcccgaacccgtggtgccatggagtcaatacgaaggcttccttctgtgcggacagctaacgaacgccgacgaagctaaagctcagcaagaattgatgaagcagttatccatcctgccccgcgacaattactctctcttatcctacatctgccggtttctgcatgaaatccaactgaattgtgccgtcaataagatgtcagtcgataacctcgctacagtgataggggtcaaccttatccgatcgaaggtagaagaccctgcggtcatcatgcggggaaccccacagatccagcgggtaatgacaatgatgatacgagaccatgaagtcttatttccaaaatctaaagacattccactgagcccaccagcccagaaaaatgacccgaaaaaggctcccgtcgctagatcatccgtggggtgggatgctacagaagatctccgcatatcccggacagattccttttcatcgatggtgcggtgcagagagccgagctgtttccactgggtgttacccctggtacaggccatcccatgcaaagcgtgttcccgggttgcgatttggggagtgcttggagacgccgttgctgtgggagccgcagctactgacagctccgagcacacacttaaggcctggccactgagcaaatcatcattctattggcatctttag

SEQ ID NO: 132514 - DNA, 1893 bp, synthetic construct
  misc_feature 1..1893: note = Description of Artificial Sequence: Synthetic coding sequence
  source 1..1893: mol_type = other DNA
atgtcactcggccaatcagcgtgtctgtttctctcaatagcaagatccagatcagtaatgaccggcgagcagatggctgcctttcacccctctagtacgcccaaccccctggaacgacctattaagatgggctggcttaaaaaacagcgtagcatcgtgaagaattggcagcagtcctattattacaaggatgaggaggacactaagccgcagggatgtatgtatttgccaggctgtacaatcaaagagatcgctaccaatcccgaagaagctggtaaatttgtgttcgagattattcctgcaagttgggaccagaaccgaatgggtcaggacagctatgttttgatggcctcctcccaggccgagatggaggaatgggtaaagtttctgagaagagtggctggcactccgtgtggcgccgtgttcggacagagactggacgagacagtcgcttatgaacagaagttcggacctcacttggtacctatcttagtggaaaaatgcgcggaattcatactggaacacggcagaaatgaggaaggaatttttcgcctgcccgggcaagataaccttgtgaagcaactgagagacgcgttcgacgctggggaacgcccgtccttcgaccgcgatacagatgtccacacggtggcctctctgttgaagctctatctgagagatctccccgagcctgttgtgccatggagccagtacgagggctttctgctgtgtggccaattaacgaatgctgacgaggcgaaggcacagcaggaactgatgaagcagctgagcattttgcctcgcgacaattatagcctgttgtcctatatttgtcggtttctgcacgagattcagctgaattgtgccgtgaacaagatgtcagtggacaatcttgcgactgtgattggagtgaatctcattcgttctaaggtagaggatccagccgtcatcatgcgcgggacccctcagattcagcgcgtgatgactatgatgattagagatcacgaggtactgttccctaagtccaaggatattcccctctccccgccggctcaaaagaacgatccaaagaaagcaccagtagcaagaagctcagttggatgggacgccaccgaagatttgcgcatttcacgcactgactccttcagcagcatgacctctgattccgacacaactagccccacaggccagcagccaagtgacgcctttcccgaggactcctcaaaagtgcccagagaaaagcccggagactggaaaatgcagtcacgcaaaaggacacagaccctgccaaacagaaagtgtttccttactagtgccttccagggggccaatagctccaaaatggaaatcttcaagaacgaattctggagcccatcgtccgaggcgaaagctggcgaagggcatagacgtactatgagtcaggatctgagacagttatccgattcacagcgcacctctacctatgataacgttccaagtctgcccggttctccaggggaggaagctagcgcgctgagcagccaggcctgtgactctaaaggcgacacgctcgcaagccctaattctgagactggacctgggaagaagaacagcggtgaggaagaaatcgactcactccagcggatggtgcaggaactgagaaaagaaattgagacgcagaaacagatgtacgaggagcagattaagaacctagaaaaggaaaactatgacgtgtgggcgaaggtggtgcgcctgaatgaagagcttgaaaaggaaaagaagaaaagcgccgcccttgaaatatcccttcgaaacatggagagatcaagagaggacgtggaaaaacgcaataaggcccttgaagaggaggtgaaagaatttgttaaaagtatgaaagaacctaaaacagaggcttag

SEQ ID NO: 132515 - DNA, 852 bp, synthetic construct
  misc_feature 1..852: note = Description of Artificial Sequence: Synthetic coding sequence
  source 1..852: mol_type = other DNA
atgaccggagagcagatggccgcattccacccctcctcgacacctaatcccctagaaaggcctatcaagatgggctggcttaagaagcaacggtcaattgtgaagaactggcaacaacggtacttcgtcctgagagcgcagcaactgtactactataaagacgaagaagatacgaagccacaagggtgcatgtatctcccaggctgcaccattaaagaaatcgccacaaaccccgaggaagccggtaagtttgtgttcgagatcattcccgccagctgggatcagaaccgcatgggccaagactcgtatgtgctcatggcgtcaagccaggctgaaatggaggagtgggtcaagtttctcagacgcgttgccgggactccttgcggggctgtattcgggcagcgcctggatgaaaccgtcgcctacgaacaaaaatttggcccacaccttgtgcctatcctcgttgagaagtgcgccgaatttattctggaacacggccggaatgaggaaggcatcttccgtctccccggtcaggacaatctagtaaagcaattaagagacgcgtttgacgctggagagcgcccttcttttgatcgagacactgacgtccacaccgtggcatcactcctcaagctctacctacgagacctcccagagcccgtagtcccatggagccaatacgaggggttcctgttatgtggacagctcactaacgcggatgaggccaagaactaccggaacaggaacgattgtcaatccgtcgtcagtgcacagatccatcagttctgcccccgcgtatccctcctagcccatggccaagctcacctcctggtgaacgacttgttggtatag

SEQ ID NO: 132516 - DNA, 1821 bp, synthetic construct
  misc_feature 1..1821: note = Description of Artificial Sequence: Synthetic coding sequence
  source 1..1821: mol_type = other DNA
atgagtttgaagttacccaggaattgggacttcaatctgaaggtcgaggccgccaagattgcacgatcccgttctgtaatgactggcgaacagatggcggcctttcacccaagcagcacacccaatccgctcgagcggcctattaaaatggggtggttgaagaagcaacggagcattgtgaagaactggcagcagcgctattttgtcctgagggctcagcagctctactattataaggacgaagaagacaccaaacctcagggctgtatgtacctccccggctgtacgataaaggagatcgctaccaaccccgaagaagcaggtaagttcgtgtttgagattatccctgtattcggacagcggttggacgagactgtggcctacgagcagaagtttgggccccatctggttcccattttagttgagaaatgcgcagaatttatcttggaacacggccgaaacgaggagggcattttccggcttcccggacaggacaatttggtgaagcagctgagggacgcatttgatgcaggcgagcgacccagctttgaccgcgacaccgacgtgcatacggtggcgtcgcttctgaagctgtatctgagagacttgcctgaacccgtagtgccttggtcccaatacgagggattcctcctgtgcggacaactgacaaacgctgacgaggccaaggcacaacaggaactgatgaagcagttgagtatactgccccgagacaactattctctgctgtcctacatatgtagattcctgcatgaaatacagctgaactgcgccgtcaataaaatgtcagtggacaacctcgccacagttatcggcgtgaatctcatccggtccaaagtagaggatcccgcagtaattatgcgcgggaccccccagatccagcgcgtgatgacgatgatgatcagggatcatgaggtgttgtttcccaagtccaaagatatcccactcagtcctcctgctcagaaaaatgacccgaagaaagccccggtggctaggtcatccgtcggctgggacgccaccgaggacttgcggatcagtcgtaccgacagcttcagtagcatgacaagcgactctgatacaactagccccaccggccagcaaccgtctgatgccttccccgaggacagcagcaaagttccacgtgaaaagcctggggattggaaaatgcaaagccggaagcgaactcaaaccctgccaaatcgtaagtgctttttaacttccgcctttcaaggagccaatagcagcaagatggagatctttaagaacgagttttggtctccttcttcagaagcaaaagctggcgaagggcataggcggactatgtctcaggatctgaggcaactgagcgactcccagcgcaccagcacctatgataatgttcccagtttacccgggtctcccggtgaagaagcttccgccctctcttcccaggcttgcgactccaagggcgataccctggcatcgcctaattctgaaactggtcctggaaaaaaaaacagtggagaggaggaaatagactctctccagaggatggtgcaggagctccgcaaagaaatagaaacccaaaagcagatgtacgaagaacagatcaagaacctcgaaaaggagaactacgatgtatgggcaaaagtggtcagactcaacgaagagctcgagaaagagaagaagaagtccgctgccttggagatctctttgcggaatatggagcgatctcgcgaggatgtagagaagcggaataaagccctggaggaggaggtgaaggaattcgtgaaatccatgaaggagccaaagactgaagcctag

SEQ ID NO: 132517 - DNA, 2445 bp, synthetic construct
  misc_feature 1..2445: note = Description of Artificial Sequence: Synthetic coding sequence
  source 1..2445: mol_type = other DNA
atggggttgcctgccttggaattcagtgactgctgtctggatagcccacacttccgggagaccctgaaatcgcacgaagctgagcttgacaaaaccaacaagtttatcaaggaactcataaaagacggaaagtctcttatatctgctcttaagaacctcagctcggccaaacgcaaattcgctgactcgttgaacgaatttaagtttcagtgcattggagatgctgaaactgatgacgagatgtgcatcgctaggtcactgcaagaatttgcgacagtactcaggaacctggaagatgagcgaattagaatgattgaaaatgcctccgaggtcctgattactccactagaaaaattccggaaggagcagataggggccgccaaagaagcaaagaagaaatacgacaaggaaactgaaaaatattgtggtatcttagagaagcacttgaacctaagctctaagaaaaaggagtcacagctgcaggaggcagactcacaggtcgaccttgttcggcagcatttttacgaagttagcctggagtacgtgttcaaagtgcaggaagttcaggaacggaaaatgtttgaattcgttgaaccactactggcttttctccaggggctgttcaccttttatcaccacggctacgaattggcgaaagattttggagactttaagacccaactcaccattagcattcaaaacaccagaaaccgcttcgagggaacccgctcagaagtggagtccctgatgaagaaaatgaaagaaaacccactggagcacaaaaccatttcgccctacaccatggaaggttatctgtatgtccaggagaagcggcacttcgggacatcatgggtcaagcattattgcacttaccaaagagactccaagcagattacgatggtcccgtttgaccagaagtctggtggaaaggggggcgaagacgagtccgtgatcttgaagtcatgtacgcgtcgtaagaccgactcaatcgagaaacggttctgcttcgatgtcgaggccgttgaccgccccggcgtcataacaatgcaagccctgagcgaggaggaccgcagactgtggatggaagctatggatggccgcgaaccggtgtataattcaaataaagactctcagagcgaggggacagctcagctggacagcataggtttctccattataagaaagtgcatacacgctgtggagaccaggggcataaacgaacaagggctatataggattgtgggtgtgaactctcgagtccagaagttgttgagcgtcctgatggacccaaaaactgcctctgagaccgagactgatatctgcgctgagtgggaaattaaaactatcacatctgctttgaaaacctacttaaggatgttgcccggacctctcatgatgtatcagttccagagatcctttattaaagcagctaagctagaaaaccaagagtcaagagtgtctgagattcatagtctggttcaccgattgccagaaaaaaatcggcaaatgctgcagctcctgatgaatcacttagccaatgtcgccaacaatcataagcaaaacttgatgaccgttgccaacctgggcgtcgtattcggtccgactctgttgcggccacaggaggagacagtagcagccattatggacattaaattccaaaatatcgtgattgaaattctgattgagaatcacgagaagatattcaatacggtgccagatatgccactgacgaacgcccagctacacctttctcgtaagaaatccagtgactcgaagcctccttcctgcagcgagcggccgctgaccttgttccatacagtacagtctacggagaagcaggaacagaggaattctatcatcaactccagcctcgaaagtgtcagttccaaccctaactctatactgaattccagttctagcctgcaacctaatatgaactcaagcgaccccgacctcgccgtggtaaagcctacaagaccaaacagcctgcccccaaacccgtctcctacgtcccccctgtccccttcttggcccatgtttagcgccccttccagtccaatgcctaccagctcgacgtcatctgatagctcccccgtgcggagcgtcgcaggtttcgtatggttctccgttgccgcagtggttctaagtttggcacgatcaagcctgcatgctgtattctctctgctcgttaacttcgttccctgtcaccccaaccttcacctgctgttcgatcgacctgaggaggctgtgcatgaagactcaagcacgccctttcgcaaggccaaagcactttacgcttgcaaggcagagcatgactctgaactgtcttttaccgccggaacagtgttcgacaacgtccatccctcacaggagccaggttggctggagggcacgttgaatgggaagaccggcctgattccagaaaactatgttgagttcctgtag

SEQ ID NO: 132518 - DNA, 2280 bp, synthetic construct
  misc_feature 1..2280: note = Description of Artificial Sequence: Synthetic coding sequence
  source 1..2280: mol_type = other DNA
atgggtctgcccgccctggaattcagcgactgttgcctggacagcccccactttagggaaactttgaagtctcacgaagccgaattagataaaacaaataagtttatcaaggaactcatcaaggacggcaagagcctgatcagtgcactgaagaacctgtcgtctgcaaaacgaaagttcgcagacagcctcaacgaatttaagtttcagtgtattggtgatgcagaaactgacgatgaaatgtgcattgccagatccctccaggaatttgccacggtgctgcgcaatttagaagatgaacgaattaggatgatagaaaacgcttcggaggtattgatcacacctttagagaaatttcgtaaggagcaaattggagcagcaaaagaggcaaagaaaaagtatgacaaagagaccgagaaatattgcggcatcctggaaaaacacctcaatcttagttccaagaagaaggagtcacaactacaggaggcagattcccaggtggacctcgtgcggcaacacttctatgaggtgagccttgagtatgtgttcaaggtccaggaagttcaagagcggaagatgttcgagtttgtggaaccgctccttgcattccttcagggactttttacattctaccaccacgggtacgagctggccaaggattttggggacttcaagactcaattgacaatatcaatccagaatacacgtaacaggtttgaagggacaagaagcgaagtggagagccttatgaaaaagatgaaggaaaatccattagaacataaaacgatctctccctacaccatggaaggatatctctatgttcaagagaagcgccattttgggacttcttgggttaaacactattgcacttaccagcgagactccaagcagatcacgatggtgcccttcgatcagaaaagcggcggaaagggcggagaagacgagagcgtgatcctgaagagctgtactaggcggaagactgactctattgaaaaaaggttttgttttgacgtggaggccgtggataggccaggcgttattacgatgcaggccctgagtgaagaagaccggcggctatggatggaggcaatggacgggcgagagcccgtctataacagtaataaggatagccagtctgagggcaccgcacagctggactccattggattctcaataatccggaaatgcatccatgctgtggaaactcgagggatcaatgagcagggcctgtaccgaatcgtgggggtgaactctcgagtgcagaagctgctgagcgtgctcatggatccaaaaaccgcaagtgaaaccgagactgatatctgtgccgaatgggaaattaaaaccatcacctccgcgctcaaaacgtatctcagaatgttgccaggacctctcatgatgtatcaatttcagaggtcatttatcaaagctgctaaactggaaaaccaggaaagcagagtgtcagagatccattctctggtgcaccggctgccagaaaagaaccgccagatgctgcagctgctgatgaaccacctggccaatgtcgctaataaccacaagcagaatctgatgactgtggcaaacttaggagttgtgttcggccccacacttttgcggcctcaagaggagacggtggccgctatcatggacatcaagtttcagaacatcgtgatcgagatcttgattgaaaaccacgaaaagatctttaataccgttcccgatatgcctctgactaacgctcagcttcatttgagcagaaaaaaatcttcagactctaagcccccaagctgttctgaaaggccattgacactgttccacactgttcaatccaccgaaaagcaggaacagcgcaactcaataattaattctagcctggagagcgtttcatccaatcccaatagtatactaaattcaagttccagcttacagcccaacatgaactccagcgatcctgatttggcagtggtgaagcctacccgacctaatagcctgccacctaacccgagccctaccagccctctgtccccatcatggcccatgttttctgcaccaagctcacctatgccaacctcatctacatctagcgactcatcccctgttagcacgccgtttagaaaggctaaggctctctatgcatgcaaagcggagcacgatagcgagctgagcttcacagcggggacagttttcgataacgtgcatccgtcccaggaacccggatggttagagggcaccctgaatggcaagactggcttgattcctgaaaattatgtggaatttctgtag

SEQ ID NO: 132519 - DNA, 885 bp, synthetic construct
  misc_feature 1..885: note = Description of Artificial Sequence: Synthetic coding sequence
  source 1..885: mol_type = other DNA
tgaccgaagacagcatctgagacagagaccgacatctgcgctgaatgggaaatcaagactatcacaagcgctctcaagacctatctgcgcatgctgcctggacccttgatgatgtatcaatttcaaaggtctttcatcaaagcggctaagttggagaatcaagagtcaagagtcagtgagatccattctctggttcaccgcttgccagagaagaatcggcagatgttacaactgttgatgaatcacctggccaacgttgccaacaatcacaagcagaacctgatgacagtagccaacttgggagtcgtgttcgggccaactctgcttcggccgcaggaggaaacggtggccgctatcatggacatcaaatttcaaaatatcgtcatcgaaatcctgattgagaatcacgagaagatcttcaatacggtgcctgacatgcccctgaccaatgcgcaactacatctgtctcgcaaaaagtcgagcgatagcaagcctccttcctgctcagagcggccattgactctttttcacaccgtccagagcactgagaagcaggaacagcggaacagcataataaatagctcccttgaatccgtgagctcaaacccgaatagtattctgaatagctcttcttctttacagccaaacatgaactcatctgatcccgatctcgccgtggtgaagccaactagaccaaactccctgaccccttttcggaaagccaaggctctctatgcctgtaaggcagaacacgattccgaactgtcatttacggcaggcaccgtgttcgacaacgtgcacccctctcaggagccagggtggctggagggaacactgaacggaaagactgggttgatccccgagaattacgttgaatttctatag

SEQ ID NO: 132520 - DNA, 861 bp, synthetic construct
  misc_feature 1..861: note = Description of Artificial Sequence: Synthetic coding sequence
  source 1..861: mol_type = other DNA
atggatccgaaaacagccagtgaaacagagactgacatttgcgctgagtgggaaatcaaaaccattacatccgcactgaaaacttatcttcggatgctgcccggtcccttgatgatgtatcagtttcagcgatctttcatcaaggccgcgaaactggagaatcaagagtccagggtgagcgaaatccactcacttgtccatcggctgcccgaaaaaaacagacagatgctgcagctgctgatgaaccacctggctaatgtggcaaacaaccacaagcaaaacttgatgacagtggctaatcttggagtggtgttcggccccactttgctccgaccacaggaggagaccgtcgctgctattatggatattaaatttcaaaatattgtaatcgaaatactgatcgagaatcacgaaaaaattttcaatactgtcccagacatgccacttacgaatgcccagctccatcttagtcgcaagaagtctagcgattctaagcccccatcctgctccgagcgaccactcacactattccataccgttcagtccacagaaaagcaggagcagcgcaatagcatcatcaatagcagcttagaaagtgtgagttctaacccgaattctatcctcaattctagctccagtctgcagccaaatatgaattcttctgatcccgatctggcagtcgtcaagcctacccgtcccaatagcttaccgcctaaccccagtcccacctcgcccctctcacctagctggcctatgtttagtgccccgtctagcccaatgcccacatcctccacttcctccgattcaagcccacgcatcacatggtcaagttccaacagaggccctcagcagaactgctag

SEQ ID NO: 132521 - DNA, 1167 bp, synthetic construct
  misc_feature 1..1167: note = Description of Artificial Sequence: Synthetic coding sequence
  source 1..1167: mol_type = other DNA
tgagctcagctggatagtattggattcagtatcattcgcaaatgcatccatgcagttgagaccagagggattaatgaacagggcttgtatcgcatcgttggcgtgaactcccgggtccaaaaactgctgtccgtcctaatggatcccaaaacagccagcgaaactgagactgatatatgcgcagaatgggagattaaaacaatcacttccgccttgaagacatatctgagaatgttgcctggccccctcatgatgtaccagtttcagcggagcttcattaaagccgccaagctggaaaatcaggaatcacgagtcagcgagattcacagcctcgtgcatcgattgccagaaaaaaacaggcagatgctccagttgctgatgaaccacttggccaacgtggccaataaccataaacagaacctcatgaccgtagctaacttgggagtggtgtttggcccgacactgttgagaccccaagaggagactgtcgcggccatcatggatattaaatttcagaatatcgtaatcgagatcctcattgagaaccacgagaagattttcaataccgtccctgatatgcctctcacgaacgcccagctgcatctttcacgcaagaaatccagcgatagcaaaccccccagctgcagcgagaggcctctgacactctttcacaccgtccaaagcacagagaaacaggagcaaaggaactctatcataaattcatcacttgaaagtgtttcctcaaatccaaacagcatactgaacagttcctcctcactacagcccaacatgaatagttctgatcccgacctcgctgttgttaaaccaacacgtcccaacagcttgccacctaacccatccccaacgtcgcctctgtccccgtcttggcctatgttctctgctcctagttctccaatgccgaccagtagcacgtcatccgatagttccccagtgcggccagaagaagccgtccacgaggattctagcacaccattcagaaaggccaaggcactgtacgcatgcaaagctgagcacgatagcgagctgtcctttaccgccggcacggttttcgacaatgtgcacccctcgcaggagcccggctggctggaaggcactctcaatggaaagacaggcctgatacccgagaattacgtggagtttctctag

SEQ ID NO: 132522 - DNA, 792 bp, synthetic construct
  misc_feature 1..792: note = Description of Artificial Sequence: Synthetic coding sequence
  source 1..792: mol_type = other DNA
atggcagcagatgttgtcggggatgtctacgttctggttgaacatcccttcgaatacacaggcaaggacggtcggagggtggcaatcagaccaaacgaaagatacaggttgttgcgcaggtcgacggagcactggtggcacgtgcgtagagagcctgggggtcgaccattttacctccccgcccagtatgtgcgggagctgcctgccctgggcaatcccgccgcagcggccccccccgggcctcacccatctccagccgctcctgagccccttgcatacgactacaggttcgtgtcggcggcagccactgccggacccgacggcgcgccagaggagagcggggggagggcctcatccttgtgcggccccgcacaaagaggcgcagcaacacagaggtcgtccctggccccaggcctcccggcgtgtctgtacctgaggccggcagccccagtcagaccagctcagtcgttgaatgatctcgcctgtgctgctgtgagcccaccagctggactgctggggagctctggctcttttaaggcttgcagtgtagccggatcatgggtgtgtccgcggccactagcccgcagcgattccgaaaatgtttatgaggtgatccaggacctgcatgtgcccccacccgaggagtctgccgagcaggttccgcccagggctcttggtaggggtggcggatggcgcgcccgagaccgcgctagaacggagccaggccgcaaagagacgcgtagtgcccaaagacgtgcgaggcgaccccctctctcggaggatttcggctag

SEQ ID NO: 132523 - DNA, 1647 bp, synthetic construct
  misc_feature 1..1647: note = Description of Artificial Sequence: Synthetic coding sequence
  source 1..1647: mol_type = other DNA
atgcagccaggccttagccctgggagtcctggggatccccgcccacccacgcccgagactgactatcccgagtccctcaccagctatcccgaggaggactacagcccggtgggcagcttcggagagccaggccctactagtcctctaactactccccctggctggtcctgtcatgtgagccaagataaacagatgctctacactaaccactttacccaggaacaatgggttaggctggaagacccgcacggaaagccctacttctataatccagaggattcttccgtacggtgggaactgccgcaggtgcccgtgcccgcaccgagatcaatccataagtcttcccaggacggggacacccctgcacaggctagccctcctgaagagaaggtcccagccgagttagatgaggtgggatcttgggaagaggtttcccccgccactgccgccgtgcggactaagactctggacaaagcaggcgtgctgcaccgaaccaagacggccgataaaggcaagcggttgaggaaaaagcactggagcgcttcttggaccgtgctcgagggcggcgtgctgacattttttaaagactctaaaacgagtgccgcgggtggccttcgccagccctcaaaattcagcacgcccgagtatacagtggagctgagaggtgccacactaagttgggcccctaaagataagtctagtagaaaaaacgtgctggagctgagaagtagggacggatctgagtatctgatccaacatgactcagaggccatcatctcaacctggcacaaagctatcgcccaaggtatccaagaacttagcgcagagttaccacccgaagaatccgagtcctcgcgggtagactttggcagcagcgaaagactcgggagctggcaagaaaaggaggaagacgcccgccccaatgcggccgctccggccctcggccctgtggggctggagagcgacctgtctaaggtacgccataaattgcgaaagttcctgcagaggcgcccaacactgcagtcgctcagagagaaaggctacatcaaagatcaggtcttcgggtgtgcattggccgctttatgcgagcgggagcgtagccgagtcccgaggttcgtacagcagtgtattagggctgtggaagcccggggcctggatattgacggactgtatcgcatcagcggcaacctcgccacgatccagaaacttagatacaaagtcgaccacgatgagagactggacctcgacgatggtcgttgggaagatgtgcacgttatcaccggtgccctcaaattattttttcgcgagcttccagaacccctgtttccgttctcccactttaggcagtttattgctgcaataaaactgcaggatcaggccaggcgcagtcgttgtgtcagagatctggttcgttcgctcccggctccaaatcatgatacgctgagaatgctgttccaacacctgtgtcgcgtcattgagcatggcgaacagaacaggatgtctgtgcagtctgtagccattgtgtttggtccaaccctcctgcgacctgaggtggaagagaccagtatgccaatgacaatggtcttccagaatcaggtggtcgagttgatcctgcagcagtgtgccgacatttttcctccacattag

SEQ ID NO: 132524 - DNA, 2670 bp, synthetic construct
  misc_feature 1..2670: note = Description of Artificial Sequence: Synthetic coding sequence
  source 1..2670: mol_type = other DNA
atggctgccgacgtggttggagatgtgtacgtgttagttgaacatccttttgagtacacgggcaaggatggaaggagggttgccatccgacctaacgagaggtacagactgttgagacggtcaaccgaacattggtggcacgtgcgaagagagcccggaggacgccccttctatttaccagctcaatacgttcgcgaacttccagcgttagggaatcccgccgcagccgcacctcccggcccgcatccttcgccggccgccccagagcctctcgcttatgactacagatttgtgagcgccgctgcaaccgccggccctgacggcgcgcctgaagagagcggtggcagggcatcctccttgtgcggtccagctcagcggggcgccgccactcagcgaagcagcttggcacctggtcttcccgcttgcttatacttgagacctgcagctccggtgcgcccggcccagagcttaaacgatctggcgtgcgcagccgtgtctccgccagctgggctgcttgggagctcgggaagttttaaggcctgtagcgtcgcagggtcctgggtgtgccctaggccactggccaggagtgattcggagaatgtgtatgaggtgattcaagacctccatgtcccccctcccgaagagagcgcggagcaggtggacgacccacccgagcctgtttacgcaaacatagagcgccagcccagggccaccagccctggcgctgcggcggcacctctgccctctcctgtttgggaaactcatacagacgctggcacagggagaccatactactacaacccagacacaggtgtcacgacatgggagtctccctttgaggcagccgaaggagccgcctctccagctacatcccctgcttctgtcgactcgcatgtcagtcttgaaacggaatggggccaatactgggacgaggagagcaggagggtgttcttctacaatcctcttacaggcgaaaccgcgtgggaagacgaagcggaaaacgagcctgaggaagagctggaaatgcagcctgggttatccccaggtagtccaggcgaccctagacctcccacccccgagacggattatccagagagcctgacctcataccctgaagaggactattccccagtgggaagttttggcgagcctgggcccactagccccctcacaaccccgccaggttggtcttgccacgtgagccaggacaaacagatgctttacacaaatcacttcacccaggagcagtgggtccgcctggaagatcctcatggtaagccctatttttacaatcctgaagatagtagcgtgaggtgggagcttcctcaagtgcccgtgcctgcccccagaagtattcacaaatcttcacaggatggcgatacgcccgcacaggcctctcctccggaagagaaagtccctgctgagcttgatgaggtgggctcatgggaagaagtttcccctgccactgcggccgtgagaaccaaaacactggacaaggccggggtcctccatcgcaccaagacggctgataaagggaagagactgcgcaaaaagcactggagcgccagttggacagtgctggagggtggcgtcctgacattttttaaggatagcaaaacgagtgccgcaggcggtcttcggcagccatccaagttcagtacaccggagtacaccgtagagctgagaggggcgacactgagttgggcccccaaggataagagtagtcgaaagaacgtgcttgagctccgcagccgtgacggttccgaatacctcatccagcatgactcagaggccataataagtacatggcacaaagccattgcacaaggcatccaggagctctcggccgagctcccacctgaagaaagcgagagtagccgcgtggactttggctcctcagagagattggggagttggcaggagaaggaggaagacgctagacccaatgctgccgctcctgcgctgggtccagtaggactggagtcggatctgtcaaaggtgaggcacaagctgcgtaagttcttgcaacggcggcccaccctccagagcttgagagaaaagggctacatcaaggatcaggtttttggttgcgcccttgcagctctgtgtgagagagaaagaagcagagtcccccgatttgtgcagcagtgtatcagagcggtcgaggccaggggactcgacattgacggtctgtacagaatttctggtaacctcgccacaatccagaaactgcgctacaaggtggaccatgacgaaagactggatttggatgacggccgctgggaggacgtgcatgtcattacaggagcactaaagctgtttttccgcgaactgccagagcccctctttccctttagccatttcagacagtttatcgctgcgatcaagcttcaggaccaggcacggagatcgcgctgtgttcgcgatctggtcagatccttgcccgcgccaaaccatgatactcttcgtatgctgtttcagcatctgtgtcgcgtgattgagcacggtgagcagaaccgaatgtccgtgcagtctgtcgccatcgtgtttggacctacattactgcgtccggaggtcgaagaaacttctatgcccatgactatggtgtttcaaaaccaggtggtggagttaatcctccagcaatgtgcagacatcttccccccacattag

SEQ ID NO: 132525 - DNA, 2589 bp, synthetic construct
  misc_feature 1..2589: note = Description of Artificial Sequence: Synthetic coding sequence
  source 1..2589: mol_type = other DNA
atggcagcggatgttgtcggcgatgtttacgttctggtcgagcacccatttgaatatactggcaaggacggacggcgagtggccatccgacctaacgagagatatcgcctgctcagacgcagcaccgaacattggtggcatgtgcgccgggagcctgggggacgccccttttatctccctgcgcaatacgtgagggagctgccagcactgggtaaccctgccgccgccgcccctcctgggccccatccatcacctgctgcaccagaaccactcgcgtacgactatcgattcgtatcagccgcagccactgccggccctgatggcgccccagaggagagcggggggcgagcgtcctccctctgcggcccagcccagagaggagctgcgactcaacgcagtagtttggcgccagggttacctgcctgcttatacctgcggccggcagcacctgtcaggcccgctcagtcgctcaatgacttggcgtgcgcagccgtgtcccccccagccggactcctgggctctagcggatcatttaaggcgtgctcggttgccgggtcctgggtgtgtccgcgacccctagcccgttccgactccgaaaatgtatacgaggtgatccaggacttgcacgtgcctcctccagaggaatctgccgaacaggtggatgacccgcctgagccggtctacgcaaatatcgagaggcagcctagggccacttcgcccggggctgctgccgcccctctcccttctcccgtttgggagacccacactgacgccgggacaggacgcccgtattactacaaccccgatacaggagttaccacctgggagagcccattcgaagcggccgaaggggctgcatcaccagcgaccagccccgcgagcgtggacagccatgtgagcctcgagactgaatgggggcagtattgggatgaggaatcaagacgggttttcttctacaatcctctcacgggcgaaactgcctgggaagacgaggccgaaaacgaacctgaggaggagctcgaaatgcaacctgggctctctcccggatccccaggcgatcctcggcctcctactccagaaacggactaccctgaatctttaacaagctatcccgaggaggactatagccccgtcggctccttcggcgagccgggccccactagccccttgaccactccacccggatggtcatgtcatgtcagccaggataagcagatgctgtacaccaatcactttacgcaggaacaggtgccagtgcctgctccgcggtctatccataagagcagtcaagatggcgacactccagcccaggcatctcccccagaagagaaggtacctgctgaactcgacgaagttggcagttgggaggaagttagtcctgccaccgcagccgtacgaacaaaaaccctcgacaaagcgggggtgctccaccgaactaaaactgcagataagggcaagcgcctgaggaaaaagcactggtctgcctcctggaccgtcttggagggtggggttctgacttttttcaaggattcaaaaacttccgctgccggagggttgaggcagccaagtaaatttagcaccccggagtacacagtcgagttacggggggctactttatcatgggccccaaaggacaaatctagtcgcaagaacgtgctggaattgaggtcacgcgacggcagcgagtacctaatccagcacgattcagaggctattatctccacatggcacaaggccatcgcccaaggcatccaggagctgtccgccgagctgcccccagaggaaagcgagagtagcagggtggactttgggtcctctgaacggctaggctcatggcaagaaaaggaggaagatgcccgacctaatgctgctgcccctgccctcgggccagtgggcttggaatccgatctcagcaaagtccgccacaaactgaggaagttcctgcagcgcagaccgacactgcagtcgctgcgagaaaaggggtatataaaggaccaggtgtttggctgcgctctcgccgccctatgtgagagagagaggtcccgtgtgcctcgtttcgttcaacagtgcatacgggccgtggaagcgcgagggttggacatcgacgggctctatagaataagtggtaatctggctacgatccaaaagcttcgatataaggttgatcatgatgaacggctcgacttagacgacgggcggtgggaagacgtacacgtgattaccggcgcccttaagctgttttttagggagttacctgagcctctgttcccattttcccacttccgtcagttcatagccgccattaagctacaggatcaagccaggagatcccgatgtgtgagggacttagtgcggagcctcccggcacctaaccatgacaccttaaggatgttgttccagcatttgtgtcgggtcatcgaacacggcgaacagaaccgcatgtcagtgcagagcgttgcaattgtatttggcccgactttgctgaggccggaagttgaggaaaccagcatgcccatgacaatggtgttccagaatcaggtagttgaattgatcttgcagcagtgcgccgatatctttcctccacattag

SEQ ID NO: 132526 - DNA, 1647 bp, synthetic construct
  misc_feature 1..1647: note = Description of Artificial Sequence: Synthetic coding sequence
  source 1..1647: mol_type = other DNA
atgcagcccggcctttcgccaggaagcccgggtgaccccagaccgcccacaccggaaaccgactaccccgagagcctaacctcctaccccgaggaagattatagtcccgttggatcttttggtgagcccggaccgacctcacccctgactacccccccaggctggtcctgccacgtctcccaggacaagcagatgctgtacactaaccactttacacaagagcaatgggtccgattggaagacccccacggtaaaccatacttttataatcctgaggatagtagcgtacgatgggaactgccacaggtgccagtgccagccccgcgatccattcataaatcaagccaagatggggacacacccgcccaggctagcccacctgaagagaaggtgccagcggaactcgacgaagtgggatcctgggaagaggtttcccctgctacagcggcagtgcggactaaaactcttgataaagcaggggtgctgcacaggaccaaaacggccgataaaggtaaaagactaagaaaaaaacattggtcggcctcgtggaccgttctggaaggcggggttctgaccttttttaaagactcaaagacctcagccgccgggggccttagacagccttcgaaattctcgaccccagagtatacagtcgaacttcgaggggcaaccctgtcctgggcgcctaaggataaaagctcacggaaaaacgtgttggaactcagatcgagggacggctcagaataccttatccaacacgattccgaagccattatcagcacttggcacaaagctattgctcagggcatccaggaactcagcgcagagctgccgcccgaggaatccgagtcgtcacgagtagatttcggaagcagtgagcgccttgggagctggcaggagaaggaggaggacgccaggccaaacgcagctgcacctgctctgggaccggtgggactggagtcagatttaagcaaggttcgacataagcttcggaaatttctgcaacggcgccctaccctgcaatcactccgcgagaagggttacattaaggaccaggtttttggctgcgccctagcggctctgtgtgaaagagagcgatctagagttcctcggttcgtccagcaatgcattcgcgccgtggaggccagagggcttgatatcgatggattatataggataagcggaaacctggcgacgattcaaaagctgcgatataaggtcgaccatgatgagcgactggacttagatgatgggcgctgggaggatgtgcacgtcatcaccggcgcactaaagcttttttttcgtgagctgcccgaacctttattcccttttagtcactttcgacagtttatcgccgccatcaaacttcaggatcaggcccggcgtagtcggtgcgtgcgggacctagttcgcagcttacctgcacccaaccatgatacactgcgtatgctctttcagcacctgtgtagagtgattgaacacggtgagcagaatagaatgtccgtgcagtccgtggctatcgtctttggcccaacactccttcgacctgaagtggaagagacaagcatgcccatgaccatggtgtttcaaaatcaagtggtcgagctgatcctgcagcagtgcgcggacatctttccgcctcattag

SEQ ID NO: 132527 - DNA, 792 bp, synthetic construct
  misc_feature 1..792: note = Description of Artificial Sequence: Synthetic coding sequence
  source 1..792: mol_type = other DNA
atggccgcagacgtggtgggggatgtgtacgtgctggtcgagcacccttttgagtataccggcaaggatggcaggcgggtcgcaattagaccaaatgagagatatcggttactgaggaggagcaccgaacactggtggcatgttaggcgggaacctggtggcaggcccttttatctgccggcccagtacgtcagagagctacccgcccttggcaatccggccgctgcagctccgcctgggccccacccctctcccgccgcaccagaacccctggcatatgattaccgcttcgtcagcgcagccgccactgccggccccgatggggcacccgaggaatcaggcggacgcgcaagttcactttgtggacctgcacagaggggcgccgccacccagcgatctagtctggcgccaggcctgcccgcctgtttgtaccttcggcctgctgccccagtacggcctgctcaatccttgaacgatttggcatgtgccgccgtgtccccacccgctgggctgctcggatcttctggcagtttcaaagcctgctcagtggcaggcagttgggtctgtcccaggccactggcccgctctgatagcgaaaatgtctacgaggtgatccaagatctgcacgtcccgcctcctgaggaaagcgctgagcaggtgccgcctagagccctgggcaggggcgggggctggagagccagggatagagcacgcaccgagccaggccgcaaggaaaccagaagtgctcagaggagagcaagaagacctccactatccgaggattttggatag

SEQ ID NO: 132528 - DNA, 1566 bp, synthetic construct
  misc_feature 1..1566: note = Description of Artificial Sequence: Synthetic coding sequence
  source 1..1566: mol_type = other DNA
atgcagcctggtctgtcaccaggatctccaggagatccacgaccacccacaccagaaacggactatccggagtctctgacttcctacccagaagaagattactccccagtcgggtccttcggcgagccaggtccaactagcccactgacaactcctcctggatggtcctgccacgtcagtcaagacaagcagatgctgtacaccaaccattttacacaggagcaagtgcccgtgccagcccctcgctcaatccacaaatcaagccaagatggtgatacccccgctcaagcgtctcctccagaggagaaggtgcctgctgagcttgacgaggttggaagttgggaggaggtatcccctgccaccgccgcagtgcgaaccaaaacgctggataaggccggcgtgctgcaccgcacaaaaaccgccgacaagggcaaaaggttaaggaaaaaacactggtccgcctcttggaccgtgctagaaggaggagtcctgacattcttcaaagacagcaaaaccagcgctgctggggggttgaggcagccatctaagttcagtacaccagaatacactgttgagttacgtggcgccaccctgagctgggcgcccaaagataagagtagccgcaagaatgttctcgaactccggagccgggatggctcagagtacctcattcagcatgattcagaggctataatttcaacgtggcacaaagctattgcacaggggatacaagagctctcagccgagctgccacctgaagaaagcgaatccagccgggtcgacttcggatcctccgagagactcggctcctggcaagagaaggaggaggacgcgcggcctaacgctgctgcccccgcgcttgggccggttgggcttgagtctgacctcagcaaggtgagacataaactccgaaagtttctgcagcgtcgcccaactttgcaatctctcagagagaaaggatacatcaaagaccaggttttcgggtgtgcattggcggcgttatgtgaaagggagaggtcccgcgtacccagattcgtgcagcagtgcatcagagctgtggaggctcgcggcttggacatagatgggctttatcggatttcaggcaacctagccactatccaaaaactccgatacaaggtggaccatgacgaaaggctggacttggacgacggccgctgggaggacgtgcacgtaatcacgggggctctgaaactgttcttccgagagctgcctgagcctctttttccatttagccatttcagacagtttatcgcagccattaagttacaggaccaggctcgtcgaagccgctgtgttagggacctggtcagaagtctgcctgcacccaatcatgacactcttaggatgctgtttcagcacttgtgtagggtgattgaacatggggaacagaataggatgagtgtccagtcagttgccattgtttttgggcctacgctgctgaggcccgaggtcgaagaaacatccatgcctatgaccatggtctttcagaaccaggttgttgagctgatcctgcagcagtgcgccgatatttttccaccccactag

SEQ ID NO: 132529 - DNA, 2013 bp, synthetic construct
  misc_feature 1..2013: note = Description of Artificial Sequence: Synthetic coding sequence
  source 1..2013: mol_type = other DNA
atgctgtccaacgagagcctccatccacccgccttctcccgtagtaatagcgaggcctccgtcgactctgcctccatggaggacttttggcgggaaatcgagtcgattaaggattcttcaatgggtggccaagaggagccaccgccagcagaggtgactccagtagacgaaggcgaactggaggcagaatggctgcaggatgtaggcctgtccaccctgataagcggagacgaagaggaggacggcaaagctctcttaagtaccctaacacggacccaagccgctgccgtgcagaagaggtaccatacctacacccagactatgcggaaaaaggataagcagagcatacgcgatgtgagggatatattcggagtgagcgaatctccgccccgagacacctgcggaaatcacactaaccagctggacggcactaaagaggagcgcgaactgccacgggtcatcaagaccagcgggtcgatgcctgacgacgcgtctttgaacagcaccactctgagcgacgcgagccaggataaagagggatcatttgccgtgcccaggtccgactccgtggccattctggagacaatcccagtgctgcccgtgcactctaatggctctcccgagcctggacagcctgtccaaaatgccatctccgatgacgactttttggaaaaaaacataccccctgaggccgaggaactgtcattcgaggtgagttacagtgaaatggtaacagaagccctgaaacgcaacaaattaaaaaagagtgaaatcaagaaggaggactatgtcctcaccaagtttaatgttcagaagacccggttcgggctaaccgaggccggggacttgtctgctgaagacatgaagaaaatccgacacctgtcgctcattgagctgacagctttttttgatgccttcggcatacagctgaagcggaataaaactgagaaggtcaaagggcgcgataacggaatctttggggtacccctgaccgtgctactggatggggatagaaaaaaggatcctggtgtgaaggtgcctctcgttctgcaaaaattcttcgaaaaagtggaagagagcgggttagaatccgaaggaatatttcgcctatctggctgcaccgcaaaagttaagcaataccgggaagagcttgacgctaagttcaacgcagataaattcaagtgggataaaatgtgccaccgcgaggccgccgtaatgctcaaggccttcttcagggagctgccaactagcctgtttccagttgagtacatacccgcttttatctccctgatggagagggggccccacgtgaaagttcaattccaagcactccatctcatggtcatggcattgccagacgccaatcgcgatgcggcccaggcactgatgactttttttaacaaagtcattgccaacgagagcaagaaccgtatgtccctgtggaatataagcactgtcatggcccccaacctcttcttctctagatcaaagcactccgactacgaggagctcctcctggctaacacggccgcgcatataattcgattgatgctaaagtaccaaaagatactgtggaaggtgccgtcctttctaatcacccaggtgcggagaatgaatgaggcaacaatgcttctcaagaagcagctgcctagtgtaaggaagttattgcggcggaagacactggaacgcgaaaccgcctctcctaaaaccagcaaagtgttacagaagagtccgtcagcccgcagaatgagcgacgtgcccgagggcgtcatacgggtacacgcacccctgctgagtaaggtctccatggcaattcagctaaataatcagaccaaggccaaagacatactcgccaaattccagtacgagaacagaatcctgcattggcaaagggctgctttatcttttctaaacggcaagtgggtgaagaaggagagagaagagagcaccgagactaatcgttccccaaaacacgtgtttctgttcacaatcggactcgacataagcacctag

SEQ ID NO: 132530 - DNA, 1713 bp, synthetic construct
  misc_feature 1..1713: note = Description of Artificial Sequence: Synthetic coding sequence
  source 1..1713: mol_type = other DNA
atgcggaaaaaggataagcagtcaatcagggacgtccgagacatattcggggtttcagagagcccacccagagatacctgcggtaatcatacaaaccagctggatggaaccaaggaagagagggaattgccccgtgtgattaagacatccggtagtatgccggatgacgcgagtctgaattccacaaccctatccgacgctagccaggacaaggaaggctccttcgccgtacctcggtctgattctgttgctatcctggagacaattcccgtactgcctgtgcattcaaatggatcacctgagcctgggcagcccgtccaaaacgcaatctctgacgacgattttctggaaaagaacattccaccggaggccgaggaactctctttcgaggtcagctactccgagatggtcaccgaggcactgaagagaaataagctgaagaaatccgaaataaagaaggaagattacgttctcaccaagttcaatgtgcagaagacacgcttcgggctgacagaggctggggatttaagcgccgaggacatgaagaagatccgccatctttccctaattgaacttaccgctttctttgacgcctttggtattcagcttaaacggaacaaaacggagaaagtaaaagggcgggacaacggcatctttggggtcccacttactgtgctgcttgacggggacagaaaaaaggaccccggcgttaaggtgccattggtgctgcagaaattttttgaaaaagtggaagaaagcggactggagagtgagggaattttccgtctgtccggttgtaccgcgaaggttaagcaatatcgggaagaactggacgccaaatttaatgcagacaaatttaagtgggataagatgtgccaccgggaggcggctgttatgttaaaggctttttttcgtgagttgcccacttctttgtttcccgtagagtatataccagcgttcatttcgctgatggagcggggaccccacgttaaggtgcagttccaggcactgcacctgatggtaatggccctgcctgatgccaatcgcgacgcagcccaggcacttatgactttctttaataaagttattgccaatgagtcaaaaaataggatgagcctctggaatatttcaaccgtcatggcccccaacctcttctttagtcgaagcaaacactcagactacgaagaactgctgcttgccaacactgctgctcacattattaggcttatgctgaagtaccagaaaatcctgtggaaagtgccatccttcctaatcacccaggtccggagaatgaatgaagctacaatgctgctcaaaaaacagctcccatctgtacgcaaactgctcagacgtaaaactctggagagggagactgcaagcccaaaaacgtccaaagttctgcagaagtctccttcagcaagaaggatgagcgacgtgcctgaaggcgtgattcgggtccacgccccattgctatccaaagtgtcgatggcgatacagttgaacaaccagactaaagcaaaagatatcctcgccaagtttcagtatgagaactcgcatgggtcaagtgaatgcatcaaaatccagaaccagagattgtatgagattggtgggaacatcggagaacattgtctagaccctgacgcctacattctggacgtgtatcggatcaatccccaggcagaatgggtgattaagccacagcagtcttcgtag

SEQ ID NO: 132531 - DNA, 1638 bp, synthetic construct
  misc_feature 1..1638: note = Description of Artificial Sequence: Synthetic coding sequence
  source 1..1638: mol_type = other DNA
atgaacgaactgcctagggatacctgcgggaaccatacaaatcagcttgatggcacaaaagaagaaagagaactgccgagagtgatcaaaacaagcggttcgatgcctgacgacgcctcactgaatagcaccaccctgagtgatgcttcccaggataaggaaggatctttcgccgtgcccagatctgacagcgtggccatccttgaaacaattcctgtcttgccagtgcactcaaacggcagccccgaacccgggcagccagtgcagaacgcaatttcagatgatgacttcctggaaaagaacatacccccagaagccgaggagttgtctttcgaggtgtcttacagtgaaatggtcaccgaagcactcaaacgcaacaagctgaagaaaagcgagataaaaaaggaagactatgtgctgacaaagtttaacgtgcagaagactcgctttggtctcaccgaggcgggcgatctctctgcagaggacatgaagaagattcgacatctctccctcattgagctcaccgccttttttgatgccttcggcatccagcttaagcgcaataaaacggagaaggtcaagggaagggacaatggcatctttggtgtccccctgacagtgttactcgacggggacaggaaaaaagaccctggcgtgaaagtgccactggtactgcagaaatttttcgagaaggttgaggagagcggattggagtctgaggggatcttcagactgtcaggttgtacagcaaaagtaaagcagtatagagaggaactggacgcgaaatttaacgcagataagtttaagtgggataagatgtgccaccgagaagccgctgtcatgctcaaggcattctttcgtgaactgccgaccagtctatttcctgtcgaatatatccctgccttcatctccctcatggagcgaggcccacacgttaaggtccagtttcaggcacttcacctgatggtcatggcgttacccgacgcgaatcgcgatgctgcccaggctctgatgacattttttaacaaggttattgctaatgaaagtaaaaaccgaatgtccctctggaatattagtaccgtgatggccccaaatctcttttttagccggtcgaaacatagcgactatgaggagctgctgctcgctaacaccgctgcccacatcattaggctcatgctcaaatatcagaaaatcctctggaaggtcccatcattcttgatcacacaggtgaggaggatgaacgaagcaaccatgctgctgaagaaacagctaccctcagtacggaaactgttgcgacgcaagacactcgaaagggaaaccgcatcccctaaaacctcaaaggtactgcagaaaagtccaagcgcccgccgcatgtcggacgtcccggagggcgtgattagagttcatgcaccgctgctttctaaggtgagcatggccatccagcttaataatcagaccaaggccaaggacattttggccaagtttcagtatgagaatcgaatactccactggcagcgcgctgcccttagcttcctgaacgggaagtgggttaagaaagagagggaagagtccacagaaacaaatcgctcccccaagcacgtttttctttttactatcggattggacatatcaacctag

SEQ ID NO: 132532 - DNA, 2169 bp, synthetic construct
  misc_feature 1..2169: note = Description of Artificial Sequence: Synthetic coding sequence
  source 1..2169: mol_type = other DNA
atggaggtcgaggattctggaggagttgtcttaaccgcctaccacagctacgcccgggctcagccaccgaatgccgagagtagatgtgcacctcgcgccgctgccagtcatccgctgagtcgcaaaagcatcccacgatgtcgacgaatcaatcgcatgctctctaatgaatccctgcatccaccagccttctctcgctccaactcagaggcttctgtggactcagccagtatggaggatttttggcgggagattgaaagcattaaggacagcagcatgggaggccaagaggagccccctcccgcagaggttacccctgttgatgagggagagctggaagcggagtggctccaggacgtcggtctttctaccttgattagcggagacgaagaagaggatggcaaagctctcctgagcaccctgacccgcacacaggccgctgctgtgcagaaacggtatcacacatacactcaaaccatgcggaaaaaagataaacagtccatccgcgacgtgcgcgacatcttcggggtgtcagaaagcccgcctcgggatacatgcggtaatcacaccaatcaattggatggtacaaaagaggagcgcgagctgcccagagtaatcaaaacttctggttctatgcctgatgacgcatctctcaattctaccacactgtctgatgctagccaggacaaagaaggctcttttgctgtccctcgcagtgattctgtggctatcctggagacgatcccagtgttacccgtccacagtaatggcagccctgaacccggacagcccgtccagaacgcgatctccgatgacgatttcctagagaagaacatacctcccgaagctgaggaacttagcttcgaagttagttactccgaaatggtgacagaagcgcttaaacgaaataaactaaaaaagtctgaaataaaaaaggaagattacgttctaaccaagtttaacgtgcagaaaacccgctttggtctcaccgaagctggcgacctttcggctgaagacatgaaaaaaatacggcacctgtccctgatcgagcttacggccttttttgacgcgttcgggatccagctcaagcgcaacaaaactgaaaaggttaaagggcgggataacggaattttcggtgtcccacttacagtgctcctggacggcgatcggaagaaggatcccggagttaaggtcccccttgtgttgcaaaagttttttgagaaagtggaagagagtggactcgaaagcgaggggatcttcagattatccggatgcacagctaaggtcaagcagtatcgggaagaattggacgccaagttcaacgctgacaagtttaaatgggacaagatgtgccacagagaggccgcagtgatgctaaaggcattcttcagggagctgcccacaagcctttttccagtggagtacatacctgcgtttatttccctgatggaacgcggtcctcatgtgaaagtacaatttcaggccctgcacctcatggttatggcgttgcccgatgcgaacagggacgccgctcaggccctgatgacatttttcaacaaagtcatcgctaatgagagcaaaaaccggatgtcactgtggaacatcagtactgttatggcgccaaatctattcttttcccggtctaaacatagtgattatgaagaactcctgctcgcgaatacggccgcccatatcattcgactgatgcttaagtatcagaaaatcctttggaaggtcccctcctttcttattacccaggtgcggcgtatgaacgaggccaccatgctgctgaaaaaacagcttccttctgttcgtaagctccttcgtcgcaagacccttgagagagaaactgcatctcccaagacctctaaggtgctgcaaaaatccccatccgcccggcgaatgtctgacgtccctgaaggtgttatcagagtccacgccccgttgcttagcaaggtgagtatggccattcagttaaacaatcagacgaaagcaaaggacatcctggcaaagttccagtacgaaaaccgaatactgcactggcaaagggctgcgctgagtttcctcaacggcaaatgggttaagaaggagcgcgaggaatcaactgaaacaaataggtctccaaagcacgtctttctgttcactataggactggacatctcaacttag

SEQ ID NO: 132533 - DNA, 1692 bp, synthetic construct
  misc_feature 1..1692: note = Description of Artificial Sequence: Synthetic coding sequence
  source 1..1692: mol_type = other DNA
atgcggaagaaagacaagcagtccattcgcgatgtacgcgatatcttcggggtttctgaaagtcccccgagagatacgtgtggtaaccacacaaaccagctggacggaaccaaggaggaacgtgagctcccccgagtcatcaagaccagtggatccatgcctgatgacgcttctctgaactcaactacccttagcgacgcatctcaagataaggagggaagcttcgcggtgcctcgatcagattctgtagccattctagaaacgattcctgtcttgcctgtgcattccaatggatctccagaacccggacaaccagttcagaacgctattagcgacgatgacttcctcgaaaagaacatccctccagaagctgaggaactgtcctttgaagtgtcctacagcgaaatggtaacggaagctctcaaacgcaacaagttgaaaaaaagtgaaatcaaaaaagaagattacgttctgacaaagttcaatgtgcagaagacccgctttggtctgactgaagccggagacctgagtgccgaggatatgaaaaagatccggcacctatccctcatcgagctcactgcattttttgatgcattcggcattcagctaaagcgtaataaaacagagaaggttaagggccgggataatgggatctttggagtccccctcaccgtactcctcgatggggaccggaagaaggatcccggggttaaggttccgctggttctgcagaagtttttcgaaaaggtcgaggagtccggacttgaatccgaaggaatattcaggctaagcgggtgtacagccaaagtgaagcagtatcgggaagagctcgatgcaaaattcaatgcagataagttcaagtgggacaagatgtgccatcgggaggctgccgtaatgctgaaagcctttttcagagaacttcccaccagcctcttcccagtagagtacattcccgccttcattagcttgatggaacgaggaccacacgtcaaggttcagtttcaggcattgcatctgatggttatggcactgcccgacgcaaacagggacgccgcacaggcactgatgacctttttcaataaggtcattgccaacgagagcaagaacagaatgagcctgtggaatatttccacagtaatggctcccaatctgtttttttctaggtctaagcattcggactatgaggagctgcttcttgccaatacggccgcccatataattaggttgatgttgaaataccaaaagatcttgtggaaggtgcctagtttcctcatcacacaggtgaggcggatgaacgaagccaccatgttgttaaagaaacagctgccctctgtaagaaagctcttgaggcgcaaaactttggaaagggagactgcctctcccaagacatctaaggtgctgcaaaagagcccaagcgcgcgacggatgagcgacgtgcctgaaggcgtaattagagttcacgcccctttgctttccaaagtttccatggccatacagctgaacaaccaaactaaagccaaagatatcctggctaagtttcaatatgagaatcgaattctgcattggcaaagagctgctctgtcttttctgaatggaaaatgggtgaagaaagagagggaagagagcaccgagacaaataggagccccaagcatgtcttcctgttcacaataggactggatatcagcacgtag

SEQ ID NO: 132534 - DNA, 1713 bp, synthetic construct
  misc_feature 1..1713: note = Description of Artificial Sequence: Synthetic coding sequence
  source 1..1713: mol_type = other DNA
atgcgcaaaaaggacaagcaatcaatccgggatgtcagggacatctttggagtttcggagagccctcccagggatacttgcggaaaccacacaaaccaactggacggaaccaaggaggaacgggagctccctcgggtaattaaaacatctggaagcatgcctgacgacgcctccctcaactccaccacactctctgatgcctctcaagacaaggaagggagctttgccgtaccccgaagtgattcagtggcaatcctggaaacaattccagtccttccagtgcattcgaacggttccccagagcccggacagcctgtacaaaatgctatctcagacgatgattttctagaaaaaaacatccccccggaagccgaagaactgagcttcgaggtctcttactctgagatggtgaccgaggcactgaagaggaataagctgaaaaaatccgaaatcaagaaagaggactacgtcctgacaaagtttaatgtgcagaagaccagattcgggctgacggaagccggggacctaagtgccgaagatatgaagaaaatccgccatttgagcctcatcgagttaacagctttcttcgatgctttcggcattcagctgaagagaaacaaaaccgagaaggttaaaggtagagataacgggatttttggagtgcctctcaccgttttgttagatggcgacaggaagaaagacccgggcgtgaaagtgccacttgttctacaaaagttcttcgagaaagtcgaggagtcaggcctagagtctgaaggcatctttaggctgtccggttgcacggccaaggtcaagcagtaccgggaagagctggatgccaagttcaatgccgacaagttcaagtgggataagatgtgccatagagaggcagctgtaatgctaaaggcgtttttcagagagctgcccacctctctgtttcccgtggagtacattccagcctttatttcactgatggaacgtgggccccacgttaaagtacaatttcaggcccttcacctcatggtcatggcattgccagatgccaatcgggacgctgctcaggctctgatgactttcttcaataaggtgatcgctaacgagagcaagaacagaatgtcactctggaacatttctaccgttatggctcccaatctgttcttctctcgaagtaagcacagtgattatgaggagctgctccttgccaacaccgctgcccacattattcgtctgatgcttaagtatcaaaaaatcctttggaaggtgccttcctttcttatcacccaagtgaggcgtatgaacgaggcaaccatgctgctgaaaaagcagttgccgtccgttaggaagctgctgcgtcgaaagacactggaaagagaaaccgcttcccccaagacgtctaaggtacttcagaagagcccttctgcgaggaggatgtctgatgtgccagagggagtcatccgcgtccatgcccctcttttgtcaaaggtgagcatggccattcaactaaataatcaaaccaaagccaaagacatcctcgccaagtttcagtacgaaaacagccacggcagctctgagtgtattaagattcaaaaccagagactgtacgagatcgggggcaacattggcgaacattgtctcgaccctgacgcttatatcctggatgtgtaccgcataaatcctcaggcggaatgggtgataaagccgcaacagtcatcgtag

SEQ ID NO: 132535 - DNA, 354 bp, synthetic construct
  misc_feature 1..354: note = Description of Artificial Sequence: Synthetic coding sequence
  source 1..354: mol_type = other DNA
atgctttcgaacgaaagtctccatccacctgcatttagccgttctaatagcgaggcctctgtcgattcggcctctatggaggacttctggcgggagatagagagcataaaggattcatctatgggaggacaagaagagcccccccccgctgaggtgacccctgtcgacgaaggagagctcgaggctgagtggctgcaggatgtgggcctgtctactctgatatctggagacgaggaggaagatggcaaagctctcctttctacacttaccaggacacaggcggcagcagtgcaaaagcggtatcacacctacacacagaccatgaggaagaaggacaagcaaagcattaggtag

SEQ ID NO: 132536 - DNA, 1665 bp, synthetic construct
  misc_feature 1..1665: note = Description of Artificial Sequence: Synthetic coding sequence
  source 1..1665: mol_type = other DNA
atggctttcatgcgaattaacgttataatgaacgagctgcctagagatacctgcggtaatcatactaatcaactcgacggtacgaaggaagagagggaactgccccgtgtcatcaaaacatccggtagtatgcccgacgatgccagtcttaattccaccacactgtccgatgcttcccaggataaggagggatccttcgcagtgccgcgatctgatagcgtggctatcctggaaaccattcccgtgctaccagtccactctaacggttctcctgaaccaggccagcctgtccagaacgctatctccgacgatgatttcctggagaaaaatataccgcctgaagcagaagagctgtctttcgaggtttcttacagcgaaatggtgacagaggctcttaagcggaacaagctgaaaaaaagcgagattaaaaaggaggattacgtgctgaccaaatttaatgtccagaagacccgattcggtttgaccgaagcaggagacctgagcgctgaggacatgaagaagattcgtcacttaagcctgattgaattgaccgcattctttgatgctttcggaattcagctgaaacggaataagaccgagaaggtcaagggccgtgataatggaattttcggggtccccctgaccgttctcttggatggggatcgcaagaaggatccaggggtaaaagtacctttggttctccagaaattttttgagaaagtggaggaatctggtctggaaagcgaaggaattttcaggctctccgggtgcacagccaaggtaaaacagtaccgggaggagctggacgctaagtttaacgccgacaagtttaaatgggacaagatgtgccaccgcgaggcagccgtaatgttgaaagcctttttccgcgagttacctaccagtctgttcccagtggagtatattcccgcattcattagcctgatggagcgaggcccccacgtgaaggttcagtttcaggcccttcacctgatggtgatggctctaccagatgccaaccgtgacgccgcccaagcgctgatgacattcttcaacaaagtgattgctaatgagagtaaaaaccggatgtctttatggaacatcagcaccgtgatggcccctaatctgttcttttccaggagtaagcactcggactatgaggaattgctattggccaacactgctgctcacatcattagactgatgctgaaataccagaagattctatggaaagttccgagtttcctgattacacaggtcagacgaatgaacgaggctaccatgcttttgaagaagcagctcccatctgtgaggaagctccttcggagaaagacactggaacgggagacagcatcccccaagacctccaaagtgctacagaaaagcccgagtgccagaaggatgagcgatgtgccagaaggagtcatcagagtgcatgccccactcctcagcaaggttagtatggctatccagctcaataatcaaaccaaggccaaggatattctcgccaagttccaatatgaaaatcgcatcctgcactggcaacgcgctgccctgtcattcttgaacggaaagtgggtgaagaaagaacgtgaagagtctaccgagactaataggtcccctaagcacgtgtttctctttactattggtctcgatatatcgacttag

SEQ ID NO: 132537 - DNA, 3786 bp, synthetic construct
  misc_feature 1..3786: note = Description of Artificial Sequence: Synthetic coding sequence
  source 1..3786: mol_type = other DNA
atgattgcccataagcaaaaaaagacaaaaaaaaagcgcgcatgggctagcggtcagctctcaactgacatcaccaccagcgagatgggactgaagtccctaagttccaactctatctttgacccagattacataaaggagcttgtgaatgacataagaaagttttcccatatgctactgtatctgaaagaggcgatttttagcgattgttttaaagaggtcatccatataaggcttgaggaacttttacgagtgctgaagtcaatcatgaacaagcaccagaacttaaattccgtggacctacagaacgcagctgaaatgctgactgctaaggtcaaggcagtcaacttcactgaagtgaacgaggagaataaaaatgatctgtttcaggaggtgttctcctctatcgaaacattagcgtttacttttggtaatatccttacaaactttctgatgggtgatgttgggaacgacagcctgctgcggctacccgtgtcgagagagaccaaatccttcgaaaatgttagtgtcgagtccgttgattcctcctccgagaaaggcaacttcagtccacttgaactggacaatgtgctgctcaagaacaccgatagcatagagctggctctttcatatgcaaagacatggtctaaatacactaaaaatatcgtcagttgggtagaaaaaaagctgaacctcgagctcgagtcaactagaaatatggtgaaactggcagaggctactagaacaaatatcgggatccaggaattcatgcctctacagagtttattcacaaatgctctcctcaatgacatcgaaagctcacacctgcttcagcagacgatcgcggcactgcaggcaaataaattcgtgcagcctctcctgggacggaagaacgagatggaaaaacagcggaaagaaatcaaggagctttggaagcaggaacaaaacaaaatgctggaagccgagaatgcactgaaaaaagccaagttactgtgtatgcagaggcaagatgaatacgagaaagcaaagtcttccatgttcagggccgaggaagaacacttgtcttcaagcggcgggctggcaaaaaatctcaacaagcagttggaaaagaaacgccgattggaagaggaagctttacagaaggtggaggaggccaatgagctctacaaagtatgtgttactaacgttgaggagcggcgaaatgatcttgaaaacacgaagcgcgagatccttgctcagttgcgaacactcgtgttccagtgcgacctaactctgaaggctgtcaccgtcaacctgttccacatgcagcacttacaggcggctagcttggcagactccctgcagagcctctgtgacagtgcaaagttgtatgacccgggccaggagtactccgaattcgtgaaggctactaatagcacagaggaggagaaggtcgatggcaacgtcaacaaacatctgaacagctctcaaccatcaggcttcggccccgctaactcattggaggacgtggtcagactgcccgattcgtcaaataagattgaggaagatcgctgcagcaactccgctgacatcactgggccaagtttcattaggtcatggactttcgggatgttcagcgatagtgagagcaccggaggctcctccgagtctcgctctctggattctgagtccatcagccccggggactttcacagaaagctgcctcggaccccctcttcaggaactatgtcctcggcggatgaccttgatgaacgcgagcctcctagtccgagcgagaccggccccaattccctcggaacatttaaaaagactttgatgtcaaaggccgcgctaactcacaaattcagaaagctgcgttcgcctaccaaatgtagggattgtgagggtatcgttgtgtttcagggcgttgagtgcgaggagtgtttgctggtctgccataggaagtgtcttgagaacctggttatcatatgtggacatcagaagctgcctggaaaaatccatttgtttggagctgaattcacacaggtggctaaaaaagagccagatggaataccctttattctgaaaatctgtgcctcggaaatagagaatcgggcactgtgcctacagggcatttacagggtatgtgggaataagataaagaccgaaaagctttgtcaagccctggaaaacggtatgcatctcgtggacattagcgagttttcaagtcacgatatctgtgacgttttgaagttatacctccggcagctcccagaaccttttatcctctttagactctataaagaatttattgatttggctaaagaaattcagcacgtcaacgaagaacaggagacgaaaaagaacagtctggaggacaagaaatggccaaatatgtgcattgagatcaaccgaatcctgcttaagagtaaagacctgctgagacagctgccggcctcgaattttaattccttgcactttcttattgtgcacctcaaacgggtggtcgatcacgcagaggaaaacaagatgaactctaaaaatttgggcgtgatatttggtccgtctttgattaggccacgaccaactactgcccctattacaatctccagtctggccgagtatagtaatcaggctcgcctggttgagttcctgattacttacagtcaaaaaatatttgacggcagcctgcagcctcaggacgtgatgtgttctattggagtggtagatcagggatgctttcccaagccgctcctaagccctgaggaaagagatattgagcgctcaatgaagtcattgttcttctcgagcaaggaagacatccatacctcagaatccgagtccaaaatcttcgagcgagccactagttttgaggaaagcgaacgtaaacagaatgccctcggtaagtgtgacgcctgcctgtccgataaggctcagctattgttggaccaggaggccgaatccgctagccagaaaattgaggacggcaaaacccctaagccattatctcttaaatcggaccgaagcaccaataatgttgaaagacacacaccgcgtacgaagatccgcccagtgtcactgccggttgaccgcttacttctggcctctcctcctaatgagcggaacggaagaaacatgggcaacgtcaatcttgacaagttttgtaagaacccagcgttcgagggagtaaacaggaaagacgcagcaacaacagtttgtagcaagttcaacgggtttgaccaacagaccttacaaaagatacaggataagcaatatgaacagaactccttgaccgccaaaactacaatgatcatgcctagtgctctgcaggagaagggggtgactacctcgctgcagatttccggagatcattcgataaatgccacacagccttccaagccatacgccgaaccggttcgatccgtgagggaggctagtgaacgccggagctcagatagctaccctttagctccagtcagggctccacgcacccttcagcctcagcattggaccacgttctataagccacacgccccaatcatctccattagggggaatgaagagaagcccgcatctccatccgctgcggttccccctgggactgaccacgatccacacggtctggtcgtgaaatcaatgccagaccccgacaaagcttcagcctgcccggggcaggcaaccggacaacccaaggaggactccgaagagttgggactgcctgacgtgaaccccatgtgtcagcgtccgcgcctcaaacggatgcaacaatttgaggatctggagggggaaatccctcaatttgtgtag

SEQ ID NO: 132538 - DNA, 1182 bp, synthetic construct
  misc_feature 1..1182: note = Description of Artificial Sequence: Synthetic coding sequence
  source 1..1182: mol_type = other DNA
atgatcgcacataagcagaagaagactaaaaagaaaagagcatgggctagtggccagctatctactgacatcacaacaagcgaaatggggctgaaatccctttcaagcaacagcatttttgatccagattacatcaaggaattggtcaacgatattcgtaaattctcccatatgctgctgtatttgaaggaggccatattctctgattgcttcaaagaggtgatccatatacggctagaagaattactccgggtcttgaagtccattatgaataaacatcagaacctgaattccgtcgatttacagaatgctgctgaaatgttgaccgccaaggtgaaggccgtgaactttacggaggtcaacgaagaaaacaagaatgacctgttccaggaggtgtttagctctatcgagaccctggcattcactttcggtaacattttgaccaatttcctgatgggcgatgttggcaacgactccttgcttaggctacccgtgtcaagagaaaccaagagttttgaaaacgtgagcgtggagtcagttgattcaagttctgaaaagggcaattttagtccactagagctggataatgttctactcaagaatacagattctatcgaactcgctctgagctatgctaagacatggtccaagtatacaaagaacattgtcagttgggtggagaaaaaactgaatttggagctggaatccacaagaaatatggtgaagctggcggaggcaaccagaaccaatatcggaattcaggagttcatgccactgcagagcctcttcaccaatgcactgctgaacgacattgaaagctctcatcttttacagcaaaccattgccgcccttcaggccaataaattcgttcagcctctcttaggcagaaagaatgagatggaaaaacagcgtaaggaaatcaaagagctctggaagcaggaacaaaataaaatgctcgaggccgaaaacgctctgaagaaagctaagctcctgtgtatgcaacggcaggacgagtacgagaaggctaaatcctcaatgtttcgtgccgaggaggagcatctttcgagctctgggggtctagccaaaaatctgaataaacagctcgaaaaaaaaagaaggttggaggaggaggccctgcaaaaagtcaccatattctttttctttatctgtaaacttaactag

SEQ ID NO: 132539 - DNA, 3306 bp, synthetic construct
  misc_feature 1..3306: note = Description of Artificial Sequence: Synthetic coding sequence
  source 1..3306: mol_type = other DNA
atgaaatcccgacaaaagggaaagaagaaagggtctgctaaggaacgagtgtttggatgcgacctgcaggaacatttgcagcactcgggccaggaggtgccgcaggttcttaaaagttgcgccgaattcgttgaggagtatggcgtggtagatgggatctacagactgtcaggggtatccagcaacattcagaagctgcgacaggagttcgagtcagagagaaagcctgaccttcgcagagacgtctatctgcaggacatacattgcgttagcagtctctgcaaagcatacttcagagagctccccgatcccctactcacttatagactgtacgacaagtttgctgaggctgttggcgtccagctagagccagaacgtttagtcaaaatcctagaggtgctccgcgagctgccagtcccgaattatcgcaccctggaattcctcatgcgccatctggtacacatggctagtttctcagcccaaacaaatatgcatgcgcgcaatttagctatagtctgggcccccaacctactcaggagcaaagatatcgaagccagcgggtttaatggcaccgcagctttcatggaggtgcgcgtgcaatcaattgtggtagaatttatcctgacgcatgtcgaccagttgttcggtggcgcagccctgagtgggggcgaagtagagtccgggtggcgctcattaccaggaactagagcatccggctctccagaagatttgatgccgcggccgctgccttatcatctgccctccatcttgcaggctggagacggcccccctcagatgagaccctatcataccatcatcgagatcgccgagcacaaaaggaaagggtccctaaaggtcagaaaatggaggtctatctttaacctcgggagaagcggccacgagacaaaaaggaaactgccccggggcgcggaagatcgggaagataagtccaacaagggcactctccgaccagctaaatcgatggacagcctatctgcggcagctggcgccagtgatgaaccagaagggctggtgggaccctcatcgccaagaccctcgccgctgctgccagagagtctcgaaaatgatagtattgaggcagccgaaggcgagcaggagccggaggccgaagctcttggggggaccaattccgagccggggacgcctcgggccgggcgctccgccattagggctggcggtagttctagggcagaaaggtgtgcaggggtgcacatttcagacccttataatgtcaacctccctctgcatatcacctcaatcctctcggtgcctccaaacataatctccaatgtgtccttggcccggctgaccagaggcctggaatgtcccgccctgcaacatcgcccgagcccagcctctgggcctggacccgggccaggcctgggcccagggcctcctgacgagaaactggaagcatcgcccgccagttctcctttggccgacagtggccccgacgatctggcacccgctttggaggactccctgagtcaggaggtgcaggatagcttttcattcctggaggacagtagctccagcgaacctgagtgggtcggagccgaggacggtgaagtagcacaggccgaagctgccggtgctgcgttcagccccggggaggatgatcccggcatggggtacctggaagaactcctgggtgtcgggccccaggtggaagagttttcagtggagccacccctcgacgacctgagcctggacgaggctcagtttgtccttgccccttcctgctgtagtttggacagcgcaggccccagacccgaggtagaagaggaaaacggcgaggaggtgttcctctctgcgtacgatgacctgtccccccttctggggcccaagccacctatctggaaagggtctgggtcattggagggagaggctgccggctgcggcagacaggcgctgggtcagggtggtgaggagcaggcctgctgggaggtgggcgaagataagcaggccgaacccggggggagactggatattagggaagaggcagagggctcacctgaaacaaaagtagaagcgggcaaggcttccgaggaccggggggaggccggcggatcccaagagactaaggtcagactgcgcgaaggctcgagggaagaaacagaagctaaagaagaaaagagcaaaggtcagaaaaaggccgacagcatggaggccaagggagtcgaggaaccaggaggagacgaatacaccgacgagaaagagaaggagatcgagagggaggaggatgaacaacgggaggaagcccaggtggaggctggtcgcgatttggaacagggtgcccaggaggatcaggtggccgaggaaaagtgggaagtcgtgcagaagcaggaggccgaaggcgtgcgcgaagacgaggataaaggacagcgggagaaaggctatcacgaggcgcgcaaggatcaaggcgatggtgaagacagcagaagccccgaggcagctaccgaaggaggcgcaggggaggtgtcaaaggagcgggagagcggcgacggagaggcagagggcgatcagagagcaggtggatactacctggaagaagacacactgagcgaggggagcggcgtcgcttccctcgaggtcgattgcgccaaggaagggaatccacactcatcagagatggaagaggttgcaccacaacctccccagcccgaagaaatggaacctgagggacagccttccccggatggatgcctttgcccatgtagtctcggactgggtggcgttggcatgagactggcctctaccctggttcaagtgcagcaggtccgctccgtgcctgtggtgcctcctaaaccgcagttcgctaagatgccgtcagctatgtgttctaagatccacgttgcccccgccaatccatgcccccggccgggccgcttagatggaactccaggcgagagagcttgggggagccgggcctctagatcctcttggcgcaacgggggatcactctcatttgacgctgcggtggcgctggccagagatagacaacgaacagaggcgcagggcgttcggagaacacagacctgtaccgaggggggtgattactgtctcatcccccggacttcgccgtgtagtatgatttcagcccactcaccacgacctctgagctgtctcgagctaccttcagagggcgctgaggggtctggatcacggagtaggctttcgctgcccccaagggaaccacaagtacccgaccccttgctgagctcccaacgtagaagttacgccttcgagacccaagcaaatccgggaaagggtgagggcctgtag

SEQ ID NO: 132540 - DNA, 2673 bp, synthetic construct
  misc_feature 1..2673: note = Description of Artificial Sequence: Synthetic coding sequence
  source 1..2673: mol_type = other DNA
atgaaaagtcgacagaagggtaaaaaaaaaggcagtgccaaggagagggtgtttgggtgcgacctccaggagcatttgcaacattccggtcaggaggttccacaggtactgaaatcatgtgcagagttcgttgaggagtacggcgtggtcgacggaatctatcggctgtctggcgtgtccagtaatatccagaaactcagacaggagtttgaatctgagaggaagcctgacctccgaagggacgtgtacctgcaggatattcactgcgtgagctcactctgcaaggcgtacttccgcgaactgcccgaccctcttttaacctaccgtctgtatgacaagttcgcagaggccgttggggtacagttggagcctgaaaggctggtcaaaatactggaggtacttagggagctgccagttccaaattaccggacccttgaatttcttatgcggcacctcgtccacatggcatcctttagcgctcagaccaatatgcacgctcggaacttagcaatcgtctgggctccaaacctgctacgttcgaaagacattgaagcctctgggttcaatgggaccgccgcctttatggaagtcagagtccagtccatcgtcgttgagtttattctgactcacgtggatcaactatttggcggagcagccctttcaggcggtgaagtcgagagcggctggcgtagtctgcccggtacacgggcatctgggagccctgaggatctgatgcccagacctctaccgtatcacctcccatccatcctccaggctggtgatggaccacctcagatgaggccttaccatacaattatagagattgctgagcacaagcgcaaggggagcttgaaagtcagaaagtggcgctctatttttaacctcgggcgcagcggccacgaaactaagcgcaagttgccacgtggagcagaggatcgggaagacaagagcaataagggtaccctgagaccggcaaaatccatggattctctctccgcggctgcaggcgcctctgacgagcccgagggcttggttggcccctccagcccacggccttcgccattgctgcccgagtccctcgagaatgacagtatagaagcggccgagggcgagcaggaaccggaagcagaggctctgggggggaccaatagtgagcccggtactcctagagctgggagatctgctattagagctggtggtagttccagagccgagcgttgcgccggcgtgcatatcagtgatccctacaacgtcaatctgccactacacataaccagtatcttgtctgtccccccaaacatcattagtaacgtgtcactggcccgactcacaaggggcctagaatgcccagccctgcaacaccggccatctccagcgtctgggcctggcccaggcccgggcttagggccaggaccccctgacgagaaactggaagctagccctgcctcgtctcccctggccgattctggccccgacgacctggcaccagctttggaggattctttgagccaagaggtacaggattcctttagcttcctcgaggatagcagtagctctgagcccgagtgggttggcgccgaggatggcgaggttgctcaggcagaggcagcaggagccgcattcagccctggtgaggatgaccccggtatgggatacctcgaggagcttctaggagtaggcccccaagtagaggaattttccgtcgagccccctctcgacgacctgtcactggacgaagcccagtttgtgctggctccaagttgctgtagcttggactccgccggcccacgccccgaggtggaggaggaaaatggtgaggaggtttttctgagtgcctacgatgacttatccccgctgctgggcccaaagcctcctatatggaaaggctccggctcattagagggcgaggcagcaggctgtgggagacaggcgctgggacagggcggagaggaacaggcatgctgggaagtaggcgaggataaacaagccgagcctggcggacggctggatatccgtgaagaagcggaaggcactccccagcccccccagccagaagagatggagcccgaggggcagccatctcccgacggttgcttatgcccttgttctcttggcttaggcggcgtcggaatgagacttgccagtaccctggtacaagtgcagcaggtacggtctgtgcccgtagtgcccccaaaaccccagttcgcaaagatgcccagcgcaatgtgctcaaagatccacgtggctcccgccaatccctgcccacgccccggccgcttagatggcaccccaggggaacgagcgtggggctcacgggcctcaaggtcttcctggcggaatgggggatccctgtccttcgacgccgctgttgccctagctcgtgacagacagcgaacagaggcccagggagttcgtcggacacagacctgtaccgagggtggagattattgcttgatcccccgtacaagcccgtgcagcatgatatccgcccattcacctaggcctttgagctgcctggagttaccatccgaaggagccgagggatcgggtagtcgctcaaggttatctctgccccccagggaacctcaggttccggaccctttactatcctctcaacgacgcagctatgcctttgagacccaggctaacccaggaaagggagagggactctag

SEQ ID NO: 132541 - DNA, 1500 bp, synthetic construct
  misc_feature 1..1500: note = Description of Artificial Sequence: Synthetic coding sequence
  source 1..1500: mol_type = other DNA
atgagacacctggtccacatggcaagcttttccgcccagaccaacatgcatgcaagaaatctggccatcgtgtgggccccaaatctgctgagatctaaagatatcgaggcctccggcttcaatggcacagctgcttttatggaggtccgagtgcaaagtattgtagttgagtttatactgacccacgttgatcagcttttcgggggagcagcattgtccgggggtgaagtggaatcgggctggcgatcactaccagggactcgggcctccgggagtcccgaggaccttatgccccgcccattgccataccacctaccgtccatcctgcaggcaggcgacggaccacctcaaatgaggccgtaccataccatcatagaaatagctgaacacaagaggaaggggagtcttaaagttagaaagtggcgctcaatttttaatttgggccgctccggccacgaaaccaaaaggaaattgcctaggggggccgaagatagagaagacaagtcaaataagggtactctgagaccggccaaaagtatggactctctgagtgctgccgctggagcttccgatgaacctgaaggtctcgtagggccaagtagcccccgccctagtcctctcctcccagaaagtttggagaatgacagcatcgaggctgcagagggcgagcaggagcctgaggccgaggccctgggaggaacaaacagcgaacccggaacccctagagccggcagatcagcaattagggccggcgggtcaagtagggctgaacggtgtgcaggcgtgcacataagtgatccgtacaatgttaaccttcccttgcacatcacctctatcctgtccgtgccgcccaacataatcagcaatgtctctctggctcggctaacacggggccttgaatgtcctgctctgcagcaccggccctcccctgccagtggaccaggacctggccctggacttggccctggccctcctgatgaaaaactagaagccagtcctgcctccagtccactcgccgacagtggccctgacgacttggcaccagcacttgaggatagtctgtctcaggaagttcaggatagttttagttttctggaggactcttcctcatccgaacccgaatgggtgggtgcggaggatggagaagtcgctcaagccgaggccgccggggccgcatttagtccaggggaggacgaccctggaatgggatacctcgaggaactcctgggggtgggcccacaggtggaggagttttccgtggagccaccactggacgacctctctctcgatgaagctcagtttgtcctcgcgcccagctgctgcagcctcgattctgctggacctagaccggaggttgaggaggaaaacggcgaggaagtgtttctcagtgcttatgatgacctctctcccgccttggggctgctactgcagcccgggtggggacatcggtcgcatagttctgaaggacaatgtttgagaattaaggcagtatttctgtag

SEQ ID NO: 132542 - DNA, 4335 bp, synthetic construct
  misc_feature 1..4335: note = Description of Artificial Sequence: Synthetic coding sequence
  source 1..4335: mol_type = other DNA
atgaagaataagggggctaagcagaagctgaagagaaagggggcagcttccgcgttcggctgcgatctgaccgagtacttagaaagttcaggtcaggacgttccctatgtcttaaagagctgcgcagagtttattgagacacatggaattgtggacggaatctaccggctgagtggagtgaccagtaatatccaaagacttaggcaggaattcggaagtgaccagtgccccgatctgaccagagaggtatacttacaggacattcactgcgtgggctccctgtgcaagctctatttccgcgaactgcccaaccctctgctgacgtacgaactctacgagaagttcacggaagctgtctctcactgccctgaggagggacagttggcgcgcatacagaatgtgattcaggagttaccacctagtcattaccggacgcttgaatacctgatcaggcaccttgcacatattgcaagtttttcaagcaaaacaaatatgcacgccaggaatttagcactcgtctgggcccccaatctacttaggtctaaagagatagaggctaccgggtgcaatggagatgcagcctttcttgccgttagagtccagcaggtggtaatcgaatttatccttaatcacgtggaccaaatttttaacaatggcgctccggggagtctggagaatgacgaaaataggccaattatgaaatcccttacactgcccgccctgtccttgcccatgaaattagtctctctggaagaagcccaggcccggtccctggccaccaatcatcctgcacgcaaggagaggagagagaactcactgccagaaatcgtcccccctatgggcacgctcttccacaccgtgctcgagctgcccgacaataagagaaagctgagctcgaaaagcaagaagtggaaaagcattttcaatttaggccgctccggaagcgatagcaaatccaaactgagccggaacggctccgtgttcgtgaggggtcagcgcctgagcgtggaaaaagcgacaatacgccctgcaaaatccatggatagtctctgctctgttcccgtggagggcaaggagactaaagggaatttcaatcgtaccgtgaccacaggggggtttttcattccagcgaccaaaatgcactccactgggaccggcagctcttgtgatctgactaaacaggagggtgaatgggggcaggagggcatgccacccggagccgagggaggctttgacgtgtcctccgaccgatcccacctgcagggtgctcaggcgcggccccctcctgagcagctcaaagtattccgacccgttgaggatccagaatccgagcagactgccccaaaaatgttgggaatgttttacacctctaatgatagcccatctaaaagtgtcttcacgagcagcctctttcaaatggaacccagtcctcggaaccagcggaaggcacttaacatatcagaaccttttgctgtgtcggtgcccttgcgggtcagcgcggttatctctacgaacagtacaccttgcagaactcctcccaaagaactgcagtcactgagctccctggaggagtttagctttcacggatcagaatctggcggctggcctgaggaggaaaagccactgggcgccgagacgagcgcagcctccgtgcccaagaaagccgggctggaggatgccaaggcagtgcccgaagctccaggcacggtggagtgcagtaaggggctctcccaggagcctggagcgcatcttgaagagaaaaagacccccgaaagtagtttaagctcgcagcacctgaatgagctggaaaaaagacctaaccccgagaaagtggtggaggaaggcagagaagccggagagatggaaagttccactctccaggagtcccctagagcgcgcgccgaagctgtgctgttgcacgaaatggacgaggacgatctggccaatgctctgatttggccggagatccaacaggagctaaagattattgaatctgaagaagagctcagttcacttccaccgcccgccctgaagacatcccccatccagccaatccttgagtccagtctgggcccatttattcctagcgagccccctggcagcctgccatgcgggtcattccctgccccagtgagtacccccctcgaggtgtggacacgggatcctgccaatcaatccactcagggagcatcaactgccgcctctcgcgagaaacccgaacccgagcagggccttcacccagacctggctagtttggcccctctagaaatcgtgccattcgaaaaggcaagtccccaggccacagtggaggtagggggtcctggtaacttatcaccacctctcccccccgccccaccacctcctaccccacttgaagaatccacccctgtgctgctgagtaaaggaggaccagaaagggaagactcgagccgcaagcttagaaccgacctttacatcgaccaactcaagtcccaggattctccagagatttcctccttgtgtcagggcgaagaagcaaccccgcgacacagtgacaaacaaaacagcaagaatgccgcttccgaggggaagggatgtggtttcccttccccgacccgcgaggtggaaatcgtgtcccaagaggaggaagatgtgacgcattccgtacaggagccatcagactgcgatgaggatgacacagtgacggatatcgcccaacatggactggaaatggtggagccctgggaggaaccacaatgggtaacgagccctctgcacagtcccacattgaaagacgcccataaagcccaggttcagggactccaagggcaccaactagagaaacggctgagccaccggcctagcctccgccagtctcattccctggacagcaagcctacagttaaatcccaatggaccctcgaagtgccttcatctagcagttgcgctaacctcgaaaccgaaagaaattccgaccccctgcaacctcaagcaccaagacgggaaatcactgggtgggacgaaaaagctctgaggagttttagagaattcagtgggctgaagggggccgaggcgccaccaaaccagaaaggacctagtggagtccagcctaatccagcagagaccagccccatctccttagccgaggggaaggagctcgggacgcatctcggccacagttctccgcagatcaggcaagggggagtcccagggcccgagagcagtaaggagtccagcccctcagtccaggattccaccagtccgggggagcacccagccaagctgcaattaaaaagtaccgaatgtggaccccctaaagggaagaaccggccctcttctctcaatctggaccctgctattccaatcgcagacttattttggtttgaaaatgtagcctctttcagcagtcccggcatgcaggtgtcagagccaggtgacccaaaagtgacctggatgacctccagctattgtaaggcagacccgtggagggtctatagccaggacccacaggatcttgatatcgtggcgcacgccctgacgggaagaaggaactcggcaccagtgtcagtttccgcagtgagaacgagtttcatggtgaagatgtgccaggcccgcgcagtaccagtcattcccccgaaaattcagtatacccagatcccccagccactgccttctcagagctccggagagaacggcgtgcagcctttggaacgttctcaggaaggtccaagctctacatccggcacgactcagaagcccgccaaagatgattccccgtcatctctcgagagctccaaggaagaaaaacccaaacaggacccaggcgccatcaaatccagcccagtagacgctaccgccccctgcatgtgtgaggggccgaccctctccccggagcctggttcttctaacctgctgagcacccaagacgctgtggtccagtgtcgcaagaggatgtccgagacagagcctagcggagacaatctcttgagctcaaagctggaacgcccatccggaggaagtaagccgttccataggagccgccccggacgacctcagtcactgatcctcttttcacccccatttcctataatggaccatcttccacccagcagcacggtgacagattctaaagtgctgctcagcccaatcagatctccgacacagaccgtgtcccctggtctgttgtgcggcgagctcgctgagaatacttgggtaactccagaaggcgtcaccctgcgtaataaaatgacaattcctaaaaatggccagagactggagacatcaaccagttgtttctaccagcctcagcggcggtcagtgatcctcgatgggcgctccggtaggcaaatcgaatag

SEQ ID NO: 132543 - DNA, 3300 bp, synthetic construct
  misc_feature 1..3300: note = Description of Artificial Sequence: Synthetic coding sequence
  source 1..3300: mol_type = other DNA
atgaaaaacaaaggagccaaacagaaacttaaacgaaagggggcagcctcggcctttggctgtgatctgaccgagtatcttgaaagttccgggcaggatgtcccctacgttctcaagtcctgtgccgagtttatcgaaacgcacggcattgtcgatggaatttaccgcttgtccggagtcacgagtaacatacagaggctacgacaggagttcggatcggatcagtgcccagatttgacaagggaggtgtacctacaggacattcactgcgtaggcagcctgtgtaagctatacttcagggagctgccaaacccgctcctcacttacgaactgtacgagaagttcaccgaggccgtctcacactgcccagaagagggtcagctggcacggatacaaaatgtgattcaggagttgcctccctcacactaccgaaccctagagtatctaatacgacacttggcacacattgcaagctttagctcgaaaacaaatatgcatgctaggaacctggccctggtgtgggccccaaaccttttaagaagcaaagaaattgaagccacaggatgtaatggcgatgccgcatttctcgccgtgagggtccaacaagtggttattgaattcatcttgaatcacgtggatcagattttcaacaacggtgcccccggctcattagagaatgatgaaaatcgtcctatcatgaaatccctcacactcccggctttatctctgcctatgaagctggttagcctggaggaggcccaggctagaagtctggctaccaaccaccctgccaggaaggaaagacgagaaaactccctgccagaaattgtgccgcccatgggcactttgttccataccgtcctggaactccctgataataaaagaaaactctcatcgaagtcaaaaaagtggaagtcaatttttaatctaggtcgttcaggcagcgatagcaagtcgaagctaagcaggaatgggagtgtattcgtcagggggcagagactgagcgttgagaaagctacaatccggcccgccaagtcgatggactctctctgctctgtgcccgtcgaggggaaggaaacgaaggggaattttaacaggaccgtgaccacagggggtttctttatccctgcaacaaaaatgcattccaccggaaccgggagctcatgcgacctgacgaaacaagagggcgaatggggccaggaaggaatgccgcccggcgctgagggaggattcgatgtgagctcagacaggtcccacttgcagggcgcccaagcccgccccccgccggagcagcttaaggtgtttagacccgtagaagatccagagagtgaacagacggcacccaagatgctgggcatgttttatacttctaatgactccccatcaaaatccgtctttacttcctcactctttcaaatggagcctagtcctaggaaccagcgaaaagcgttgaacattagtgagccatttgctgtgtcagtgccgctgcgggtttcagcagtgatatccactaactccactccgtgccgtacaccccccaaggaattgcaatctctctcctccttagaggaatttagtttccacggaagtgaaagcggcgggtggccggaggaagagaagccactgggggctgagaccagtgccgccagcgttccaaaaaaggccggcctggaggacgcaaaagctgtgcccgaggctccagggaccgtcgaatgctctaaggggctttctcaagagccgggtgcccacctggaagagaaaaagacccctgagtcatcactcagctcacagcaccttaacgagttagaaaaacgccctaatccagaaaaagtggtcgaggaaggaagagaggcaggggaaatggagagtagcacactccaggagagccccagggcaagggccgaggctgtgctgcttcatgaaatggatgaagacgacctggccaacgccctgatctggcctgagattcagcaggaactaaagatcatagagtctgaagaggagctctctagtctaccaccacctgctctgaagacctcacccatccagccaatactggagagcagtcttggcccattcattccatctgagccacccggttccctgccttgcgggtcttttcctgccccggtatcaacgcccctggaggtttggacgagagacccggcgaatcagagcacccagggcgcgagcacagcagccagtagggagaaacccgaaccagagcaggggctccaccccgacttagcctctttggctccgctggagattgtgccattcgagaaggcctcccctcaggccaccgttgaggtcggtggtcctgggaacctctcgcccccgctccccccagctccaccacctcctacccccctggaggagagtacccccgtactgctgagtaagggcggccccgagcgggaagatagtagccggaagctgcgcaccgacctctatattgatcagcttaaaagccaggactccccggaaatttcttctctctgtcagggggaagaagctactcccaggcattccgataaacagaattctaagaatgccgctagcgaggggaagggctgcggattcccgagccctacgcgggaggtcgaaattgtgtcccaagaagaagaagatgtgacacattccgtccaggaacctagcgactgcgatgaagatgacacagttaccgacatcgcacaacatggacttgaaatggtcgagccctgggaagagccccaatgggtcaccagtccactgcacagccctaccctaaaggatgctcataaagcccaggtgcaggggttgcagggacatcagcttgagaaaagactttctcacaggcccagtctgaggcagagtcacagccttgattcaaagccgacagttaagtcccagtggacgttggaggtccccagcagttcctcctgcgccaacttggagacagaacggaacagtgaccctctgcagccccaagctccgagaagagagattactggatgggatgaaaaagcattgagaagtttcagggagttttccgggctcaagggggcagaggcccccccaaaccagaagggacctagcggggtccagcctaatcccgctcagcccgtaggcccattacgaaatctgcccaagatgatcctccccccgccatggaaggcccagagaaaaaaaaaccagtccaagattcctgagcctttgtcaccacaccagtggatgccgctccaccccgcttgtgctagagatctgccgttcttacagaatcaggcaaggctgacatgctcccccccccggatgcagtag

SEQ ID NO: 132544 - DNA, 4509 bp, synthetic construct
  misc_feature 1..4509: note = Description of Artificial Sequence: Synthetic coding sequence
  source 1..4509: mol_type = other DNA
atgatggcaaaaaataaggaaccgaggccccccagctacaccatctccattgtgggtttgtccggaactgagaaagataaagggaactgtggagtaggcaaatcttgcctctgcaaccgctttgtgcgctctaaagcagatgagtactacccggaacacacgtcagtgctttcaacgatagacttcgggggacgtgtcgttaataacgaccatttcttatattggggcgatatcatccagaactctgaggacggcgtggaatgcaagatccacgtgatcgagcagacagagttcatcgatgatcagacttttctgcctcatagaagcacaaacctccagccttatataaaacgcgccgccgccagtaaacttcaaagtgccgaaaaacttatgtatatctgcacagatcagctgggcctggaacaagacttcgagcagaaacagatgccggagggcaagctcaacgtggacggctttcttttgtgtatagatgtatcacagggttgtaaccgaaagtttgatgaccagctgaagtttgtaaataatctcttcgtccaactgagcaagtccaagaagcctgtgattattgcagctactaagtgtgacgagtgtgttgatcactatctacgggaggtacaggcatttgcgagcaataagaagaacctgctcgtggtggaaactagcgcccgattcaacgtcaatatcgagacgtgctttacggccctggtccaaatgcttgacaagacccgctctaagccaaagattatcccgtacctagatgcttacaaaacccagaggcagctagtggttactgccactgacaagttcgagaagctggttcaaaccgtgagggattatcatgctacttggaagacagtctctaataagttgaaaaaccatccagactatgaggagtacattaacctggagggcacgcgcaaggctaggaatacctttagcaaacatattgagcagctgaagcaagaacatatcaggaaacgcagagaagaatacataaataccctccctagggcttttaacactcttttaccaaaccttgaggaaattgagcatcttaactggagcgaggctctgaagctaatggagaaacgcgcagattttcagctctgtttcgtggtgcttgaaaagactccatgggacgagacagatcacatcgataagattaacgatagacgaatccctttcgacctcctcagtaccttagaggccgagaaagtttatcagaatcacgtgcagcaccttattagcgagaagcgaagggtggaaatgaaagaaaaattcaagaaaacgttagagaagatccagtttataagtcctgggcagccttgggaagaggtgatgtgctttgtgatggaagatgaagcctataagtacatcactgaggccgactccaaagaagtctacggccgccaccagagagagatagttgaaaaggctaaggaggagttccaggaaatgctctttgagcactctgagctgttctatgatctggatctcaatgctaccccatccagcgataagatgtccgagatccacactgttctctccgaggagccgaggtataaagccctgcaaaaactcgctcctgatcgggagagtctgttattgaagcatatcggtttcgtttatcacccaaccaaagagacatgcttgtccggccaaaattgtacagatattaaggtcgagcagcttctggcctcttcactcctgcaactggaccacggcagacttaggctataccacgacagcacgaatatagacaaagtgaatctgttcatcttaggcaaggacggcctggcacaggaattggcaaacgaaattcggactcaaagcaccgatgacgagtatgccctcgacggcaaaatctacgagctcgacctgaggcctgtggatgccaaatcaccctactttctgtcccaactttggaccgcggcatttaaaccacacgggtgcttttgtgtatttaactctatcgaaagcctgagtttcatcggagagttcatcggcaagatcaggactgaagcttcgcaaatccggaaagacaaatacatggctaacctaccctttacgctgatcttagcaaaccaacgggattctatctccaaaaacctgcccatactacgccaccaaggtcagcaactagccaataagcttcaatgtcccttcgtcgatgtgcctgcaggtacatatccacgaaaatttaacgagactcaaataaaacaggctctgcggggagtgctcgagtctgtgaagcataacttggatgtggtgtcgcccattcccgccaataaagaccttagtgaagccgaccttcggattgtcatgtgtgccatgtgtggagaccctttcagtgtggacctgattctgtccccattcctggactcccacagctgctccgcagcccaggccgggcagaacaatagcttaatgctcgacaagatcataggagagaaacggcggagaatacaaatcaccatcttgtcctaccattcttccataggcgttcgaaaggacgagttagtgcatggttatatactggtctacagtgccaagcggaaggcctccatgggcatgctgcgggccttcttgtccgaagtgcaggacactatccccgttcagctcgtggctgttacagattcgcaggctgacttttttgagaatgaagccataaaagaactgatgacagagggtgagcacatcgccacggagatcacagccaagtttactgctctttactccctatcgcagtaccacaggcaaacggaggtattcacattgtttttttctgacgtgctagaaaaaaaaaatatgatcgaaaactcctacctctccgacaacacacgcgaatcaactcatcagtccgaggatgtgttcctgcccagccctcgggattgcttcccatacaacaattaccctgattccgacgatgatactgaggcgcctcccccatatagcccaataggcgacgatgtgcagttgctacctaccccctccgatcgaagtcggtatagattagacctggaaggcaatgaatatcctattcatagtacgcctaactgtcacgatcatgaaaggaaccacaaagttcctccccccatcaaaccaaaaccagttgttcctaagactaatgtgaaaaagcttgatcccaatctgctgaaaaccatcgaggccgggattggaaagaatcccaggaagcagacctcacgggtgcccctggctcaccccgaagacatggaccctagcgataattatgccgagcctattgataccatttttaagcagaagggctacagcgacgaaatatatgtggtgcctgacgactctcagaacaggattaaaattcgaaattcattcgttaataacacacaaggagatgaggagaacgggttctcagaccggacttcaaaatctcacggtgagaggcgtccgtcgaagtataagtataaaagcaaaactttgttttccaaagctaagtcctactatcgaagaacccactcagacgcgtctgacgatgaagccttcaccaccagtaagaccaagcgaaaggggcgccatcgaggtagtgaggaagatcctttgctgtcccccgttgagacatggaagggtggcattgataacccagccatcacctctgaccaagagctggacgacaagaagatgaaaaagaaaacccataaggtgaaagaagacaaaaagcagaaaaagaagaccaagaacttcaacccccctaccagacggaattgggaatctaattactttgggatgccgctccaggatctggtaaccgctgaaaagccaatcccactttttgtggaaaagtgcgtggaattcatcgaagacacggggctgtgcacagaggggctctatcgggtcagtggcaacaaaacagatcaggacaacattcaaaagcagttcgatcaggaccacaatatcaatctggtctcaatggaggtgacggtcaacgctgtggcaggcgccctcaaggcgttctttgccgacctgcccgacccattgattccttacagtctgcatccagaacttctggaggctgcaaagatcccggacaagacagagcggctccatgccctcaaggaaattgttaaaaaatttcaccccgtgaactatgatgttttccgttacgtgatcacacacctcaaccgagtttctcagcagcacaaaataaatctaatgacagctgacaatcttagcatctgcttttggcccactctcatgcgaccggatttcgagaaccgggaatttctcagtaccaccaagatccatcaaagtgtggttgaaacattcattcagcagtgtcagttcttcttctataacggcgagatcgtcgaaacaactaacatcgtcgctccgccccctccgtccaatcccgggcaactggtggaaccaatggtgcctctgcaactgccacccccactgcagccacagctcattcaaccacagttgcagaccgacccactgggcattatctag

SEQ ID NO: 132545 - DNA, 714 bp, synthetic construct
  misc_feature 1..714: note = Description of Artificial Sequence: Synthetic coding sequence
  source 1..714: mol_type = other DNA
atgtccctcccaccaccccctcctggcccactgcctctcagacgtaggaggcgccgcccaacccttctagggctttgtaccgaaggactgtacagggttagtggcaacaagaccgaccaggacaacatccagaaacagttcgaccaagaccataacattaacttggtatctatggaggtcactgtgaacgcagtggccggagcacttaaagcctttttcgcagacctgccagatccgttgattccgtatagtcttcacccagaactgttggaagccgcaaaaatcccggacaagacagagcggttacacgctctgaaggagatcgttaagaaattccaccccgttaactatgatgtgttccgatacgttattacccacctgaaccgagtgtcccaacagcacaagatcaatttgatgaccgcggataatttatcaatatgcttttggcctaccctgatgaggcctgactttgagaacagagaatttctgtcaactacaaagatccaccagtcagttgttgagactttcatccaacagtgtcagttcttcttttataatggcgaaattgtggaaacaaccaacattgtggcaccaccacctccgagtaatcccggccagctcgtcgagcccatggtgcccctgcagctgcctcccccgctccaaccacagttgattcagccgcaactgcagaccgatccactgggcatcatctag

SEQ ID NO: 132546 - DNA, 4506 bp, synthetic construct
  misc_feature 1..4506: note = Description of Artificial Sequence: Synthetic coding sequence
  source 1..4506: mol_type = other DNA
atgatggctaagaataaagaaccacggccacctagttataccatcagcatcgtaggactatcggggaccgagaaagacaaagggaattgtggggtgggaaaatcctgcctctgtaatcgctttgtgcgttcgaaagcagatgagtactatccagagcacaccagtgtgctctccactatagattttggaggtagagtggtcaataacgaccactttctatattggggggacattatccagaactctgaagatggggttgaatgtaagattcatgtgatcgaacagactgaatttatagatgatcagacattcctccctcacagatcaacaaacctccagccctatatcaaacgcgctgcagcgagtaagctgcaatctgcagagaaactgatgtatatttgtacggatcagctgggactggagcaggatttcgagcagaagcagatgcccgagggcaagctgaatgtggacggattcctgctgtgcattgatgtgtcacagggatgtaacagaaaattcgacgaccagctcaagttcgtcaacaatcttttcgtccagctgagcaaatccaagaagccggttattatagccgcaaccaagtgtgacgaatgcgtcgaccactatctccgcgaagtacaggcattcgctagtaataagaaaaacctgctggtggtggagacctcagccagattcaatgtgaacatcgaaacttgctttacagcgctggtgcagatgctggataagactcgttccaagccaaagataatcccttatctggacgcatacaaaacgcaacggcagctggtcgttacagcgactgataaattcgagaaactcgtccaaaccgtgagagactaccacgcaacttggaaaactgtctccaataagctgaaaaatcaccctgactatgaggagtatattaatctggagggtacacgtaaggccaggaacacattctccaagcacattgagcagctcaaacaggagcacatccgtaagcggagagaggagtacataaatacgctccccagggccttcaatacgctacttccaaacttagaggaaatcgaacatctaaattggtctgaagccttgaagctgatggagaagcgcgccgatttccagctatgttttgtggtactcgaaaaaaccccttgggacgaaaccgatcacatcgataagatcaatgatcgccgtatccccttcgacctgctatccacccttgaagcagagaaggtgtaccagaatcatgtgcagcacctgatctccgagaagcggcgtgtggagatgaaagagaagttcaaaaaaacgttggaaaaaatacaattcataagccctggacagccctgggaggaggttatgtgctttgttatggaggacgaagcctacaagtatatcaccgaggccgattctaaagaggtgtacggaagacaccaacgggagattgtggaaaaggcaaaggaggagttccaggaaatgctttttgaacactcggagctgttctatgacctggacctcaatgctacacccagctctgacaaaatgagcgaaatacacacggtcctatccgaagagcctcgctacaaagccctccaaaagctggcgcccgacagggagtcccttcttttaaagcacattggcttcgtataccaccctactaaggaaacttgcctgtccggacagaactgcaccgatattaaggtcgaacaactgttagctagctctctactgcaactcgaccacggtcggcttcgcctatatcacgattcgacaaacattgataaagtgaacctctttattctagggaaagacggcctggctcaagagctggctaatgaaattcgcacacaaagcaccgacgacgagtacgcccttgacgggaagatctatgaacttgacttgagacccgtcgatgctaagagcccttatttcctgtctcagttatggactgcggcattcaagcctcacggctgcttctgcgtgttcaactccatagagtctctctcattcattggggagtttattggaaaaatcagaacagaggcctctcagatacgcaaggacaagtacatggccaacctcccatttactctgattctggctaaccagagggatagcattagtaagaacctgccaatattaagacaccaaggtcagcagctggccaataaactgcaatgccctttcgtggacgtccccgccggcacctatccccggaaattcaacgagacccaaattaagcaggctttgcgcggagtgcttgaaagcgtgaagcataatctggacgtggtgagccctatcccagccaacaaagatctctctgaggcagatttgcgcattgtgatgtgcgctatgtgtggcgacccattttccgtggacctcattctgtcccctttcttagacagccactcctgctccgcggctcaggccggacagaacaactccctgatgctggataagatcatcggggagaaacgacgccggattcaaatcacgatcctgagttaccacagctccattggtgtgcgcaaagatgaacttgtacatggctacatcctggtctattcggccaagcggaaagcttccatgggaatgctgcgggcctttctgtctgaagtgcaggatacgatcccagtgcagttggttgcggttaccgatagtcaggccgatttctttgagaatgaggccatcaaggagctgatgactgagggcgagcacattgccaccgagattacagccaaattcacagccctctacagcctctcgcagtaccacagacagacagaagtgttcaccctgttcttctcagacgtgctagagaagaaaaacatgatcgagaatagctacttgtctgataacacacgtgagtctacgcaccagagcgaggatgtgtttctgccgtcaccacgtgactgcttcccgtacaataattatccggacagtgacgatgataccgaagctcctccaccatactctccaatcggggacgacgtgcaactgttgccaacacccagcgacaggtcccgatatcggttggacctcgagggcaacgagtaccctatccactccacccctaactgccatgatcacgagcgaaatcataaagtcccccctcccatcaaacccaagcctgtcgtcccaaagaccaatgtgaaaaagctcgacccgaacctcctcaaaaccatagaagccggcatcgggaagaaccctcgaaagcagacaagtcgtgtccccctggcccatcccgaggacatggacccaagcgacaactacgccgagccaatcgatacaattttcaagcagaagggttactccgacgagatctatgtagttcccgacgactctcagaacaggatcaagatccggaacagcttcgtcaataatacacagggggacgaggagaacggcttcagcgaccgcacttccaaatcccacggcgagaggcgcccttcaaagtacaagtacaagagtaaaaccctgttctccaaggccaagtcttattatagacgaacgcatagtgatgcatctgacgacgaagcctttaccacatctaaaaccaagcgcaaagggcggcataggggcagtgaggaggatccactcttgagcccagtagagacctggaagggcggaatcgataaccctgctattacatccgatcaggagctggatgataagaagatgaagaagaagactcacaaggttaaagaagataagaaaaaaaagaaaaccaaaaatttcaaccctcctaccagacggaattgggaatcgaactattttggcatgcctctccaagacttagttaccgctgagaaaccaattcctttattcgtggagaaatgtgtcgaattcatcgaagataccgggctgtgcacggaggggctctaccgagtgagcggcaacaagacagaccaggataacattcagaagcagttcgatcaggatcataatattaaccttgtgtctatggaagtgactgtgaacgccgtggccggggccctgaaggctttttttgctgatcttcccgatcctctgataccatacagcctccatcctgaactgctggaggccgctaagatccctgataagacagagcgccttcatgcacttaaagagattgtcaaaaagtttcatcccgtgaactacgacgtgtttcgttacgtgatcacacacctgaaccgggtctcacagcagcacaagattaatctgatgactgcggataacctcagtatttgcttttggcccactctcatgcgtccggacttcgaaaatcgggagtttcttagtaccactaaaatccaccagtctgtggtggaaacattcattcaacaatgtcaattttttttttataatggcgagatcgtggagacaacgaatattgtggcacctccgccaccatccaatccaggacagcttgtcgagccaatggtgccactgcagctgcccccgcccctgcagccccagctgatccaaccccagttgcaaactgaccccctcggtatcatttag

SEQ ID NO: 132547 - DNA, 726 bp, synthetic construct
  misc_feature 1..726: note = Description of Artificial Sequence: Synthetic coding sequence
  source 1..726: mol_type = other DNA
atgccactgcaagacctggtcacagccgagaagccaatccccctgttcgtggaaaagtgcgtcgagttcatcgaagatacaggcctttgcacggagggcctttaccgggtgtcagggaacaagactgatcaggataatatccagaagcagttcgaccaagatcacaatattaatctagtttctatggaggttaccgttaacgccgtcgccggcgcactgaaagcgttcttcgccgacctccctgatccgctgataccgtacagcctgcacccagagctcttggaggccgccaagatccctgacaagaccgagcgcctccacgcgctgaaagaaatcgtcaaaaagtttcaccctgtcaactatgacgtttttagatacgtgatcactcatttgaacagagtttctcagcagcacaagataaacctaatgaccgccgataacctatccatttgtttctggccaaccctgatgcggcccgactttgaaaaccgggaatttctgtcaaccacaaagatccatcagagcgtggtcgaaacattcattcagcaatgccagttcttcttttacaacggagagattgtggaaaccactaatatcgtcgcacccccccccccatctaaccccggccagctggtagaaccgatggtaccgcttcaattgccacccccccttcagccccagctcatccagccacagcttcaaaccgaccccctcggcatcatctag

SEQ ID NO: 132548 - DNA, 4509 bp, synthetic construct
  misc_feature 1..4509: note = Description of Artificial Sequence: Synthetic coding sequence
  source 1..4509: mol_type = other DNA
atgatggccaaaaacaaggaacctcggcccccatcctacacaatttccatcgtcggactgtcaggaactgaaaaagacaagggcaattgtggggttggaaagtcttgcctgtgcaaccgatttgtgagatcgaaagccgacgaatactaccctgagcacacatctgttttgtcaactattgacttcggtggcagagtggtgaacaatgaccacttcctttattggggcgacataatacagaatagcgaggatggggtcgaatgtaagatacatgtcatagaacagacggaattcattgatgaccagacttttctccctcatcgttcgacaaacttacaaccatacataaagcgggctgccgccagcaaacttcaaagtgccgagaaattgatgtatatctgcaccgaccagttaggccttgagcaagattttgaacaaaaacagatgcccgaaggcaagctcaatgttgatggattcctgctctgtattgacgtgagccaaggctgcaatcgcaaattcgacgaccagttgaagtttgtgaacaacctgttcgtccagctgtctaagtccaaaaagcctgtcattatagccgctacaaagtgtgacgaatgtgttgatcactatctgagggaagtgcaggcctttgctagtaataaaaaaaacttgctggtggtcgaaaccagtgctcgtttcaatgtgaacatcgaaacctgcttcacagccctggtgcagatgctcgacaagacacgctccaagcctaagatcataccctacctcgacgcgtataaaacccagagacagcttgtagtgacagctacagataagttcgaaaagcttgtacagactgttcgtgactatcacgcgacatggaagacggttagtaataagcttaagaatcatcccgattatgaagaatacatcaacctggaggggacaaggaaggcgaggaatacattttccaaacacatcgaacagctcaagcaggagcatatacggaaacgccgcgaagaatatatcaacacactaccaagggctttcaatacacttctgcctaatctggaagaaatagaacatctcaactggagtgaagcactgaagttaatggagaagcgggccgacttccaactgtgctttgtggtcctggagaaaactccctgggacgagactgatcatatcgacaagatcaacgatcgccgaattccgttcgatcttcttagcacactcgaggccgaaaaagtgtatcagaaccacgtccagcatctaatcagcgagaagaggcgcgtggaaatgaaagaaaagttcaaaaaaaccctggaaaaaattcagttcatctcaccaggtcagccttgggaagaagtcatgtgctttgttatggaggatgaagcttataagtacattacggaggcagattcaaaggaggtctacgggagacatcagcgggagatcgttgagaaagccaaggaggagtttcaggagatgctctttgagcactcagagctgttctacgacctagatcttaatgcgactccaagcagcgataaaatgagcgagatccacactgtgttgtccgaagaaccccgttacaaagccctccagaaacttgcaccggaccgtgagtcgcttctattaaagcacatcggcttcgtttatcacccaacaaaggaaacatgtcttagcgggcagaattgcacagatattaaagtggaacagctgctggcctcctcccttctgcaattggaccatggccggctaagactctaccatgactccaccaacatcgacaaggtgaatctgttcattctgggcaaagatggtctagctcaggaactagccaacgaaatacgaacacagtccactgacgatgagtacgctctggacggaaagatctatgagctggacctgagacctgtggacgcaaagtctccctattttctgtctcaactatggaccgccgcgtttaaaccccacggatgcttttgcgtcttcaattccatcgaaagcctcagtttcatcggcgagttcattggtaagatccggactgaggcatcacagatccgaaaggacaaatatatggccaacctaccgttcactctcatcctcgctaaccagcgggattcaatatcgaagaacctgcccatcctaagacaccagggtcagcagctggccaacaagcttcagtgccccttcgtcgacgtcccggctggaacatacccgcgtaaatttaatgagactcagattaagcaagccctgcggggcgttctagaaagtgtgaaacataatctcgatgtggtgtcccctatccccgcaaacaaagatctgagcgaagccgacctgcggattgtgatgtgtgccatgtgcggcgatccattctccgtcgacctcatccttagccctttcctggattcccactcatgttccgctgcccaggcgggccagaacaactcacttatgctggacaaaattatcggggagaagaggagacggattcaaattacaatcctgagctatcatagctccatcggggtgcgtaaagatgagctcgtgcacgggtatatcctagtatactcagcaaagcgaaaggccagtatgggcatgctacgcgcctttctgtctgaggtacaagacacaattccagtacagctggtggccgtcactgactcccaagctgacttcttcgagaacgaagctattaaggagttgatgaccgaaggcgaacatattgcaaccgagatcaccgccaagtttacagccctctattctcttagccaataccacagacaaacagaggtctttaccctgttcttcagcgacgtcctggagaaaaaaaatatgatcgaaaactcatacctaagcgataatactcgcgagtctacgcaccagagcgaagatgtgtttctcccctcaccacgcgactgcttcccttacaataattaccccgactcagatgatgataccgaggctcctcctccatactctcccattggggacgacgtgcagttgctgccgaccccatcagacaggtcccgctatcggcttgacctggaaggaaatgaatatcctatccattcaactcccaattgccatgatcatgagagaaatcataaggtgcccccccctattaaacccaaaccagtggtaccgaagactaatgtgaagaagctagaccccaacctgctgaagacaattgaagccggtattggaaagaatccccgtaaacagactagtcgcgtgcccttagcccatcccgaggacatggatccatccgataattacgcggagcctatagatacgatttttaaacagaaagggtactccgacgagatttacgtcgtgcctgatgactcccagaatcgcattaagattagaaactcatttgtcaataatacacaaggcgacgaggagaatggctttagtgacagaaccagtaaatcccatggcgagagaaggccttcaaaatataagtacaagagtaaaaccttgttttccaaagccaaatcatactacagaagaacgcatagcgacgcaagcgatgacgaggctttcacaacatctaagactaagcggaaaggtagacatcgcggttccgaggaggatccactgctgtctcccgtggagacttggaaaggcggtatcgataatccagcaattacctcggatcaggagttagatgacaagaagatgaagaaaaaaacgcataaggttaaagaagataagaaacaaaaaaagaagactaagaactttaatccccccacccggagaaactgggaaagtaactattttggtatgcccctgcaggacctggtgaccgctgaaaaacctattccccttttcgtggagaagtgcgtcgagttcattgaagataccgggctatgcacagaaggattgtaccgggtgtcaggcaataagacggatcaggacaatatccagaaacaattcgatcaggatcacaacattaacctggtgagtatggaggtaaccgtaaacgcggtggcaggcgcattgaaggcatttttcgcggacctgcctgaccctttgatcccttacagcctgcacccggagctgctcgaagccgctaagatcccagataaaacagaaaggttgcatgccctgaaggagatcgtgaagaagtttcaccctgtaaattacgatgtctttcggtatgtaattacccatcttaacagagtgtcacagcagcacaagatcaatcttatgacagccgacaatctctcaatttgtttctggcctaccctcatgaggcctgatttcgaaaatcgagagttcctgtcgaccacaaaaatccaccagtccgtggtcgagaccttcatccagcagtgtcaatttttcttctacaacggggaaattgtggaaacaactaacatagttgccccaccccccccaagcaatccaggacaattggtagaaccaatggtgccccttcaactcccgcctcctctgcaaccgcagctaattcagccccagctacagacagacccgcttggcatcatatag

SEQ ID NO: 132549 - DNA, 414 bp, synthetic construct
  misc_feature 1..414: note = Description of Artificial Sequence: Synthetic coding sequence
  source 1..414: mol_type = other DNA
atgccactccaggatctcgtgacagctgaaaagcctatcccactctttgtggaaaaatgtgtggagtttattgaggatactggactgtgcacggaaggattgtaccgtgtttcggggaataagaccgaccaggacaacattcagaaacagttcgaccaggatcacaacattaatttggtttctatggaggtcacagtcaacgctgtggctggggccttgaaggctttttttgcagatctcccggaccccctgattccctactcgctgcatcctgagctcctcgaggccgctaagatccctgataagaccgagcgcttgcacgccctgaaggagatcgtgaaaaagttccacccggtaaattatgacgtgttccgttacgtgatcacccacctgaatcgtgtgtctcagcagtag

SEQ ID NO: 132550 - DNA, 114 bp, synthetic construct
  misc_feature 1..114: note = Description of Artificial Sequence: Synthetic coding sequence
  source 1..114: mol_type = other DNA
atgatggcgaagaacaaggaacccaggccgccatcctatacaattagtattgtggggcttagcggaacagagaaggacaagggaaattgtggcgtggggaagagctgtctatag

SEQ ID NO: 132551 - DNA, 423 bp, synthetic construct
  misc_feature 1..423: note = Description of Artificial Sequence: Synthetic coding sequence
  source 1..423: mol_type = other DNA
atgatggccaaaaataaggagccacggccacccagttacaccatcagcattgtcgggttgtccgggacggagaaagacaagggaaattgtggagtgggaaaaagctgcttgtgcaaccgattcgtgcggtccaaggcagacgagtattaccccgaacacactagtgtgctcagtactatagatttcggtggcagagtggttaacaacgaccatttcctgtactggggggacataattcagaacagtgaggacggtgtggagtgcaaaattcatgtgattgagcagacggagttcattgatgatcagaccttcttaccccatagaagtaccaacttgcagccttacataaagcgagccgctgccagtaagctgcaaagcgccgagaagctgatgtacatctgcaccgaccagctaggtttgtag

SEQ ID NO: 132552 - DNA, 4506 bp, synthetic construct
  misc_feature 1..4506: note = Description of Artificial Sequence: Synthetic coding sequence
  source 1..4506: mol_type = other DNA
atgatggccaagaataaggaaccacgaccaccctcctatactatcagtattgtcggcctgagcggcaccgagaaggacaaggggaattgcggggtggggaagagctgtctttgcaataggtttgtgagatctaaagctgatgagtattacccagaacatacatcagtcctctctacaattgatttcggtggtagagttgtgaacaatgatcattttctgtactggggcgacatcatacaaaactctgaagatggagttgagtgcaaaatccacgtgatcgagcagacggagtttattgatgaccagacattcttgccacacagatccaccaatctgcaaccatatatcaagcgcgccgccgcatccaaattacagtctgcagaaaaactgatgtatatctgcaccgaccagctgggcctggagcaggatttcgagcaaaaacaaatgcccgaggggaagctgaatgtagacggtttcctgctgtgcatagatgtctcacagggttgtaataggaaatttgacgaccagctgaaatttgttaacaatctctttgtacaactgagcaagagcaaaaaacccgtcataattgcggccactaaatgtgacgagtgtgttgaccactatctaagagaggtccaggcatttgcctctaataagaaaaatttgctggttgtggaaaccagcgcacgttttaatgtcaacatagaaacatgcttcactgctctcgttcaaatgctggacaaaacccggagcaagccaaaaattatcccatatctagatgcatacaagacacagcgtcagctggtcgtcaccgctaccgacaagttcgagaagctcgtgcagacggtgagggactatcatgcgacctggaagactgtaagtaataagctgaaaaatcaccccgactacgaagaatatattaacctggaagggaccagaaaagctcggaacaccttctccaagcacatcgaacaactgaagcaggagcacatcaggaagcgcagagaagaatacattaatacactgcccagggccttcaacactctcctcccgaatttagaggagattgagcacttaaactggtccgaggcactcaaactgatggagaagcgagcggactttcagctctgttttgtggtgctggaaaaaaccccttgggatgaaactgatcacatcgacaagattaacgacaggcgtattcctttcgatttgttgagtaccctggaggcagaaaaagtttatcagaaccacgtgcaacacctgatcagcgaaaaacgacgggtcgagatgaaggagaaattcaagaaaactctcgaaaagatccaattcataagccctggccagccctgggaggaggtgatgtgttttgtgatggaggatgaagcctataagtacatcacagaagccgactccaaggaggtttatggacgtcatcagcgggaaattgtagaaaaggccaaggaggaattccaggagatgctgttcgagcactccgagctcttctacgatctggatttgaacgcaacaccgagctctgacaaaatgagcgagatccacaccgtactgagcgaggagccacgttataaagccctccagaaactcgcaccagaccgcgaatctctgctccttaagcatatcggttttgtataccacccaaccaaagaaacctgcctctccggacagaactgcaccgatattaaagtcgagcaactgctcgcctcctccctcctgcagctggatcacggacgcttgcgtctataccatgatagcacaaatatcgacaaggttaatctttttatactgggaaaggacggtttggcacaggaactggctaatgaaatcaggactcagagcaccgacgacgagtacgctctggatgggaagatttatgaactggacctgagacccgtagacgcgaagtccccatacttcctttcacagctctggaccgctgccttcaaaccccacggatgtttctgcgttttcaactccattgagagtctgagttttataggggaatttattggtaaaatcagaaccgaggcatcacagatccgaaaggacaagtatatggccaatctgccctttacattgattctggctaaccaacgggattcaattagcaagaatctacccatattgcggcatcaggggcagcagctcgctaataaattgcagtgcccgttcgtcgacgttccagctgggacataccctcgaaaattcaacgaaacgcagattaaacaggcgctgagaggggttctcgaatcagtgaaacacaatttggacgtcgtctcacctatccctgccaacaaagatctcagtgaagcggatttgaggattgtcatgtgtgccatgtgtggcgatcctttcagcgtcgatttaatcctgagcccgtttttggattctcactcctgttcagcggcacaggcgggacaaaacaacagcctgatgctagataagataatcggagagaagaggcgccgcattcagatcacaatcctgtcgtatcatagtagtatcggcgtccggaaggacgagttagtgcacgggtatatcctggtgtattctgctaagaggaaagcctctatgggcatgctgagagcctttctgtctgaggtccaagacaccatccccgtgcagctggtagctgtgactgattcgcaggccgatttctttgaaaacgaggccattaaagagctgatgactgagggcgaacatatcgccaccgaaattactgctaagtttacagcactgtactcgctttctcagtaccatcggcagactgaagtctttacgttgtttttcagcgatgtgctcgaaaaaaaaaacatgatagaaaacagctacttgagcgataataccagggagtccacccaccagtcggaagacgtctttctgcctagcccccgggactgcttcccatacaataattaccctgacagtgatgatgatacggaggcacctcctccatactcccccatcggtgatgatgttcagttactgcccacaccgagcgatcgaagtcgttatcggctcgatttagagggtaacgaatacccaattcattcgacgcccaactgtcacgaccacgagcggaaccataaagttccccctcccatcaaacccaaacccgtggtgccaaagactaacgtgaagaaacttgatcctaatctgttgaaaactattgaagcaggaattggtaaaaacccccgtaaacagacaagcagggtaccgctggcccaccctgaggacatggaccccagcgataattacgctgagccgattgataccatttttaagcagaagggctacagcgacgaaatctatgtggtgccagatgacagtcagaataggatcaaaatcagaaatagtttcgtaaacaatactcagggcgacgaggaaaacggcttttcagaccgtacgagcaagtcccatggcgaaagacgcccttccaaatataagtacaaatctaaaactttatttagcaaagctaaaagttactaccgaagaacgcactctgacgcttccgacgacgaagctttcaccacctccaagaccaaacgaaaaggacgacaccgagggagcgaggaggatcctctgttatcacccgtggaaacttggaaagggggaatcgataaccccgccatcacttcggatcaggagttagacgataaaaaaatgaagaagaaaacgcacaaggtgaaagaggacaagaagaagaaaaaaacgaaaaatttcaaccctcccacacgccggaattgggagagcaattactttgggatgccgctccaagatctggttacggccgaaaaacccatcccactctttgtcgagaagtgcgtagaatttatagaggatacaggcctgtgcactgaaggcctgtatcgagtgtcgggcaacaagactgatcaggacaacatccagaaacagtttgaccaggaccacaacatcaaccttgtctcaatggaggtgacagtaaacgctgtcgccggcgccctcaaggcattctttgccgatttaccagatcccctgatcccctattccctacatcctgagctccttgaggctgccaagattccggacaaaacagagcggctccacgccctgaaggagattgtaaagaagttccaccccgtgaattacgacgtgttccggtatgtcatcactcatctcaatcgcgtgtcacaacaacacaaaattaacttgatgactgccgacaacctatccatttgtttctggccgaccctgatgcgtcccgacttcgagaaccgcgaatttctaagtacaacgaaaatccatcaatctgtcgtagagacatttatacagcagtgccagttcttcttctacaacggtgagatcgtggaaacaaccaatattgtcgcaccaccacctcctagcaacccagggcagttggtagaaccaatggttcccctccagttgccaccacccctgcagccccaactcattcaaccacagttacagactgacccgttggggatcatctag

SEQ ID NO: 132553 - DNA, 2316 bp, synthetic construct
  misc_feature 1..2316: note = Description of Artificial Sequence: Synthetic coding sequence
  source 1..2316: mol_type = other DNA
atgtctggccggagcgtccgcctgcgtagcgttcccatccagagtctgagcgagctagaacgagcgcgtctgcaagaagtcgcattttaccagctccaacaggattgtgacctcagttgccagattacaattcctaaggatggccagaagagaaagaagagcctgcgcaaaaaactcgactccctgggcaaggaaaagaataaagacaaggagttcatcccacaggccttcgggatgcccctaagtcaggtgatagccaacgaccgggcttacaaactcaaacaggacctgcaacgagacgaacagaaggacgcctcggacttcgtagcttctctgctgccctttggcaacaaaaggcaaaataaagagctgtccagttcaaacagtagcttgtcctcgacatcagagacgcccaatgaatccacatcacccaacactcccgagcctgccccccgggctcggcgacgcggcgctatgtcagtcgacagcattaccgatctggatgacaatcagtcacgcctactggaggctttgcagctgagcctccccgcagaagctcaaagcaagaaggaaaaggcccgggataaaaagttaagtcttaaccccatttatagacaagtccccagactggtcgactcttgttgtcagcatctggaaaagcatgggttacagacagtcgggatctttcgcgtaggctcctccaaaaagcgggttagacagctccgcgaggagttcgacagagggattgacgtatctctcgaggaagagcatagtgtgcacgacgtggcggcactcctgaaagaattcttgagggacatgccagaccccctccttacgagggaactgtacaccgcatttataaacaccttgctgcttgaacccgaagaacagctggggactttacagcttctgatttatctgttacctccctgtaactgtgatacactccataggcttctacagttcctgagcattgtagcaagacatgcagacgacaatatttccaaggacggccaggaggttactggaaataagatgacatcactgaacctggccacaattttcgggccaaatctgttgcacaagcagaagtcaagcgacaaagaattttccgtgcagtccagcgccagggctgaagagtctacagcaatcattgccgtggtccaaaaaatgatagaaaactatgaagccctgtttatggttccacctgacttacagaatgaagtgcttattagcctgctggagactgaccccgacgtggtggactatttacttagacggaaagcttcacagagttccagccctgatatgttacagtccgaggtttcattcagcgttggtgggagacacagcagcaccgacagcaacaaggcgtcatccggtgatatttccccatacgataacaacagccccgttctatccgagcggtcacttctagccatgcaggaggacgctgccccgggcggcagtgagaagctatacagagtgcccggacagtttatgctggtcggtcatctttcaagtagcaagagcagagagtcctcacctggtccaagactgggaaaagacctgtctgaggagccatttgacatttggggaacttggcactccactctgaaatcgggcagcaaagatcccggcatgaccggatcttccggagacatttttgagtcctcctctctgagggccgggccttgctcactttcacagggcaacctgtcccccaactggcctcggtggcaaggcagcccggccgagctggactccgacactcagggcgcgcgaaggactcaggcggccgcccccgccactgaagggcgagcccatcctgcggtgtcaagggcctgcagtacccctcacgtccaagtggcgggaaaggccgaaagacctacagccaggtccgagcagtacctgacgttgtctggcgcgcacgatctgagtgagagtgagctggatgtggccgggctgcagtcccgggcgacccctcagtgtcagaggccacacgggtcgggacgcgacgacaagcgacctccccccccttacccgggtccgggtaaaccggctgcagctgccgcctggatccagggacctcccgaaggtgtcgagaccccgacggaccagggcggacaggcggcagagcgggaacaacaggttacacagaaaaagctgtctagtgcgaactcgttacctgctggcgagcaagacagtccccgactcggagatgctggctggctggattggcaacgcgagaggtggcagatttgggagctcttgagcacagataaccctgatgcactgcccgaaaccttagtctag

SEQ ID NO: 132554 - DNA, 2925 bp, synthetic construct
  misc_feature 1..2925: note = Description of Artificial Sequence: Synthetic coding sequence
  source 1..2925: mol_type = other DNA
atgtcagctcagagcctccttcatagcgtttttagctgctcttccccagcctcaagctccgccgcatctgccaaaggatttagcaagagaaaacttcgccaaacaagatcacttgatccagccttaatcggaggatgtggttctgatgaagctggcgctgaagggtccgccagaggggcaacggccggtagactgtattcgccttcactgccagccgagtctctcggacccaggctggcttccagctctcgtgggccaccaccgcgtgccaccaggcttccacctccggggccactgtgttctagcttctctaccccatccacgccacaggagaaatctccatctggttctttccactttgactacgaagtaccactcggacgcgggggtctaaagaagtccatggcatgggatctacccagtgtcttagcaggccccgcatctagtcggtccgcgagttccatcctctgcagtagtggagggggtcccaacggaattttcgctagtcctcggaggtggctgcagcagcgcaaatttcaatccccccccgattcacggggacacccttacgtcgtgtggaaatccgagggagatttcacatggaattcaatgtccggaagatcggtgcgtttgaggtctgtgccaatacaatctctgagcgagcttgagagagcgcggttgcaggaggtggctttttaccagctgcaacaggactgcgatttatcttgccagattaccatcccaaaagatgggcagaagaggaaaaagagcttacgcaaaaagttagactcattaggtaaggaaaagaacaaggacaaggagtttattccacaggcgtttggtatgcccctgagccaggtgattgccaatgatcgcgcctacaagttgaaacaggatctccagagagatgagcaaaaggacgcaagtgacttcgttgcttccctcctgccatttggaaataaacgccagaacaaagagctgagctccagtaactcgagcctgtcatccacaagcgagacccctaatgagtctacctcacctaatacacctgagccagcccctcgagcgcgcagacgcggtgcaatgtccgtcgactcaatcactgacctcgatgacaaccagtccagattactggaagctctgcagttatctctgcccgccgaggctcagtcaaagaaggaaaaggctcgcgataagaagctatcactaaaccctatctaccgccaggtcccgaggctagtggacagctgctgccagcatctcgagaaacacgggctgcaaacggtgggcatcttcagagttggatctagtaaaaaaagagtgcggcagctgcgagaggagttcgatagaggcatcgacgtgtccctcgaggaggagcacagtgttcacgacgtagccgccctcttgaaagagttcctccgggacatgcccgacccccttttaacccgcgagctatacacggctttcattaacacgctgttactggaaccggaggagcagctgggcaccctgcagttactgatttatctcttacctccatgtaactgcgacaccctccataggctgctacagtttctgagtatagtagcccgtcatgcagacgataacatatcgaaagatggccaggaggtcacagggaataagatgacaagtctgaatctggccacgatctttggccctaacttactccataagcagaagtcctccgataaagagttctcagtacagagcagtgcgcgcgcagaagagtctacggccatcatagcagtcgtgcaaaaaatgattgagaattacgaggcccttttcatggtaccacctgatttacaaaacgaggtgctcatttccctgctagagacggatccggatgtagtcgactacttattgcgccggaaagcttcccagagctcctcccccgatatgctccagtcagaggtgagtttctccgtgggaggaagacactcgtcgacagattcaaataaggcctctagcggtgacatcagcccatatgataacaactccccggtgttgagtgagagatcactgctggctatgcaggaggatgccgcccctggggggtcggaaaagctgtatagagtgcctggtcaatttatgctggtcggacacttatcgagcagtaagtccagagagagttcacccggaccgagactcggcaaagacttgtctgaggaaccgttcgacatctgggggacatggcacagcacccttaagtcaggttctaaggatcctggcatgacaggtagttccggagatatattcgagtcatcaagtttacgggccggtccatgttcactgtcccagggaaatctcagtcctaactggccccgatggcagggttcacccgccgaactcgattcagacacccagggggcccggcgaactcaggcagcggcccccgccactgagggccgtgcgcatcccgctgtctcacgtgcatgtagtaccccacacgtccaggtggcagggaaagcggagagacccaccgcgagaagcgagcagtatctgacactctctggcgcacacgaccttagcgagtctgagctagacgtggccggtctccagagccgggccaccccccagtgccagaggccacacggatccggtcgagacgacaagagaccaccgcctccctatcccggccctgggaagcctgcggcagcagctgcatggattcaaggaccacctgagggtgtggagactcccacagatcagggcggtcaagccgcagaacgcgaacagcaggtcacccagaaaaagttatcgtccgctaattcgctgcctgccggtgagcaagactctccccgcctcggcgatgcaggctggctcgactggcagagagagcgctggcagatatgggagttactgagtactgataatccagatgcactccccgagacattggtgtag

SEQ ID NO: 132555 - DNA, 1806 bp, synthetic construct
  misc_feature 1..1806: note = Description of Artificial Sequence: Synthetic coding sequence
  source 1..1806: mol_type = other DNA
ctggagctctacgatcttcaaatccttggtacaaagcctcctatgaattctgacacccaccgcaacttcgatcctactgcgactctcaggaatcaaggtgactttacatggaactcaatgagtggcaggtcagttcgattgcggtccgtccctatacaaagcttatctgagcttgagcgggcgcggttacaggaagtagccttttatcagcttcagcaagactgcgatctctcttgtcagatcactatacccaaagatggacagaaaaggaagaaaagtctacgcaaaaagctggactccctggggaaggagaaaaataaagataaggaattcattccgcaagcgtttggaatgccgctgtcgcaggtgattgccaacgatcgggcgtacaaactcaagcaggatctccaacgggacgaacagaaggatgcctccgacttcgtcgcatctctcctcccatttggcaataagcgacaaaataaagagctgtcgtccagtaactcttcgctgtcatctacatcagaaaccccaaacgaatcgaccagcccgaacacaccggaacccgctcctcgtgccagacgtagaggcgcaatgagcgtggacagcattaccgatcttgatgataatcagagtaggctgcttgaggccttgcagctctccctgcccgcagaagcccagtcgaaaaaagagaaggcacgcgataagaagctgtcactgaatccaatctacagacaggtgccaaggctggtagacagttgttgccaacacctcgagaaacacggtttgcagacggtcggtatctttcgcgtgggcagctctaaaaaaagggtacgccaactccgcgaggagttcgaccggggcatcgatgtgagcttggaagaagagcactcagtccatgatgtggctgccttactaaaggagttcctgagggacatgcccgatcctctgcttacccgggaactatataccgctttcattaacacacttcttctggagccagaagagcagctcggaaccctgcagctactcatttacctgctgcctccctgcaattgtgatactctccataggcttttgcagtttctctccatcgtggcccgacacgcagatgataatattagtaaagatggacaggaggtaaccggaaacaaaatgacttctttgaatttggcgaccatttttggcccaaatttgctgcacaagcaaaagagctccgataaagaattttcagtacagtcctctgctagggctgaggagagtacagctattatcgcagtagtacagaagatgatcgaaaattatgaggcgctgtttatggttcctcccgatctgcagaatgaggtattgataagccttctggaaacagaccctgacgttgtggactacctgctacgtcggaaggcctcccaaagttcttctcccgatatgctccagagtgaggtatctttcagtgtgggagggaggcactcatctacagatagcaataaggctagttccggggacatctccccgtacgacaacaactcacctgtactctcagaaaggtcactgctggctatgcaggaggacgctgcccccggggggtctgagaagctttaccgagtccccgggcagtttatgctagtgggccacctgtcctcctctaagtctagggaaagctctcccggtcccagactgggaaaaggaaattggagtcttgcttcaaggcgatggcccaagcaggctactctactgctgttgcacgtggcatggtgcggagctctcaggactttttctagcagcctcccgtatctcatgtttctgtag

SEQ ID NO: 132556 - DNA, 2298 bp, synthetic construct
  misc_feature 1..2298: note = Description of Artificial Sequence: Synthetic coding sequence
  source 1..2298: mol_type = other DNA
atgtcagctcaatctctgctgcactctgtcttttcctgtagttccccggcctccagttctgcagcatctgccaaaggttttagcaagagaaagctacggcagactcggagtttagacccagccctgataggaggatgtgggtctgatgaggccggggctgaggggtccgcccgaggggccaccgctggccgactttactcgcctagcctcccagctgagtcccttggcccaaggttagcttcttctagcaggggaccccctccacgtgccacgaggctacccccacctggaccattgtgctcctcttttagtacgccgtccactcctcaggaaaagtccccctccggttcatttcattttgactacgaagtaccattaggcaggggtgggctgaaaaagtccatggcatgggatcttcctagcgtgttagctggccctgcaagctcgcgttcagcgtccagcatcttgtgttccagcggcggagggccaaatggtatttttgcgagcccccgtagatggctgcagcagagaaagtttcagtctccacccgattccagaggccatccatacgtggtctggaagtccgaaggcgattttacttggaatagtatgagcggacgaagtgttcgtttgcggtcagtccctatacagagtctgtccgagttagagagagctcggctacaggaggtcgcattttaccagctgcaacaggattgcgacctcagctgtcagatcacgattccgaaagacgggcagaagcgtaaaaagtctcttaggaagaaactggactccctcggcaaagagaaaaataaggataaggaatttattcctcaggcctttggaatgcctctttctcaagttatagccaacgaccgcgcgtataaattgaagcaggatttacagcgagatgaacaaaaagatgcctccgactttgttgctagtctgttgccctttggtaataaacggcagaacaaagagttgtcttcgtcaaacagttccctttctagcaccagcgagacacccaatgagtccacatcccccaacacacctgagccggcacctagggcccgtcggcggggggctatgagcgttgactcaattactgatcttgacgataaccaaagccggttgcttgaggccctgcagctgtccctgccagccgaggcccagtcaaaaaaggaaaaagcgagagataagaagctctccttaaaccccatttatcgccaagttcccagactggtggattcatgctgtcagcaccttgaaaaacacggccttcagactgtcggtatcttcagggtgggatcttctaaaaagagggtgaggcagcttagagaggaattcgatcggggtatagatgtgtccctggaggaagaacactccgtacacgacgtggccgcattgttaaaggaattcctaagggatatgccagacccactcctaacgcgcgagctctatactgcatttatcaacactctcttgcttgaacctgaagaacagctgggaaccctgcagctgctgatttatctcctgccaccttgcaactgcgacacacttcacaggctcctgcagttcctctccattgttgctcgccacgcagacgacaatattagcaaagacggtcaagaggttaccggtaacaaaatgacctctctcaacctggccacaatattcgggccaaacctgttgcataagcagaagagtagtgacaaagagttctctgtccagtcctccgccagggctgaggaatcgacagcgatcattgcagtcgtgcagaagatgatagagaactacgaagctctgtttatggtgcctccagatctgcagaacgaggttcttatatccctgttagagacagatcccgatgtggtggattacctgcttaggcgcaaggccagccaatcaagctctccagatatgctgcagagcgaggtgagcttctcggtgggtggaagacactcatcaaccgattctaataaggcatccagtggcgatattagtccttacgacaataactcacctgtgctttcagagcggtcccttctggctatgcaggaggacgctgcgcccgggggatctgaaaagctgtatcgggtgcccggacagttcatgctagtgggacacctgtcctcaagcaagtccagggaatccagccctggaccgagactgggaaaggggaactggtccctcgcatctcgccgctggcctaaacaggcaacactgctgctcctccacgtagcgtggtgcggagctctaaggaccttctcctcttcattaccctatctgatgtttctgtag

SEQ ID NO: 132557 - DNA, 2073 bp, synthetic construct
  misc_feature 1..2073: note = Description of Artificial Sequence: Synthetic coding sequence
  source 1..2073: mol_type = other DNA
atgagtgcccaaagcctgctccactcagtatttagctgcagttcccccgcttccagttctgccgcttctgcaaagggtttttccaaaagaaagcttagacagaccaggtcactggacccagccttgatcggtggctgtggatccgatgaggcaggtgcggaaggctctgccaggggagcgacagcaggtcggctctacagtccatccttgccggcagagtctctcgggcctagactcgcttcttccagtcgaggcccgccacctcgggcaaccagattgcctccacctggacccctctgttcgtcgtttagtactccctctacacctcaggaaaagagcccgagtggctcatttcacttcgactatgaagtccctctgggccgcggcggcctcaagaaatctatggcctgggacctgccgtccgtccttgcgggtcctgcctcctcgagatccgccagctctatcctgtgcagctcaggaggcggacctaacggaatttttgcctccccacggagatggctgcaacagcgtaaattccagagtccccccgattctcggggacatccatacgtcgtttggaagtccgaactggagttgtatgacttgcaaatcctaggaaccaagcctcccatgaatagtgatacgcaccggaatttcgatccaactgccaccctccgaaatcagggggacttcacctggaatagcatgtccggaaggagtgttcgactgcgcagcgtcccaatccaaagtttgagcgaattagaaagagctcgcctccaggaggtggctttctatcaactccagcaagattgcgacctcagctgccagataaccattccaaaggatgggcagaagcgcaagaagtctctccgtaagaaactcgattctttgggcaaagaaaaaaataaggacaaagaatttattccccaggccttcggcatgcccctttcccaggtgatagccaacgatcgggcctacaagttgaagcaggatttacagcgtgacgagcagaaggacgcctcggatttcgttgcatcactccttccattcggtaataagaggcagaacaaagagctctcgtcatcaaatagctccctgtcttctaccagcgagaccccaaacgagtccacctctccgaacacacctgagccggctcccagagcccgccgcagaggtgccatgtccgtcgacagcatcacagatttggacgacaaccaatcgaggctgcttgaggctttgcaactgagccttccagccgaggcacagtccaagaaggaaaaagccagggataagaagctctctctgaacccgatctaccgccaggttccacgtttggtggatagctgctgccagcaccttgagaagcatggtctgcaaacggtggggattttccgggtaggctccagcaaaaagagagtgcgacagctccgggaggaattcgataggggtatcgatgtttccctggaggaggagcacagcgtgcacgatgttgccgcgctactgaaggaatttctacgtgacatgcctgatcccctacttactcgtgaactgtacacagccttcatcaacacactcctgcttgagccagaggagcagttagggactctgcagctccttatctacctgcttcctccgtgtaattgcgacaccctccaccgactcctgcagttcctgagcatagtcgctcggcatgccgatgataatatcagtaaagacggacaggaggttacaggcaacaagatgacctcactcaatctggctactatattcggtccgaatctgctccacaagcagaaatcttcggataaagagttcagtgttcaatctagcgcacgggccgaggaaagtactgccatcattgccgtggttcagaagatgatcgaaaactacgaagctttattcatggtaccccccgatctccagaatgaggtgctcattagtctgctggaaactgatccggatgttgttgattatctcttgaggcggaaggctagccaatcatctaccagtagcgtgttgcccgccgcagtgcaggcctgcccgcagtatccagccagcatgttcaccccgtag

SEQ ID NO: 132558 - DNA, 2316 bp, synthetic construct
  misc_feature 1..2316: note = Description of Artificial Sequence: Synthetic coding sequence
  source 1..2316: mol_type = other DNA
atgtccggacgctccgttaggctgcggagcgtgccgatccaatccctgagcgagctggaacgagctagactccaggaagtggccttctaccagctgcaacaggattgcgatctatcctgccagatcacaattccaaaggatgggcaaaagcgtaagaagtcactgcggaagaaactggatagcctcggaaaagaaaagaacaaagacaaggaatttattccccaagccttcgggatgcctttaagccaagtcattgctaacgatcgcgcctacaagctgaagcaggacctgcagagagatgagcagaaagacgcttcggactttgttgctagtctcctcccctttgggaacaagcgacagaataaggaactgtcttcaagcaattcctccctgagttccactagtgagacgccaaacgaatcgacatctcctaacactccggagcccgccccgcgggcacgaaggcggggcgccatgtctgtcgattccattacagatcttgacgataatcaatccaggctgctcgaggcgttgcagctctcacttcccgccgaggcacagagcaagaaggagaaggcaagagataaaaaactctccctaaaccccatatacagacaggtcccacgtctcgtagactcctgttgccagcatctggaaaaacacggcctgcagaccgtaggaatattcagagtaggctctagtaagaagcgagttcggcaactgagggaagaattcgataggggaatcgatgtcagtctggaggaggaacacagtgttcacgatgtggccgcccttctcaaggaatttctgcgggacatgccagatccactgctgactagagaactgtatacagcgttcataaatacattgctgctggagccagaggaacagttaggcaccctgcagcttctgatctatttgctgcccccttgtaattgtgacaccctgcacaggttgttacagttcctgagcattgtggctcgccatgccgacgataatatctctaaagacggtcaagaggtcacgggcaacaaaatgacaagcctgaatctggctactatcttcggcccgaacctcctgcataaacagaaatctagcgataaggagttttcagtacagagcagcgctagggcagaagaaagcactgctatcattgccgtggtgcaaaagatgatcgagaattatgaggcattattcatggtcccacccgatcttcagaacgaggtgctcattagccttctggagaccgaccccgacgttgtcgactacctattacggagaaaggctagccagtcttccagccctgacatgctacaatctgaagtgagctttagcgtcggaggcagacattcctcgactgacagcaacaaagcatcctccggagacatatcaccttatgacaataatagtcccgtgttgtcagaaaggtcgctcttagccatgcaggaagatgctgcacccgggggctcagagaagctgtatagagtgccaggacagtttatgctcgtggggcacttgagttcaagcaaatcaagagaatcatcacctggtccgcgattgggtaaggatttgtctgaggaaccattcgacatttggggcacgtggcattctacactgaagtcgggctccaaggatcccgggatgactggttcctctggggatatctttgagtcttcctccctgagagcagggccatgttcgctgagtcagggcaatctttccccaaattggccacgctggcagggatcaccagccgagctcgattccgacacacaaggagctcgtcggactcaagccgcagcccctgcgacagagggaagggcacaccccgcagtgtccagggcttgctctacgccacatgttcaggtggcaggcaaggcagagcgcccaactgctcgaagcgagcagtacctgaccctttctggtgcccacgatctgagcgaatccgaactcgatgttgctgggttacagtcccgcgccacccctcagtgtcagcggccgcatgggagcggtcgcgatgataaacgccccccaccaccatacccaggccccggcaaacccgccgcagcggcggcgtggattcaggggcctcctgagggcgttgagacaccgactgaccagggtggccaggccgccgagcgagagcagcaggtcacccaaaagaaactgtcaagcgccaattccctgcctgctggcgaacaggatagtccccggctgggagacgcaggatggttggactggcaacgcgagcgttggcagatatgggaactactgagtactgataatccggacgccttgccagagacgttggtttag

SEQ ID NO: 132559 - DNA, 1404 bp, synthetic construct
  misc_feature 1..1404: note = Description of Artificial Sequence: Synthetic coding sequence
  source 1..1404: mol_type = other DNA
atgtaccgaattttcggggacttcacatggaactccatgagcggcagaagtgtgaggcttagaagcgtacccatacagtctcttagcgagctggagcgcgccagactgcaggaggtggctttctatcaactgcagcaggactgtgatttgtcttgtcagatcacaatcccaaaggatggtcaaaagaggaaaaagagtctcaggaaaaaattggacagtttaggcaaggagaagaacaaggataaagagttcataccacaggcgttcgggatgcctcttagccaggtcatagctaacgatagggcctataaactgaaacaggacctgcagagggacgagcaaaaagacgcatctgactttgtggcttccctgctcccctttgggaacaagcgccaaaacaaggaattgagcagttctaatagtagcttatctagcaccagcgagacacccaatgaatctacttctcccaatactcccgaacctgctccacgtgccagaagacggggggcgatgtcagtagattccattacagatcttgacgataaccagagtcgtctgttggaggcactgcaattatctttaccagcagaagctcaatctaaaaaggaaaaggcaagagataaaaagctcagcctcaatccgatctatagacaggtgccgaggctggtggattcatgctgccaacacttggagaaacatggattacagaccgtcggaatttttcgcgtgggttcatcgaaaaagagagtaagacaactgcgggaggagtttgaccgcggaatcgacgtcagtctggaggaggagcacagtgtccatgatgtcgccgctcttctcaaagagtttctccgtgatatgcccgacccactcctcacccgtgaactgtacaccgctttcatcaacacccttcttttggagcctgaggaacagctaggcacactgcagctgcttatctacttactgccgccgtgtaattgtgataccctccatagactgttgcagttccttagcattgtcgccaggcacgctgacgataatatctctaaggacggccaggaagtgaccgggaataagatgaccagcctgaatcttgccaccatctttggccccaatttgttgcacaaacaaaaaagttctgacaaggaattttcagtgcagagctctgctagggctgaggaaagtacggccatcattgcagtcgtgcagaagatgattgaaaactatgaggccctatttatggttcctccggatttacagaacgaggtgttaattagcctgcttgagaccgaccctgatgtcgtagattacctgcttcgcaggaaagcttcacagtcaagtacgtcaagtgtgctgccagcagctgttcaggcctgtccccaatacccagccagcatgttcacaccctag

SEQ ID NO: 132560 - DNA, 1815 bp, synthetic construct
  misc_feature 1..1815: note = Description of Artificial Sequence: Synthetic coding sequence
  source 1..1815: mol_type = other DNA
atgaaacggctgcacattttcgggcccaagatccacagtagcggcgggctgtggcagcagaaaggggattttacgtggaacagtatgtcgggccggagtgtacgactgaggagcgtacctatccaatcactgagcgagctggagcgggccagattacaggaggtggcgttctatcaactccaacaggattgtgacctgagttgtcagattaccattcctaaagacggccaaaagaggaagaagagtctgagaaagaagctcgactccttgggtaaagaaaaaaataaagataaggagttcatcccccaggcgtttggaatgccactgagtcaggtgatcgcaaatgatcgcgcctacaaactcaagcaggatctccagagagatgagcagaaggacgcctctgactttgtggcttcgttgctgcccttcgggaacaagaggcagaataaggagttatcctcctcaaattcatccctcagtagcactagcgaaactcctaatgagtccactagccctaacacacccgagcctgcacctcgggctaggagaagaggcgcaatgtctgtagattccataacggacctggacgataaccaatctaggctcctggaagcactccagttgtctcttccagctgaagcccagagcaaaaaagaaaaggcaagagacaaaaaacttagcctgaatccaatctatcgccaggtgccaagactggtggactcatgctgccagcaccttgaaaagcatggcctgcaaacggttgggattttccgggtggggagttccaaaaagcgggtgaggcagttacgcgaggaatttgatcgaggcattgacgtgagtctggaagaggagcactcagtgcatgacgtggcagccttgctgaaggagtttctccgcgacatgcccgatcccctgctgacaagagaactgtataccgcttttattaatacactcctattggagccagaggagcaactggggacactgcaattgctgatctaccttcttcccccatgtaattgtgatacgttgcatcgtctgctgcagttccttagcatcgtggcacgccacgccgacgacaacattagtaaggacggacaagaggtgacagggaataaaatgaccagccttaatttggcaactatttttggtccaaacctgttgcataagcaaaagtcctccgacaaggagttcagcgtacaatcctcagccagggctgaagagtcaactgcgatcattgccgtagtgcagaaaatgatagaaaactatgaggcgctgtttatggtaccaccagacctacagaacgaggtgctcatctcgttacttgaaacagatcctgatgtggtggattatctcttaagaaggaaggcctcacaatcatcctcacccgatatgctgcaatccgaagtcagcttttcagtcggcgggagacatagctccacagattctaataaggctagttctggggacatcagtccatacgataataacagccctgttctttctgaacgatcccttctcgcaatgcaggaagacgcagcgcccggtgggagcgagaaactctacagggtgcctgggcagttcatgctggtgggtcacctgagcagctctaaatccagggagtctagccctggccctaggctcgggaaagatttaagtgaagaaccatttgacatctggggcacctggcactctacactcaagagtgggagcaaggatcctggtatgaccgggacaacccctctattgaatatcagctcccaggaagaccataggcagaaggatttgcgccttatttttaaaatttatccttag

SEQ ID NO: 132561 - DNA, 918 bp, synthetic construct
  misc_feature 1..918: note = Description of Artificial Sequence: Synthetic coding sequence
  source 1..918: mol_type = other DNA
atggccggtcaggacccagcactcagcacatcccacccattctacgacgttgcacgccatggcatccttcaggtcgctggggatgatcgctttggaagaagagtggtgactttcagctgttgtcgcatgcctccgtcacacgagctggaccaccaaagactgctagaatatctcaagtacacactggaccaatacgtggaaaatgattacacaatcgtatacttccactatggactgaacagccggaacaagccctccctcggttggttacaaagcgcttataaagaatttgatcgcaaatacaaaaagaacctgaaggcactatacgtggtgcaccctacaagcttcattaaggtgctgtggaacatccttaaaccactcatctcccacaagtttggaaaaaaggtcatttacttcaattacctttctgagctgcacgagcatctcaagtacgatcagctcgtaattccacctgaggtgctgcgctatgacgagaaactccagtctctccatgaagggagaacaccacctcctaccaagactcctcctcctcgtcctcctttaccgacccagcagttcggggtgtcattgcagtaccttaaggataaaaaccaaggagagctcattcctcctgtgctgcggtttaccgtaacttatttacgtgaaaagggtcttcggacagaggggctgttccgtcggtctgcgtccgtgcagaccgtgcgggagatccagcgcctctacaaccagggtaagcctgtcaatttcgatgactacggagatattcatatcccagccgtgatcctcaaaacattcctcagggagctacctcagccactgttgacattccaggcctacgaacagatactgggcatcacgtgtgtccccggcgaacaccttcagcagaacgagcagctatag

SEQ ID NO: 132562 - DNA, 1302 bp, synthetic construct
  misc_feature 1..1302: note = Description of Artificial Sequence: Synthetic coding sequence
  source 1..1302: mol_type = other DNA
atggctggtcaagaccccgccctgtcgactagtcatccattctacgacgtggcaaggcacgggatactgcaggtcgccggggacgataggttcggccgtagggttgtcacgttctcctgctgccgaatgccaccaagccacgagcttgatcatcagaggttactggaatacctgaaatacactctggatcagtacgtggagaacgattataccattgtctacttccattatggtcttaactctcgcaataagccatcactcggatggctgcagagcgcctataaagagttcgatcggaaatacaagaagaacctcaaagcactctatgtggttcatccgacgtcctttattaaagtcctctggaatatactcaaacctctcatcagtcataagttcgggaaaaaagttatctactttaattatctgtcggagctgcacgagcacctgaagtacgaccagttggtgatacctccggaagtcttgaggtacgatgaaaaactccaatcgcttcacgaaggtagaacacccccaccgactaaaacacctccacctcgaccccccctacctactcagcagtttggcgtgagcttacagtacctcaaagataaaaaccagggagagctgattcctcctgtgctacggtttactgtcacatatctgagagagaagggtctgcgcaccgaaggtctgttccgacggtccgcgtctgttcaaactgtgcgagaaatacagcggctttataatcagggcaaaccagtgaacttcgatgactatggcgacattcatatccctgctgtgatcttaaagacctttcttcgcgagctacctcagccactgctcacattccaggcctacgaacaaatcctggggattacttgtgtggagagctcactccgtgtgactggatgtcggcagattctgaggagtctcccagaacataactatgtcgttctcagatatctgatgggcttcctccacgctgtttcaagagagtctatctttaataagatgaattcatctaacttagcgtgtgtttttgggctcaacctaatttggccatcacagggcgtgtcatctctctctgccctggtgccacttaacatgtttacagaacttttgattgagtattatgaaaagattttctccacccccgaagcacccggcgaacatggtttagccccctgggaacaaggatcaagggccgctccattgcaggaggcagtgccgcggacccaggccaccggcctgacaaagccaaccctgccgccttcccccctgatggcggcacggaggcggctgtag

SEQ ID NO: 132563 - DNA, 1668 bp, synthetic construct
  misc_feature 1..1668: note = Description of Artificial Sequence: Synthetic coding sequence
  source 1..1668: mol_type = other DNA
atgagctccccaagccttagtgacctgggtaaaagggagccggccgcagcagccgacgaaaggggaacccagcagcgacgtgcctgcgctaatgctacgtggaactcaatccataatggggtgattgccgtgttccaacggaaagggctccctgatcaggaacttttttcattaaacgagggagtcaggcagctgcttaaaacagaacttggctccttctttacagaatatctgcagaatcagttgttgacgaaaggtatggttatccttagagacaagatacggttctacgaggaattgcaacgggacaaggctgccgctgccgctgtccttggcgctgtaaggaagcgtccaagtgtggtccccatggctggccaagatccagcacttagcacctcccatcctttttacgacgtggcccgacacgggattctgcaggtggccggtgatgaccgctttggcagacgcgtcgtcacttttagctgttgtcggatgcccccctcacacgaactagaccaccagaggctgttagagtacctgaaatatacacttgatcaatacgtggaaaatgattacaccattgtatactttcactatggcttgaacagccgcaacaagccctctctggggtggcttcagtcagcgtacaaagaatttgacagaaagtataaaaagaatctgaaagctttgtatgtagtgcatcccacgtcgttcatcaaggttctctggaacatcttgaagcctcttatcagccacaaatttggcaaaaaagtcatatactttaattatttgtccgagctgcacgagcacctaaagtacgaccagttagtgattcccccggaagtcttaaggtacgacgagaagctgcagagccttcacgaggggaggacccctccgccaaccaaaaccccacctccaaggccacctctccccacccagcaatttggtgtgtcccttcaatatctgaaagacaaaaaccaaggagaacttataccgcccgttctcagattcaccgtgacatatcttagagagaaggggctgcgaacagaaggtttatttcgcaggagcgcaagcgtacaaactgttcgcgaaatacagaggctgtacaaccaggggaagcctgtgaacttcgatgattacggcgacatccacataccggcagtcattttaaagaccttcctgcgtgaactaccgcagccattattgacttttcaggcgtacgagcagattctcggcatcacctgcgtggaatccagtctgagagtgacagggtgtcggcagattctgcgatcactcccagagcacaactatgtggtgctgaggtatctgatggggttcctgcacgccgtgagtcgcgagtctattttcaataagatgaacagctccaaccttgcctgcgtgtttggactgaatctgatctggccctcccagggagtgagcagcttatccgccttggtcccattaaacatgttcaccgagctgctcatcgagtattatgagaagattttcagcaccccagaggccccaggagagcacgggctcgctccatgggagcaaggatcgagggcagccccactacaggaagcagtgccgcgcacgcaagccacagggcttacgaaaccgacactcccacccagccccttgatggctgcccggcggcgactgtag

SEQ ID NO: 132564 - DNA, 1395 bp, synthetic construct
  misc_feature 1..1395: note = Description of Artificial Sequence: Synthetic coding sequence
  source 1..1395: mol_type = other DNA
atggccggccaggatccagcactgtccacttctcatccattttacgatgtagcacgccacggaatccttcaggtggcgggtgacgaccgcttcggtcgcagagtcgtgaccttttcctgctgcagaatgcccccttctcacgaactcgatcaccaaagactgctggagtacttgaaatataccttagaccaatacgtggagaacgactataccattgtttattttcactatggtctgaatagccggaataaaccttcactgggttggctccaaagtgcctacaaggagttcgatagaaaggatggcgatctgacgatgtggccacgacttgtttctaacagcaagcttaaacgaagctctcatttgtcactgcctaaatattgggactaccggtataagaaaaatcttaaggcactctatgtggtgcacccaactagctttatcaaggtgttatggaatattctgaagcccctcattagtcacaaattcggaaagaaggtgatctacttcaattacctttccgaactacacgagcacctgaaatatgatcagctggtgatccctcctgaggtcctacgctacgacgagaaactgcaaagcctacatgaggggaggacccccccgcccaccaagacacccccaccccgcccccctctcccaacacagcagtttggagtatcactgcagtaccttaaagataagaatcagggcgaacttattcccccagtgctgaggttcacagttacctacctgagagaaaaggggcttcgaactgagggcctgttcaggcgctccgcgtctgtgcagaccgtgcgcgagattcaacgcctgtataaccaagggaagccggttaactttgatgactacggggatatccacatccccgccgttattctgaagacctttctacgcgaactgccacagcctctgcttacgtttcaggcctatgaacaaatccttggaatcacctgcgtcgagagctcactgcgagtgactggatgtcggcagatcctgaggtcactgcctgagcataactacgtagtgctgaggtatttgatgggatttctgcacgccgtgtccagagagtcaatttttaataagatgaattcaagcaatcttgcttgtgtgtttggtctcaacctgatttggcctagccagggtgtctcttccctgagtgctttagttccactgaatatgttcacagaactgttaattgagtactatgaaaagatcttcagcacccccgaggctcccggggagcacggcctggcgccctgggagcagggcagccgcgccgctcccttgcaagaggccgtgcctagaacacaggcaaccggcctcaccaaaccaaccctgccgccctctcctttgatggccgctcgccgccgcctgtag

SEQ ID NO: 132565 - DNA, 393 bp, synthetic construct
  misc_feature 1..393: note = Description of Artificial Sequence: Synthetic coding sequence
  source 1..393: mol_type = other DNA
atggccggccaggaccccgcattgagcaccagccatcccttctatgatgtcgcccgccatggaattctccaggtggcaggcgacgatcgatttggaagacgggtggtgacattcagctgctgtcggatgccccctagccatgagttggatcatcaaaggctccttgagtacctgaaatacacccttgatcaatatgtcgagaacgattacaccattgtctacttccattatggactgaactcccgaaataaaccatctctagggtggctccagagcgcatataaggagttcgacagaaaagatggggatttaacgatgtggccccggttggtttccaactccaagcttaaaaggagttctcacctatctctgcctaaatactgggattactag

SEQ ID NO: 132566 - DNA, 348 bp, synthetic construct
  misc_feature 1..348: note = Description of Artificial Sequence: Synthetic coding sequence
  source 1..348: mol_type = other DNA
atggccggtcaggatcccgctctctcaacatcccacccgttctatgatgtagctagacacgggattctccaggtggccggagatgatagattcgggcgcagagtcgttactttctcttgctgtcgtatgcctcccagccacgagctcgaccatcagcgcctgctggaatacctaaagtataccttggatcagtatgtcgaaaacgattatactatagtgtactttcactacggactgaactcccgcaataagcccagcctaggatggctgcagtcagcatataaggagttcgatagaaagtacaagaagaatttgaaggcactgtacgttgtgcacccaactagctag

SEQ ID NO: 132567 - DNA, 1932 bp, synthetic construct
  misc_feature 1..1932: note = Description of Artificial Sequence: Synthetic coding sequence
  source 1..1932: mol_type = other DNA
atgagaaccctgcgaaggctcaagtttatgagcagcccttctctaagcgacctgggcaagcgcgaacccgcagcggccgcagacgaaaggggaacgcaacagagaagggcctgcgcaaatgccacctggaactcaattcacaatggagtgatcgcggtgttccagaggaaggggctacctgatcaggagctattcagcctcaatgagggcgtcaggcaactgctgaagactgagctcggtagcttcttcactgagtatctgcagaatcaactgctcaccaagggcatggtgattctgagggacaagatccgcttttatgaggggcagaaattgctcgactctctcgcggagacctgggatttttttttctcagatgttctcccaatgctccaggcaatcttttaccctgttcaggggaaggaacctagcgtccgccaactggcccttctccatttcaggaacgcgatcacgctgtctgtaaaactggaggatgctttggccagggcccatgcccgcgtgcctcccgcaattgtgcagatgctactggtgctgcagggcgttcacgagagtcggggggtgaccgaggactacctgaggctggaaacactcgtgcagaaagttgtcagcccctacctggggacttacggcctccatagctctgagggcccctttacgcactcttgtatcttagagctgcagagggacaaagccgctgctgctgccgtgttaggcgcagtgcggaaaagaccctcagtggtgcccatggctggacaggatccagcgctttctacatcgcatccattctatgatgtcgcacgacacggtattctgcaggtggctggcgatgataggtttggacgcagggtggtcaccttcagttgttgtcgaatgcccccatctcatgaattggaccatcagcggttacttgagtataagaaaaatttaaaagctttgtacgtcgtgcaccctacctcatttataaaagtgctctggaacatcctgaaacctctgatttcccataagtttggtaaaaaggttatctactttaattacttaagtgaattacatgaacacctcaaatacgaccagctggttattcctcctgaagtactaagatatgatgaaaagcttcaaagcctgcacgagggtaggaccccaccccccaccaagactcccccacctagaccccctctgccaactcagcaatttggtgtttctctgcagtaccttaaggataagaatcagggtgaacttataccaccagtcctgcggttcaccgtaacgtacctgcgagaaaaagggctgcgcaccgagggcttgttcagaagatccgccagcgtccagaccgtccgggagattcagaggctctacaaccagggaaaacctgtcaatttcgacgactacggtgacatccacattcccgccgtgatcctgaagaccttcctccgggagctcccgcagcccctccttaccttccaggcttacgaacagattctgggcatcacctgcgtcgagtcaagcctgagggtgactggttgcaggcagatattacgtagtctgcccgaacataattacgtggtactgcggtatctaatggggttcctgcacgccgtgagtagagaaagcattttcaacaaaatgaactcttcaaatttggcctgtgtattcggcttaaatttaatttggccgagccagggagtctcgagcctttctgccctcgtgccactcaacatgttcaccgagcttttgatcgagtattacgaaaagatcttctcgactcccgaggctccaggtgagcatggcttggcaccatgggaacagggaagtcgcgccgcccccctccaagaggccgtgccacgaacacaggccaccggcctgacgaaaccaacattgcccccttcccccctcatggccgcccggaggcggttgtag

SEQ ID NO: 132568 - DNA, 2322 bp, synthetic construct
  misc_feature 1..2322: note = Description of Artificial Sequence: Synthetic coding sequence
  source 1..2322: mol_type = other DNA
cagacacagaccgaatctttaactctgtgtagtggagaagccgaacgaagaggtaaggaggaatggccagattcccaccactaccccggacccacccccgcccccgagtcctccgatggcccccataaggtgaccgttctcgcaacgatgttgtcttctcggtggtggccctcatcctggggcatccttggcctcggtcctagatcaccaccacgaggcagtcaactttgtgctctgtacgctttcacctacactggagctgatggacagcaggtgagcttagctgagggcgaccgttttctgcttctgaggaaaactaacagcgattggtggctggccagaagactcgaagcgcctagtacgagcaggcccatctttgttcctgctgcgtacatgattgaagagtccatcccaagtcagtcaccaactaccgtgatacctggccaactgctctggacgcctgggcccaaattgttccatggaagtctggaagagttgtcccaggcattgccatcaagagctcaggcatccagcgagcagccacccccactccctcggaagatgtgtcgctcagtcagtactgataaccttagtccctccctcctcaagcccttccaagagggccccagtggtcggtccctgtctcaggaagacctgccatctgaggctagcgcctcaacagctggcccccaacctctgatgtctgagcccccagtgtactgtaatctggtggacctgcgccggtgtccgcgcagtccacctcccggccctgcatgtccattgctgcagagactagatgcttgggaacagcacttagacccgaatagcggaaggtgtttctacatcaattctctcaccggctgtaaatcttggaagccccctcggcgttctcgatccgagacaaatcctgggtctatggagggaacccaaacattgaaacgcaataatgacgtactccagccccaagccaagggatttagaagcgacactggtacccccgaaccgctggatccccaaggaagcctgtcgttgtcacagaggacgtcccagctggatcctcccgcattacaggcccctagaccactgcctcagctgctagatgaccctcatgaggtcgaaaaaagcgggcttttgaacatgaccaagatcgctcagggagggaggaaattgcgtaaaaactgggggccaagctgggtcgtcttgactggcaacagtctcgtgttttatagagaacctccgcctaccgcgccaagtagcggctggggccctgctggctccaggcctgagtcatcggtggacctgcgaggggcggctctggcacacggaagacatctgtccagcagaaggaatgtactccacatcaggaccatccctggtcatgagtttctccttcagagcgatcacgagaccgagctgcgggcctggcaccgtgcactgagaacagtaatagaaagattggatcgcgaaaatcctctcgagctgcgcctgtctggatccggacccgccgaactatccgccggcgaggatgaagaggaggaaagcgaactggtgtccaaacccctcctacgcctttcgtcaaggaggtctagcattcggggacccgagggtacagagcaaaacagggtgaggaataagctaaagagactaattgctaagcgccccccgctccagagcctgcaagaaagaggccttcttcgggatcaggtcttcggatgtcaattggaaagcctgtgccagcgggaaggggatacggtccctagctttctcagactctgcatcgcagctgtcgacaaaagagggctggacgtcgatgggatttatcgcgtgagcggaaacctggccgtggtgcagaaactcaggttcctggtggaccgggagagagcagtaacctccgatggccggtacgtgtttcccgagcagcccggtcaggaggggagactagatttagatagcacggaatgggatgatatacacgtggtgactggagctttgaaacttttcctgcgggaactgccacagcctctggttcctcccctgctgctgcctcatttcagagccgctctggccctcagccagatacaggagctgatcgggtccatgcccaaacctaaccacgatactctgcggtacctgttagagcatctttgcagggttatagctcatagcgacaagaacaggatgacgcctcacaaccttggaatcgtcttcggcccaacactattccgcccggaacaggaaacctcagatcccgccgctcacgccttgtatcctgggcaacttgtccagctgatgttgactaatttcacctccctcttcccgtag

SEQ ID NO: 132569 - DNA, 2253 bp, synthetic construct
  misc_feature 1..2253: note = Description of Artificial Sequence: Synthetic coding sequence
  source 1..2253: mol_type = other DNA
atgctgtctagccgctggtggccttctagttggggcattctgggcctcggcccacggtctccaccgcgcggtagtcagctgtgtgctctttatgcttttacctacaccggcgccgatggtcagcaagtgagcctggctgaaggcgaccggtttttgttgcttagaaaaacaaattctgactggtggctggctcgaaggttagaggctcctagcacgtcgagaccaatatttgtacccgccgcgtatatgatcgaggaatctataccatcccaatccccaaccacagtgatcccaggacagctgttgtggacccccggtcctaaactattccatggttcactggaagagttgtcccaggccctcccctccagggctcaggcctcaagtgaacagcccccacccttaccgagaaagatgtgtaggagcgtgtcgaccgataacctttcaccgagtttgctaaaacctttccaggaagggccatccgggaggtcactctcccaggaggatctgcccagcgaggctagtgcctcaaccgctgggcctcaaccattaatgtctgagcctcctgtgtactgcaatctggtcgatctccgtcggtgtccacgctctccaccacccggccccgcctgccccctcctgcaaagactggatgcgtgggagcagcatctcgacccaaatagcggaaggtgtttttacattaattccctgaccggatgtaagtcctggaagccgcccaggcggagccggagcgaaaccaatcccggatctatggagggcactcaaaccctgaaacggaataacgatgttttacagcctcaggccaagggttttcggagcgacacaggaacaccagaaccacttgaccctcagggaagcctcagcctgagccagagaacatcccagttggatcctccagctctacaagctccgaggcctcttccccagctgctggacgacccacacgaagttgagaaaagcggtcttcttaatatgactaagatcgctcagggagggcgcaagcttcgcaaaaattgggggccaagttgggtggtgctcaccggcaactcccttgtcttttaccgcgaaccccccccaactgccccttcgtccggctggggaccagcaggttctcgcccagagagtagcgtcgatctgcgtggcgcggccttagcccatggaagacacctcagtagtcggcggaatgttctgcatattaggactatcccaggccacgagtttctgttgcagtccgatcacgagacggagcttagagcctggcatagggccctgagaacagtgatcgaacggctcgtgcgctgggtcgaagcccgccgggaggcgccaacagggcgcgaccaaggctcaggtgaccgcgaaaatcctcttgagctgcgcctgtcagggtccggaccagcagagctgagcgccggtgaggacgaggaggaagaatcagaactggtgtctaagcctctgttgcggctttcatcgcgaagatccagcatccggggccctgagggcaccgaacagaaccgagtgcggaataaactgaagaggctcatcgcgaagagaccacctctgcagagtctgcaggagcgtgggctgcttagagaccaggtgtttggctgccaactcgagtctctgtgccagagggagggggacaccgtgccctcatttttacgcttgtgtatcgccgccgtggataagagaggcttggatgtggatggtatctatcgcgtctctgggaatctcgcggttgttcaaaagctgagatttctcgtcgatagggagagggccgtcacctctgatggaaggtacgttttccccgaacaacctggccaagaggggcgcctagacctcgactccactgagtgggacgatatacacgtggttactggcgcactcaagctttttctccgggagctgccccagcctctggttcctcctctcctcctgccgcattttagagccgcccttgccctttccgaatcggagcaatgcctgagtcaaatccaagaactcattgggagcatgcccaaaccaaatcacgatacgctgcggtatctcttggaacatctctgccgggtcatcgcacatagtgataaaaaccgcatgacacctcataacctgggtatcgtcttcggcccgacactgttccggccagagcaagagaccagtgatccagcagctcacgctctgtatccaggccagttggtgcagttgatgctgactaattttacctcgctgtttccatag

SEQ ID NO: 132570 - DNA, 2196 bp, synthetic construct
  misc_feature 1..2196: note = Description of Artificial Sequence: Synthetic coding sequence
  source 1..2196: mol_type = other DNA
atgctcagttccaggtggtggcccagctcctgggggattctgggtctgggaccccgctctcccccacggggctcacaattgtgcgcgttgtacgctttcacttataccggggccgatggacaacaggtgtctctggccgagggcgacagatttctcttgctgaggaaaacaaactccgactggtggctggcacgacggctggaagcaccctctacctctagacccatctttgtgccagccgcttacatgattgaagaaagcatcccctcccagtcacctacaactgtgattcctggacagctcttgtggacgcccggcccgaagcttttccatggctccttggaagaactatcccaagcactccctagccgagcacaggcttcttctgagcaacctccacccctacccagaaagatgtgtcggagcgtctcgaccgacaatctaagccctagtctactaaaacctttccaggaaggccctagtggacggagcctgtcgcaggaagatctccccagcgaggcctctgcaagcacagccggtccacagcccctgatgtccgaaccccccgtgtactgcaacctggtcgatctgcgcaggtgccctcgttcaccccccccgggaccagcatgtcctctgctgcaacgtctggacgcttgggagcagcacctggaccctaactccggccgttgcttctacattaattcactgacaggttgtaagagttggaagcctcctagaaggtctcgcagcgagaccaacccaggctccatggagggtacacagacactgaagagaaataatgacgtgctgcaacctcaggctaagggtttccggagcgacactggcacccctgagcccctggatccccagggcagtctgagtctctctcagcgcacatctcaactagatcccccagcactccaagcacctcgcccacttccgcagcttctggatgatccacacgaggtggaaaagagtggactgctgaacatgaccaaaatcgcccaggggggcaggaaacttagaaagaactgggggccctcttgggtggtactaactggtaattccttagtattctacagagaaccaccgcctaccgccccgagtagtggttggggccccgccggttcacgccctgagagctctgtggacctccggggtgccgcgttagcacatggaaggcacctctcttcgaggaggaatgtgttacatattcgaactattcctggccatgaattcctattacagtcagatcatgaaactgaactgagagcatggcacagggccttgaggacagtgatcgagagactggaccgggagaacccattagaacttcggctctctgggagcgggcctgcagagctgtccgcgggggaggacgaagaagaggaatctgagctggtgtccaagccacttttaaggctgagtagccggcgctcaagtatccgcgggcctgaggggacagaacagaatagagtgagaaataagcttaagaggctgatcgctaaacgtccgcccctacagtctctccaggagcggggtcttcttcgcgaccaggtgtttgggtgtcagctcgagagcctctgtcagagagaaggtgatacagtgccctcttttctgcgcctatgtatagctgccgttgacaagagagggctggacgtggacggaatttatagagtgtcgggcaatctcgctgtggtccagaaactccggtttctcgtggaccgagagcgcgcagtaacgtctgacggtcggtatgtgttccccgagcaaccgggtcaggaaggtcggctggacctggactccaccgaatgggacgatattcacgtagtgacaggagccttaaagttgtttcttcgggaattgccacagcccttggtaccacccctcctgctgccccatttccgggctgcactcgcgctaagtgagtcggagcaatgcttgagccagattcaggaattgattgggtccatgcccaagcccaaccacgataccctacggtacctgctcgagcacctgtgccgcgtgattgctcactccgacaaaaatcgtatgacgccgcataatcttggtatagtatttggacctacactatttagaccggagcaagagacgagcgaccccgcagcacacgccctgtacccaggccagctggtacaacttatgctcactaactttacgagtctgttcccctag

SEQ ID NO: 132571 - DNA, 2466 bp, synthetic construct
  misc_feature 1..2466: note = Description of Artificial Sequence: Synthetic coding sequence
  source 1..2466: mol_type = other DNA
atgcgacgggggagcagcgattcatgtgctagcgggtcccaagtggcagggactaccgttgcgggaccagcccaccctgaatctttgacactatgctccggagaagctgagcgtagggggaaggaagagtggccagactctcatcattacccagggccaactccagcaccagagtccagtgatggccctcacaaggtaacagtcctagcaactatgctgtcgtctcggtggtggcccagcagctggggtatcctgggcttgggacctcggtccccaccacgcggctcccagctgtgcgctctgtacgcgtttacttataccggcgctgacggccaacaagtctcactggccgagggggacaggttcctcttgttacgaaagaccaacagcgactggtggctggccagaaggctagaggctccctctacaagccgacctatcttcgtgccagctgcctatatgattgaagaatctataccaagtcagtcccccacgacagtgattcccggacagcttctgtggacccccggccctaagctttttcatggctctctcgaggagttgtcacaggccctgccctccagagcccaggcgtcctccgaacagcctccacccctcccaaggaagatgtgccgatcagtatctacagacaatctgagtcccagcctgctgaagccatttcaggaaggcccctctggacggagtctcagccaggaagatctgccatcagaggcgtccgcctctactgcggggccccagcccttgatgtccgagccccccgtttattgcaatcttgtagatcttcggcgctgccctagatcacctccaccaggacccgcctgcccactactccagcgactcgacgcctgggagcaacacctggacccgaattcgggcaggtgcttctatatcaactccctcactgggtgcaaatcttggaagcccccgaggcgcagcagatctgagactaacccaggatctatggagggtacccaaaccctgaaaagaaacaacgacgtcctgcagccacaggccaagggttttaggtccgacactggcaccccagaaccattggatccccagggtagcttatctcttagccaacgaactagtcagctcgatccccccgcactccaggcacctcggccactacctcagttgttggatgatccccatgaggtcgaaaagtccggtctgctcaacatgaccaagattgctcagggaggcaggaagctcagaaagaattggggcccctcatgggtcgtgttaactggtaattctctggtcttttacagagaaccgccgcctacagcgccttcatctgggtggggccccgctgggtcccgacccgagtcatcggtagacctgaggggcgccgctctggcccacggccggcatctttcctcacgtaggaatgtcctacacattcgtactatccctgggcatgaattcctcctgcagtccgatcatgaaactgagctgcgtgcatggcatcgtgccctcaggaccgtgattgagcgtctggtccggtgggtcgaagcccggagagaggcccctaccggtcgggaccaaggcagtggcgaccgtgagaaccctctcgagctgagactatcagggagtggtcctgctgagctgtctgctggcgaggatgaagaagaagagagcgagttggtgtcgaagcccctgctccggctatcctctaggcggtctagcatcagaggcccagagggaactgagcagaacagagtacgaaacaaacttaaaaggttgatcgctaagcggccccccctgcagagcctgcaggagcgtggcctgttgagggatcaagtgttcggctgtcagctggagagcctctgccagagagagggggatacagtgccctcgtttctcagactgtgtatcgctgcagtggacaagcgcggcctggatgtggacgggatatatagagtgtcaggcaacttggcagtggtccaaaagttgcgatttctggtcgatcgagagcgcgctgtgacgtccgacggccggtacgttttccctgagcagccgggtcaagaaggccggctcgacctggatagcactgaatgggatgatatccatgtagtaaccggcgctttaaagctgtttcttcgcgagctaccacagccattggtgcctcctctactgctgccccactttcgagccgcccttgctctttcggagtctgagcaatgcttgtctcagatacaagagctgatcgggtctatgcccaaaccaaaccacgatacgctacggtacctactggagcacctgtgtagggtgatcgcgcactcggacaaaaatagaatgacccctcacaatttgggcatcgttttcggcccgacactgttccggcctgaacaagaaacttcagacccagcggcccacgcactgtacccagggcagcttgtgcaactgatgctgaccaacttcactagtttgtttccctag

SEQ ID NO: 132572 - DNA, 900 bp, synthetic construct
  misc_feature 1..900: note = Description of Artificial Sequence: Synthetic coding sequence
  source 1..900: mol_type = other DNA
atgacaaaaatagcccagggagggcgcaagctgcgaaagaactggggcccaagttgggtcgttctcacagggaatagtttagtcttttacagggagcctccgcctacagctccctcgagtggttggggacctgccggctctagaccagagtcaagcgttgacctgaggggcgccgccttagctcatgggcggcacttatcatcaagacgaaacgtgctacacatccggaccatcccaggacacgaatttctactgcagagcgatcacgagacagaacttcgggcctggcatcgggccctgagaactgtgatcgagcggcttgacagagagaatccattagagctccggctgagcggaagcggacccgcagaactgtccgccggagaggacgaggaagaagagagtgaactggtgtccaaaccactcctgcgcctgtcatcaagacgctcttcaatcaggggtccagaggggacagagcagaatcgagtgagaaacaagctcaaacgcctgatcgccaaaaggccaccacttcagtcactgcaggaacggggcttgctccgcgatcaggtgtttgggtgccagcttgagtcgttgtgtcagagggaaggtgatacagtcccctccttcctgagattatgcatcgcagctgtggacaaaaggggtttggatgtcgatggaatttacagggtatcagggaacttggctgtggtgcagaagctcaggtttctggtggacagggagcgagctgtgacctcagatggtcgttatgtttttcctgaacaacctggtcaggcattatccgagtccgaacagtgcctcagtcagattcaggaactgattggatccatgcctaagcccaaccacgatacactccgatacctcctggagcacctatgttag

SEQ ID NO: 132573 - DNA, 1923 bp, synthetic construct
  misc_feature 1..1923: note = Description of Artificial Sequence: Synthetic coding sequence
  source 1..1923: mol_type = other DNA
atgctcagtagcaggtggtggccatccagctggggcattctcggtctcggacccagatcccctcccagaggttcgcaactgtgcgccctctatgccttcacctacaccggagcagatggacagcaagtgagcctggctgagggggatcgttttctcctgctgcgcaagaccaactcagactggtggttggcacggaggctcgaggctcctagtacctcccggcccatttttgtgcctgccgcatacatgatcgaggagtctataccctcacaatcacctaccacagtaattcctgggcagttgctttggactcccggcccaaagcttttccatggcagtttggaagagcttagccaagccctcccctcacgggctcaagcttcatcagagcagccccctcccctccctcggaaaatgtgcaggtccgtatctacagataacctgagtcctagcctgctgaaaccattccaagaggggcctagcggccgttcactttctcaggaggacttgcctagcgaagccagcgccagcacagccgggccccaacctctgatgagcgaacctcctgtctattgtaatctcgtcgatttgcgacggtgcccgaggtcacccccacctgggcccgcgtgcccactgctgcagcggctggacgcttgggaacaacacttggatcccaattccggccggtgtttttacataaactcattgactggatgtaaaagttggaagcccccaagacggagtagaagtgagactaatccggggtccatggaaggcacacagacactgaagagaaataatgacgtactgcagccccaggcgaaaggattccggtccgacacagggactcctgagcctttggacccacaaggttccctctctctgagccagagaacctcccagttggaccctcccgcgctgcaggccccccgccccttgccacagctgctggacgatcctcacgaagtggagaagagtgggctgcttaacatgacaaaaatagcccagggtggccggaagcttagaaagaactgggggccatcatgggtggtccttactggcaattcattagtgttctaccgcgagcctccccccacagctccctcatcagggtggggtccagccgggtctagacccgagtcaagcgtggacttgaggggcgctgccctggcacatggcagacacttaagctctcgtcggaatgtattgcacattcggacgattcccgggcacgagtttctgctgcaaagcgaccatgaaacagagctgcgtgcgtggcaccgggcactcaggaccgtcatcgaacgcttagatagagagaatccacttgaactccggttgtccggctccggccccgccgaactctctgccggcgaggacgaggaggaggaaagcgaactggtgagtaagcctctgctgcgcctctcctccaggagatccagcattcgcggccccgagggcaccgagcagaatcgagttaggaataaactcaagcgccttatcgccaagcgtccacccctgcagtctttacaggagcggggcctgcttcgggatcaggtattcggatgtcagctggaatctctgtgtcaacgggagggtgatactgtcccatctttcctgagactgtgcatcgccgctgtggacaagagagggctcgatgtggatgggatttatcgtgtgagcggcaatctagcagtagtgcagaagctgcgcttcttggtagatcgggagcgcgccgtcacgtcagatgggcgctacgtctttccagaacagccaggccaggaaggacgcctcgatctcgattccaccgaatgggatgatatacatgtcgtaaccggagcgcttaagctgtttctgcgagaactcccacaaccactcgttcctcccctgctgcttccccatttccgggctgctctggggtag

SEQ ID NO: 132574 - DNA, 1644 bp, synthetic construct
  misc_feature 1..1644: note = Description of Artificial Sequence: Synthetic coding sequence
  source 1..1644: mol_type = other DNA
atgtctgaacctccggtttattgcaacttggttgacctcagacggtgcccacggtccccacctcccggcccagcttgcccacttctgcaacggctggatgcttgggagcagcatctcgacccaaattcggggcgttgtttctatatcaacagtctcaccggctgtaaatcatggaaacctccaaggagatcaagatcagaaaccaatccaggctccatggaggggacccaaactctcaaacgtaacaacgatgtgctacagccgcaggctaagggcttccggagtgacactgggacacccgagcccctcgatcctcagggttctctctcgctgtcccagcgaacctctcaactggatccgccggcccttcaggctccgagaccactccctcagctactggacgaccctcatgaagttgaaaaaagtgggctactgaatatgaccaaaatagcacagggaggccgaaagctgaggaaaaactggggaccttcttgggtggtgctgactggcaattccctagtattctatagagagcctccaccaacagcacccagttccggttgggggcctgcaggcagtcggccagagagttccgtcgatctgcgcggggcggcgttggcccacggtaggcacctttcctctcgtcgtaacgtgctccacataagaaccattccgggccacgagttcctgttgcagtccgatcatgagacagaactcagagcctggcaccgagccttaaggacagtgattgagcgattagacagggagaaccccctggaattgaggctctccggctctgggccagcggagctgagcgccggcgaagacgaggaggaggagagcgaacttgtgtcgaagccactgctgaggcttagtagtcgaaggtcatcgatacggggaccagaaggtactgaacagaatcgagtgaggaacaagctcaaacggctgatagcaaagaggcccccactccagtcccttcaggagcgcgggctgcttcgagatcaggtgtttgggtgtcagctcgagagcctgtgtcagcgggagggcgatacagttcctagtttcctgagactctgtattgctgcggtggataagaggggcctggacgtggacgggatctatcgagtgtctggtaatttagctgttgtgcagaagttgcgtttcctcgtagacagggaacgtgcggttacctctgatggccggtacgtgttccctgaacagcccggccaggagggtaggctggatctggactctacagaatgggatgacattcatgtagtcactggggcactgaaattattcctaagggagctgccccagcccctcgtgccccccttactcctaccacacttccgggctgccctggctctttctgaatccgagcagtgtttgagccagattcaggagctgatcggcagcatgcccaagccgaaccatgacactctgaggtaccttttggaacacctctgtcgcgtgattgctcacagtgataagaaccggatgaccccacacaacctgggtatcgtcttcggcccaacccttttcagaccggaacaagagacgtccgatcccgccgcacacgctctatatcctggccagctggtgcagctaatgctcacaaatttcacaagtctctttccatag

SEQ ID NO: 132575 - DNA, 894 bp, synthetic construct
  misc_feature 1..894: note = Description of Artificial Sequence: Synthetic coding sequence
  source 1..894: mol_type = other DNA
atgtcagagcctccggtctattgcaatctcgtggatttgcgcagatgtccacggtcaccacctcccggccccgcctgcccactcctccagcgtctcgacgcctgggagcagcatctcgacccaaattcaggtaggtgtttttatattaactccttaacgggttgtaagtcctggaagcctcccagaaggtcacgaagcgagaccaaccctggcagcatggaaggcacccagactctcaagcgaaacaatgatgtgctgcaacctcaagcaaagggttttcgtagcgacactgggacccccgagcccctggatcctcaagggtcactgtcactcagtcagagaacttcccagctcgacccgcccgctctgcaggcccctcgcccacttccacagctgctcgatgacccccatgaggtggagaaaagcggtcttctcaatatgacgaagatcgcccagggcggcagaaaactccggaaaaactggggaccttcttgggtcgttctgacggggaacagcctggtattttatcgggagcccccccccaccgctccgagctccgggtggggccctgctggatcccgccccgaatccagtgtagatttgcgtggtgctgccttggcgcatggacggcacctgagctcacgtcggaatgtgctccacattcgtactatccccgggcatgaattcctcctgcagtctgatcatgaaacagaactcagagcctggcatagagctttgagaacagtgatcgaacggcttgaccgtgagaaccctctcgagctgagattgtcaggttctggaccagcagagctgtccgccggagaagatgaggaggaagagagcgagcttgtgtctaaacccttgctacgcctctcttcccgacgctccagttag

SEQ ID NO: 132576 - DNA, 186 bp, synthetic construct
  misc_feature 1..186: note = Description of Artificial Sequence: Synthetic coding sequence
  source 1..186: mol_type = other DNA
atgtcagagcctccggtgtactgtaacctagtagatttaagacgatgtcccaggtcccctccaccgggcccagcctgcccactcctgcagcgcctggatgcctgggagcagcacctggatcccaattcagggcggtgtttttacatcaattccttgaccggctgtaagagctggaagcctccctag

SEQ ID NO: 132577 - DNA, 471 bp, synthetic construct
  misc_feature 1..471: note = Description of Artificial Sequence: Synthetic coding sequence
  source 1..471: mol_type = other DNA
taagaaggggacacagtcccgtctttcctgcggctatgcatcgccgccgtggacaagcgaggcctggacgtggacggcatctatagggtctcgggtaatctcgccgtggtgcaaaaattgagatttctggtagaccgggagcgtgccgtgacaagtgacggcagatacgtgtttcctgaacagccgggccaagctctgtctgagagcgaacagtgtctctctcagatccaggagttaatcggttcaatgccaaaaccaaatcacgacaccctacgatacctactcgagcacttgtgccgggtgattgctcacagcgacaagaacagaatgactccgcacaacctaggaatcgtgtttggacctacattgttccgacctgagcaggagactagcgatcccgcagcccatgctctctacccggggcagctcgtccagctgatgctgaccaactttacctcactcttcccctag

SEQ ID NO: 132578 - DNA, 396 bp, synthetic construct
  misc_feature 1..396: note = Description of Artificial Sequence: Synthetic coding sequence
  source 1..396: mol_type = other DNA
atgtcagagcctccagtctactgcaacttggtggacctgcgccgctgtccccggtcccccccacccggtccggcctgtcctcttttacaaagactggacgcgtgggagcaacatttggatccgaactcgggacggtgtttttacattaattcccttaccgggtgtaaaagttggaagcctccacggcgttcccgaagcgagacgaatcctgggagcatggaaggcacccagactctaaagcggaacaatgatgtgttgcagccccaagcaaagggattcagatctgatactgggacgcccgagcccctcgacccgcaaggatcgctgtccctgagtcagcgcacctcccagctggaccccccagctctgcaggcccctagaccccttccacagtag

SEQ ID NO: 132579 - DNA, 2028 bp, synthetic construct
  misc_feature 1..2028: note = Description of Artificial Sequence: Synthetic coding sequence
  source 1..2028: mol_type = other DNA
gaacccgggtcagggagtcgggaccccggacctggcatagccgaacccgacctgggtcgccctgctgggcaccttagagctgatacatccccggcagaacctagggagatggaggactttgctcgaggagccgcctcccccgggccttctaggcccggtctggtgcccgttagtatcattggggccgaggatgaggactttgaaaatgagctggagactaatagcgaggagcaaaattcacagtttcagtctcttgaacaagtcaagagaaggcctgctcacctgatggccctcctacagcacgttgccttacagtttgaaccaggtcccctgttgtgctgtctgcacgcagatatgctgggtagtttgggtccaaaggaggccaagaaagccttccttgacttttaccacagctttctggaaaagaccgccgtcctgcgcgtaccagtgccgccaaatgttgccttcgaactagaccgtactcgagctgatctgataagcgaggacgtccagcggcgcttcgtccaggaagtggttcaatcccagcaggttgctgtgggccggcagcttgaagattttcgctccaagcggctgatgggcatgaccccttgggaacaggagcttgctcaacttgaggcctgggttggcagggaccgcgcctcgtatgaggctagagaaagacacgtggccgagcgcctgctgatgcacttggaagagatgcagcacaccataagcactgacgaggaaaagagtgccgccgtagtgaatgctatcgggctatacatgcggcatctgggcgtgagaacaaaaagcggggacaagaagtctggcaggaatttcttccgcaaaaaggttatgggaaatcgccgaagcgacgagcctgctaagactaagaaaggtctcagctccatcttagacgctgcgcggtggaataggggagagccccaggtgcccgactttagacatttgaaggcggaggtcgatgccgagaaaccaggagcaacagaccggaaaggtggggttggaatgccatcacgagacaggaatattggggcccctggccaagacacaccgggtgtatcccttcacccactcagcctagattcacccgaccgtgagccaggcgccgacgccccactggaactgggcgattcatcaccccagggtcccatgtcgctcgaaagcctggccccgcccgaatctactgacgaaggcgcagagacggagaggtgcccaggatggggggctggagccggaggtgtcgcttactgggctttggtaggaggctgtcgagtgactgccgctatttgtgcatgcctgtctcaggctcttgctccccatgcacccctcctgctatcaggctcaggacactcgagtcctttcttctttccatttctgatctcactgctgctgccacactgtcctcctttcctgctgtcgttcctcttccctttactgctccccctgttgcctttcttcaccaacccttctccacctccattcttgtccaccaccccaagtatcagttttatctcatctccactgctgagccacctacccccccccttgttcccgcctcattcctcacttacgtgggtcttttttcctcacctacccagcccttccgatttacctgccacattccactttttctccccaagtccattctcttttaagccaccatgccccctacccccgacaccgcggctggcaccggcctcctggtgtccatcattgaatcctcctcccctgtgtagcgttccgtggggtccttgcccgccttacagctggggtgctggctcagcatcttgcccaagtctgtgccgatgctttggcgatcctctcgtgggcgcaggacgctgggttcgtttccaccttggaccacctctgacactgtgcccatcgcttccgcgaaggtggaaaaggtgggtgcctggaccatgggtgggagagggtttagccccgcccccattcttacccgcccctcccctgtctccgtggcccttaccacccttgcactctctttag

SEQ ID NO: 132580 - DNA, 2784 bp, synthetic construct
  misc_feature 1..2784: note = Description of Artificial Sequence: Synthetic coding sequence
  source 1..2784: mol_type = other DNA
atggcctccctgtcaacgtggagctccccggccgagcccagagaaatggaagattttgctaggggggctgcctcaccagggccctcccgaccaggactcgtgcccgtgtcaatcatcggggccgaggacgaagattttgagaatgagctggagactaactcggaagagcagaattcgcagtttcagagcttagagcaggtcaagcggcggcccgcacatttgatggctctcctgcaacatgtcgccttgcagtttgaacccggaccgctcctctgttgtctgcacgctgacatgctgggctcccttggccccaaggaagctaagaaggcttttcttgacttctaccactctttcctcgaaaagacagccgtcctaagggtaccagtccctccaaacgtagcctttgagcttgaccgaacacgagccgacctcatctctgaggacgtccagcgccgcttcgtgcaggaagtggttcaatcccaacaggtcgcagtgggacgacagttggaagacttccgcagcaagcgtttgatgggaatgaccccctgggagcaggaactagctcagctggaggcttgggtcgggagggacagggcctcatacgaagcacgcgaacgccacgtggcagagagacttctaatgcacctcgaggagatgcagcacactatatccaccgacgaggaaaagtccgctgctgtggttaatgccatcggactgtatatgcgtcacctgggagtcagaacaaagagtggagataagaaaagcggcaggaattttttccgtaaaaaagtgatgggaaataggcgcagcgatgagcctgccaaaacgaaaaaagggctctcaagcatccttgatgccgcccgatggaacaggggcgagcctcaggttccggacttccgccaccttaaggccgaggtcgatgcggagaagcccggggctacagaccggaaaggcggggttgggatgcccagccgggacagaaacatcggagctcccggacaggacacgccgggggtttctctgcatccgttgtctctggattcacccgaccgagagccaggagccgatgcaccactggagcttggggacagtagccctcagggcccgatgtccctggagagtctggctcccccagagtctactgacgagggagccgagacggagtcccccgaaccgggcgatgagggcgagcctgggcgcagtggtctggaacttgagcccgaggagcctccagggtggcgagaactggtaccccctgacaccctacatagccttcctaagagccaggtgaaaagacaggaggtaatttcagaactgctggttaccgaggccgctcatgtgcgcatgcttcgggttttgcatgacctcttttttcagccaatggctgaatgcctcttctttccactggaagagttacagaacatctttccttcactggatgagctcatcgaagttcattctctgttcctggaccggctcatgaagcgcaggcaggagtcgggatatcttatagaggaaatcggcgatgtcttgctagcacggttcgatggagcagaagggtcctggttccagaagatctcaagtaggttttgttcgcgtcagtcatttgccctggaacaattgaaggctaagcagcgtaaggaccccagattctgcgcctttgtccaggaggccgagtcccgccctcgatgtagacgtcttcagcttaaagacatgatcccaacagagatgcaacggctgacaaaatacccactgctgctccaaagtattggccagaacactgaagagccaaccgagcgcgagaaagtggagctcgctgctgagtgctgcagggaaattctgcatcacgtcaatcaggcggtgagggatatggaggatcttcttaggctaaaagactaccaacgcagactcgatctcagccatctcagacagtcctccgatcccatgctgtctgaattcaaaaatctggacatcacaaagaagaaattggtccatgaagggcctctcacctggcgtgtgacaaaagataaagctgtggaagtacatgttctcctcttggatgatctgctgctcttgcttcagagacaggacgagagacttctgttgaagtcacactctaggactctgacccctacgcccgacgggaagactatgctgcggcccgtcctgaggctcaccagcgccatgacaagagaggtcgctaccgaccataaagccttctatgttctgttcacctgggaccaagaggcccagatatacgagctcgtggctcagacagtcagtgaaaggaagaattggtgcgccctgattacagagacagcaggaagccttaaagtgccagcaccggcgagcagacccaagccccgcccatcaccaagctcaacacgcgagcctctcctaagttcatccgaaaacggcaacggagggagagagacatcacctgctgatgctagaactgaaagaatcctatccgacctcctacctttttgccgacccggccccgagggacagcttgctgcaactgctctgagaaaagtgttgagcttgaagcagctgctctttcctgctgaggaggacaacggtgcaggccccccgagggacggggacggagtgccggggggaggtccactttctcctgcgcgaacacaggagatccaagagaacctgttgtctctagaagagaccatgaaacagctggaagaactggaggaggagttttgcaggttacgcccattgctttcccaacttggcggcaatagtgtgccgcagcctggctgtacctag

SEQ ID NO: 132581 - DNA, 2640 bp, synthetic construct
  misc_feature 1..2640: note = Description of Artificial Sequence: Synthetic coding sequence
  source 1..2640: mol_type = other DNA
atggaggatttcgccaggggcgccgcttcacccggacccagcagacctggtctcgtgccagtctcaatcattggcgccgaagatgaggactttgagaacgaactcgagactaactcagaagagcaaaattcacagtttcagtccttggagcaggtgaagcgacggccagcacacctcatggccctgctacagcatgttgcattacagttcgaacccgggcccctcgtcctgagggttccagtgccacccaatgtcgcattcgaactcgatagaacgagagccgaccttatcagcgaagacgtgcagaggcgctttgtgcaggaggtggttcagtcacagcaggtggccgtaggcagacagttggaggacttccggtctaagaggttaatgggaatgactccctgggaacaggaactagcacaactggaggcctgggtggggagagatcgggccagctacgaagcgagagaacggcacgtcgcggaacgtctgctcatgcatcttgaagaaatgcagcacactatctctaccgacgaagaaaagtcagctgccgttgtaaacgccattggcttatatatgagacacctcggtgtgcgcactaagtctggagacaaaaagtcaggcaggaattttttccgcaaaaaggtgatgggcaataggcgatcggatgagcctgccaagaccaaaaaaggcttgtcctccatactcgacgccgcaagatggaatcgcggggaaccgcaggtgcccgattttaggcacttgaaagcggaagtggatgctgagaagcccggagccaccgatcgcaagggaggagtagggatgccaagtcgggaccggaatataggcgcccctggccaggatactccaggggtatctctgcatcccctcagtctggacagccccgacagagagccgggcgccgatgcaccattggagctgggagatagctctccccaaggtcccatgtccctggagtcgcttgctccccctgaaagtaccgacgaaggcgccgaaacggaaagcccagaacccggcgacgagggcgaacctggtcgctcgggcttggaattggagcccgaggaaccccccggatggcgcgagctcgtaccgcccgataccctccattcactgccaaagagccaggtgaagcgccaggaggtaatttccgagttgctcgtcactgaggctgcacacgtgcgtatgctcagggtgctgcacgacctcttttttcagcctatggcagagtgcctgttctttccactcgaagagctgcagaacatcttcccaagcctggatgaactcatagaggtgcattccctgtttctagatcgcctgatgaagcgccgtcaggagagcgggtatctgatagaggagattggcgatgtgcttctcgcccgattcgatggggccgaagggagttggttccagaagattagttctaggttttgcagtcgtcagtctttcgcccttgagcagcttaaggccaaacaacgaaaagacccccgcttctgtgcgtttgtacaggaggccgaatcccgtccgcggtgccggcgtctccagctcaaagacatgattccaactgagatgcaacgcctgaccaaataccctctcctgctccagtctatcggacagaacacagaagaaccaacggagagagaaaaggtggagctggcggcagaatgctgtcgcgagattctgcatcatgtgaatcaagccgttcgggacatggaggacctgttgcgcctgaaagattaccagcgcaggttagatctgtcccatctaagacagtcgtcagatccaatgctatcagagttcaagaacttggatatcacaaagaaaaaactggtccatgaggggcccttgacctggagggttactaaagataaggctgttgaagtgcacgttttacttctggatgatctcctgttgctattgcagcgccaggatgagcgcttgcttctaaagagccatagcagaacgcttacccctacaccggacggcaagacaatgttgaggcccgtgctacggctgaccagcgcaatgactcgggaggtggcgactgaccataaagccttctatgttctttttacttgggatcaggaggcacaaatttacgagctggtcgcacagaccgtgtccgagcgcaaaaactggtgtgcgctgatcacagagaccgccggaagcctcaaggtccccgccccagcctcgagacccaagcctcgaccctcaccatctagtaccagagagcctctcctgagctcttccgagaacggaaatggtggaagggaaacttcccctgccgacgcacgaacagaaagaattctgtcagacctgttacctttttgtcgacccgggccggagggacaattagctgccacagccctacggaaggtcttgtcactgaaacagcttctcttcccagctgaagaagataatggtgctggccctcccagagatggcgacggggtgcctggcggcgggcccctgagccccgctaggactcaggaaatccaggagaatctcctgtccctcgaggaaaccatgaaacagctcgaagagctcgaggaggaattttgtaggcttcggcctttgctgtcgcaattggggggtaattcagtcccgcaacctggctgtacatag

SEQ ID NO: 132582 - DNA, 2739 bp, synthetic construct
  misc_feature 1..2739: note = Description of Artificial Sequence: Synthetic coding sequence
  source 1..2739: mol_type = other DNA
atggaggacttcgctcgcggggctgcctcacccggaccaagccggccaggattagtgcccgtgtcaatcatcggggccgaagacgaggattttgagaacgaactcgagaccaattctgaggaacagaactcgcagttccagtcgctggagcaggtcaaaaggcgaccagcacaccttatggctctactgcaacatgtagccctacagtttgaacctggccccctgctttgctgtctacacgcagatatgcttggtagtctaggtccaaaggaagcaaagaaagcattcctcgacttttatcactcatttttagagaagactgcagtcctgcgggtaccagtgccccctaacgtggcattcgagctcgatcggacccgggccgacctgatcagcgaggatgtgcagaggcgctttgtccaggaggtggttcagagccagcaggttgcggtagggcgtcagctggaagatttccggtctaaacggctcatgggtatgactccatgggagcaggagctagcacagctcgaggcatgggtagggagggatagagcctcctatgaagctagggagcgccacgttgcagaacggctgttgatgcacctagaggagatgcaacacacaatatctacggatgaggaaaagtccgctgccgtggttaacgccataggcttatacatgagacaccttggtgtccggacaaaatcaggtgataagaaatccggccgcaattttttccgtaagaaggtgatgggaaatcggcgttcagatgagcccgccaagaccaagaagggtttgtcaagcattttggatgccgctcggtggaaccggggagagccccaagtgcctgattttcgccatctcaaagcggaggtcgacgctgaaaaacccggagcaaccgatcgaaagggtggcgtggggatgcccagtcgggatcgcaatatcggtgccccaggtcaggatactccaggggtttccttgcatcctctgtctttggactctccagatagagaaccaggggcagacgcccccttagagttgggagattcatcgccgcaaggacctatgagccttgagtctctggctcctccggagagtactgacgaaggagctgagacagaaagcccggagccgggagatgagggcgaaccgggaagaagtggcctggagctggagccggaggagccacccggctggcgtgaattggtgcccccagataccttgcacagcctgcctaaatctcaggtgaagcgacaagaagtgatttccgagcttctggtaaccgaggcagctcacgtgcgcatgttgcgcgtcctccacgatttgttcttccaacccatggcagagtgtttattcttcccactggaagaactccaaaacatattccctagtctggatgaattaattgaggtgcatagcttattcctcgaccggttgatgaaaagacggcaggagtccggatacctcatcgaggagataggggacgtgttgctggcacgattcgacggggccgaggggtcctggtttcagaaaatcagtagcagattttgtagccggcagtcctttgcactcgagcagctgaaggccaaacagcgcaaagacccaaggttctgcgccttcgtccaggaagcagagagtcgaccgcggtgcagacgcctgcagctgaaagatatgatacccaccgagatgcagcgattaactaagtatccattgctgctgcagtcaatcggacagaatacagaagagccaacagagcgcgagaaagttgagctggctgcagaatgctgccgggagattctccatcacgtcaaccaggccgttcgcgatatggaagatctgttgcgcttaaaagattatcaacggcgcctggatctttctcatttgagacaatccagcgacccaatgctcagcgagttcaagaaccttgacattaccaagaaaaaacttgtgcacgagggacccttgacttggcgggtcaccaaagacaaagcagtcgaggttcatgtattgctcttagatgatctcctgctcctacttcaaaggcaagacgagcggcttctgttgaagtcccactctaggactctgacccctacacctgatggcaaaacgatgctgaggccagtactacgcctcacctctgcaatgactcgcgaggtagcaaccgaccataaagctttttatgtgctgttcacctgggaccaggaagcccagatttatgaactggtggcacagaccgtcagcgagcgtaaaaattggtgtgccctgattacagagacagccggctctctgaaggttccagctcccgcctcaagacctaagcctcggcctagtcccagttctacgcgggaacccctactgtcatcttccgagaacggaaacgggggacgcgagacgtccccagccgacgctaggaccgaacgaatcttgagcgatttgctccctttttgtcgacctggtcccgaggggcagttagcggccaccgccctccgtaaggtgctgtctttaaaacagctgcttttccctgccgaagaggataacggggccggacctcctcgagatggagatggagtgccaggcggaggtcctttgagtcccgcacggactcaggagatccaggagaacctgctgagtctggaggagacaatgaagcagcttgaggagctcgaggaggaattctgccggctgcgccccctcttgtcacagctgggcggcaactccgtgccacaaccagggtgtacatag

SEQ ID NO: 132583 - DNA, 2847 bp, synthetic construct
  misc_feature 1..2847: note = Description of Artificial Sequence: Synthetic coding sequence
  source 1..2847: mol_type = other DNA
atggcgagcctttcaacgtggagctcaccagctgagccccgggagatggaggactttgcccggggcgccgcgtctccgggacccagtcgccccggtttggtccctgtgtctatcattggcgctgaagacgaggatttcgagaacgagctggagacaaatagtgaagaacagaattcccagtttcagtctctggagcaggtcaagagaagacctgctcatctcatggcgctgctgcagcatgtggccctgcagtttgagcccggcccattggttttgcgtgtccctgtgccccccaatgtcgctttcgaattagacagaacccgtgctgacctgatttctgaggatgtacagcggcgatttgttcaggaggtggtacaaagccagcaggtggccgttggtcgacagcttgaagattttcgatccaaaaggctcatgggcatgactccttgggaacaggaactcgctcaactggaggcgtgggtcggcagagatagggctagctacgaggcaagggaacgacatgttgcagagcggttactgatgcatctggaggaaatgcaacacaccatctcaacagatgaggagaagtccgccgctgtagtcaacgcgattggactatacatgaggcatctgggggtgcgtaccaaatcgggggataaaaagtctggaaggaatttttttagaaagaaagtgatgggcaataggcgctctgacgaacccgccaagacaaagaagggtctgagcagcattcttgacgctgcgaggtggaaccggggcgaaccacaggtgcccgatttccgtcatctcaaggctgaagtggacgcagagaaaccaggcgccaccgatcgcaaagggggggtgggaatgccatcccgggacagaaacattggggcccccggacaggatactcctggggtgtcactgcaccctctgtccttagatagccccgatagagaacccggtgccgatgcccctctcgaacttggagattcttcccctcagggcccaatgtccctggagtccctggccccgccagagagcaccgatgagggagctgagacggagagcccagaacccggggacgagggagaaccagggcgatctgggctggagctggagccagaggagcccccagggtggcgagagttagtgcctcctgacactcttcacagtctccctaaaagtcaggttaagcgccaggaggtcatctctgagctgcttgtgaccgaggccgctcacgtgagaatgctccgggtgctgcacgacctcttcttccagcccatggcggaatgcctgttttttcccctggaggagctgcagaacatattcccttccctggacgagctcatcgaggtccattctctttttctggataggctgatgaagcggagacaagagtcaggataccttatcgaagagattggtgacgtgctgttggccagatttgatggcgccgaaggaagttggtttcagaagattagctcccggttctgttcacgacaatcattcgcgctggagcagctgaaagccaagcagaggaaagatccaaggttctgcgcctttgtgcaggaggccgaatcaaggccccgctgcaggcgattgcaacttaaagatatgatcccaaccgaaatgcaacgattgactaagtatccactgttgttgcagtctataggccagaataccgaagagcccacggagcgggaaaaggtggagctggcggcagaatgttgccgagaaattctgcaccacgtcaatcaagccgttagagatatggaagatctgctgaggctcaaggattaccaaaggcgtctcgatctctcccacctccgccagtcctcagacccaatgttatccgagttcaagaacctggacattaccaagaaaaagttggtgcatgaggggcctcttacgtggcgggtgacaaaggacaaagctgttgaggtgcacgtgctgctcctcgacgacctcctgctgctcctccagcgtcaggatgagcgcctgctcctaaagtcacacagccggacactcacacctactccggacggcaagactatgcttagaccagtcttgcgccttacttcagccatgactcgtgaggttgcaaccgatcacaaagccttttatgtcttgttcacatgggaccaggaagcccagatttatgagctcgtcgcacaaacggtcagcgaacgcaagaactggtgcgccctgattactgaaaccgctggctccctgaaagtgccagctcccgcctcaagacccaaaccacggccctcaccctcctcaacgcgggaaccactcctgagttctagcgagaacggcaacggaggccgtgagacgtcccctgccgacgcaagaactgaacgaatcctcagcgatttgctgccattctgtaggcccgggccggaaggccagttggcagccacggcactgcggaagggcgtcggaggcgggattctgccgccagagactcctcctgtgtccgcatggggagaactgtgcccacccgcctggttacacttgcggtttcctcccaggaaagcattctgtaaaaaggagcggaatggcggcgaggatgttcgggatcacccgcacccacactcctgtcgaagcatttctcatccggagggactcaggagggggtcatgtgggcctcgcctcggtggtgcccagttaggactgctagcgccacatgagccacggccgagcctccctcccgcattatgcctcggcgattctggactgcactctggcgggcatcacggggatcccgggcacctgtccatcgcctgcggaggccatcccagcactccaactcccaaatgcctgcgctctgtctttatcccatag

SEQ ID NO: 132584 - DNA, 4023 bp, synthetic construct
  misc_feature 1..4023: note = Description of Artificial Sequence: Synthetic coding sequence
  source 1..4023: mol_type = other DNA
atgcgccctccagggtttctttcacgggcccctagcctgaatcgagccgagagaggcatttggtcatgcagcatggaccaacgagaacctctccctccggcccctgccgaaaacgaaatgaaatatgacaccaataacaatgaggaggaggagggcgagcagttcgacttcgacagtggggacgaaattcccgaggctgatcggcaggccccaagcgcacctgagaccggcggggcaggagcctccgaagcccctgccccgaccggtggggaagacggcgcaggagccgagacaacaccagtggccgagcccacgaagctggtgctccctatgaaagtcaacccctactcagtgatagacattaccccttttcaggaggaccaaccccccactcccgtccccagcgctgaggaagaaaacgttggcttgcacgtgccgtgcggatatttggtgcccgtcccgtgcgggtacgctgtaccaagtaacctgccactgctcctgccagcttacagctctccagtgataatttgcgcaacatcccttgacgaagaagccgaaactcctgaagtgaccgaagataggcagcccaactctctgtcctccgaagagccacctacttcagaggaccaggttgggagggaggatagtgccctcgccaggtgggcagcggacccggctaacaccgcatggatggagaatccggaagaggccatctatgacgacgtgccaagagaaaacagtgattccgagcctgacgaaatgatatacgatgatgtagagaatggagacgaaggcgggaactcttctttagagtatgggtggtccagcagtgagtttgagtcctatgaagagcaatctgacagcgaatgtaagaatggcatcccgagatcattcctgagaagcaatcacaaaaagcagttgtcccatgacctgacacggcttaaagagcattacgagaagaaaatgagggacctgatggcctctactgtaggcgtcgtagagatacagcagttacgccagaagcatgaactgaagatgcaaaagttggtgaaggctgccaaagacgggacaaaagacgggctggagaggaccagagcagctgtgaaaaggggaagaagttttataagaacaaagagtctcatagcacaggaccaccgaagctctcttgaagaagagcagaatctctttatcgacgtagactgcaaacacccagaagcaattctgacccccatgccagaggggctctcccaacaacaggtggtgcggaggtatatcctggggtctgtcgtggattccgagaagaactacgtcgatgctctgaaaagaatactcgagcagtacgagaagcctctttcagagatggagcccaaggtcctgtcggaacgtaaattgaagactgtgttctaccgtgtaaaggagatactgcagtgtcattctttatttcagatagccctggcctcccgtgtttccgagtgggacagtgtggaaatgataggagatgtatttgtcgcaagcttcagtaagagcatggtcctggatgcctatagcgagtatgtcaacaactttagtacagccgttgccgtgcttaagaagacctgtgctactaaaccagccttccttgagtttctgaagcaagagcaagaggctagcccagacagaacaacgctttattctctaatgatgaaacctattcaaaggttcccacagttcatccttctgcttcaagatatgctcaaaaacacatccaaaggccaccccgaccgccttccgctgcagatggccctcacagagctcgagacactggccgagaaacttaatgagcgcaaaagggatgccgaccaacgttgcgaagtgaagcaaattgccaaggctattaatgagaggtacctcaataaattgctctcttcggggtcccgctatcttatccgcagcgacgatatgatcgaaaccgtttacaacgaccggggcgagattgtgaagacgaaagagagaagagtcttcatgctcaatgacgttctgatgtgtgctactgtttcttcccgtcccagtcacgattcaagagtgatgagcagccagcgctacctcctcaaatggtccgtcccgctgggacacgtcgatgctatagaatatggaagctcggccggaacaggcgagcatagtcggcatctggctgtccatccaccagaatcactggctgtggtggccaacgctaaaccaaacaaagtgtatatgggacccggtcagctgtaccaggatctgcagaatctgctccacgatctgaatgtgattggacagatcacccagctgattgggaatctcaagggaaattatcagaatttaaaccagtctgtggcgcatgattggacttccggtctgcagaggctcattctgaaaaaagaggacgagattagggccgccgattgctgccgaatccagctccagctgcccggcaagcaggataagagtggaaggcccaccttcttcacggctgtgtttaatacgtttaccccagcgatcaaagagtcctgggtcaactctcttcagatggcaaagcttgccctggaagaagagaatcacatggggtggttttgcgttgaggatgatggaaatcatattaagaaagagaagcatccactcctcgtagggcacatgcccgttatggtggccaagcagcaggaatttaaaattggtagttgcacccaccaaatgggccaaatcgctatcgtcagcttccaaaacagtacgcccaaggtcatagagtgtttcaacgtcgagtctcgcatcctctgcatgctctacgtgcctgtggaagaaaaaagacgagagcccggggcccctccagacccagaaactccagcagtgcgagccagtgacgtgccgaccatctgtgtcggtaccgaagaaggatctatttccatttacaaaagctcccagggttcaaagaaggtacgcctccagcatttcttcacacctgagaaatctaccgtgatgagccttgcatgtacttcgcagagcctctatgccggcctcgtaaatggcgctgtggctagttatgccagagccccagacggctcctgggattccgagccccagaaggtgatcaagctgggcgttctccccgtcaggtcacttctaatgatggaagacactctctgggctgcatccggcgggcaggtgttcattatttcagttgaaacccatgccgtggaagggcagcttgaggctcaccaggaggaaggaatggtgatctctcacatggcagtgtccggggtggggatttggatcgccttcacttcaggaagcaccctgagactgtttcataccgaaaccctcaagcatttgcaagacattaatatagcgacccccgttcataacatgctccctggccatcaacgattgtctgtgactagcctgctggtgtgtcacggcttgctgatggtgggaacttccctgggggtgttggtcgctttacccgtgccccggctgcaggggatccccaaagtgaccggacgtggaatggtgtcatatcacgcgcacaattctcccgtcaaatttatcgtactcgctacagctctgcacgaaaaggataaggataaatcacgggactctctagccccagggccagaaccccaggacgaggaccagaaagacgcacttccatccggcggcgcggggtcgagcttatcccaaggcgaccccgacgcagccatctggctcggcgattccctgggaagcatgacccagaagtccgacctgtcttcctcctcaggctctctttcgctgagccacggaagctcttccctggagcataggagcgaggacagtaccatatatgacctcttgaaggacccggtttcactgcgctccaaggcgagacgcgcgaaaaaggcaaaagccagtagcgccctggttgtgtgcggggggcagggacacagacgggtccacaggaaagcgcggcagccacaccaagaggagcttgcccctactgtgatggtctggcagattccactgctcaacatttag

SEQ ID NO: 132585 - DNA, 4035 bp, synthetic construct
  misc_feature 1..4035: note = Description of Artificial Sequence: Synthetic coding sequence
  source 1..4035: mol_type = other DNA
atggaccaaagagaaccattgcctcccgccccggccgaaaatgaaatgaaatatgataccaacaacaatgaagaggaagaaggagagcagttcgatttcgactccggggacgaaatcccagaggctgatcgacaggcccccagcgcaccagagacaggcggcgcgggagctagcgaagctcctgcccccacaggaggagaggacggagccggagcagaaacaacgcctgttgccgagcccacaaaactggtgctcccgatgaaagtcaatccctactctgtcatcgatatcaccccattccaagaagatcaaccccctacaccagttccttctgccgaagaagaaaatgtgggcctacatgtcccttgtggatatctggtaccagtcccatgtggctatgcggtgccatcaaatctgccacttctgttgccagcttacagcagcccagtgattatctgtgccacctctttggacgaggaggaaactccagaagtgactgaggacagacaaccgaactctttatcctcggaggagccacccacttctgaagaccaagtgggtcgcgaggactcggcattagctagatgggcagcggaccctgctaatactgcctggatggagaacccagaggaagctatctatgatgatgtcccacgcgagaatagtgatagcgagccagatgagatgatttatgatgacgtggaaaatggtgacgaaggaggtaactcatcgttggagtatgggtggagctcttccgagttcgagagctacgaagaacagtccgacagcgagtgcaagaacggaatccccagaagctttctccgctcgaaccataagaagcagctcagccacgacctcaccaggcttaaagaacattacgagaaaaagatgcgggacctgatggcttcaaccgttggcgtagtcgagattcagcagctgaggcagaagcatgaactgaaaatgcagaagctggttaaagctgcaaaggacgggactaaggacgggctggagcgaacaagggccgccgttaaacgaggaaggagtttcattcgtactaagagtctgatcgcccaggatcacagatcatcattggaggaagagcagaatctttttatcgacgtcgactgcaagcaccctgaggccatcctcacacctatgccagaggggctgtcacagcaacaggttgtgcgccgctacatactgggaagcgtggtggactctgagaaaaactacgtggacgctttaaagagaatacttgaacaatacgagaagcccttgtctgagatggaacctaaagttctcagtgagagaaagctgaagactgttttttatcgggtgaaggagattctccaatgccattccttgttccagatcgctttggccagcagggtgagcgaatgggacagtgtcgaaatgataggcgacgttttcgtagcatctttcagcaagagcatggtgctggatgcctatagcgaatatgtcaacaatttcagcactgcagtagctgtgctgaagaaaacttgcgctactaagcccgcatttctagaatttttaaagcaagaacaggaggcttccccggacaggacgaccctgtatagccttatgatgaaaccaatccagcgcttcccccagttcatcctcctgctgcaagatatgctgaagaatacatcaaaaggacatccagatcgcttgcccctgcagatggcgttgaccgagctggaaacccttgccgagaagctgaacgagcgcaagcgggatgccgaccagaggtgtgaggtcaagcaaattgccaaggcaattaatgagaggtatttaaacaagctgctctccagcggctctcggtacttaatcaggtcagacgacatgatcgagacagtgtacaacgaccgcggcgagatcgtgaaaaccaaggaacgacgcgtgtttatgctgaacgacgtactcatgtgcgcaacagtgtcatctagaccctctcatgattccagagtcatgagctcacagcggtacctcttgaagtggtcggttcctttgggccacgtggacgctattgagtacgggtcaagcgctggaacaggtgagcacagccgccatctggccgtccatcctccggagtctctcgccgtggtcgcgaacgctaaaccaaacaaagtatatatgggccctggacaactttatcaggacctccagaacttgctgcatgatttaaatgtcattgggcagattacgcaattaatcgggaatctgaaaggcaactatcaaaatctcaatcagagtgtggctcacgattggacatccggactacagcggctcattctgaaaaaggaggatgagatcagggctgcagattgctgccgaatccagttgcagctgccagggaaacaggataagtccggtcgacccacttttttcacagcagtgttcaatacctttacgccagcaatcaaagaaagttgggttaattcgctgcagatggctaaactggcactcgaggaggagaaccacatggggtggttctgtgtggaagacgatggaaaccatataaagaaagaaaagcacccactgctagtgggtcacatgcccgtgatggtggctaaacagcaggaattcaagattgaatgcgcagcttacaaccctgagccatacctgaataacgaatctcagcccgactctttcagcaccgcccatggctttctgtggataggatcgtgtacccaccagatgggtcagattgccattgtatcgtttcagaattccacccctaaggtcattgagtgcttcaacgtggagtccagaatcctatgtatgctgtacgttccagttgaagagaaacggagagagcctggggccccacctgatcctgagaccccagccgtcagggcttcagacgtgccaactatctgtgttgggacagaagagggatccattagtatctacaagagctctcagggtagtaaaaaggtgcgtctgcagcacttttttaccccagaaaaatccactgtgatgtctctggcttgcacgtcccaatctctttacgcaggattagtaaatggtgctgtggcttcatatgccagagcccctgacggctcctgggactctgaacctcagaaagtcattaaacttggcgttcttccagttcgctccctgttgatgatggaggataccctgtgggcagcttcgggcggacaggtgtttattatatcggtcgagacgcatgccgttgagggccagcttgaggcccaccaagaggaaggaatggtcatttcccacatggccgtaagcggcgtgggaatctggatcgcatttaccagtggatctactctgagactgttccacaccgagacgctaaaacacttgcaagatattaacatcgctaccccagtacacaacatgcttccaggccaccaaagactgtcagtgacgtcactgcttgtgtgccacggactattgatggtgggaacctccttgggtgtcttagtggcgcttcctgtaccaaggctgcaggggatacctaaagtgacaggcaggggcatggtctcatatcatgcacataactctcccgtgaaattcattgtactagctacagccttgcacgaaaaggacaaagataaatcaagggattccttggccccgggtcccgagccacaggatgaggatcagaaggatgccttgcccagcggaggcgccgggtcatccctaagccaaggcgatccagatgcggccatctggctgggagatagcctcggctcaatgacacagaagagcgatctgtcttcatcctccggctcactatctctatcccacgggtcttccagcctggagcaccgatccgaggacagcaccatttatgatctgctcaaagatcctgtatctctgcggagcaaagccagacgagcaaagaaagctaaggcttcctccgctctggtcgtctgcgggggtcaggggcatcggcgggttcacagaaaagccaggcaacctcaccaggaggaactcgctcccacagtgatggtgtggcagattccactgctgaacatatag

SEQ ID NO: 132586 - DNA, 1833 bp, synthetic construct
  misc_feature 1..1833: note = Description of Artificial Sequence: Synthetic coding sequence
  source 1..1833: mol_type = other DNA
atgcgacctcccgggttcctctcccgggctcctagtcttaatcgggcggaacgggggatctggtcctgttccatggatcagagagagcccctgccacctgcccccgccgaaaatgagatgaaatatgatacaaataataatgaggaggaggagggcgagcagtttgatttcgatagcggggacgaaatccccgaggccgacaggcaggcccccagcgcaccagagactggcggcgctggagccagcgaggcacctgctcccactggcggagaagatggcgctggagccgagacaaccccggttgccgagcctactaagctcgttctgcccatgaaggtgaacccatatagtgttatagacatcaccccatttcaggaagaccagccgccaaccccagtacctagcgcggaggaagagaacgttggcctacacgtcccttgtggttatctcgtaccagtaccctgcggttacgccgtgccaagtaacctgcccctgttactgcctgcatactctagcccggtcattatttgcgcgacatcactggatgaggaggccgagacgcctgaggtgacagaagaccgacaacctaatagcctttccagtgaagagcccccgactagcgaggaccaagtggggagagaggatagcgccctggcccgctgggcagcagatcccgcaaatactgcatggatggaaaatcctgaggaggcaatctacgacgacgttcctagagaaaacagcgattccgagcctgacgagatgatctacgatgacgtcgaaaatggcgacgaaggcggaaattcttctctagaatatgggtggtcgtctagtgaatttgagtcctacgaggagcagtccgattcagagtgtaagaacgggatcccccgatcatttctgcgcagtaaccataaaaaacagatgcaaaagctggtgaaagccgctaaggacggcactaaggacgggctggagcgaaccagggccgctgttaagagggggaggagcttcattaggacgaaaagcttgatcgcccaggaccacagaagctcactggaggaagagcagaacctgtttatcgatgtcgattgtaaacacccagaggctatcctgacccccatgcctgaaggactttctcagcagcaggtagtgagaaggtacattctggggtccgtggtggacagcgagaagaactacgtcgacgcactgaaacggattcttgaacagtacgaaaagcctctcagcgagatggagcccaaggtgttgagcgagaggaagttgaaaacagttttttacagagtgaaggagatacttcaatgccacagcttatttcaaatcgctcttgcctcccgggtgtcagaatgggattctgttgaaatgattggcgacgtatttgttgcctccttcagcaagtccatggtacttgatgcttacagtgagtatgtgaacaatttttccaccgccgttgctgtgttgaagaagacttgtgcgactaagccagcattcctcgaatttctgaaacaggaacaggaagcctctcccgaccgtactactctgtatagcctgatgatgaaaccaatacaacgatttccacagtttattctgttgctgcaggatatgctgaaaaatacaagtaaaggccatcccgacagactacctttgcagatggcactcactgagctcgaaacactggcagagaagttaaacgagcggaagcgggatgctgaccaacggtgcgaggtaaaacagattgccaaggctattaatgagcgctacctgaacaaggtggaacgcgggttcctgcagttatatagtaagatcatttttgccctgtgctag

SEQ ID NO: 132587 - DNA, 4110 bp, synthetic construct
  misc_feature 1..4110: note = Description of Artificial Sequence: Synthetic coding sequence
  source 1..4110: mol_type = other DNA
atgcgtccccctggtttcctgtcccgcgctccatccttaaacagggctgaacgtggcatttggagttgttccatggatcagcgcgagcctttacccccagcacccgccgagaacgagatgaaatatgacacaaacaacaacgaggaagaggagggagagcagtttgacttcgactctggagacgagatcccagaagcggatagacaggccccttccgcccctgagaccggcggggcaggcgcctctgaggccccagctccgacgggcggagaagatggagccggggcagaaaccacaccagtcgccgaaccaactaagctggtccttcctatgaaggtgaatccctatagcgtcattgatataaccccctttcaagaggatcagccaccaacccctgtgccttccgccgaagaggaaaatgttggactgcatgtaccgtgcggctatttagtcccggtgccctgtggttacgccgtcccatccaacctgccgctcctgttgcccgcttattccagtcctgtgattatatgcgccactagcctcgacgaagaggctgagacgcccgaggtgacagaggataggcaacctaatagcctctctagcgaggagccccctacttcagaagaccaagtgggaagagaggactctgcgctagcgcggtgggccgccgacccagcaaacacagcttggatggagaatcccgaggaagccatctacgacgacgttccccgggaaaatagtgacagtgaacccgacgaaatgatttacgatgatgtagaaaacggagatgaaggcgggaactcaagcttagagtatgggtggtcaagttcggagttcgagagctatgaggaacagagcgatagcgagtgcaaaaacggaattcccagatccttcctccgctccaatcataaaaaacaactgtcacatgacttaacaaggctgaaggaacactatgagaagaagatgcgggacttgatggctagtacagtaggggtcgttgagattcagcagcttcggcagaaacacgaactgaaaatgcagaagctcgtgaaggctgctaaggatgggaccaaagacgggctggagcgcacccgggcggctgtgaaacgggggcgttctttcatcaggacgaagtcgctgatcgcccaggatcataggtcctctctggaagaggagcagaatcttttcatcgatgtggattgcaagcaccctgaggcaatcctgacccccatgcccgagggtctctcccaacagcaggttgtgcgtcgttatattcttggcagtgtcgtcgactcggagaagaattacgtcgacgcgttaaaaagaattttagagcaatatgaaaaacctctcagcgagatggaacccaaggtgctgagcgagcgaaaactgaaaactgtgttttaccgagttaaagaaatcttgcagtgtcattcacttttccagatagcattggcgtcacgggtgagtgaatgggacagcgtggagatgatcggcgatgtgtttgtggcctccttctccaagtctatggtgttggatgcctattccgagtacgtgaacaacttttcaactgcggtagccgtgctgaaaaagacgtgcgcaactaagccagccttcctggaatttttaaagcaggagcaggaagccagtcccgacagaaccaccctgtactccctcatgatgaaaccaatccagagatttcctcagttcatcctcctcttgcaggacatgctgaaaaatacatctaaagggcacccagaccggctcccccttcagatggcactgactgagcttgaaacccttgccgagaaactgaacgagaggaaacgagatgcggaccaacgctgcgaggtgaaacagattgcaaaagccattaacgaacgatatctcaacaagttactgtctagcggtagtaggtatctcattcgctcagatgatatgatcgagaccgtctacaatgaccgcggggagattgtgaaaaccaaggaaagaagggtgtttatgcttaacgatgtgctcatgtgcgcgacagtgagttcccgacccagccacgatagtagagtgatgagtagtcaacgatatcttcttaagtggtcagttcccctcggacatgtggatgctatagagtatggatcttctgccggtaccggcgagcactctcggcatttagctgtgcacccaccagagtccctggctgttgttgctaacgctaaaccgaacaaggtgtacatgggaccagggcaactgtatcaggacctgcagaatctgttgcacgatcttaatgtgatcggacagattacacagcttatcgggaatctgaagggaaactatcagaacctgaatcagagcgtggctcacgattggacttctgggctccaacggttgatcctgaagaaggaggacgagatcagggccgcagattgctgtagaatccagctccaactacctggaaaacaagataaatcaggtaggcctaccttctttaccgctgtattcaacacatttactcccgccataaaggaatcctgggtgaattccctccaaatggcgaagctggcactcgaggaagagaaccacatgggatggttctgtgtggaggatgacggaaatcacatcaaaaaggagaaacacccattgctggtgggccacatgccagtcatggtagcaaagcagcaggagttcaagattgagtgtgctgcctataatccagaaccttacctgaacaacgagtcccagccagattcatttagcacagcccatgggtttctctggattggcagttgtactcaccagatgggtcaaattgccatcgtgtcctttcagaatagcacaccaaaagtgatcgagtgctttaatgttgaaagtagaattctttgcatgctatacgtgcctgtggaggaaaagaggcgggagccaggggctccccccgaccctgaaactcctgctgtgcgcgcctccgatgtgcctacaatatgtgtgggaaccgaagagggatcaatttctatttataaaagtagtcagggatcaaaaaaagtccgattgcagcatttttttactccggaaaagtcaacggtaatgtcactggcatgtacatcccagagcctctacgccggactggttaacggcgctgttgcatcatacgcccgcgcaccagatggctcgtgggacagcgagccacagaaagtcataaagctgggggtccttcctgtccgctcgctactgatgatggaggatactttatgggccgcctcaggcgggcaggtgtttattatatccgtcgagacccatgccgtagagggccaactagaagcacaccaggaggagggcatggtaatcagtcacatggccgtgagtggtgtcggcatatggatagccttcacctctggctcgaccctgcgcctgttccataccgagactcttaaacatctacaagatattaatatagcaacccccgtccacaacatgctgccgggccatcagcggctgtcagttaccagtttgcttgtatgtcacggcctcctgatggtgggaacaagtctgggtgtactagtcgcactccctgtcccccgacttcagggcatcccaaaggttaccggccggggcatggtgtcctatcacgcccacaacagtcctgttaaatttatagtactggctacagcgttgcacgaaaaggataaggataagtctcgagactcgctggcgcctggaccagagcctcaggacgaggatcagaaagacgctctgcccagtggtggcgccggctcatcactatcccagggagaccccgacgcagctatctggttgggcgactctctaggatccatgacccagaaatcagatctgagcagctccagtggcagcctgtccttgtctcacggcagctcaagcctggaacatcgaagtgaggactctaccatctacgatctgctcaaagaccccgtgtctttgcggtctaaagccaggcgggccaagaaggccaaagcttccagcgccctagtggtgtgtggcggtcagggacatcggcgcgtgcatcgtaaagctagacaacctcaccaggaggaactcgcgcccaccgtgatggtgtggcagataccactccttaatatttag

SEQ ID NO: 132588 - DNA, 4107 bp, synthetic construct
  misc_feature 1..4107: note = Description of Artificial Sequence: Synthetic coding sequence
  source 1..4107: mol_type = other DNA
atgcggccacccggcttccttagcagggccccgtcactgaatagagccgagcgtggaatctggagctgcagcatggaccagagggagcctctgcccccagcccctgccgaaaatgagatgaaatacgacaccaataataatgaggaagaagaaggtgagcagttcgatttcgattccggcgacgagatcccagaagctgacagacaggccccaagtgctcccgaaaccggtggtgctggcgctagcgaggcgccagccccaacaggcggagaggacggtgctggagccgagaccactccggtggctgaaccgaccaaactcgtcctgcctatgaaagtgaatccatactccgtgatcgatatcacgccctttcaggaggatcagcctcccacccccgtgcctagcgccgaagaagagaatgtgggactccatgtcccttgtgggtatctggtgccagtcccttgcggatacgctgtgccgagcaatttgcccctgcttttgcctgcgtattcatcccccgttataatttgtgctacgagcctggatgaggaggccgagacacccgaagtgacggaagatcgtcagcccaactccctgtcctctgaggagccccctacttccgaggatcaggtagggcgagaggactcagcgctggccaggtgggctgccgatccggccaatacagcctggatggagaatccagaagaagcgatatatgatgacgttccaagagagaattctgattccgagcctgatgagatgatttacgacgacgtggaaaatggggatgagggcggtaattcatcccttgagtatgggtggtctagtagcgagttcgaaagctatgaggagcaaagcgattccgaatgcaagaacggaattccccgcagcttcctaagatccaaccataaaaaacagctgagccatgacttgactcggcttaaagagcactacgagaagaagatgagagatctgatggcctctactgtcggggtggtagagatccagcaactgcggcagaagcacgagttgaagatgcaaaaactggtcaaagccgcaaaggacgggactaaagacggcctggagagaactcgggcagcggttaagcgcgggcgatccttcattcgaacaaaaagcttgattgcccaggatcaccgcagtagtctggaagaagaacagaacctgtttattgatgttgactgcaaacatcccgaggcgattttgacccccatgccggaaggcctttcacaacagcaggttgttagacgctacatcttgggcagcgtggtcgattctgaaaagaactacgtggatgctcttaaacggattctcgaacagtacgagaagccactttcggagatggagcctaaagtgctgtccgaaagaaagctgaaaaccgttttttatagagttaaggaaatccttcagtgccatagtctctttcagattgctcttgcttctagagtgagtgaatgggattcagtggagatgattggcgacgtattcgtcgccagtttttcgaagagtatggtcctggacgcttattccgaatacgtgaataattttagtactgctgtggccgtgctcaagaaaacctgtgcaactaagccagcattcttggaattcctaaaagaacaggaagcgtctcccgacagaacaaccttgtactcgctcatgatgaagcctatacaacgctttccacaatttatccttcttctccaggatatgctgaaaaatacctctaaggggcaccccgataggttgcccctgcaaatggcattgactgagttggaaacgctggccgaaaaactcaacgaacgaaaaagggatgctgaccaacgctgtgaggtgaagcagattgcaaaggctatcaatgaacggtacttaaacaaacttctttcatctggctctaggtacctgatccggtccgacgacatgattgaaacagtgtacaatgaccggggagagattgtcaagactaaggaacggcgtgtgttcatgttaaatgatgtgctgatgtgcgccaccgtgagctctcggccatctcatgacagccgggtgatgtcttcacagagatacttgttgaagtggtccgtgccccttggccatgtcgatgcaattgagtacggcagttccgctggtacaggcgagcacagtcggcatcttgccgtgcatcccccagagtctctggctgtggtcgccaacgccaaacccaacaaggtgtatatgggccctggacaactttaccaggatctgcagaacctgctacacgacctgaacgtcattggccagattacccagctgattggaaacctgaaaggtaattatcagaacctgaaccaatctgtagcccatgactggacgtctggactccagaggctgatcctgaagaaagaagacgagatcagggccgcagactgctgtaggatacaactgcagctgccgggaaaacaggataagagtggtaggcccacgttttttactgccgtgtttaacacattcacaccagccataaaggaatcatgggtcaacagcttgcagatggcaaaattagcacttgaagaggaaaaccatatgggctggttctgcgtggaagacgacgggaatcatattaaaaaagaaaaacaccccctcctcgtggggcatatgccggtgatggtcgccaagcaacaggaattcaaaattgaatgcgcagcctacaatcccgaaccatacctgaacaatgagtctcagcctgatagttttagcactgcccatgggttcctgtggatcggtagctgtacacaccagatgggtcagattgcaattgtttcctttcagaacagcacccctaaggtgatagagtgctttaacgttgagtcacggatactgtgcatgctctatgttccggtggaggaaaagcggagggaaccaggggctcccccagatccagagaccccagctgtgagagccagcgacgttcccaccatctgtgtgggtacagaagaggggagcatatcaatttacaagtccagtcagggatccaagaaggtgaggcttcaacacttctttacacccgagaagagtactgtgatgtcccttgcatgtaccagccagtctctgtatgccggtctggtgaatggcgccgtagcttcgtatgcacgcgctcccgacgggagctgggacagtgagcctcagaaagtgattaaattgggcgttctccccgtgaggtcactgctgatgatggaggatactttgtgggcagcctcagggggacaggtcttcattattagtgtagaaacccatgccgttgaaggccagctggaggctcaccaggaggaaggtatggtgatctcacatatggctgtcagtggcgttggaatttggattgcgtttacaagtgggagtactctgcggttgtttcacacagagaccttaaaacatcttcaggacattaacatcgcgacgccagtacataacatgttaccgggacaccaaagactgtcagtgacgagcttactggtgtgtcacggcctgctgatggtgggaaccagtctcggagtgctcgtggccctgcccgtcccccgactccagggcatcccgaaggtgaccgggcgtgggatggtgagctaccacgctcacaattctccagtaaagttcattgtcctggctaccgctctccatgagaaggataaggacaagtcacgggattctctggctccaggcccagagccacaggacgaggatcaaaaggatgcactcccttccggaggcgcaggctcctcactctctcaaggcgatccagacgccgcaatctggctgggtgactcactaggaagtatgacccaaaaaagcgacctgtcttctagttccgggtccctgtcactgagtcacggaagtagctctctggaacaccggagtgaggatagcacaatttatgatctgctaaaagatccggtaagcctccggtcaaaggccagaagggccaaaaaggcaaaggcctcctcagccttagtggtctgcgggggccaaggacaccgcagggtccaccggaaggctaggcagcctcaccaggaagaacttgccccaactgtgatggtttggcagatccccttgcttaatatttag

SEQ ID NO: 132589 - DNA, 2949 bp, synthetic construct
  misc_feature 1..2949: note = Description of Artificial Sequence: Synthetic coding sequence
  source 1..2949: mol_type = other DNA
atgttaccttcatcgtcttggggaaaacggaagttaaggggccgcttagggtgggtgcgcagtgatgctcgcggagtgatgtgggctcgtcaggaagggctccatcaccctcacccccatgcagtaatacgctgtccatcctctagcagctctagcgtgagctgcagcggcgactcagaggaggaggatatgggactactggaagtatcagtttcagacatcaaaccgcccgcgcccgagcttggacctatgccagagggcctcagtccccagcaggtggttagaagacatatccttggctccatagtacaaagcgaggggtcttatgtggaatcccttaaacgtattctccaggactacagaaatcccctcatggagatggaacccaaggccctgtcagctcgcaaatgccaggtggtgtttttccgggtgaaggagattctgcactgccacagcatgtttcagatcgcactctccagcagggtggcagaatgggactctactgagaagataggggacctgttcgtggcatccgatatgctcaagaacaccccaagaggtcaccctgaccgactgtcgctgcagctggccctgacggaactcgagacccttgcggaaaagcttaacgaacagaagcgtctcgccgaccaggtggctgagatacaacagttaactaaaagcgtgagtgacaggtcatccttaaacaagctcctgactagcggacagcgccaactgctgctctgcgagacactgacagaaactgtgtacggagaccgcgggcagctaattaaatcaaaggagaggcgcgtgtttctccttaatgatatgttggtatgtgccaatattaacttcaaagggcaactggagatttcttcactggttcccctgggcccaaaatacgtggtgaagtggaatacagccctaccccaggtccaggttgtggaagtcggacaggatgggggcacatatgataaagacaatgtcctaattcagcacagcggggccaaaaaggccagcgccagcggacaggctcaaaataaggtgtaccttggacccccccgcctgtttcaggaactgcaggatttgcagaaggacctggccgtcgtggaacagataaccctgctgattagtaccctccacggtacctaccaaaacctcaatatgacggtggcacaggattggtgtttagctttgcaaaggcttatgcgggtgaaagaggaagaaatccacagtgccaacaagtgccgtctgagattattactgcctggtaaacctgacaaaagcggcaggcccattagttttatggtggtcttcatcactcctaacccactgagcaaaatcagttgggtaaaccggctgcacttagccaaaatcggcctgcgagaagaaaaccaacctggctggctctgccccgacgaagacaagaaatcaaaggccccattctggtgtccaatactggcgtgttgtattccagccttcagttctcgagccctaagtctgcagttgggagccctcgtccacagtcctgtcaattgccccctgcttggcttctcggctgtgtcaacatctctgccccagggctatctgtgggtgggtggaggccaagaaggggccgggggacaagtggagatcttctccctgaatcggccctcaccgcgcaccgtcaagtcttttccacttgccgcacccgttctgtgcatggaatacattccggagctggaggaagaggctgagagtcgcgatgagtccccaacagtggccgatccgtccgcgactgttcatcccacaatttgtctaggactgcaggacggaagtatcctgctctattcatcagtggataccggtacgcagtgcctggtgtcttgccgatcacccggcttacaacctgtgctgtgcttgaggcattcaccgtttcatctgctggccggcctccaggacggaactctcgcagcttacccgcgcacctccgggggggtcctgtgggatcttgaatcaccgccggtgtgccttactgtcggtcctgggccagttcggaccttactcagcctggaagacgccgtgtgggctagttgtgggccctgggtgacagtgctcgaagccacaacccttcagccgcagcagtccttcgaagctcaccaggacgaggcagtcagcgttactcacatggttaaggccggaagtggggtctggatggccttcagcagcggcacttcaatccggttgtttcacacagagacactggagcatctgcaggaaataaatatcgctacccgcaccacttttctgttgccaggccagaaacacctgtgcgtgactagcctgctgatatgccaagggctactgtgggtgggcactgatcagggggtgattgtactgctacctgtgccacggctggaggggattccaaaaatcaccggcaaggggatggtgagcttgaacggtcactgcggtcccgtggctttcctggcagtcgccactagcatattagctccggacatcttacggtcagatcaggaagaggccgagggcccaagggctgaagaggataagcccgacggacaagcccacgagccaatgccagactcacatgttggtagagagttaactaggaagaaggggatcctgttacagtatcgcctgcgctctaccgcacatctacccggccctctgctttctatgcgcgagccagcacctgccgacggcgccgccttggagcacagtgaagaggacgggagcatctacgaaatggcggatgatccagatatttgggtgagatcgagaccttgtgcaagggacgcccatcgcaaggagatttgctccgttgcaatcatcagtgggggccaaggctatcgcaattttggatcggctctcggttcctcaggcaggcaggctccttgcggcgaaactgactcaaccctcttgatctggcaagttcctcttatgctgtag

SEQ ID NO: 132590 - DNA, 3840 bp, synthetic construct
  misc_feature 1..3840: note = Description of Artificial Sequence: Synthetic coding sequence
  source 1..3840: mol_type = other DNA
atggcatcatctaatccccctccacagcctgccataggtgatcagttggtgccaggggtaccggggccaagcagcgaggcggaagacgatccaggtgaggctttcgaatttgacgactcagacgacgaagaggatactagcgccgctttgggcgtgccgagtctggccccagagcgggatacagatccacctttgatacacctagattcaattcctgtaactgatccagatcctgcagccgcacctcctggcacgggcgtgcctgcttgggtgagcaacggggatgccgcagatgccgccttttctggagcgaggcattcatcatggaagaggaaatcctccaggaggatagatcggttcactttccccgcgctggaagaagacgtaatttacgatgatgtcccatgtgaaagccctgacgcacatcagcccggtgctgaacgcaacctgctgtacgaggatgcccatcgagctggcgccccgcggcaagccgaagacctgggctggtccagttctgagtttgaaagctattctgaagactctggcgaggaagcaaaaccagaggtcgaagtggaaccggccaaacatcgtgtatcttttcaacctaagttgtcacctgatctaactcgcctaaaggaaagatacgctcgaacaaagcgggacattcttgccctaagagtgggaggacgagatatgcaggagctgaaacacaaatatgactgcaagatgactcagctgatgaaagcagccaagagcggcaccaaagacggactcgagaaaacaaggatggctgtgatgcggaaggtgtcctttctccacaggaaagatgttctcggggacagtgaagaggaggatatgggtctccttgaggtcagcgtcagcgacataaaacctcctgctcctgagctgggccccatgccagagggtctgagcccacagcaggtggttagacggcacatactgggttccatcgtgcagtcagagggttcatacgtggagagtctgaaacggatcctgcaagactataggaatccattaatggagatggagcccaaggctctcagcgcaaggaaatgtcaagtcgtattcttcagggtaaaggaaattcttcactgccacagcatgttccagatagccttgtcaagccgcgtcgcagagtgggactctactgaaaaaattggtgacttatttgtcgcgtctttctctaagtccatggtgctggacgtctattctgattacgtcaacaattttaccagtgccatgagcataatcaaaaaagcatgtttgactaaaccagccttcctggagttcctcaaacgacggcaggtgtgtagtccggacagggtgacactttacggtctaatggtgaaaccaatccagaggttcccccagtttatcctgctgttgcaagatatgctcaagaatacaccccggggacaccccgatcggctgtctctccagctggccttgacggaacttgagactctggccgagaaacttaatgagcagaagagacttgccgaccaggtggctgagatacaacagttgactaaatctgtcagcgatcggagtagcttgaacaagctccttacttccgggcagcggcagctcctcctgtgtgaaacacttaccgagactgtttatggggatagaggccagctgatcaaaagcaaggagagacgcgtgtttctgcttaacgacatgctggtctgtgccaatattaacttcaagcctgcaaatcaccgcggacagcttgaaattagctctctggtgccgctgggaccaaaatatgtggtgaagtggaatacggccctgccccaggtccaggtagtagaggtggggcaggatggtggcacctacgataaggataacgtccttatacaacactcaggtgctaaaaaagcctccgctagcggccaggctcagaataaagtctatttgggaccgccacggctctttcaagagctgcaggacttacagaaagatctggctgtggtcgagcagatcacgctgctcatctccacactgcatggcacatatcagaacctgaatatgacagtcgcccaggactggtgcctggccttgcagcgactgatgcgggttaaggaagaggagatccattccgctaataagtgtagactcaggttacttctgcctgggaagcctgataagtctgggaggccgatatcgtttatggtcgtgttcatcacaccaaatccgctgtctaagatcagctgggttaatcgactgcacctggcaaaaatcggactgcgggaggagaaccagccagggtggctttgccccgatgaagacaagaagagtaaggcccctttctggtgccccatccttgcttgctgcatccctgccttttccagtagagcactcagcctgcaactaggggccctggtacacagcccagtgaattgcccgctgctgggtttttccgccgtctccaccagcctgccgcaagggtacctctgggttggaggcggccaggaaggggctggaggtcaggtggagattttttcgcttaaccgtccatctccacgcacagtgaagagctttcccctggcagccccggttctctgtatggagtacatcccagagttggaagaggaggcggagagtcgggatgagtcccccacagtggcagatccgtctgcaactgtccaccccaccatctgtttgggcttgcaggacggcagcatcctgctgtactcctccgtggacaccgggactcagtgcctcgtcagttgcaggagccccggcctgcaacccgtactttgcctgagacactccccctttcatctgcttgccggactgcaggacggcacgctggcagcatatccccggactagcggcggagtcctatgggatttagagagtccaccagtttgtttgacggtaggacccggaccagtaaggacactcctaagcctagaagatgccgtctgggcctcttgtggaccctgggtaaccgtgctggaggccacgacactacaacctcagcagtcatttgaagctcatcaggacgaagctgtgtcagttacacatatggtgaaagccggttctggtgtgtggatggccttttcttcaggcacatccatcagactcttccacaccgagacccttgaacacctacaggaaataaacatcgctacacgcacaacatttctcctgcctggccagaagcatctatgcgtgacttccctcctgatctgccaggggctgctgtgggttgggactgatcagggagtcattgtgcttctcccggtgccccgtctagaaggaataccaaagataactggtaagggcatggttagcctgaatgggcattgcggacccgtggcatttctggccgtggcaacgagtattctcgctccagatatcttacgtagcgaccaagaggaagccgaaggaccgcgggcagaggaggataaacctgatgggcaggcccatgagccaatgcctgactcgcacgtgggaagggaactcaccagaaagaagggaatcttgttgcagtaccggctccggagtacagcacacctgccgggccctctcctctctatgcgggaacctgccccagctgacggcgccgccctggagcactctgaagaggacgggtccatctatgaaatggccgatgacccagatatttgggttcggtctcggccatgtgcaagagatgctcacaggaaggagatttgctcggtggccatcatctcgggtggtcaggggtaccggaacttcggaagcgctctggggagctcaggcaggcaagcgccgtgtggcgagactgattcaaccctcctcatttggcaggtgccccttatgttatag

SEQ ID NO: 132591 - DNA, 3159 bp, synthetic construct
  misc_feature 1..3159: note = Description of Artificial Sequence: Synthetic coding sequence
  source 1..3159: mol_type = other DNA
atgctgccctctagcagctggggaaagaggaagctgcgcggcaggctgggatgggtcaggtctgacgctcgaggcgtgatgtgggctcggcaggagggattgcatcatccacaccctcatgccgtaattagatgtccatcttcttcaagttcaagtgtcagttgctcaggtgactccgaagaggaagatatgggcttgctcgaggtgagcgtgtccgatattaaaccgcctgcccccgaactaggtccaatgcctgaaggcctcagcccacagcaggtcgttcgtaggcacattttaggctcgattgtccaaagcgaaggctcctacgttgagagcttaaaacgcatcctgcaagattacaggaatccgctcatggagatggagccgaaggcgctctctgcacgcaagtgtcaggtcgtgttcttccgcgtcaaagaaattctgcactgtcacagcatgtttcagatagccttgagctcacgggtcgccgaatgggattcaaccgaaaagataggagacctcttcgttgctagcttctccaaatcgatggtcttagacgtgtacagtgattatgtaaacaacttcacatcagcaatgtctattatcaagaaggcatgtcttactaaacccgcttttctggagttcctaaagaggcgacaggtgtgctcgcccgaccgcgtgaccctctacgggctgatggttaagccaatccagcggtttccacagtttatcctcctgctacaggacatgttgaagaacaccccaaggggccatcccgacagactgagtctccagctcgctctgactgagctcgagactttggccgagaaactcaacgagcagaaacggttggctgatcaggtagcagagatccagcagctgaccaaaagcgtctccgaccggagtagcttaaataagttgctgacatcgggtcaacgccagttgctgctgtgtgagacattgactgagaccgtgtacggtgacaggggacagttaataaagtcaaaagagaggcgggtgttcttgctcaacgacatgctggtgtgtgcaaatataaactttaagggccagttagaaatttccagcttagtgcccctgggacccaagtatgtggtgaagtggaacaccgctctgccccaagtacaggtggtggaagttggccaggatggtggcacgtacgacaaggacaacgtgctgattcagcactcgggagctaagaaagctagcgcttcggggcaagcacagaataaggtgtacctgggccccccacgactcttccaggaattacaggacctgcaaaaggacttagctgtagtagaacagataacactgttgatttccaccctgcacggaacataccaaaatctgaatatgacagtggcccaggactggtgcttagcccttcagcgcctaatgcgggtgaaggaggaggagatacactcagcaaacaagtgtcggctacgacttctgttgccggggaaacccgataaaagtggccgccctattagctttatggtggtgtttataactcccaacccattaagcaaaatcagctgggtgaacaggctacaccttgcaaaaattgggctccgagaggagaatcagccgggctggctgtgtcccgatgaggacaagaagtccaaggcacctttttggtgtcctatactggcatgttgcatccctgcattctcaagtagggctttgagcctgcaactgggcgccctagttcatagtcccgtgaattgtccccttctgggattcagcgccgtgagcacctctctcccccagggttacctttgggtaggcggcgggcaagagggggcgggaggacaggtcgaaatttttagcctgaatcgaccttctcctcggactgttaaaagtttccccctggcggctccagtgttgtgtatggaatatatccctgaactggaagaggaggcggaatcacgcgacgagtccccgaccgtggccgaccctagcgccacagtccaccctacaatatgccttgggctgcaggatgggtctatcctgttatactcctctgtggacaccgggacgcaatgtttggtcagttgcagatcaccaggacttcaacccgtattgtgcctgcgacactctccctttcacctcctcgctggcctccaggatgggactttagctgcttatcccagaacctcaggaggcgtactgtgggatctggagagtcctccagtatgtttaaccgtcggtcctggccccgtccggacactgctttcgcttgaggatgccgtctgggcctcgtgtggaccttgggtaaccgtgcttgaggcaaccactctgcaaccacaacagtcatttgaagcccatcaggatgaagctgtgtccgttactcacatggtgaaagccggctccggcgtttggatggcattcagcagcggaaccagtatcagactgttccatacagaaaccttggagcatctccaggaaatcaacatcgccacaaggaccaccttcctgctaccagggcagaaacacctttgtgtgacgtcactgctgatctgtcagggtctgctttgggtcggcactgaccagggcgttatcgtcctcttgcctgtcccccggctggagggtatccctaaaattacggggaagggcatggtcagcctcaacggccattgtggcccggttgccttcctagcggtcgccacctcaatcctggcaccagacatactcaggagtgatcaggaggaggccgaaggcccacgggccgaagaagacaagcccgacggtcaggctcacgagcctatgcctgactcccatgttggtcgcgaactgacgagaaagaaaggcatcttgctgcaataccgtttgagatctactgcgcacctgcccggaccgttattgagtatgcgtgaacccgcacctgccgacggcgcagctctggagcactctgaagaggatggttcaatatacgaaatggcagatgatcccgatatttgggtccggtctagaccgtgtgcccgcgacgcccatcggaaggagatttgctcagtggcaattatctcgggaggccaaggctatcggaacttcggatccgctctgggcagctccggccgccaggccccctgcggtgaaacggactctactctgctgatttggcaagttcctctgatgctgtag

SEQ ID NO: 132592 - DNA, 3723 bp, synthetic construct
  misc_feature 1..3723: note = Description of Artificial Sequence: Synthetic coding sequence
  source 1..3723: mol_type = other DNA
atggcctcaagcaacccaccacctcagcctgccattggagaccagctcgtgccaggagttccggggcccagtagtgaggccgaagatgatcctggggaagcatttgagttcgacgattccgatgatgaggaggatacgagcgccgccctgggtgttccaagccttgccccggaacgcgacacagatcctcccctgattcacctggattccatcccagtaacagatcccgatccagcggcagctcctcctggcacaggggtgccagcttgggtctctaatggtgacgccgcagacgccgcgtttagcggcgcccgccattcctcctggaagaggaaaagctcacgaagaatcgatcggttcacatttccagctctggaagaagatgttatctatgatgatgtgccgtgtgagtcgccagatgcgcaccagcccggagctgagcggaaccttctctatgaagacgcacacagagcaggcgccccacgccaggccgaggacctgggctggagctccagcgaattcgagtcctatagcgaagactccggcgaggaggccaagcctgaggttgaagtagagcctgcaaagcatagagtttcctttcagcccaagatgacacagctcatgaaagccgcgaagtccggaacaaaggacggattagagaaaactagaatggcagtgatgcggaaggttagctttttgcacaggaaggacgtgctgggcgattcagaggaagaggacatggggctgctcgaagtgagcgtgtctgatataaagccccctgcccccgaactgggccccatgccagaggggctgtctcctcagcaggtggtacggcgtcatatattgggttctattgtgcagtctgagggatcctacgtggagtctctcaaacgtatacttcaagactataggaatccgttgatggagatggagcccaaggccctttcggctaggaaatgtcaggtggtgttcttccgcgttaaagagatccttcactgtcattctatgttccagattgccttgtcttcccgggtggccgaatgggatagcactgagaagattggagatctgttcgtggcgtccttttccaagtcaatggtgttggacgtctacagcgattatgtcaataattttacttcggccatgtccatcataaagaaagcatgcttgacaaagcctgccttcctggaatttctcaagcgcaggcaggtgtgtagtcctgaccgagtcactctgtacggcctcatggtcaaacccatccaacgattccctcagttcatccttctgttacaggacatgttgaaaaatacccccagaggccatcccgaccgtctctcccttcagctggcgttgaccgagctggaaaccctggccgaaaaattgaatgaacagaagcgccttgcagaccaagtagccgagatacagcagctgacgaaaagtgtgtctgatcggtcttccttaaataagttgctgactagcgggcagagacagctgcttctctgcgagacactgaccgaaacagtctatggggatcgggggcaacttattaaatccaaggagcggcgagttttcctacttaacgatatgctcgtctgcgccaatataaactttaaaccagcaaatcacagggggcagctggaaatctcctccttagtgccgctgggccctaaatacgttgttaaatggaacaccgctttaccccaggtgcaagttgtggaagtgggacaggatggaggcacttacgacaaggacaatgtgctcatccagcatagtggggccaagaaagcttcagccagcgggcaggcccaaaataaggtatatctaggtcctcccaggttgttccaagaacttcaagatctgcagaaggatctcgccgttgtggagcagatcactctcctcatatcaaccctgcacgggacttaccagaacttgaacatgaccgtggctcaggactggtgcctggctctgcagaggctgatgagggtaaaggaggaagagattcactcagcaaataagtgccggctgcgtctcctgctcccggggaaacctgataagtctggaagaccaattagtttcatggtagtgttcatcaccccaaacccacttagtaagataagctgggtgaaccgcttgcacctggccaagatcggactgcgggaggagaatcagcccggatggctgtgccctgacgaggacaaaaaaagcaaggcacctttctggtgccctatcttggcctgttgtatcccggcgttctcttcacgcgctctgagccttcagctcggtgccctggtgcacagtcctgtgaattgccctcttctcggtttttcagctgtgtcaacctccctgccccaggggtatctctgggtggggggcgggcaagagggggccgggggccaggtggagatcttctctcttaatcgaccgtcgccccggacagttaaaagctttcctttagccgctccagtgctgtgcatggaatacattccggagttggaagaagaagccgaatcccgggacgaatctcccacagttgccgatccatctgcgaccgttcaccccactatctgcctgggactgcaagatgggtctattctattgtactcctccgtcgataccggtacacagtgcctggtgtcctgtcggtcccccggcctccagcccgtgctatgcctgagacatagcccctttcacctcctggcggggctgcaagatggcactcttgcggcttaccccagaactagcgggggggtcctctgggacctagaatcaccacctgtatgcctcacggtgggtccagggcccgtgcgaacgcttttaagcttggaggacgctgtgtgggctagctgcggtccatgggtgacggtcttggaggccactacgctgcagccacagcaatcgtttgaggcccaccaggatgaagctgtgtcagtgacccacatggttaaggcagggtcaggagtgtggatggcttttagcagtggaacctctatacgactgttccacaccgaaacactggagcatctgcaggaaataaatatcgccactaggaccacatttttactcccaggacaaaagcacctgtgcgtgacctccctactgatatgccaaggattactgtgggtgggcactgatcaaggtgtgattgtgctgctgcctgtacctcgattggaggggataccaaaaattaccgggaagggtatggtgagccttaatggtcactgtggcccagttgcattccttgccgtggccacaagtatcttagccccagatatcctgcggagcgaccaggaagaggccgagggtcctagagccgaggaggacaagcccgacggccaggcccatgagccaatgccagactcccacgtagggcgggagctgaccaggaaaaaaggcatcctactgcagtacagactccgctctaccgctcatcttcctggcccattactgtccatgcgagagccagctcccgccgacggcgcagcactcgagcactccgaagaagatggctcaatatacgagatggccgacgatcccgatatttgggtacgaagtcgcccttgcgcccgggatgcccatcgcaaggaaatatgctcagtggccattatctccggaggtcagggttaccggaactttgggtcagcacttggtagctccggaaggcaggcaccttgtggtgagacggactctaccctgctgatctggcaagttcctctcatgttgtag

SEQ ID NO: 132593 - DNA, 1467 bp, synthetic construct
  misc_feature 1..1467: note = Description of Artificial Sequence: Synthetic coding sequence
  source 1..1467: mol_type = other DNA
atgacccaactgatgaaggctgcgaaatcaggcactaaggatggcctggagaagacccgaatggctgtaatgaggaaagtgtctttcctgcaccgcaaagatgtgcttggcgacagtgaggaggaggatatgggcctgttggaagtaagcgtgagtgacatcaagccacctgcacctgaactcggtccaatgcccgaaggcctcagcccgcagcaagtggtaaggcggcacattttgggaagcattgttcaatctgaagggagctatgtggagtcacttaagcggattctgcaagactaccgcaaccccctgatggaaatggaacctaaggccctgtctgcccggaagtgccaggtggtattttttagggtcaaagaaattctgcattgtcactctatgtttcagatcgccctctcctcgcgcgttgcagaatgggacagcaccgagaagattggcgatctcttcgtggcctctttctctaagagcatggtccttgatgtatattcggactacgttaataatttcacctccgcgatgagcatcatcaagaaagcatgtctaactaaaccggcctttctcgaattcctcaaacgcagacaagtatgtagccccgacagagtgacactgtacgggctgatggtcaagcctatccagaggtttccgcaattcatcctgctgctgcaagatatgctgaaaaatacaccaaggggccatcctgaccggctcagccttcagctcgcactgacagaattagaaaccctcgcggagaaactcaacgaacagaagaggctagcagatcaagttgcggagatccaacaattgacaaagtcggtgtctgaccggtcctctcttaataagttgctgactagcggccaaagacagttgttattatgcgagacccttacggagacggtgtatggcgatagaggacaactaatcaagagtaaggaaagaagggtattcttacttaacgacatgctagtttgcgccaacatcaacttcaagcctgcaaatcatagagggcagttggagatttccagtctcgtccctctgggacctaaatacgtagtgaagtggaatacggctctaccccaggtgcaggtggtcgaggttggccaggacgggggtacctacgacaaggacaacgtgctgatccaacactccggggctaaaaaagcgagcgcctccggccaagcgcaaaataaggtatatctcggcccgccgcgactcttccaggagcttcaggaccttcaaaaggatctcgccgttgtggagcagataactttactcatctcgactctccacggtacatatcaaaacctgaacatgacggtggcacaggactggtgcctggctttacagcggcttatgcgagtgaaggaagaagagattcacagcgctaacaaatgccgcttaagactcttactgccaggaaaacctgataaaggcacttggtcagatatgtag

SEQ ID NO: 132594 - DNA, 3204 bp, synthetic construct
  misc_feature 1..3204: note = Description of Artificial Sequence: Synthetic coding sequence
  source 1..3204: mol_type = other DNA
atggcctcttctaatccccccccccagcctgccatcggagaccaattggtgcctggcgtaccagggccatcctccgaagctgaggacgatccaggggaggcattcgagtttgatgattccgacgatgaagaagatacatccgccgcacttggtgttccatccctggcccctgagagagacaccgatccacccctgattcatctggacagtatccctgtgaccgaccccgaccctgcggccgctcctcctggcaccggagtccctgcatgggtgtcaaacggggatgctgcggatgccgctttcagcggtgcgaggcattcttcctggaagcggaagtcatcccgacggatcgatagattcacttttcccgctctggaggaagacgtcatttatgatgacgtaccctgcgagtctcctgacgcacaccagcctggcgcagaacgtaacctgctgtatgaggacgctcaccgagcaggggcccctcgtcaggcagaggacctggggtggtccagctccgaattcgaatcctactctgaggactccggtgaggaagccaaacctgaggtcgaggtcgagcctgccaaacatcgagtatcctttcaaccgaaactgagtcccgacctgactcggctgaaagagaggtacgcaagaacaaagcgagatattttggcactgcgggtcggtgggcgcgatatgcaagaactgaaacataaatatgactgtaaaatgacgcagctgatgaaagccgcaaagtctgggacaaaggacgggttagaaaaaacccggatggctgtgatgaggaaggtgagtttcctccacagaaaagatgtactgggagacagcgaggaagaagacatgggcttgctggaggtctctgttagcgatatcaagccacctgctccggaactgggtcctatgcctgaggggctgtctccccagcaggtcgtgagaaggcatattcttggtagcatcgtgcagagtgaaggcagctatgtcgagagtctcaagaggatacttcaggattatcgaaatcccctgatggaaatggagcctaaagctctcagtgcaagaaagtgccaagtggttttctttcgtgttaaagaaatcctgcactgccactctatgtttcaaatcgcattaagttctagggttgctgagtgggatagcacagagaagattggggacctctttgtcgcaagttttagcaaaagcatggtcttagatgtgtatagtgactacgtcaacaatttcactagcgccatgagtatcatcaaaaaggcatgtctcactaagcccgccttcttagaattcctaaaaagaagacaagtgtgcagtcccgatcgcgtcacgctatatgggctaatggttaaaccgattcaacgcttccctcagttcattttgctattgcaggatatgctcaaaaatacccctcggggccatcctgataggttaagcttgcagctcgccttaactgagctcgagacattagctgagaagctaaacgagcagaagagactggctgatcaggtggctgagatccagcagcttacaaagtccgtatccgaccggagcagcctgaacaagctactcacaagtgggcaaagacaactgctgctgtgcgagaccttgacagagactgtctacggagaccgcggccaactgatcaaatcaaaggagcgtcgagtgttccttctcaatgacatgctagtttgcgccaacatcaattttaaggggcagctggaaatctctagcctcgtccctttagggccaaaatacgtagtgaaatggaacactgcactacctcaggtccaggtggtggaggtcggtcaagatggaggcacctatgataaagacaacgtgctgatccaacattctggtgctaagaaagccagcgcctccggccaggcccagaacaaggtgtatctcggacctccgcgactttttcaggaactccaagatctgcagaaggatttggcggtggtggagcaaattaccctgctcatatctacactgcatgggacttatcaaaatttaaatatgacagtcgcacaggactggtgtttagctttacagcgtctgatgagggttaaagaagaagagatccattcggccaacaagtgcaggctcaggctcctcctgccaggtaagcccgacaaatcaggaaggcccatctcattcatggtcgtctttattactcccaacccattgtctaagatcagctgggttaaccgccttcacttggctaaaattggcctgcgtgaggagaaccagccagggtggttgtgccctgatgaagataaaaagagcaaagcccctttttggtgccctattcttgcctgctgtatcccagccttttcctctagagccctgtctctgcagctaggcgctcttgtccacagcccggtgaactgcccactcctcggattctctgccgtcagcaccagcttacctcagggatatttatgggtcggcggcggccaagagggtgccggggggcaggtcgagatcttctccctgaacagaccctcacctcggaccgttaaaagttttccactggcagcccctgttctgtgcatggagtacattccagagctcgaggaggaagccgagagcagggatgaatcaccaaccgtggccgatccctcagctaccgtgcacccaacaatctgcctcggccttcaggacggaagtatcttactgtactcctccgtcgacactggcacacaatgtctcgtgtcttgccggtcaccaggactgcaacccgttctttgtcttagacactcaccatttcatttactggcaggattgcaagatgggacccttgctgcatatccccggacctcgggaggtgtgctctgggacctggagagccctccggtctgccttactgtcggcccaggccccgtccgaaccctgttgtctttggaggacgctgtttgggccagctgcggaccttgggtgaccgtactcgaggccaccacactgcagccacagcagagcttcgaagcccatcaggatgaggcggtatccgtcactcatatggtgaaggcagggtcaggagtgtggatggctttttctagcggtaccagcatccgtctctttcacacagagaccctcgaacacttgcaggaaattaacatcgctacaagaacaaccttccttttaccggacagaagcctgatcaagtgctcaccccgggcatag

SEQ ID NO: 132595 - DNA, 3723 bp, synthetic construct
  misc_feature 1..3723: note = Description of Artificial Sequence: Synthetic coding sequence
  source 1..3723: mol_type = other DNA
atggcctcatccaacccgccaccacagccggccatcggtgatcagttggtgcctggggtccccgggccttcctcagaagcagaggacgatcctggtgaggcttttgaatttgatgatagtgatgacgaggaagacacatcagctgctctgggtgtcccttctctggcaccagagagggacaccgatccacctctgatccacctggactccattccggtgactgatccggatcccgccgccgcccctccaggtaccggggtcccagcctgggttagcaatggagacgcagccgatgcagccttcagcggcgcccgccacagttcctggaagcgaaagagttcacgcagaatcgaccgctttaccttcccagctctagaggaggacgttatctacgacgatgtgccatgtgagtctccagacgcccaccaaccgggcgcagaacggaacctactttacgaggacgctcaccgggcgggcgccccacggcaggccgaagatctgggttggtccagctctgagtttgaatcttatagcgaggactctggagaagaagcaaaacccgaggtggaggtagaacctgcgaaacacagagttagcttccagcctaagatgacacaactaatgaaagctgctaaatcagggaccaaggacggcctggagaagacccgcatggccgtgatgcgcaaggttagcttcctccacagaaaggacgtgctcggagattcggaagaggaggacatgggcctactcgaggtgagcgtgagtgatattaagccacctgccccggaattgggtccgatgcctgagggtctcagcccacagcaggtggtgcggcgacatatactaggcagcattgtccagtccgaaggcagctacgtcgagtccctgaagcggatcctccaggattatcgaaaccctcttatggaaatggaaccgaaggcccttagcgcgaggaagtgtcaggtggtcttttttcgggtcaaggaaatattgcattgccactctatgtttcagattgcattgtcctcacgggtggctgaatgggatagtactgaaaaaattggcgaccttttcgtggcttctttctctaaaagcatggtgttggatgtctactcagattacgtgaataacttcacgagcgcgatgtcaattatcaagaaagcatgcctcacgaagcctgcctttctcgaatttcttaagcgtagacaagtctgctctccagatagggttactctgtacgggctcatggtcaaacccatacagaggtttccgcagtttatactcctgctccaggacatgctgaaaaacactccccgcggacatcccgaccgactgtccctacagcttgccttaacggagctcgaaactcttgcagaaaaactgaatgaacagaagaggctagcagatcaggttgcagagattcagcaactgactaaatcagtctccgacaggtcttcactgaataagctgctgactagcgggcagagacagctgctgctttgcgagaccttaacagaaacagtttacggcgaccgggggcagctgatcaagtccaaagaacgtcgcgtgtttctgctgaatgacatgctggtgtgtgccaatatcaattttaagcctgccaatcatcggggccagttagagattagttctctggttcccctcggaccaaaatatgtggtcaaatggaatactgctctgccacaggtacaagtggtggaggttgggcaggacggtgggacctatgacaaggataatgtgctaattcagcactccggggcaaagaaagcctcggcgagcgggcaggcccaaaacaaggtgtacctagggccccctcgattgtttcaggagctgcaggatctccagaaagatctggcagtggtcgaacaaatcaccttactgataagtacactccatggtacttaccaaaatctcaacatgaccgtcgctcaggactggtgcttagcactgcagcgtctcatgcgggtaaaggaagaggagattcacagtgccaacaagtgtcgtctaaggttgttactccccggcaagcccgacaaatccggaaggcccatctcttttatggtggtgttcatcactccaaaccctctcagtaagatcagctgggtcaaccgcctccaccttgcgaagattggcctgagagaagagaaccagcccggctggttgtgtcccgacgaggacaagaaatctaaggccccattctggtgtcccatcctcgcctgttgcatcccggcatttagctcccgagccctgtctctgcagcttggggcgttagtgcatagccccgttaattgtccgctcttgggcttctctgccgtttcaacatccctgccgcagggctacctgtgggtcggcggaggccaagaaggcgccgggggccaagtcgagatattctccctgaatcgtccatcaccacggaccgtcaagagctttcctctggccgcacctgtcctgtgtatggaatacatacctgagctcgaggaggaggctgaatcaagggacgaaagcccaaccgtggccgatccctcagccactgtccatcccactatatgtctgggccttcaggatgggtctatcctgttgtatagcagtgtcgacaccggaactcaatgtctagtcagctgcagaagcccgggactccagcctgtcctgtgcctgcgccactcacctttccatcttctggccggcctgcaggatggaaccctggccgcctacccaaggactagcggcggggtgctgtgggatctggaatcccctcctgtgtgtctgactgtgggtcccggaccagtgcgaaccctcctgtctctggaagatgcagtgtgggcctcgtgcggtccgtgggtaactgttctcgaggccactacccttcaaccccagcagtcattcgaagcacaccaggatgaagcggtgtcagtcacacacatggtgaaggctggctcaggggtttggatggcattctccagcgggacaagcatacgcctgtttcatacagaaactctggagcatctgcaagagataaatattgctacgcggactaccttcctgctgccgggccagaaacatctgtgtgttacttccctgctgatttgccagggactgctgtgggtcggcactgaccaaggagtgatagtcctcctgccagtgccgcgcttagaggggatcccaaagatcactggaaaaggaatggtgagcctcaacggccactgcggcccagtagcctttctggcggtggccacctctatcctggcccctgatatactgcgatctgatcaggaggaagccgagggcccacgcgccgaagaagataaacctgacggtcaggcccacgagccgatgcccgactcacatgtcggccgggagctcaccaggaaaaaaggtatactcttgcagtacagactgaggtccacagcccacctgcccggcccgctgctgtcaatgcgcgagcccgcacccgccgacggggctgcgctcgaacactccgaggaagacggcagtatttatgaaatggccgatgatccggatatctgggtgcgatcacggccctgcgcccgggatgcccataggaaggaaatctgctctgtcgctatcatctctggggggcaggggtatcggaatttcggcagcgcactcggctctagcggccggcaagcaccttgtggtgagactgatagcaccttactgatatggcaggtccccctgatgctttag

SEQ ID NO: 132596 - DNA, 3129 bp, synthetic construct
  misc_feature 1..3129: note = Description of Artificial Sequence: Synthetic coding sequence
  source 1..3129: mol_type = other DNA
atgcttccttcttcttcatgggggaagagaaagctgcgcgggcgcctgggttgggtgcgctccgatgctcgtggcgtaatgtgggcccgccaggagggcctgcatcaccctcatcctcatgcagtcatcagatgccccagttcctcttcctcttcggtgtcctgcagcggggattctgaagaggaggacatggggctgctcgaggtgagcgtatctgacatcaagccccctgccccagaactgggtcctatgccggaaggactgtcgcctcagcaggtggtgcgaagacacatactcggttccatcgtgcagagcgagggctcctacgtggagtctctgaaacggatccttcaagattaccgaaatcctctcatggaaatggaaccaaaagcactgtcagccagaaagtgtcaggttgtgttttttcgggtaaaggagatcctgcactgccactcaatgtttcaaattgcgctcagtagtcgtgttgccgaatgggatagtactgaaaagattggagacttgttcgttgcctcgttcagcaagagtatggtgcttgacgtgtactccgactatgttaacaattttacctccgccatgagtattattaagaaggcgtgtctgaccaaaccagcctttttggagtttctgaagcgccggcaggtgtgtagccccgatagagtcacattgtacggccttatggttaaacctattcagcgcttcccacagtttatcctgcttctccaggatatgttaaagaatacccctagagggcaccctgatagactgtccctgcaactggcgctcacggagcttgaaaccctcgccgagaagctgaacgagcaaaagcgattagccgaccaggtcgcagagattcagcagctaaccaagtcagtaagcgataggagctcactcaataagctgctaaccagcggccaacgccaactactgctgtgtgagacactgacggagaccgtgtatggcgatcggggccagttgatcaaatcaaaggaacggcgcgtgttcctgctgaacgatatgctcgtttgtgcaaacataaactttaaaggacagctcgaaatcagctcgctggtccccctgggccctaagtatgtcgtaaaatggaacacagctctccctcaggtccaggtggttgaggtcgggcaagatggtggcacatacgacaaagacaacgttttgatccagcactctggggcaaagaaggcaagtgcatccggtcaggcgcagaacaaggtatacttgggaccgccacgtctgtttcaggaattgcaggatctgcagaaggaccttgccgttgtagaacagatcactttgcttatcagtacgctccacggtacatatcaaaatctcaacatgactgtagcccaggattggtgcctcgccctgcagcggctgatgcgcgtgaaagaagaggaaatccactccgccaataagtgcagactaagactgctgctccccggcaagcctgataaatcggggagacccatcagttttatggtcgttttcattacaccaaacccgctgtccaagatctcttgggtaaatcgactccacctggctaagatcggcctgcgcgaggaaaatcaacccgggtggctttgccccgatgaagataaaaagtccaaggcccctttctggtgccctattcttgcgtgctgtattcccgccttctcaagtcgcgctctgagcctgcagctgggcgcactcgtacactctccagtgaactgtccactgctgggcttttcagccgtgagtacatcattgccgcagggctacctttgggtgggtggaggccaggaaggggctggcggccaagtggagatttttagccttaaccgaccgtcacctcggacagtgaagagctttcctctggcagcgccagtactgtgtatggaatacattccggaactggaggaagaagccgagagtagagacgagtctccgactgtcgcggacccgagtgctacggtacatccaacaatctgcctgggcctgcaagatgggagtatcctgctgtactccagtgttgacactggcacacaatgcttagtgtcttgccgcagtcccgggctacaaccagttctctgcttgcgacattcacccttccacctgctagccggtcttcaggacgggacactagccgcctatccacggacttctgggggagttttgtgggacctggagagtccccctgtctgtctgaccgtgggtcctggtccggttcggacgctcctgtctctggaagacgccgtctgggctagctgcggtccatgggtcactgttctggaagcgacaacgctgcagccccagcaaagttttgaagcacaccaggacgaggcggtgagtgttacccatatggttaaggccggaagcggagtgtggatggccttcagttcgggaaccagtatacggcttttccacacagaaacactggagcatttgcaggaaatcaacatcgcaacgaggactaccttcctcttacccggtcagaagcacctgtgcgttacatccctactaatctgtcagggcctgttatgggtggggactgaccagggcgtcatagtgctgttgccagtgccaaggctcgaggggataccaaaaatcactggtaaggggatggtgagtctcaatggacattgtggtcctgtggcattcctggctgtagccaccagtatcctcgcccccgatattttgcgctctgaccaagaggaggccgagggccctcgcgctgaggaggacaaaccagatggccaggcccatgagcccatgcctgatagtcacgtcggtcgcgagctgacaagaaagaaaggaattctgctccagtaccgtcttaggagcaccgcccatctgcctggaccactgttatccatgcgggaacctgctccggcagacggagcagctctggagcactcagaggaagatggatccatctacgagatggcgttttttttaaaggccaaaaacactaagccacataactgcctcgctagtccggttagccttgtttgggccttagctggactgcagggaagccacactccactcctggaaggttgcgtgcgggtttccgtgtgcgaatgcgtcggctggtgcgtgaacatctacaagtag

SEQ ID NO: 132597 - DNA, 4578 bp, synthetic construct
  misc_feature 1..4578: note = Description of Artificial Sequence: Synthetic coding sequence
  source 1..4578: mol_type = other DNA
atgtctgggacgcaatctactatcaccgatcggttcccactcaaaaaacccatcagacatggctccattcttaatcgcgagagtcccaccgataagaaacaaaaagtggagcggattgcctctcatgacttcgacccaacagggttagtgcagcggtgtgttataattcagaaggacgataatggatttggcctgacggtctctggcgataaccctgtgttcgtgcagtccgtgaaggaggacggcgctgctatgagggctggcgtgcaaactggggatcgaataatcaaggtaaacgggactttggttacacactctaatcaccttgaagttgtgaaactcatcaagagcggttcctatgtggcactgacagtgcagggtcggccccctgggagtccccagatccccttagccgactccgaggtagagccttctgttatcggtcacatgagccctatcatgacctccccacacagcccaggtgctagcggtaacatggaacgcatcaccagccctgtgctgatgggcgaagaaaataacgtcgttcacaatcaaaaggtcgagatcctcaggaagatgctgcaaaaagagcaggagcggctccagctgttgcaggaagactacaaccgcactcccgcccagagactactcaaagagatacaagaagccaagaaacatataccccagttgcaggagcagctcagcaaggccactggcagtgcccaagacggggcagtggtcacaccgtctaggccgctcggggataccttaacagtgtcagaagcagagaccgaccctggtgatgtgctgggacggacagactgttcgagtggggacgcctcaagaccatcctctgacaacgcagactcgcccaaatcaggcccaaaggagaggatttatttggaggagaatcctgaaaagagcgagacaatacaggacactgatacccagtcactggtaggttccccttccactcggattgctccacatatcattggggccgaggatgacgacttcgggactgagcacgagcagatcaatgggcagtgtagttgctttcagagtattgaactcctcaagagtagaccagcacacttggcagtttttcttcaccatgtagtgtcccagttcgaccctgctactctgctttgttacctttatagcgacctgtacaagcacaccaattctaaggagaccagaagaatttttttggagttccatcaattttttctcgacaggtctgctcacctgaaagtgtctgttcccgatgagatgtccgccgacttggagaaaagaaggcccgaactcataccggaggacctccaccggcactacattcaaactatgcaggagcgagttcaccctgaggtgcagagacatctggaggactttcggcagaaaagatctatgggcttgaccctggccgagtctgagttaaccaagcttgacgccgaacgtgacaaagacaggcttaccctggagaaggaacgtacctgtgccgagcaaatagtagctaagatcgaagaggtactgatgactgcgcaggccgttgaagaagataaatcttccaccatgcagtatgtgatcctgatgtatatgaagcacttaggagttaaagtgaaggagcctaggaacctggagcacaagaggggtcgtatcggtttcctgcccaagatcaagcagtccatgaaaaaagataaggagggcgaggagaagggcaagcgacggggttttccctctatactggggcctccacgccggcccagtagacacgataactctgctattggccgggccatggagttacaaaaggccagacaccctaagcacctgtcaactccatcaagcgtctctccggaaccccaggactctgctaaactgcgacagagcggtctcgctaacgaggggaccgatgccggttacctgccagccaacagcatgtcctccgtagccagtggcgctagttttagccaagagggcggaaaggagaatgacacagggtccaagcaagtaggagaaacgtccgcgcctggagacactcttgacgggacaccgagaactttaaataccgtttttgactttcctcctccgcctctggaccaagtgcaggaggaagaatgtgaggtagagagggtgaccgaacacgggacccccaaaccattccgaaaattcgactccgtggcctttggcgaaagtcagtcagaggacgaacagtttgagaacgaccttgaaaccgatcctccaaactggcagcagcttgtgtcccgtgaagttttgctgggcctgaagccttgtgagattaagcgacaggaggtgattaatgagttattctatactgagagagctcatgtaagaactctgaaagttctagaccaggtgttttatcagagggtgtccagggagggcatcttgagtccctcagagctgaggaagattttctcgaatctggaagatatcctccagctgcatattgggcttaatgaacagatgaaagccgtgcggaaacgcaatgagacgtctgtcatcgatcagatcggcgaagatctattaacttggtttagtggtcccggcgaagaaaagctgaaacatgccgccgctacattttgctctaatcagccattcgcccttgaaatgattaagtccaggcagaaaaaggattcaaggtttcagacctttgttcaggatgctgagagcaatcctctgtgcaggagactgcaactgaaggatatcatacctacacaaatgcagcgccttacaaagtaccctctcctgctggataatattgccaagtacaccgagtggcccacagaacgggaaaaggtgaaaaaggccgcagatcactgccgccagatcctgaattacgtcaatcaggccgtcaaagaggcagagaataaacaacgtctcgaggactatcagagacgccttgacacgtcttcccttaaactctctgaatacccgaatgtcgaggaattgcgtaatctggacctaactaagagaaagatgattcatgaaggcccccttgtgtggaaggtgaacagggacaagaccatcgacctgtacacgctgcttctcgaggatattctggtcctcctacagaaacaggacgacagactggtcctgagatgccatagtaaaattcttgcctctacagcagacagcaagcacacattctctccggtgatcaagctgagcaccgttctagtgcgccaggtggccactgataataaagccctcttcgttatctcaatgagtgacaatggggctcagatatacgagcttgtggcccagacagtttccgagaagacggtttggcaggacctgatctgtcggatggctgcctcggtgaaagagcagtctaccaaaccaattccattgccccagtccacacccggcgaaggtgacaacgacgaagaggacccaagcaagttgaaggaagaacagcatggcatttcagttacaggcctgcagtcccctgaccgggacctcggacttgagtccacactcatctcttcaaagccacaatcccactcccttagcacctccggtaagagtgaagttagagacttgtttgtagctgaacgccagttcgcaaaagaacagcacaccgacgggactctcaaagaagtcggcgaggactatcagattgccatccctgactcacaccttcccgtcagcgaagagagatgggcgctggacgctcttcggaacctcggattgctcaaacaactgctggtacagcagctgggccttaccgaaaagtccgtccaggaagattggcagcatttcccacgctatcgaaccgcctcccaagggcctcagaccgactctgtgatacaaaatagtgaaaacataaaggcttaccactcgggcgaaggtcacatgccattccggacggggacgggcgacattgcaacctgctactccccccggacaagcacagaatctttcgcccctcgggattctgtgggactggccccacaggacagtcaggcttcaaatatcttagtgatggaccatatgatcatgacaccagagatgcccactatggaaccagaagggggactggatgatagcggcgaacatttttttgatgctcgcgaggcccactcagatgagaatccgagcgagggggacggggctgtgaataaagaagaaaaggatgtgaatctgcgcatttccggtaattacctgatccttgacggttacgacccagtgcaagaatctagcactgatgaagaagtcgccagctccttgaccctgcaaccaatgacaggcatcccagccgtggaaagtacacatcagcagcagcattctcctcaaaatacacattcagatggagctatttcccccttcacacctgagttcctcgtccagcagagatggggggcgatggagtactcctgttttgagatccagagtccgtcatcttgtgcagactctcagtctcagatcatggagtatatacacaaaatcgaggccgatctggagcatcttaaaaaagtggaagaaagctatactattctgtgtcaacggctggctggatctgcactcaccgacaaacacagcgataagtcttag

SEQ ID NO: 132598 - DNA, 4635 bp, synthetic construct
  misc_feature 1..4635: note = Description of Artificial Sequence: Synthetic coding sequence
  source 1..4635: mol_type = other DNA
atgtccggtacacaatccacgatcacggaccggtttccactcaagaagcccatacggcatggctctatcctgaaccgagagtcaccaacagacaaaaagcagaaagttgagagaattgcctctcacgacttcgatcctacggacagctccagtaagaagactaagtcaagtagtgaggagagtcgatctgagatttacggcctcgtccagcgatgtgttattattcagaaagacgacaacggcttcggactgactgtcagcggtgataatccagtgtttgtgcagagcgtgaaggaagatggagcagccatgagagccggggtgcaaacgggggaccggattatcaaggtgaatggcactctggtgacccattccaatcatctcgaagtggtcaaattgatcaaatcgggctcctatgtcgccctgaccgtccaggggaggccaccaggaagtccccagatacctctggcagatagcgaggtagagccctctgtcatcgggcacatgtctcccattatgactagccctcatagccctggggcttcaggcaacatggagaggataacaagtcctgtactgatgggtgaggagaataacgtggttcataaccaaaaggtagagattctgaggaagatgctccagaaggagcaggagcgcctccagctgttacaggaagactataatcggaccccagcgcaacggttactaaaagaaatccaagaggctaaaaagcatataccccaactccaagagcagttgagcaaggccacagggagcgcccaggatggagctgtcgtgacccccagccgcccccttggtgacacgcttacggtctcagaagcagaaacagacccgggtgatgtactgggcaggacagactgctcctccggcgacgcatctcgcccttcaagcgacaacgccgacagcccaaagagtgggcccaaggagagaatctaccttgaagagaacccagagaagtcagagaccatacaggacaccgatacacagtcactggtcggctctcctagtacgaggattgccccgcatatcatcggagctgaggatgacgactttggtactgaacacgagcagattaatggacagtgcagctgcttccaatctattgagctcttaaagagtaggccggctcacctcgccgtctttctccatcatgtagtgtcgcaattcgatcctgcaactcttctttgttacctgtacagcgatctgtataaacatacaaattccaaggagaccagaagaatctttctcgagtttcatcagttctttctggaccgcagcgctcacctgaaggtaagtgtgcctgatgagatgagcgccgatctggaaaaacgaagaccagagctgatccccgaggatcttcatcgccattatatccaaaccatgcaggaacgcgtgcatcctgaggtccagcgacaccttgaggatttccgacagaagagatccatgggactgaccctggcggagtcagaactgactaaactggatgccgaaagagataaagataggcttacgctggagaaagagcggacctgcgccgaacagatcgtcgccaagatcgaagaggtactgatgaccgcgcaggcagtcgaagaggataagtcctccaccatgcagtatgtcatcctgatgtatatgaagcaccttggagtgaaggtaaaggagccaaggaacctagagcataaacgggggaggattggattcctccccaaaatcaagcagagcatgaagaaggacaaagagggcgaggagaaggggaagagacgcggattcccatcgattctaggacctccccggcggccatctaggcacgacaattcagccatcgggcgtgcaatggagttgcaaaaggctagacatcccaaacatctgtccacgccatcttcagtctctcctgagccgcaggactctgccaaactgcgtcagagtggcttggcaaacgaaggcacagacgcaggataccttcctgcaaattctatgtcttccgtggcttctggtgcttcatttagccaggagggaggaaaggagaatgacactgggagcaagcaggtgggggaaaccagcgcccctggggataccctcgatggtacgccgcgtaccctaaacaccgttttcgactttcctcccccccctctcgaccaggtacaggaggaagaatgtgaagtcgagagggtcactgaacacggcaccccaaagcccttcagaaagtttgacagtgtggcattcggagaatcccaatccgaggatgagcagtttgagaacgatcttgagaccgatccccctaactggcagcagctggtctctcgagaggttctcctgggcctcaaaccatgcgagatcaaacgccaggaggttattaatgaattattctatacagagcgggcacacgtgcgcacactgaaggttctggatcaggttttctatcagcgcgtgagtagggagggtatcttgagcccctctgagctgcgaaaaatctttagcaacctcgaagacatcttacagctgcacattggcctgaatgagcagatgaaggccgtgagaaagagaaatgagactagcgtcatcgatcagatcggtgaagatttgttgacttggttcagcggccccggggaggagaagcttaaacacgccgccgctaccttttgctcaaaccagccgttcgcgctggaaatgatcaagtcaagacagaaaaaagatagtcgcttccaaacattcgtgcaggacgccgagtctaatcctctttgtcgccgactccaactgaaagacatcattcctacacaaatgcagcgcctgacaaagtatcctctgctgctcgataacattgccaagtataccgagtggcccacagagcgcgaaaaggttaaaaaagccgctgatcattgccgacaaatactgaattacgtgaaccaagctgttaaagaagcagaaaacaagcaaaggctggaggattatcagagaagactggacacgtcaagcctgaaactctctgaatatcccaatgtggaggagctccggaaccttgatcttacaaaacgaaaaatgattcatgagggccccctcgtgtggaaagttaacagagataaaacgattgacctttatacccttttgctcgaggatatcctggtgctgctccagaagcaggatgaccggctagtgctgcggtgccactcaaaaatcttggcctccacagccgattccaagcacaccttctcaccagtgatcaagctatctacggtcctggttcggcaggttgcaacagacaataaggccttattcgttatatccatgtctgataacggtgctcagatttatgagctcgtggcccagacagtgtcagagaaaactgtatggcaagacttaatctgtcggatggccgctagcgtgaaggagcagagcactaaacccatacccttgccccagagcacgccaggagagggagataacgacgaggaggatcccagcaaactgaaggaagaacaacacggtatctcagtaaccggcctgcagtcaccagatagagatctcggcctggaatccaccctgatatcctctaagcctcaaagtcattcgttgtctaccagcggcaagtccgaagtcagggacctcttcgtggccgaaaggcagttcgcgaaagagcaacacaccgatggcactctgaaagaagtcggtgaagactaccagattgctatccccgactcccatctacccgtctctgaggagcgctgggccctcgacgcactgaggaacctgggcctgttaaaacagctcctggttcagcagctgggattgacagaaaagtctgtccaggaagactggcagcatttcccaagataccggacagcatcgcagggaccacagaccgacagtgtgatccagaattccgagaatatcaaggcttaccacagcggcgagggccacatgccgttccgcaccgggaccggagacattgctacctgctatagccctcgaacctccaccgagtcgttcgcccccagggatagtgtgggacttgccccacaggatagccaagcttctaacatccttgtcatggaccacatgattatgacaccagaaatgccaactatggaacccgagggcggcttggacgactcgggggaacacttcttcgacgcccgggaagcccactctgatgagaaccccagcgaaggcgacggagccgtgaataaagaagaaaaggatgtgaacttgcggatctcaggcaattatttaatactggacggctacgatcctgtccaggagtcctccaccgacgaagaggtggcctcgtccttaacgctgcaacccatgaccgggatacccgccgtcgaaagcacacaccagcagcagcattctccccagaacacccatagcgacggcgccattagtcctttcacaccagagtttctggtgcagcagaggtggggagccatggaatacagctgctttgaaatccagagtccatcaagctgcgccgacagccagagtcaaataatggaatatatccataagattgaggccgatttggagcatctgaagaaagttgaggagtcttacactattctgtgccagcgactcgcaggcagtgcccttaccgataagcattcagataaatcgtag

SEQ ID NO: 132599 - DNA, 2409 bp, synthetic construct
  misc_feature 1..2409: note = Description of Artificial Sequence: Synthetic coding sequence
  source 1..2409: mol_type = other DNA
atggactgcggccctcctgctaccctccaacctcatctcacaggaccaccagggaccgcccatcaccccgtggccgtctgccagcaggagtctcttagcttcgccgaactgccagcattgaagccaccatctcccgtttgcctggacttatttcctgtggcgccagaagagctcagagcccccggctcccggtggagtctcggcaccccagccccactccagggtctactctggcctctgagtcccgggggtagcgacaccgagatcacctcgggaggtatgcgcccgtccagagccggatcttggcctcattgcccaggcgctcagcctccagccctggagggcccatggtctcctaggcacactcagcctcagcgtcgcgcctcccacggaagtgaaaaaaaatccgcatggagaaagatgagagtctaccaacgtgaggaggtccccgggtgtccggaggcccacgccgtcttccttgagccaggtcaagtcgtgcaggagcaggccctgtctaccgaggagccccgggttgagctgtccggatccacgcgcgtcagtctggaaggacccgagcgccggcgcttcagtgcctctgaattaatgactcggctccactcgagccttcgattggggcgcaactctgccgctagagccctgatatctggctccgggacgggagctgcccgggaaggtaaggccagcggtatggaggcacgctccgtggagatgtccggggacagggtgagcaggccggcaccgggggactcacgggagggagactggagcgaaccacgactagacacccaggaagagcctccactagggtcgagaagcacgaatgaacgtcggcaaagcaggttcttattaaactccgtgttatatcaggagtacagtgacgtggcctccgctcgcgaacttaggcgtcaacagagagaggaggaggggcctggagatgaggccgagggcgccgaggaaggaccaggcccacccagggccaatctgagcccctcctcttcctttagagcgcaacgttccgcccggggcagtactttctctttgtggcaggacatccctgatgtacgggggtccggagtgttagccactctgtccttgcgtgactgtaaactccaggaggccaaatttgaacttatcacttccgaagctagctacatacacagcctgtcagtcgccgtggggcatttccttggctccgcagagttgagtgagtgcctgggagcccaagataaacagtggctgttcagcaaacttccagaggtaaaaagtacttcggaacgtttcctgcaagacctggagcaacgactggaagctgatgtcctcaggttcagtgtgtgcgatgtagtgttggatcactgtccagcctttaggcgggtgtacctcccttatgtgacgaaccaggcctaccaggagcgcacataccaaaggctcttactggagaacccaaggtttcctggtatcctcgcacgactggaggaaagtcctgtgtgtcaaaggctgccgctgactagcttcctaattctccctttccagagaatcactagactaaaaatgctggttgaaaacatcctgaaaagaaccgcacagggatctgaggatgaggacatggcaacgaaggcatttaatgctctaaaggagctcgtgcaggaatgtaatgcttccgtccaaagtatgaagcgaacagaagagctcattcatctgagcaaaaaaattcatttcgagggaaaaatcttcccattgatttcccaggcaaggtggttggtccgccacggcgagctggtggagctggcgcctctgcccgctgctcctccagccaagttaaaactgtccagcaaagccgtgtatctccacctgtttaatgattgcctactactcagtcgaaggaaagagctcggcaaatttgctgtatttgtgcatgctaaaatggcggagctacaggtgcgagatctatccttaaagctacaaggcatccctggacatgtgttccttctacagctgcttcacggacaacacatgaagcaccaattcttgctgagagcccgcacggaaagtgaaaagcagcgatggatctcagcactctgccccagcagtccgcaggaggacaaagaggtgatttccgaaggagaagactgcccccaggttcagtgcgttagaacttacaaggctcttcaccccgatgagttgacgctggaaaagaccgatattctcagtgtcagaacttggacctcggacggctggctggaaggcgtaagactggcagatggcgaaaaaggctgggtgcctcaggcctacgttgaagaaatctcctctttgtcagcacgtctgcgaaatttacgcgagaataagagggtgacatccgctacttcaaaactgggagaggccccggtttag

SEQ ID NO: 132600 - DNA, 1575 bp, synthetic construct
  misc_feature 1..1575: note = Description of Artificial Sequence: Synthetic coding sequence
  source 1..1575: mol_type = other DNA
atggattgcggacctccagcaacccttcagccccatctcactggtcccccgggcaccgcacatcaccccgtagccgtctgccagcaggagtcgctcagttttgccgagttgccagcactgaagccaccaagtcccgtttgcctcgacctgttccctgtcgcccctgaggagttacgcgctcccggatcacgctggagcctgggcacgcctgctccattgcagggtctcctgtggcccctctcacccgggggtagcgatacggaaatcactagtggaggcatgagaccctcccgcgccgggagctggcctcattgccccggagcccaaccacccgccttggaaggcccttggtcccctcggcacacccaaccgcagcgtagggcatctcacggatctgaaaagaagagtgcttggagaaagatgcgcgtgtatcagcgggaagaggtgccaggttgccccgaagcacacgccgtgtttttggaacccgggcaggtagtgcaggagcaggctcttagcacagaagaaccaagagtggaactgtcaggcagcaccagggtctcactagaggggcccgaacgccgcagattttcagctagtgagctgatgacccgcctccattcaagcttgcggctgggccggaattctgcggcaagggccctgatctcagggtctgggactggcgcagcccgagaagggaaggctagtggtatggaagctcgctcagtcgaaatgtctggggaccgggtctcccgacctgctccaggcgactcacgggaaggagattggtctgaacctcggctcgacacgcaggaggagcctcctctcggatcaaggagtacaaatgagcgccgtcagtccaggtttttgctaaacagtgtgctgtaccaggaatatagcgatgtagccagtgcgcgcgaattaaggcgacagcagagagaagaagaaggtcctggcgatgaggcggagggcgccgaagaaggccccgggccccctcgggcaaatctttccccgtcttcctctttccgagcccaaaggtctgctagaggcagtaccttttccctgtggcaggatatccctgatgtgcgaggttctggcgttttggccacccttagcctgcgcgactgcaagctccaggaggccaagttcgagcttatcacctccgaagcgtcctatatacattccttgtccgtggccgtaggccattttctaggcagtgccgagttgtccgaatgcttgggtgcacaagataaacaatggctcttcagcaagttacccgaagtgaagtccacctccgaacgtttcctgcaggacctggaacaaaggttggaggcagatgtcctgagattctcagtatgtgatgtagtcctcgaccattgccccgcatttcggcgcgtatacctcccttatgtcactaatcaggcataccaggagcggacctaccagaggcttcttctggagaatcccaggttcccggggattctggcaaggctggaggaatcacccgtgtgtcagcggctaccgctgacctcctttctcattctccaaccacccgggggtcagggtgggcaccaatag

SEQ ID NO: 132601 - DNA, 1509 bp, synthetic construct
  misc_feature 1..1509: note = Description of Artificial Sequence: Synthetic coding sequence
  source 1..1509: mol_type = other DNA
atggattgcggacctccagccacactccagccccatctgacgggtccccccggtaccgctcaccatcccgtagcggtctgccagcaggaaagcctatcattcgcagaattaccagcactgaagcccccttcccctgtctgtttagacctgtttcccgtcgcgccggaggaactgcgagctccaggtagccggtggtcgcttggcaccccagccccactgcaggggctcctatggcccctgtcacccggcggtagcgacaccgaaattaccagcggggggatgcgtccttctcgggccggaagctggccgcattgtccaggagcccagccccctgctctcgaaggtccgtggtccccaagacacacccagccccagagaagggcctcccatggctccgaaaagaaatccgcctggcggaaaatgcgtgtctaccaacgggaggaggtgccaggctgtccggaagcacatgccgtgtttctggagccaggtcaggtggtgcaagagcaagccttatcaacagaggagccaagggtggagttatcaggttcgacccgcgtgtcactggagggtccagaacgccggcggtttagtgcctctgagctgatgaccaggctccactccagccttaggcttggaaggaatagtgcagccagggccctgattagtggttctggcactggagcagcgcgagaaggcaaagcctcggggatggaggctagatcagtcgaaatgtccggcgatagggtgagcaggcccgccccaggcgactcccgagagggcgattggagcgaaccgcgtctggatactcaggaggagccccccctgggcagtaggagtacaaatgagcgacgccagtccagattcctccttaacagcgtgctctatcaggaatattctgatgtggcatccgcccgcgagttaaggcgtcagcagagagaagaggaaggcccaggtgatgaggcagagggggccgaagaagggccaggccctccacgcgccaatctgtccccctcatcgtcttttagagcccagcgcagcgcaagaggcagcacgtttagcctatggcaagacattccagacgtgcgggggtcaggcgtgttggctacgttgtctctgagggactgcaaactgcaagaggctaaatttgaactgatcacttccgaagctagctacatccattcccttagcgtcgccgtggggcacttcctgggatctgcagaactctccgaatgcttgggcgcccaggataagcaatggctgttcagcaagctgcctgaggttaagtctacttccgaacgcttcttgcaagatctcgaacagcggctggaagccgacgtactgaggttttccgtgtgcgacgttgtgctcgatcattgccccgcattccggagggtgtatctcccatacgtgactaaccaggcatatcaggaaaggacctaccagagattactgagggaaaacaaacgagtaaccagcgccacttctaagttgggagaagcccccgtctag

SEQ ID NO: 132602 - DNA, 504 bp, synthetic construct
  misc_feature 1..504: note = Description of Artificial Sequence: Synthetic coding sequence
  source 1..504: mol_type = other DNA
gagcgcttggcccaattccctgccgctggccggggcagccccgggccgcctggggcaaggctgggcgttggtctggaaaaaggaagaggccgggaagtgtggaggccaggagtttggggttgcgaagcccgcgcttcagaagtgaattggagttgccctttcgatccagtctgcgccctgcctcaggcgaagttcgagctaatcacaagtgaagcttcgtatatccacagcctgagcgttgccgtggggcattttctggggtccgcggagctgtctgagtgcctgggcgcgcaagacaagcagtggctcttttccaaattacctgaagtgaaaagcaccagtgaaaggttcttacaggacctcgagcagcgccttgaggcagatgtgcttagattttcagtatgtgacgttgtgctggaccactgtcctgcgttccgccgtgtatatctcccatacgtgacaaatcaggcctatcaagagcgcacttatcagagactgttatag

SEQ ID NO: 132603 - DNA, 924 bp, synthetic construct
  misc_feature 1..924: note = Description of Artificial Sequence: Synthetic coding sequence
  source 1..924: mol_type = other DNA
tgacgtgatcggggacaagagcggttagctcagttcccagccgcagggaggggatctcccggcccgcctggagctcgccttggggttggactcgaaaagggacggggtagggaagtatggagaccaggagtatggggatgtgaagcgcgggctagtgaggtgaactggagctgccccttcgatcctgtttgtgcactgccgcaagccaaattcgaattgatcaccagcgaggcctcctatatccatagtctctctgtagccgtcggccactttctgggcagtgcggagctatcagaatgtttaggtgctcaggataaacagtggctcttcagtaaactgcccgaggtgaagagtacatctgaaagatttctgcaggacctcgagcagcgactggaagccgacgtgctacgcttctcagtgtgtgatgtggtgctggaccactgccccgccttccgccgggtgtacctgccctatgtcacgaatcaagcttatcaggagaggacttatcagcgccttttgctggaaaatccccggtttccaggaatcctcgctagattggaagaatctcctgtctgccaacgattacccctgaccagtttcctaattctacccttccagcggatcacacgtctcaagatgctggtcgagaacatactgaagcgtaccgcccaggggtcggaggacgaggacatggcaactaaagcctttaatgctctcaaggagctggtgcaggagtgcaatgccagcgtgcagtccatgaagcgcacggaagaactgattcatctctccaaaaagattcacttcgagggcaagatctttcctcttatctcccaggcccggtggcttgtacgccacggagagctggtggagctcgcgccactgccagcggcacctccagctaaactcaagctttcatccaagtag

SEQ ID NO: 132604 - DNA, 1581 bp, synthetic construct
  misc_feature 1..1581: note = Description of Artificial Sequence: Synthetic coding sequence
  source 1..1581: mol_type = other DNA
atggtggcgaaggattatcctttctatctgactgtgaaacgggctaattgctccctcgagctgcctccagcgtcgggacctgcaaaagacgccgaagaacctagtaacaagagagtgaaaccactcagtcgtgtgacatccctcgccaacctgatccctcctgtgaaggccacacctttaaaacggttttcccagaccctgcagaggagcatttcattccgctccgagagcaggcccgacatattggcccctcgcccctggagtaggaacgccgccccttcttcaaccaagcgcagagactccaagctgtggagcgaaacctttgacgtgtgcgtgaaccagatgcttacctcaaaggagattaaaagacaggaggccattttcgagctttctcagggtgaggaggacctaatcgaggacctgaaattggctaaaaaggcatatcacgacccaatgctgaaactgtccatcatgaccgaacaggagctcaaccaaatctttggaacccttgattctctcatccccctccacgaggaactgctatcacagctgcgggacgttaggaagcccgatgggtcgacagagcacgtgggacccatcttggtgggttggttgccttgcctctcttcttacgactcttattgtagcaatcaggtagccgcaaaggctctactggaccacaagaaacaggaccacagagtacaggattttcttcagagatgtttggaaagcccattcagcaggaaactggatctgtggaacttcttagatatccccagatccagactggtgaaatatccgctgctcctccgcgagatcctgagacatactccaaacgataaccctgatcagcaacatctggaagaagcaatcaacataatccagggaatcgtggccgagatcaacactaaaaccggcgagtcagagtgtagatactacaaagaacgactgctgtatctggaggaggggcagaaagacagcctgatcgatagcagcagggtgctatgttgccatggcgaattaaaaaataatcgcggtgttaagctacacgttttcctgttccaggaagttctggtgataactcgcgctgttacccataatgagcagctttgttaccagctgtatcgccagccaattcccgtaaaggacctcctgttagaggacttgcaggacggggaagtgcgactgggtgggtccctgcgcggagcgttctccaataatgaaaggatcaagaatttcttcagagtctcgtttaagaacgggtctcagtcacagacccatagcctgcaagcgaacgacacttttaataagcaacaatggctcaattgtatccgccaggcaaaagagacagtgctgtgtgcggcgggccaagccggcgtgttggactccgaggggtccttcctgaatcctactactggctctcgagagttgcagggtgaaaccaagctggaacagatggatcaaagcgattcagaatccgattgttccatggatactagtgaggtcagccttgactgtgagcgtatggaacaaactgactcttcttgcggtaattctaggcatggggagagtaatgtctag

SEQ ID NO: 132605 - DNA, 1677 bp, synthetic construct
  misc_feature 1..1677: note = Description of Artificial Sequence: Synthetic coding sequence
  source 1..1677: mol_type = other DNA
atggactcatctaccgcaatgaatcagtgctcctgccgcggcatggaagaaaataaggaacgccccaagcggcaaagacagaacaacttcccgatgtttccctccccaaaagcatggaacttccgcgggagaaagagaaagcaatccacacaggacgaggacgccgtcagcctatgtagcctcgatatttcggaaccttccaacaaacgagttaagccgcttagccgagtgacttcattggcaaacctcattccaccagtgaaggcaacaccacttaagcggttttcacagacgctccaaagatcaatctcatttcggtccgaatctagacccgatatcctggccccacgaccttggtcaagaaacgctgcaccatcatctaccaagcgcagggattccaagctgtggagtgaaacatttgatgtatgcgttaaccagatgctgacttcgaaggaaatcaaacggcaggaggcaatcttcgaactgtcccagggagaggaggacctaatcgaagaccttaagctggccaagaaggcttaccacgatcccatgttaaagctctcaattatgaccgagcaggagttgaaccagatatttggtactctcgacagcttgatccctttgcacgaggaactcctgtcccagttaagagatgtgaggaaaccagacggctcgaccgagcacgtgggtccaatcttggtaggctggctgccgtgtctcagttcctacgacagctattgctctaaccaggtcgctgccaaggcccttttggatcataaaaaacaggaccaccgggtccaggatttcttgcagcgctgtctagaatcccctttttctcggaaattggacctctggaattttctagacattcccagaagccggttggtaaagtaccctctgctgctgcgtgagatactcaggcataccccaaacgataaccctgaccagcagcacctggaggaagcaattaacatcatccagggcattgtcgcggagatcaacactaaaaccggtgaaagtgagtgtagatattataaagagcgcctgttgtatctggaagaagggcagaaagacagtcttatcgactcatcaagagtgctctgttgccatggcgagttgaaaaataataggggtgttaaactgcatgtatttctttttcaggaggtcctggtcataactcgagcagttacccacaacgaacagttgtgctaccagctgtacaggcagcctattcccgtaaaggacctactgctggaggacctgcaggatggagaggtgagactggggggctccctcagaggggccttcagtaataacgagcggatcaagaatttcttccgggtgtcttttaagaatggttctcaatcccagacgcactccctgcaggcgaatgatacattcaacaaacagcagtggttaaactgcataaggcaggcgaaggagacagtcctgtgcgccgcaggccaggccggcgtgctcgacagcgagggcagctttttaaatccgaccaccggcagccgtgagttgcagggtgagaccaagctcgaacaaatggatcagtctgatagcgaatccgattgctcaatggacactagcgaggtttcactggactgtgagcggatggagcagacagacagctcatgcgggaatagccggcacggagaatcaaatgtgtag

SEQ ID NO: 132606 - DNA, 1599 bp, synthetic construct
  misc_feature 1..1599: note = Description of Artificial Sequence: Synthetic coding sequence
  source 1..1599: mol_type = other DNA
atgatcgaggtgtgccaccacaattggctactgtggctctgtcccagtaagttcggaatcttcatgtgctgtctagccagcaccactgggcagatggaactgcggcgtacgagggaaccatctaacaagcgggtgaagcccttaagcagagttaccagtctggcgaatctgatcccgcccgttaaggccacgcccttaaagcgctttagtcaaacactgcagaggtccatctctttccgcagtgaaagtcgccctgacatccttgcaccacggccatggagcagaaatgcagctccgtcttccacaaaacggcgcgatagtaagctctggtccgagactttcgacgtgtgcgtcaaccagatgttgacatccaaggaaatcaagcgccaggaggctatttttgaactttctcagggcgaggaagatttgattgaagacctcaaactggctaaaaaggcctatcacgacccaatgctcaagttgtctataatgacggagcaagagctgaaccagatttttggaactctagattcactaattcctctgcatgaggagctgctgtcacagcttagggacgtccggaagcccgatgggtctacagagcatgtaggtcctatcctcgtgggttggcttccttgtctcagcagttacgattcttactgcagcaaccaggtggccgcgaaagccctgcttgaccacaagaaacaggaccaccgagtgcaggacttcctccaaagatgcctcgagtccccttttagccggaagcttgatctctggaactttctggacatccccaggtctcggttggtgaaatatcccctgctgctgcgcgaaattctcagacacacgcctaacgacaatcccgatcaacagcacctcgaggaggccatcaacattattcagggtattgtggcagaaatcaataccaaaaccggagagtccgagtgtcgatattacaaggaacgtcttctctatctggaagagggtcaaaaggattccctgattgatagctctcgggttctgtgctgtcacggcgaactaaaaaacaaccgcggcgttaaattacacgtgttcctcttccaagaggtcctggtcattactcgcgcggtgacacacaacgaacagctgtgttatcagctgtaccgtcaaccaatcccggtgaaggatctcttgctggaggatctgcaagacggagaggtgagattggggggcagcttgcgcggagctttctcaaataatgagaggatcaagaacttctttcgtgtatcatttaagaacggaagtcagagccagactcactctctacaggccaacgatacattcaacaaacagcagtggctgaattgtatcagacaggctaaagagacggtgctctgcgctgccggccaagctggcgtcctggattccgagggatcctttctaaacccaacgaccggaagtcgtgagctgcaaggagagaccaaactggaacagatggatcagtcagacagtgagtcggattgctcaatggatacaagcgaggttagccttgactgtgagcgaatggagcagaccgattcatcctgtggcaactcacggcacggcgagagtaatgtgtag

SEQ ID NO: 132607 - DNA, 2073 bp, synthetic construct
  misc_feature 1..2073: note = Description of Artificial Sequence: Synthetic coding sequence
  source 1..2073: mol_type = other DNA
atgccgtgggaggagccagccggcgagaagccttcatgcagccattcccagaaagcttttcatatggaaccagcccagaagccatgcttcacaaccgacatggtgacatgggcactcctgtgtatctccgccgaaaccgtgaggggggaagcaccgtcccaaccacgtggaattccccatcggagccctgtctccgtcgatgatctttggctcgaaaagacgcagagaaaaaagttacagaaacaggctcacgtggagagacgcctgcatatcggtgccgttcacaaggacggtgttaagtgttggagaaaaactattattacctcccctgagagcctgaatctccccaggagatcacatcccctttcccagagcgcccctactggactgaaccacatgggttggccagaacatacccccggaaccgccatgccagacggcgcattagatactgcggtgtgcgccgatgaggtaggatctgaggaggatctctacgatgatttgcactccagctctcatcactattcccatccagggggcgggggtgaacaactggccattaatgagctcatttcagatggaagcgtggtctgcgccgaggccctgtgggatcacgtcacgatggatgatcaggagttgggattcaaggctggggatgttatcgaagtgatggacgcgaccaatagagaatggtggtgggggcgagttgctgacggagaagggtggttccccgcctcttttgttcggctcagagttaatcaggacgagccagccgacgacgacgccccgctcgctggcaatagcggagccgaagatggcggggcagaagctcaatcttctaaggatcagatgcgtactaatgttattaatgagatcctttccaccgagcgggactacatcaagcaccttcgcgatatctgcgagggatatgttagacagtgccggaaacgggctgacatgttcagcgaagagcagctgcgaacaattttcggcaacatcgaggatatttataggtgtcagaaggcctttgtcaaggcgctggagcagcggttcaacagagagcgaccccatttgtcagaattgggcgcctgtttcctcgagcaccaggcagattttcagatctactccgagtactgtaacaatcaccccaatgcctgtgtggagctatcccggctgacgaaattgtcaaagtatgtttacttcttcgaggcctgccgactccttcagaagatgatcgacatatccctggatggctttctgctcacacccgtacagaaaatttgcaagtatccgttgcaattggccgaactcctgaaatatacacacccgcagcaccgtgatttcaaagatgtggaggctgcccttcacgctatgaaaaatgttgcacagcttatcaatgaacgaaagcggcggctggagaacatcgacaagattgctcaatggcagagctccatcgaagactgggaaggtgaagacctgctggtgagaagcagcgagctgatctactctggtgagctgacccgcgtgacgcagccgcaagccaaatcgcagcagagaatgtttttcctgttcgatcaccagctgatttattgcaaaaaagatctgctcaggagggacgttctctattataaaggccgattggacatggacggtctcgaagtggttgacctcgaggacgggaaggaccgggacctgcacgtttcaatcaagaatgcattccgactgcatcggggagctacgggtgactctcatctcttatgcacaagaaagccagaacagaagcagagatggctgaaagccttcgcgagggagcgggagcaggttcagttagaccaggagaccgggttctctattacagagcttcaacggaagcaggcaatgctgaacgcttctaaacagcaagtcacgggtaaaccaaaagccgtggggcgaccatgctacctcacacgccagaagcatcctgcgcttccttcaaacagaccccaacagcaggtgctggtgttggcagagcctcgccgcaaacccagcaccttttggcacagcatcagtcgtctggccccctttcgtaaatag

SEQ ID NO: 132608 - DNA, 1860 bp, synthetic construct
  misc_feature 1..1860: note = Description of Artificial Sequence: Synthetic coding sequence
  source 1..1860: mol_type = other DNA
atgcggcctgacggtcagcaggcacttgacgccgtggtgcgctcatttgactgccattctgaggccgctctccgccagcgtaacgacgtcatttactgtagcttacctcgtacggcacagggcattgtccaacgtgaagaccaactggaggttctggtgagcctccgcgaagtatggggcaggagacgtgggcgcgacggaacatgcaccggggcaatgccagacggggcgttagacacggctgtgtgcgccgatgaggtcggctctgaggaagacctgtacgatgacctgcatagctcctcccatcactatagccaccctgggggcgggggcgaacaacttgccataaacgaactgatctcagatggctctgtggtgtgcgccgaagccctctgggaccacgtcacaatggacgatcaggaacttggctttaaagcgggggatgtgatagaggtgatggacgcaacaaaccgggaatggtggtgggggcgcgttgcagacggagagggttggtttcccgcctcatttgtccgtctgcgagtcaatcaggatgagccggctgatgatgatgcccctctagccggaaatagcggtgccgaggatggtggagcagaggctcagtcgtccaaggatcagatgcgaacaaatgttataaacgagattcttagtactgagagggattacataaaacatctgcgcgacatttgtgagggctatgttcggcagtgcagaaagcgcgcggacatgtttagtgaggagcagctgcgcactattttcggtaatattgaggacatatacaggtgccagaaagccttcgtaaaggcactggagcagcggtttaatcgcgagaggccccatcttagtgagctgggcgcctgcttcttggagcaccaggcggactttcagatatattcagaatattgtaacaatcatcccaacgcctgcgttgagctcagccgcctgacgaagcttagtaagtacgtgtacttctttgaggcctgtcggctgttgcagaaaatgatcgatataagcctggacggcttcctgcttactcccgttcagaagatatgtaaatatccattgcagctggccgaacttctgaaatatacacacccccagcatagggacttcaaagacgtggaagcagctctgcatgccatgaaaaatgtggcccagctcattaatgagagaaaacgtaggttggaaaacatcgataaaattgctcagtggcagtcatccatcgaggattgggaaggagaagacttgcttgtccgcagcagtgagttgatttactctggggagctgactagggtaacccagccacaggccaagtcccagcagcgcatgtttttcctttttgatcaccaactgatttactgcaagaaggatctgttaaggcgtgatgtgctttattataaaggacgcctggatatggatggccttgaggtggtcgacttagaggacggtaaggaccgggatctgcacgtcagtatcaaaaatgcgttccggctgcacaggggtgctacgggtgactcccatttgctgtgtacacgcaagccagagcagaaacagcgctggttgaaagcgtttgcaagggaacgggagcaggtccagctggatcaggaaacaggcttttccataacagaactacaacgaaaacaggcgatgctcaatgcaagtaagcaacaggtgacggggaaacctaaagccgtaggcaggccatgctacttgaccaggcaaaagcatccggcactgccatctaaccgacctcaacagcaggtgctagtgctcgccgagccccggaggaaacctagtactttctggcattcaataagtcgcctggccccctttagaaagtag

SEQ ID NO: 132609 - DNA, 2013 bp, synthetic construct
  misc_feature 1..2013: note = Description of Artificial Sequence: Synthetic coding sequence
  source 1..2013: mol_type = other DNA
atgccttgggaggaacccgcaggagaaaagcccagttgctcacattcacaaaaagcttttcatatggaacccgctcagaagccctgtttcactaccgacatggttacatgggccttgctatgcatttctgcagaaaccgtgcgtggcgaggccccttctcagcccaggggcattccacaccggtctcccgtgtccgtggacgacctttggttagaaaaaacccagcggaaaaaactccagaagcaagcccacgttgagcggcggttgcacatcggcgcagtccataaggacggggtgaaatgttggcgtaagaccattatcaccagccccgaaagcctgaatcttccacgacggagccacccactgtcccagtcagcccctacaggtctaaatcacatgggatggcccgagcacacccctggaacagctatgccagacggtgccttggatacggcggtctgcgcagatgaagtcggctctgaggaggacctctacgacgacctgcactcgtcgagccaccactatagtcatccaggtggcggtggggagcagcttgccatcaacgaactgatcagcgatgggtcggttgtttgcgcagaagcgctttgggatcacgtgaccatggacgaccaggagcttggttttaaagccggagatgttattgaagtaatggatgccactaatcgggagtggtggtggggtcgggtggcagacggcgagggatggtttccagcatccttcgtcagactgagggtcaatcaggacgaacctgctgatgatgacgctccccttgctgggaatagcggcgcagaggatggcggcgcagaagctcagtcgtccaaggatcagatgcgaaccaatgttatcaacgaaatcctctctactgaacgcgactatataaagcatctacgcgatatatgtgaggggtacgtgcgccaatgccgcaaaagggcagatatgttttccgaggagcagttgagaactatctttgggaacattgaagacatctacaggtgccagaaggcatttgtgaaagctcttgagcagcgtttcaatagggagcggcctcacctctccgaactgggcgcttgctttctcgagcaccaggccgactttcagatttatagcgaatactgtaataatcatcccaatgcatgcgttgagctgagccgcctgacaaaactctctaaatatgtgtattttttcgaagcctgtcgtctacttcagaagatgatcgacatatccctggatgggttcctgctgacccccgtgcagaaaatatgtaaataccccttacagctggctgaactcctgaagtatacacatcctcaacacagagactttaaagacgtggaagccgctcttcatgctatgaaaaacgtcgcgcaactgatcaacgagcgaaaaagaagactggaaaatatcgataagatagctcagtggcagagctcaatcgaagattgggaaggtgaggatctcttggttcggagctccgaattgatctacagtggcgaacttaccagggtgacccaaccgcaggcgaagtctcagcagcggatgttcttcctattcgaccatcaattgatctattgcaagaaggacctgctgcggagagatgtgctgtattacaaaggacgtctggatatggacggcctggaagtggttgatctggaggatggtaaagatagagatttacatgtgtccatcaagaatgccttcaggctacatcggggcgccacgggcgacagtcacctgctgtgtacacgcaagccggaacaaaagcagaggtggctgaaagctttcgctagagagcgcgagcaggtccagctggaccaggagacaggtttttctataaccgagctgcagagaaaacaggcaatgttaaacgcttcaaaacagcaagtgactggcaagcctaagggaaggcggacggctgctcctcctccccgattgcccgggccttaccctgctgacatcatccctttcagcgagccacagtcccaggcctcttag

SEQ ID NO: 132610 - DNA, 1893 bp, synthetic construct
  misc_feature 1..1893: note = Description of Artificial Sequence: Synthetic coding sequence
  source 1..1893: mol_type = other DNA
atgccttgggaagagccagcaggcgaaaagcccagttgcagtcactcacagaaagcctttcacatggaacccgcgcaaaagccatgttttacgacagatatggtgacgtgggctctgctgtgtattagcgctgagacagtacgaggagaagcaccgtctcaaccccgcgggattccccataggagcccggttagtgtcgacgacctgtggcttgaaaaaacccagagaaagaagttgcaaaagcaggcccacgtggaacggcggctccacataggagccgtgcataaagatggagttaaatgctggagaaaaacaatcattactagtcctgagtccctcaatttgccacggaggtcacaccccctgagccagagcgctccaaccggactgaatcacatggggtggcccgaacatacccctggtacagccatgcctgacggagctttggacacagctgtttgtgcggacgaagtaggctccgaagaagacttgtatgacgaccttcactcatcctcacaccactacagccaccctggcggcgggggggaacaactggccattaacgagttgatcagcgacggtagcgtcgtctgtgcggaagccctttgggatcacgtaaccatggatgatcaggagttaggattcaaagctggagacgttattgaggtaatggatgctaccaacagagagtggtggtggggccgagtggcagatggtgaggggtggttccctgcgtcctttgtgaggctccgggttaatcaagatgagccggcagatgatgatgcaccactggcgggcaactctggagcagaagacgggggcgctgaggctcagtctagcaaggatcagatgcggacaaatgtaatcaatgagatcctgagtactgaaagggattacatcaaacacttgagggacatatgtgaacaggctgactttcagatttattctgagtactgtaacaatcatcctaatgcctgtgtggagctttcgagattaaccaagttgtctaaatacgtctattttttcgaagcatgtcgcctcctgcagaagatgatagatatcagcctggacgggtttctgctgactccagtacagaagatctgcaaataccctctgcagttggctgaactcctgaaatacacacacccccaacaccgggattttaaagacgtcgaagctgcactgcacgccatgaagaatgtcgcacagttgatcaacgagcgcaaacggaggttggagaatattgacaagatcgcccaatggcaaagctcaatcgaggactgggagggagaggatctgttggtgagatcttcggaactgatttattcaggggagctcaccagggtaacgcaaccccaggctaagagtcagcagaggatgtttttcctttttgatcaccagctcatctactgtaagaaagaccttctccgcagagatgtgttgtattacaaaggacgacttgacatggatgggctggaggtggtggacctggaagacgggaaggaccgtgacctgcacgtgtcaatcaaaaatgcgttcagattgcatcgcggagccaccggagatagccatttactgtgcacccggaaaccagagcaaaaacagaggtggctaaaggcttttgcgcgggagcgtgagcaagtgcagctcgatcaagagaccggattttctatcacagagctccagcgcaagcaagctatgctgaatgctagcaaacagcaagtgactggtaaaccgaaggccgtgggcagaccctgttacctgacccgacagaaacaccccgcactgccgagcaataggccacagcagcaggtgctggtgctggctgagcctcggaggaaaccaagtacgttctggcacagcatcagtaggctggccccctttagaaaatag

SEQ ID NO: 132611 - DNA, 579 bp, synthetic construct
  misc_feature 1..579: note = Description of Artificial Sequence: Synthetic coding sequence
  source 1..579: mol_type = other DNA
atgccttgggaagagccagctggggaaaaaccttcctgtagccattctcagaaggccttccacatggaacccgcgcagaagccctgcttcaccaccgacatggtcacttgggctttactgtgcattagtgctgaaaccgtgcggggggaagcaccatcccagccacgggggatcccccacagaagccccgtgagtgtggacgacctctggctggagaaaacgcaacggaagaaactccagaaacaggctcacgtggagagacggctgcacatcggtgccgtccacaaggacggagtgaaatgttggcggaagacaataataacaagtcccgaaagtttaaatctcccacgccggagccacccactgtctcagagtgcgcctacaggactgaaccatatgggttggccagagcacacccctggtacagcggtggggcggccttgctacttgacccgtcagaaacaccctgcactaccaagcaatcggccacagcagcaagtgctggttctagccgaaccaagaaggaaaccgtccaccttctggcatagcatctcacgcctagctcctttccggaagtag

SEQ ID NO: 132612 - DNA, 2013 bp, synthetic construct
  misc_feature 1..2013: note = Description of Artificial Sequence: Synthetic coding sequence
  source 1..2013: mol_type = other DNA
atgccttgggaggagccggcaggagagaaaccatcttgctcccattcccaaaaggcctttcatatggagccagcccaaaaaccttgttttaccacggacatggttacctgggccctcctctgcattagcgccgaaacggtgagaggggaggcgccttctcaacccagggggatccctcacagaagtcctgtgtccgtcgatgacctctggctggagaaaacacaacgtaagaaactacagaagcaggcacatgttgagcggcggctgcacatcggcgctgtgcataaggacggggttaagtgctggagaaagactataatcaccagtcctgagtccctcaatctacctaggagatctcatccactgagccagtccgcccctactggcctcaatcatatgggatggccagaacataccccgggcaccgctatgcccgacggggccctggatacagctgtatgtgcagatgaagtgggttctgaggaggacctgtatgacgacctacattcatcgtcccatcattattcccacccaggaggcggcggcgaacagctcgctattaatgaactaatttctgacggctccgtcgtgtgcgcagaggcgctgtgggatcacgtcactatggacgaccaggagttgggctttaaagctggagatgtgatcgaggtgatggacgcaaccaatagggagtggtggtgggggagagtggcagacggggaggggtggtttcctgcttcattcgtgcgcctccgagtgaatcaggacgagcccgcagatgacgatgcacccttggcggggaactccggtgccgaagacggcggtgcggaagcccagagctcaaaagatcagatgcgcaccaacgtcatcaacgagatactctcgacagaaagagattacattaagcatcttcgggacatttgtgagggatatgtgaggcagtgccgaaagcgtgccgacatgttttctgaggagcagctaaggacgatttttgggaacatcgaggatatatataggtgtcagaaagcctttgtcaaagcattggagcaaagatttaatagggagcgacctcacctatccgagcttggcgcttgcttcctcgagcaccaagccgatttccagatatattctgagtactgcaataaccacccaaatgcctgcgtcgagctgtcccggctcacaaaactttctaagtacgtctatttttttgaggcatgcagactgctgcagaagatgatcgatatatccctcgacggattcctcttaacaccagtccaaaagatatgtaagtacccgctccagctggcagagctgttaaagtacactcatccccagcatcgggattttaaagacgtggaagccgcgctacacgcaatgaaaaacgtggcccagctcatcaacgaaaggaaaaggagacttgagaatatcgacaagatcgcgcagtggcagtcatccatcgaggattgggagggtgaggatctgctggttaggtcttctgagcttatttactcaggggaacttacacgcgtcactcaaccacaggctaaatcacaacagcgtatgttttttctctttgatcatcaactgatttactgcaagaaagacctcctcagaagggacgtgctttattacaagggcaggctcgacatggacggcctggaggtcgtggacctcgaagatggcaaggatagggacctccacgtcagcatcaaaaatgctttccgcttgcaccggggcgcaaccggcgactcccatctgctgtgtacacggaagccggagcagaaacagaggtggctgaaggcgtttgctagggagcgggagcaggtgcagctcgatcaggagaccgggtttagcatcaccgagctccagcgcaagcaagccatgctaaatgcctcaaaacagcaggttaccgggaagcccaaagggcgaagaactgccgccccacctcccaggcttccgggaccataccccgctgacataatccccttttccgagccgcagagccaagcatcctag

SEQ ID NO: 132613 - DNA, 4794 bp, synthetic construct
  misc_feature 1..4794: note = Description of Artificial Sequence: Synthetic coding sequence
  source 1..4794: mol_type = other DNA
atggaggctgaagaagcgcagcgtggggcttctcctccaatctccgcaatagaagagttttccattatccctgaagcaccgatgaggtctagccaggtgagcgccctaggcttagaggcccaagaggatgaagatcctagctacaaatggcgcgaggagcaccggttatccgctacacagcagagtgaactgcgcgacgtttgcgattatgctatagaaactatgccttcatttcctaaagaagggagtgctgatgtggagcccaatcaagagtcccttgttgccgaagcctgcgatacacccgagcattgggaggcggtgcctcagtcgctcgctggccgacaagctagaaccctggcgcctcctgagttgtgggcatgccccattcagtcagaacacctagatatggcacccttcagcagcgacctcgggagtgaggaagaagaggtggagttttggcccggtcttacctccctcactctgggcagcggccaagcggaggaagaagaagagacaagcagcgataactcaggacaaacccgctattattctccttgcgaagagcaccccgctgaaacaaaccagaacgaaggttccgagtccggcaccatccgccagggcgaggagctccctcccgaagaactgcaggagtcccaggggctgttgcacccccaagaggtgcaggttcttgaggagcaagggcagcaggaagctggattcaggggggaagggacactgagggaggacgtgtgcgcagatggcctgctgggcgaggaacaaatgatcgagcaggtgaatgatgaaaagggggaacagaaacagaaacaggaacaggttcaagacgtaatgctggggagacagggtgagcggatgggactgaccggagagccagaaggattgaacgatggggaatgggaacaggaagatatggagcgaaaagctcaggggcagggcgggccggagcagggggaggagaggaagagagaactacaggtacctgaggaaaatagggccgacagtcaggatgagaaaagccagacttttctaggaaagtccgaagaagtgaccgggaaacaagaagatcatggaatcaaggaaaagggggtgcctgtgtcagggcaagaagcaaaggagccggaatcttgggatgggggaagattgggggccgtcgggcgtgcacgttctcgggaggaggaaaacgagcatcacggcccttccatgcctgccctgattgcccccgaagattcgcctcattgtgatctgttcccaggcgcctcttatttaatgactcagatccccggaacacagacagagtcccgggccgaggagctcagccctgcagctctttcccctagcctggagcccatcaggtgcagtcatcagcccatttccttgttaggaagctttttgactgaggaatcccccgacaaggaaatcgatcaaaacagtcagcaggaggagtctaggctgcgaaaaggaacagtgtcaagccagggcacagaggtggtgttcgcttccgccagcgttaccccgccccggacccctgatagcgctcctccctcccccgctgaagcctatcccatcacaccggcaagcgtttctgcccggcctcccgtggccttccctcggagagaaacgtcatgcgccgcgagggcacctgaaaccgcgtctgctcctttgtccatggatgacccaagcccttgcgggaccagcgagatgtgtccagcggccctgtatgggtttccctcaaccggcacatcacctccccgccctccagccaactcaaccggaactgtccagcatctcaggagcgactccttcccagggtcacaccggacagagcagacgccggaccttgtcggtatgcttctgagctacagtcacagcgagttacctcagaggcctccaaagcctgcaatctattctagcgttacaccaaggagggaccgccggagcggccgcgattattccacagtctccgcctcacctacagctctaagcacgcttaaacaagatagccaggagagcatatcaaacctggagcgcccctcatctcctccctccatccagccctgggttagtcctcataaccccgcttttgcgaccgagtcacctgcatatggctcaagcccctccttcgtgtccatggaagatgtgaggatccacgagccgttaccaccacccccacctcaacgacgggacacacatccaagcgttgtggagacagacggacacgcaagggttgtcgtgccgacactcaagcaacatagccacccaccaccgttggcactcggatctgggctccatgcgcctcacaagggccccttgcctcaggcgtcagaccctgctgttgcccggcagcatagacctctgccttccactcctgatagctcccatcacgctcaggctaccccccggtggcgatataacaaacccttgcctccaactcctgacctaccccagcctcatctcccacctatttccgcgcctggaagtagcaggatataccggccgctgccccccctccctattatcgatccccctacagagcccccacctttaccacccaaatcccggggccgctcacgaagtaccagaggtggtcacatgaactcaggaggtcacgccaagacccggcccgcctgtcaggactggaccgttccactgcccgcatctgccggacgaacttcatggccacctgcgacagccagaagtacagagagtttcacgtctacgagcaggagcaaaagtgaggtttcccctgggatggcatttagcaatatgaccaatttcctgtgtccaagttcaccaacgaccccttggactccagaactacagggccccacctccaaggatgaggccggtgtctctgagcaccctgaggctccggcccgggaaccactgcgaaggacaaccccccagcagggcgcttctggacctggtcgctctcccgtaggtcaggcccgacagccggaaaaaccatctcacttacatctggaaaaggcgtcaagctggcctcaccggcgagatagcggtagacctcctggggatagcagtgggcaagctgtggctcccagcgagggcgccaacaagcataaaggctggtccagacaagggctccggagaccatccatcctgcctgaagggagctcggattccaggggtcccgccgtcgagaagcaccctggcccgagcgacacggtggtttttagagagaagaaaccaaaagaggtcatggggggatttagcagacgatgttccaagttgatcaattccagtcaactcctttatcaagagtactctgacgtcgttctgaacaaggaaatacagagccaacagaggctagagagtttgagtgagacccctgggccctctagcccacggcaaccaaggaaagccctcgtatcttccgagagctacctccagcgcttatccatggcatcatccggatctctgtggcaggaaatcccagtggtaagaaactccacagtcctgctgagtatgacccacgaggaccagaaactgcaggaggtgaagttcgagctgatcgtatctgaggcaagctatctacgctctctgaacatcgccgtggatcatttccagttgagcacatctctgagagccacacttagtaatcaagagcaccagtggctcttctcacgcctgcaagatgtgcgggatgtctccgccacatttcttagtgacctggaagagaacttcgagaataacatattcagcttccaggtgtgtgatgttgtgctgaatcatgctccagattttagacgtgtgtacctaccctacgtcactaatcaaacctaccaggagaggacatttcagagtctaatgaattccaacagtaacttcagggaggtgctggaaaagcttgagagtgaccccgtctgtcagcggctgtcactgaaaagctttttgatactgccatttcaaagaatcaccagattgaagcttctgctccagaatatcctgaagagaacacagccaggttcctctgaagaggcggaagcaaccaaggcccatcatgctctggagcaactgatcagagactgcaataataatgtgcagtcaatgcggaggacggaagagctgatttacttgtctcagaaaatagagttcgaatgtaaaattttcccactgatttcacaatccagatggctcgtgaaatctggcgaactgactgcattggagtttagcgccagccccggccttcgtcgcaagctcaatactcgcccagttcatctccacttgttcaacgattgtttgctgctgagtagaccccgcgagggaagcaggtttctagtgtttgaccatgcccctttttcctccattcgcggagaaaagtgtgagatgaagctccatgggccacacaagaatctttttcggttgttccttagacagaatacgcagggcgctcaagccgagtttctgtttaggacagaaacccagtctgagaaactcaggtggatctcagctctggcgatgcccagggaggagctggacctgctggagtgttacaactctccgcaggtccagtgcctgcgagcgtacaagcccagagagaacgatgagctggccctggagaaagctgatgtcgtgatggtgacacagcaatcttctgacgggtggctggagggcgtacgcctcagcgatggagaacggggatggttccctgtgcaacaggttgagtttatttctaacccggaagtgagggctcagaacttgaaagaggcacatcgggtgaagactgctaagctgcagcttgtggagcagcaagcctag

SEQ ID NO: 132614 - DNA, 1197 bp, synthetic construct
  misc_feature 1..1197: note = Description of Artificial Sequence: Synthetic coding sequence
  source 1..1197: mol_type = other DNA
atggcctcctccgggagcctgtggcaggaaatccccgtggtgcggaattctaccgtgcttctttccatgacccacgaggatcagaaacttcaggaggtcaaatttgagctaatcgtgagcgaagctagttatctgcggtcccttaacattgccgtagatcactttcagctttccacgtctctgagagctacattgtctaaccaggagcatcagtggctttttagccgactgcaggacgtgagggacgttagcgcaaccttcctcagcgacctcgaggagaatttcgaaaacaatatcttctcatttcaggtttgtgacgtggtgttgaatcatgcccccgactttagacgtgtttacctgccatatgtgacgaatcagacatatcaagagcggactttccagtccttgatgaatagcaattccaatttccgggaggttctggagaagctggagtccgatcccgtatgtcagaggctgtctctgaaatcatttctgatcttaccatttcagcgtataacacgattgaaattgttattacagaatatactgaaaaggactcagcctgggagcagcgaagaagccgaagccacgaaggcccaccacgcgctagagcagcttattagagactgcaacaataatgtgcagtccatgcggaggaccgaagagctgatttatctctcacaaaagatagaattcgaatgcaaaatttttcccctgatctcacagtctaggtggttggttaagagtggagaattgacagccctcgaattttccgcgtctccaggcctacgcagaaagctgaacacccgtcctgtgcatctccacctcttcaacgattgcttgcttctgtctcggcccagggagtcagagaagctaaggtggataagtgcactggccatgccccgtgaggagttagatctccttgagtgttataactcacctcaggtgcagtgcttacgcgcctataagccacgcgagaacgatgagttggcactggagaaagcagatgtggtcatggtgacacagcagagctctgacggctggctcgaaggcgtgcgcctctcggacggtgaacgtggttggtttccagtgcaacaagtggagtttatttcaaaccccgaagtcagagctcagaacctcaaagaagcccacagggttaagacagccaagctgcaactggtggagcagcaggcatag

SEQ ID NO: 132615 - DNA, 1560 bp, synthetic construct
  misc_feature 1..1560: note = Description of Artificial Sequence: Synthetic coding sequence
  source 1..1560: mol_type = other DNA
atgggtggtttctcccgccgttgctcaaaattaatcaattctagccagctactttatcaggaatatagcgatgtggtgctgaataaggagatccagtctcaacagcgcctcgaatcattgtccgagacaccgggacccagcagcccccggcagccccgaaaggcactggtgtccagcgaatcttatctgcagaggctgtcaatggcctcttctggatccttgtggcaggagatcccagtggtgcgtaactcaaccgtactcttaagcatgactcacgaggatcagaaactacaggaagtcaaatttgaattaatcgtctccgaggcttcctacctgcgatctctgaatatcgcggtcgaccactttcagctgtccacttctctacgcgcaacgctgtccaatcaggagcatcagtggcttttcagccgtctgcaagatgttcgcgacgtatcagcaacctttctaagtgatttagaggagaatttcgagaataacatattcagctttcaggtgtgtgacgttgttctgaatcatgcccccgacttccgtcgagtgtatctgccatacgtgacaaaccagacgtaccaagagaggaccttccagagcttgatgaactcaaacagtaattttcgggaagtgcttgaaaagctggaaagcgatccagtgtgtcagagattatccttgaagtccttcctgatcctacctttccagagaataacaagattgaagctgctgctccagaatattcttaaaaggacacagcccggttcttccgaggaggctgaggctacaaaagcccaccacgcccttgagcagctgatcagggactgcaacaataatgtgcagtcaatgcgcagaaccgaagagctgatttaccttagccaaaaaattgaatttgagtgcaagatttttccactgatttctcagtcccggtggctggtgaagtccggagaactgactgccctcgaattctctgcctccccgggtctcagacgtaaattaaacacaagacccgtccaccttcatctgttcaacgactgtcttcttctgtcgcgccccagggaggggtctcgcttcttggtttttgatcatgcaccattttcctctatccgaggggagaagtgcgagatgaagttgcacggaccacacaagaatctgtttcgcctgtttctacgacaaaacactcaaggagctcaggcagaatttctgttcaggacggagacgcagtctgagaagctaaggtggattagcgccctggcaatgccacgtgaggagctggacctgcttgaatgctataacagcccccaagtccaatgtcttagggcatacaagccccgagagaatgacgagctcgccctcgaaaaggccgacgtggtcatggtgactcagcagagttctgatgggtggctggaaggcgtccggctctcagacggagagcgagggtggttcccagtgcagcaggtcgagttcatctccaaccctgaggtccgcgctcagaatctgaaagaggctcatcgcgtgaagactgcaaagcttcaattggttgaacagcaagcgtag

SEQ ID NO: 132616 - DNA, 2394 bp, synthetic construct
  misc_feature 1..2394: note = Description of Artificial Sequence: Synthetic coding sequence
  source 1..2394: mol_type = other DNA
tgagttgttgtacctaccttgaagcagcattctcacccccctcccttggctctcgggagcgggcttcacgcccctcacaaggggcctcttccccaggcaagcgacccggccgtggctcgccagcatcgacccctgcctagcacgccagattcttcacatcatgcccaagccactccacggtggcggtataataaaccattgcctcccactccagacctgccccaacctcacctccctccgatctctgcgcccgggagctctcggatctacagacctttgcccccactgccaatcattgatcctcctacagagccaccaccactgccacctaagagcagaggacggtctcgttctacccgtggggggcacatgaattctggaggccacgctaaaacgcggccagcctgccaggactggactgtacctcttcccgcgtccgccgggcggacatcctggccaccagcaactgccagaagcaccgagagcttcacctcaaccagcaggagcaaaagcgaggtttcccccggcatggcattttccaacatgactaacttcctgtgcccctcatcccccacaactccctggacgcctgagttgcagggcccaacctccaaggatgaggcgggtgtgagtgaacatccagaggctcccgccagagagccactgcggcggactactccgcagcagggcgcttccggccccggtcgttcacccgtgggccaggcaaggcagccggagaagccctcacatttacacctcgaaaaggcttcctcctggccacacagaagggattctggacgcccacccggcgatagcagcggtcaagcagtggccccctccgaaggagctaataaacataagggctggtcacggcaggggctccgtcggcccagtatcctacccgagggctcatcggattctcggggtccagcagtggaaaaacatccgggacccagcgacaccgtagtctttagagagaaaaaacccaaagaagtgatgggtggctttagtcggaggtgttccaaactgatcaattcaagtcagctgttgtaccaggaatactcagatgtcgtgcttaataaagagatacagagccaacagagactggagtcattgtccgagactcctggtccctctagccctcggcagcccagaaaggccctcgtgagttctgagtcatatttacagcggctcagtatggcaagttctggtagtctctggcaggaaattcccgtggtgcgtaatagcactgtcctgctgagtatgactcacgaagaccagaagttgcaggaggtgaagttcgagctcattgtgtccgaagcttcgtatctgagaagtcttaacatcgccgttgaccattttcagttatccacatccctgagagccactctttccaatcaggagcaccagtggctattcagcagactccaggacgtgagagacgtctccgcaaccttcctgtctgatctcgaagaaaattttgagaacaacatcttctccttccaagtgtgcgacgtggtgcttaaccacgcccccgactttaggcgcgtctaccttccctatgtaactaatcagacgtaccaagagcgcacattccagtctctgatgaattcaaacagtaacttccgggaggttctggaaaaattagagagtgaccccgtgtgtcaaagactttccctcaagtcattcctaattctcccattccaaagaattacacgtctgaaactccttctgcagaatattcttaagaggacacagcccggcagctccgaagaagcagaggctacaaaggcccatcacgccctggagcaactgataagggattgcaacaacaacgtgcagagtatgcgacggacggaggaactgatctatctgtctcagaaaattgagttcgagtgcaagattttccctctcataagccagagtcgatggctcgtcaagtccggtgaactaactgcccttgaattctcggcatcacccgggttgagacgaaagctgaacaccagacctgtgcacctccatctcttcaatgattgtctcctgctgtcccgcccacgcgagtctgagaagctcagatggatatcagcgctggcaatgccaagggaggaattggatctcttggagtgttataactcaccgcaagtccaatgcctcagggcttataaacctagagagaacgacgaattggctctggagaaagctgacgtcgtgatggtgacccagcagtcatccgacgggtggctcgagggagttcgcctaagtgatggagaaaggggctggtttccggtgcagcaggttgagttcatcagtaaccccgaagtgcgggcacagaacctgaaagaagcacatagagtcaagaccgctaagttgcagctagtcgaacagcaggcctag

SEQ ID NO: 132617 - DNA, 2958 bp, synthetic construct
  misc_feature 1..2958: note = Description of Artificial Sequence: Synthetic coding sequence
  source 1..2958: mol_type = other DNA
atgagccggatcgagagccttacacgcgcgcgcattgaccgaagccgggagttagcctcaaaaacgagagagaaagaaaagatgaaagaggccaaagacgccaggtacaccaatggccatctcttcacaactatttccgtctcaggcatgacgatgtgctatgcctgcaacaagtccataacagctaaggaagcattgatctgtcccacgtgcaatgtcaccatccataacagatgcaaagacacactggcgaattgtaccaaggtgaagcagaagcaacaaaaagccgccttattgaagaataatacagctctgcagagtgtgagcctccgttcaaagaccacaataagggagagacccagttctgccatctatccctctgattccttcagacagtccttactgggttcccgtcggggaaggagctctctgtctctagccaagtccgtgagtaccacaaacatagcaggtcactttaacgacgagtccccccttggattaaggcgcattctctcgcagagcactgattctttgaacatgcgcaaccggacccttagtgtcgagtccctgatagatgaagaagtcatttacagtgagctgatgtccgattttgagatggatgaaaaggatttcgccgcagactcctggtccttggcagtggactcttccttcctgcagcaacataagaaagaagtgatgaaacaacaggacgttatctatgaactaatccagaccgagctgcaccatgttagaactcttaagatcatgacccgtctctttcggaccggcatgcttgaggaattgcaccttgagccgggggtcgtccaggggttatttccctgtgtggacgaactgagtgacatccacactcggttcctctcccagttgctggagagacgcaggcaagcattgtgccccggatcaaccaggaacttcgtgattcatagactcggtgatctgctcatctctcagttctcgggcccctctgctgagcagatgtgtaaaacctattccgagttttgctcacgtcatagcaaagcactcaagctctacaaggaactgtatgcaagagataagcggttccaacagtttatacggaaggtgactcgacccgcggttctgaagcggcacggagtgcaggagtgtattctccttgtaacccaacggatcactaagtatcccctcctgatcagtagaattcttcagcattctcatggcatcgaggaggagagacaggatttgactactgctctcggactcgtaaaggagcttttgtccaatgtggacgagggaatttatcagttggagaagggcgcaaggctacaggagatctataatagaatggatccccgggcgcaaaccccagtgcctgggaagggtccatttgggagggaggagctgctgcggaggaaacttattcacgatggctgtttactgtggaagactgccactgggagattcaaggacgttctggttcttttgatgacagacgtccttgtattcttgcaggaaaaagatcagaaatacatttttcccacactggataagccttctgtcgtgtccctgcaaaacctgattgtgcgggacatcgccaaccaggagaagggaatgtttcttatcagcgccgccccacccgagatgtacgaggtgcacactgcctctagggatgataggagcacctggatcagagtcatccagcagtccgtcaggacatgcccaagccgggaagacttcccactgatcgaaacagaggacgaggcttatctgagaagaattaagatggagctgcaacagaaagatcgagcactggtagagctgctccgcgagaaggtgggtttgtttgcggagatgacgcacttccaggcagaagaagacggcggttctggtatggccctgccaaccctgccgcgtggcctttttcgttccgagtcccttgagtctccccggggagagagactgttgcaggacgctattagggaagtagagggattaaaggacctgctggttgggccaggggtggagctactcctcacgccgcgagaaccagccctgccccttgagccggattccggaggaaacacaagccccggagttaccgccaatggagaggcacgaactttcaatggtagcattgaactctgccgggccgactcagactcaagccagagggaccgaaacggcaatcagctgcggagtccacaagaagaggccctgcaaaggctcgtgaacctgtacgggctcctccacggcctccaggccgcggtggctcagcaggacaccctgatggaggccaggttccctgaaggcccagaaagacgcgaaaaattgtgtcgcgctaactctagagacggagaagccggccgcgccggagccgcccctgttgcccccgaaaaacaggccacagagctcgcgctcctccagcggcaacacgcccttctccaggaagaactccgaaggtgtaggcgcctgggcgaagagagagccactgaggccggcagtctggaggcccgcctgagagagtccgaacaagccagagctctccttgaacgtgaggctgaggaggccagaaggcagttggctgccctgggacagacagagcctctgccagccgaggctccatgggcccggcggccagtggacccccgccgccgttctttacctgcaggagacgccctgtacctgtcttttaacccaccccagccttctaggggcacagatcgtctggatcttcccgttacaacccgatctgtccatcgaaactttgaagacagggagcgtcaggagttggggagtccagaagaaagactgcaggattccagcgaccctgataccggatccgaagaggagggcagttcaagacttagcccccctcactctcctagggactttactagaatgcaggacatcccagaggagaccgaatccagagatggagaagcagttgccagcgagtcctag

SEQ ID NO: 132618 - DNA, 2877 bp, synthetic construct
  misc_feature 1..2877: note = Description of Artificial Sequence: Synthetic coding sequence
  source 1..2877: mol_type = other DNA
atgaaagaagctaaggatgcccgttacaccaacggtcacctgttcactactatcagcgtgagcggaatgactatgtgttatgcttgtaacaagtccattacagcgaaggaggctttaatctgtcccacctgtaacgtgactatccataaccgatgtaaggacacacttgccaattgtactaaggttaaacagaaacagcaaaaagcagcactgctgaagaacaacacggcactgcagagtgtgagcctgcggagcaagacgaccattcgggagcgtccctctagcgcaatctacccaagtgactctttccggcagtccctgctcggttcgagacgcggccgctcatcactgtccctggccaagagtgtgagcacaactaatatcgccggacacttcaatgacgaaagcccactcggactaaggagaatcctgtcccagagtaccgattcgttgaacatgcggaatcggacgttgtcagtggaatccctcattgatgaggaagtaatctattcagagctgatgtcagattttgagatggatgaaaaggactttgccgcggactcctggagcctggcagtagactcatcgtttcttcagcagcacaagaaggaagtgatgaagcagcaggacgtgatttacgaattaatccaaacagagttgcatcatgtacgcacacttaaaatcatgacgcggctgtttagaacagggatgctggaggaactgcatttagaacctggggtagtgcagggactcttcccctgtgtggacgaactcagtgacatccacaccaggtttctgtcccagctgctggaacggagaagacaggccctctgccccggctctactagaaactttgtcatccatcgcctgggcgaccttcttatctcccagttttcaggcccgagtgctgagcagatgtgcaagacctatagtgagttctgcagtcggcattccaaggctctcaaactttacaaggaattatatgctcgtgataaacggtttcagcagttcataagaaaagtcacacgtccggccgtgctgaaacgccacggggtccaagagtgtatccttctggttactcagagaatcactaaatatcctctgcttattagcagaattttacagcactcccacgggattgaggaagagaggcaagacctgaccaccgccctcgggctcgtgaaggagttgttgtcgaatgtggacgaagggatctatcaattggagaagggcgcccggctgcaggaaatctacaatcggatggatccacgcgcacagacaccagttcctgggaagggtccgttcggcagagaagaactgctccgaagaaagctgatccacgacggttgtctattgtggaaaactgcaacgggtagattcaaggatgtgctcgtcctgctcatgaccgacgtcctggttttcctgcaagagaaagaccaaaagtacatttttcctacacttgataagccatccgtggtttcactgcaaaacctgatcgtgcgggatattgccaatcaggagaaggggatgttcctgatttccgctgccccccctgagatgtacgaagtgcacaccgcctctagggatgacagatcaacctggataagggtaattcagcagtccgtgaggacttgtccatccagggaggacttcccactcattgagactgaagacgaggcctacttgcgccgaattaaaatggaattacagcagaaagacagagcgctggttgaattgctaagggagaaggtgggcttgttcgctgagatgacccacttccaggctgaggaggatgggggcagcggcatggctctaccaactctcccccgtgggctcttcaggtccgaatcgctggaatctccacgtggagagaggctcctacaggacgccatcagagaagtggaaggcttaaaagatttgctcgtaggccctggtgttgagctgctcctaactccacgggaaccggcacttcccctggagcctgatagcggggggaatacctccccaggcgtcacggcaaacggcgaggcccgaactttcaacggctccatcgaactgtgcagggcagatagtgactcttctcaaagggatcggaacgggaaccagctccgctccccacaggaggaggcccttcagcgcctcgtgaacctgtacggccttctgcatggactacaggccgccgtcgcgcaacaagatacgttaatggaggctcggttcccagagggcccagaaaggagggagaagttgtgcagagcgaacagcagagacggggaggcagggagagccggggcagcgccggtcgccccggagaagcaggctacagaactggcattgctgcagagacagcatgccttgctgcaggaggagctacgtaggtgcaggcgcctcggcgaggagagggctacagaggctgggtctttagaagcgcgtctgcgggaatcagaacaagcaagggccctcctcgaaagggaggccgaggaggcccgacgacagttagcggccctgggtcagaccgagccgctgccagccgaggctccatgggcaaggcgccctgtcgaccctcgcagaagaagtctgccagcaggtgatgctctttacctctcatttaatcctccccaacctagccggggcacagataggttggacctgcccgtaactactagatctgtccatcgcaatttcgaagaccgagaacggcaggagcttggatcgccagaggaacggctacaggacagttctgatcccgacacagggagtgaagaagaaggtagctcccggctctcaccgccacactctcctcgcgacttcaccaggatgcaagatatccccgaggaaacggagtcccgagatggagaggctgttgcaagcgaaagttag

SEQ ID NO: 132619 - DNA, 2961 bp, synthetic construct
  misc_feature 1..2961: note = Description of Artificial Sequence: Synthetic coding sequence
  source 1..2961: mol_type = other DNA
atgtcgaggatcgagtctctgactagagcccgcatagatcgaagtcgggagttggccagcaaaactcgcgaaaaggagaagatgaaggaagcaaaagacgccaggtacactaacggccacctgttcaccactattagtgtgagtggcatgaccatgtgctatgcgtgcaacaagtctattacagctaaagaggctctgatctgccccacatgtaacgtgactatccacaatcgatgtaaggacaccttggcaaattgcacgaaggtgaaacaaaagcagcaaaaggccgccctcctgaaaaacaatacagccctgcagtctgtctccctgcggtctaaaacaacgattagggagcggccatctagcgctatatacccttccgactccttccgacaatccctgctgggcagcaggagaggtaggtctagtttaagtctggcaaagagcgtgagcaccacaaatatagccggccacttcaacgacgaatctccactgggactccgacgcatcctctcacagagcaccgattcgcttaacatgaggaatcgcacactgagcgtggaatctttaatcgatgaagcagaagtcatctactcagagttaatgtccgactttgagatggacgaaaaggacttcgctgctgactcctggtctctggccgtcgactcctccttcctgcagcagcataagaaggaagtgatgaagcagcaggacgtgatctacgaacttattcagactgagctgcaccatgtacgtactctcaagatcatgaccaggttatttagaactggcatgctcgaggagctccatcttgaaccaggggtagtacagggtctgtttccatgcgttgatgaattgtcagacattcacacgcgttttttatcacaacttcttgagagacggagacaggcgttatgtcctggctccactcgcaactttgtgattcaccggctcggcgacctgctcatcagccagtttagcggaccatccgctgaacagatgtgcaaaacctatagcgaattctgcagcaggcactctaaagcgcttaagctgtataaagaactctacgcccgggacaaaaggtttcagcaatttatccggaaagtaacacgaccagccgtgctgaaacgacacggggtgcaggagtgcattctcctcgtcactcagaggatcacaaagtaccccttattaatctcacggatcctgcagcatagccacggaattgaagaagagcgccaagaccttaccactgccctgggccttgtcaaagaactgctgtccaacgtagatgaggggatctatcagctggagaagggggctaggctgcaggagatatacaataggatggacccaagggctcagaccccagtccccgggaaaggcccttttggtcgggaggaactcttaaggcgtaaactaatccatgatgggtgtctcctgtggaagaccgcaacaggacgtttcaaagacgtgcttgtgttgcttatgacagatgtcttagtgtttctgcaggaaaaagatcaaaagtacatcttcccaacactcgataagccgtccgtggtgagtctccagaatcttattgtgagagacattgccaatcaggagaagggcatgtttttaatttcggcggcccctccagagatgtacgaagttcacacagcttcgcgcgatgaccgcagcacctggatacgcgtcattcagcaatccgttaggacctgccccagcagggaagacttccctttgattgagactgaagatgaagcttatcttcgacgcatcaaaatggagctgcagcagaaggaccgtgcgctagtcgagctgctgcgcgagaaagtgggactattcgccgaaatgacacatttccaagctgaagaagatggaggctcagggatggcattgccgactctgccgcggggactctttcgcagcgagtctctggagagtcctaggggagaacgcctgctgcaggacgccatcagagaggtggaaggattgaaggatctgctcgtgggcccaggagtagagctgctcctgacccccagagagcctgctctgcctctggagccagattcaggcgggaatacttcacctggcgtgactgcaaacggtgaagcgaggacctttaatggatctattgaactttgcagggcagacagtgactctagtcagcgtgacagaaacggtaatcagttacgaagtcctcaggaagaggctctgcagagactggtgaatctatatggcctcctgcacggacttcaagccgcagtggcacagcaagataccctcatggaagcccggtttccagagggccccgagcggcgagagaagttgtgcagggcgaactcacgggacggcgaggccggaagggccggggctgctcctgtggcaccagaaaagcaggccacagagctggctttgctccagaggcagcatgctctcctgcaggaagaacttaggagatgccgccgcctaggcgaggagcgcgctaccgaggcagggtccctcgaggcaagactgcgcgagtccgagcaggcccgggccctgctggagcgtgaggccgaggaggccaggcgccagctggcggcgcttggccaaacggagccactgccggccgaggctccttgggctcggaggcctgtggaccctcgcaggagatcactgcctgccggcgatgctctctatctctcctttaaccctccacaaccttcgaggggcactgatagactggatctgccggtgactaccaggtccgtacacagaaactttgaagatcgcgagcgacaagagttagggtcaccagaggagcgactgcaagatagcagcgacccagacaccggttcagaagaagagggcagctcacggctgagtcccccgcattcccctagagatttcacgcgtatgcaggacattcccgaggagaccgaaagccgggacggcgaggccgtggcaagcgagtcttag

SEQ ID NO: 132620 - DNA, 2964 bp, synthetic construct
  misc_feature 1..2964: note = Description of Artificial Sequence: Synthetic coding sequence
  source 1..2964: mol_type = other DNA
atgtgttgctgttgcggatgttgccctttactggctcacttagaacagggctccttacgtgagcgtaccagggagaaggaaaaaatgaaagaggctaaggatgccaggtataccaacggccacctatttacaacaattagcgtgtccggcatgactatgtgttacgcctgcaacaaatctataaccgctaaggaggccctcatttgcccaacttgcaatgttaccatccataaccgctgcaaagacaccctggctaattgcactaaagtgaaacagaagcagcagaaggctgctctgctaaaaaataacaccgctctgcaaagcgtctccttaagatctaagaccactatccgggaacgtcccagtagcgctatttaccctagcgactcctttcggcagagcctcctagggtcgagaagaggaaggtcttcgttatcgctggcaaaatctgtgtccacaacaaacatagcaggccactttaacgacgaaagccctctagggctgaggcgtattctatcccagagcacggacagtctgaatatgcggaatcgtacgctgtccgtggagagcctcatcgatgaggccgaggttatttattccgagctaatgtctgatttcgaaatggatgaaaaggatttcgccgccgacagttggtcactcgctgtggattcctcctttctgcagcagcacaaaaaggaggtgatgaagcagcaggacgtgatctatgagctcattcagacagaattgcatcatgtccgcactctcaagattatgacccgcctcttcagaactggcatgcttgaggagcttcacttagagcctggggtcgtgcagggtttgttcccctgcgtagatgagttgtccgatatccacacacgcttcctgagtcagctgctagagagacggcggcaagcgctttgcccgggatctacccgcaactttgtcattcaccgcctgggggacctgttaatatcacagtttagcggccctagtgctgagcagatgtgtaagacatatagcgagttttgttcacgtcactcaaaagccctgaagttgtacaaagaactgtacgcccgtgacaaaagatttcagcagtttatccgcaaggtcactagacctgctgtgctgaagcggcacggtgtgcaagagtgcatcctcttagtgacccagaggatcacaaagtatcctctactcatctcaaggatcctgcagcattcccacggaatagaggaagaacgccaggacctcaccaccgccctgggactcgtcaaagagctgttatctaacgtcgatgaaggtatctaccagttggaaaaaggggcgcgtttgcaggagatatacaatcggatggatcctagagcccagactcccgtgcctgggaaaggtccattcgggagagaagagcttttgcgccgcaagttgatacatgatgggtgcctgttgtggaagaccgctactggacggttcaaggatgttttggttttgcttatgactgatgttctcgtattcttacaagagaaggaccagaaatatattttccccacactggacaaaccctctgttgtgagtctgcagaatctgatcgtcagagatattgcgaatcaggaaaaaggtatgttccttatctcagccgcccccccagagatgtatgaggtccatacagctagcagagatgatcgttcaacctggattcgcgtaatacagcagtccgttcgtacttgcccctccagagaggatttccccctgatcgagactgaagatgaagcatatctgcggagaattaaaatggagcttcaacaaaaggacagagctcttgttgaacttctgcgcgagaaagtgggtctgtttgccgagatgactcactttcaggctgaagaggacggtgggagtggaatggctctgccaacattaccaaggggcctgtttcgttccgagtcgctggagtcaccacggggagagcgcttactccaagacgcaatccgagaggttgaaggactaaaagacttgctggtggggccgggggtcgagctgctgctgacacctcgggaacccgccttgccacttgagcctgattctggtgggaacacatcaccaggcgtgacagccaatggtgaggccaggactttcaacggttcaatcgagctgtgcagggccgattcggacagcagccagagagacaggaatggaaaccagctgcgttccccgcaagaggaagctttacaacgactggtcaatctttacggtctgctgcacggcctacaagcagctgtggcacagcaggacactctgatggaggcacgctttcctgaagggcccgagcggagagagaagctctgtcgcgccaatagtcgggacggcgaagcaggcagagccggcgccgctcccgtggcacctgagaagcaggcaacagaactcgccttgttgcaacgacagcacgctctcttacaggaggagctgcgccgctgcagaaggctcggcgaggagagggcgacggaggcaggatcgctggaggctagactccgcgagagcgagcaagctcgtgcacttctggagagggaggcagaagaagctcgaaggcaacttgccgctctgggacaaaccgagccccttcctgcggaagcaccttgggcccgcagacctgtggatcctcgaaggcgttcactgcccgctggcgacgccctatacctttctttcaatccacctcagccgagtcgaggcacagataggctggacctgcccgttacaacgcgaagtgtgcacagaaactttgaggatcgtgaaagacaggagctaggaagcccagaagaaaggctgcaggactcgtctgatcccgatactggcagcgaggaggaaggctcttcgcgactctcaccacctcattcccctcgcgactttacccgcatgcaggacattcccgaagaaactgagagtcgggacggagaggcggtagcctccgaatcctag

SEQ ID NO: 132621 - DNA, 2877 bp, synthetic construct
  misc_feature 1..2877: note = Description of Artificial Sequence: Synthetic coding sequence
  source 1..2877: mol_type = other DNA
atgaaagaggcaaaggatgctcggtacacgaacgggcatttgtttacgactatttcagtttccgggatgacaatgtgctatgcctgcaacaaatcaatcaccgccaaggaagctctgatctgtccaacctgtaacgtgactatacataacaggtgcaaggacactctggccaactgtacaaaggtgaaacaaaagcaacagaaagcagcactgttgaaaaataataccgccctgcagagtgtatccctgcggagcaagacgacaattagggaacgacccagctccgctatctacccctcggattccttcaggcagagtttactgggttcgcgaaggggcagatcatctttgtcactggccaaatctgtttcaaccactaatatcgcagggcacttcaacgatgagtctccgctggggctcagacgaatcttgtcgcagtccaccgattctctcaacatgaggaaccggacactgtcagtcgaaagcctgatagacgaggaagttatctactccgaactgatgagcgatttcgagatggacgaaaaagacttcgccgctgacagttggtccttggctgtggattcatccttcctgcaacagcataagaaagaggtaatgaaacaacaggacgtgatttatgagctaatacaaaccgagttgcatcatgtgagaactctgaagatcatgactagactgttccgtaccggcatgctggaggagctgcaccttgagcctggcgtggtccagggtttatttccctgtgtggatgaactgtccgatatccacaccaggtttctgagccagctgcttgagagacgccgccaagcactctgtccggggtctacacggaactttgtaatccataggctcggtgatctcctgatatctcagtttagcggaccatctgctgagcagatgtgtaagacttattcggaattctgtagccggcatagcaaggctctgaaattgtacaaggagttatacgctcgggataaacggttccaacagttcatccggaaagttactcgtccggcggtcctcaagagacatggagtgcaggagtgcattctcctcgtcacccagaggattacgaagtacccactcttaattagcaggatactgcagcattctcacggtatagaggaagaaagacaggacttaacaactgcgctggggttggttaaagagctactgagtaatgttgacgaaggtatttatcagctcgagaaaggtgcaaggctgcaggagatctacaacaggatggaccctcgtgctcagacaccggtgccagggaagggcccatttggtcgcgaagagctcctccgcaggaagctgattcatgatggatgccttctgtggaagactgccacgggccgtttcaaggatgtgctggtgctgctaatgaccgacgttctcgtgttcctgcaagaaaaggatcagaaatacatctttccaacactcgacaagccctccgtggtgagcctgcagaatctgattgtgcgagacatagcaaatcaggaaaagggtatgtttctgatttctgcagccccacctgaaatgtacgaggtgcacacagctagtagagacgatagaagtacctggatacgcgtgattcaacagagcgtccggacatgcccatctagggaggactttcctctgattgagactgaggacgaagcttacctacgtcgaattaagatggagctgcagcaaaaggatagagcactggtggagctcctccgcgagaaggtcgggctgtttgcggaaatgacccactttcaagcggaggaggatggggggagtgggatggcacttcctaccctgcccaggggactcttccgttctgaaagcctggagtctcccaggggagagcgactgctgcaggatgccatcagagaggttgaaggactgaaggaccttttggtgggtcctggagtcgagctccttctcacccctagagagcccgctctccccctggagcctgattctgggggtaatactagtcccggcgtgactgccaatggggaggcgagaacctttaatggttccatagaactttgccgcgcggactccgatagcagccaacgcgacaggaacggaaatcagctgagaagtccccaggaagaagcgcttcagagactggttaatttgtatggtctgctgcatggactacaggccgctgtggcacagcaagacacactgatggaggcgcggtttccagagggccccgagcggagggagaagctgtgcagggccaacagtagagatggagaggctggccgcgccggagcagcccctgttgcccccgagaagcaagccaccgagttggcgttactgcagagacaacacgcgctgctgcaggaggagctgcggcgctgccggcgacttggagaggaacgcgccacagaagccgggagtctggaggcgagattacgagagagtgagcaggccagagctctgttagaacgggaggccgaggaggcccgtcgccagctggccgccctgggacagactgaaccccttccagccgaggccccatgggcccggagaccagtggatccgcggcgtagaagtctacccgccggggatgccctctacctgtccttcaaccctccccaaccttcaagggggaccgataggttggatttacctgtgacaacccgcagcgtgcaccgtaactttgaggaccgggaacgacaggagctgggttctcccgaggagcgtctgcaagattcttccgaccccgatacagggtccgaggaggagggcagctctagacttagtccaccacactcaccccgcgatttcacacggatgcaggatatccccgaggaaaccgaatctcgagatggcgaggccgtagcgtcagagtcctag

SEQ ID NO: 132622 - DNA, 1548 bp, synthetic construct
  misc_feature 1..1548: note = Description of Artificial Sequence: Synthetic coding sequence
  source 1..1548: mol_type = other DNA
atgctctccaaaagcgttccggtttcaggcatcaactgtctcctggataggagcgacactgatggaaacgtgtcccagtctagcgccatcgatttaaggaagaggtgtagccagcttgagggccacagcggcacccgggtgggaagcagtctgcgccagacgttctcgttcctgagcggaatgacaggcaaggccaaaactagggaaaaggagaagatgaaggaggccaaagatgccaggtataccaatggccacctcttcactaccatttctgtctctgggatgaccatgtgctacgcatgcaacaagagcatcaccgcgaaggaagccctgatatgtcccacatgtaacgttaccatccacaacaggtgtaaggatacactggcgaattgcactaaggttaaacagaaacagcaaaaagcagccctgctcaaaaacaatactgcattacagagtgtgagcctccgaagcaagacaacaattcgcgagcgaccatcatctgcaatatacccttcagattcgtttagacaaagcttattggggtcacgtagagggcggagcagtttgtctctagccaagtctgtctcgacaactaatatagccggccacttcaacgatgagtcgccattaggcctgcggcggatattgtcacaatccaccgatagcctgaatatgcgcaatcgtactctctccgtcgaatccttgattgatgaagccgaagtgatttactccgagttgatgagtgacttcgagatggacgagaaggactttgcggcagatagctggagtctggcagttgactcctcgtttttgcaacagcacaaaaaggaggtgatgaagcagcaggacgttatctatgaactaatccagactgagctgcatcacgtcagaaccttaaaaataatgaccaggctctttagaactggcatgctggaagagctgcacctcgagcctggcgtggtgcagggcctgttcccctgcgtggatgaactgagcgacatccacactagatttctgagccaactgttggagagaagacggcaggccttgtgcccaggaagtactagaaactttgttattcaccggctgggagacttgctcattagccaatttagtggtccaagcgctgagcagatgtgtaagacatatagcgaattctgtagcaggcactctaaagccctgaaactgtataaggaactgtatgcacgggataagcgcttccagcagtttatcaggaaagtcactcggcctgcagtgctgaaacggcacggggttcaagaatgcatactgctagtgacccaaagaattaccaagtatcccctcctgatatccaggattctacaacactcgcacggcattgaggaggaacgccaggatcttacaaccgctcttgggttggtaaaagaacttctgagcaacgttgatgaaggcatctaccaattggaaaaaggcgcaagattgcaggagatttacaacctgctgctccttttttccctttcaccctcgtttatggaggcgctgggagataatctcgcaagttggagctag

SEQ ID NO: 132623 - DNA, 1332 bp, synthetic construct
  misc_feature 1..1332: note = Description of Artificial Sequence: Synthetic coding sequence
  source 1..1332: mol_type = other DNA
atgaaggaggccaaagatgcacgctacacaaacggacatctgtttactactattagtgtgtcggggatgaccatgtgctatgcttgcaataaaagcattactgctaaggaggcactgatttgccctacctgtaacgtcaccatccacaatcgctgtaaggacaccctcgccaattgtaccaaggtcaagcagaagcagcagaaggctgcccttttgaaaaacaacactgctttacaatctgtgtcactgcggtctaaaacgacgattcgcgaacggccgtctagcgccatttacccgtccgattcgtttcgacaaagcctgctcggcagtcgaaggggcagatcatctttgtccttagccaagtccgttagcacaactaacatagctggacactttaatgacgaatcaccactgggcttgcggcgcattttgtcacagtctactgattccctgaatatgcgtaacagaacactcagtgtagaaagcctcatcgatgaggctgaggtcatatacagcgagctgatgtctgacttcgagatggacgaaaaggatttcgctgccgacagttggagtcttgcagtggactcatcttttctccaacagcataagaaagaggtgatgaagcagcaagatgttatttatgaacttattcagacagaactccaccacgtgcgcacacttaaaattatgactcgtctcttccgtaccgggatgctggaagagcttcatctggagcctggtgtggtgcagggcttgtttccgtgtgtcgatgaacttagtgacatacataccagatttctgtctcagctgctggaaagaaggcgccaggctctgtgccctggttccactcgaaatttcgtcattcatcgtctgggggatttactgattagccaattcagcgggccttcggccgaacagatgtgcaagacctacagtgagttctgcagcaggcacagcaaagccctgaaactgtacaaggagttgtatgcaagagataagcgctttcaacagttcatccggaaggtgactcgacctgctgtcctaaagcgacacggagtccaggaatgtattctcctcgtgacacagagaattacaaaatacccccttttaattagccgcatcctgcagcattctcacgggattgaagaggagaggcaggatcttacaacagccctaggccttgtgaaggaactattgagcaacgtcgacgaaggaatctaccaactagagaaaggggcccgactccaagaaatatacaatctcctcctgctgttctccttgtcaccgagttttatggaggcgctcggcgataatctggctagctggagttag

SEQ ID NO: 132624 - DNA, 4167 bp, synthetic construct
  misc_feature 1..4167: note = Description of Artificial Sequence: Synthetic coding sequence
  source 1..4167: mol_type = other DNA
atgagtaggccccctcctaccggcaagatgcccggcgcgcccgagaccgcacctggggacggagctggtgccagccgtcaacgcaagctggaggccctcattagggaccccagatccccaatcaacgtcgagtcactccttgacggcctgaattccctcgtgttggatctggattttccggccctcaggaagaacaagaacattgacaactttcttaatagatatgagaaaatagttaaaaagatcaggggcctgcaaatgaaggctgaagactatgatgtggtgaaagttattggcaggggcgcctttggggaagttcagctggtgagacacaaggcctcgcagaaagtatacgccatgaaactcctaagtaagtttgaaatgatcaagagatccgacagcgcatttttttgggaagaacgcgacattatggcgtttgccaatagcccatgggtggtccagctcttctatgccttccaggatgatagatacctatatatggtaatggagtatatgcctggtggggatctggtcaacctaatgtccaattatgacgttccagagaagtgggctaaattttacactgccgaagtggtgttggctttggacgccatccacagcatgggcttgattcatcgcgatgttaagcccgacaacatgctcctggataaacacggacatcttaaactggccgatttcggcacctgcatgaagatggatgaaaccggtatggtacactgcgacaccgcagtgggtactcctgattacatctctcccgaggtccttaaaagccagggaggggacggcttttacgggcgcgagtgtgattggtggagtgttggggtgtttctgtacgagatgttggtgggtgatactccattttatgccgattccctcgtggggacctattctaaaataatggatcacaagaactcactgtgttttcccgaggacgccgagattagtaaacacgcaaaaaatttaatttgtgccttcctgaccgatcgagaggttcgactgggaaggaacggagtggaggagatccgacagcatcctttctttaaaaatgatcagtggcactgggacaacatccgggaaactgccgctcctgttgttcctgagctgtcctccgatatagattcgagcaatttcgacgacatcgaagacgacaagggagatgtagagactttccccattcctaaagcctttgtcgggaaccagctgccttttattggctttacctactatagggagaacctcctccttagcgacagcccaagctgcagggagaccgattccatccaatctaggaaaaatgaagagagccaggagattcagaagaaactttacacactggaagagcatctgtcaaatgagatgcaggcaaaggaggaactcgagcagaagtgtaagagtgtgaacaccagactggaaaaaactgctaaggagctcgaggaagagatcactctaaggaaatcagtcgagagcgccctgagacagttggagcgcgaaaaggcactgttacagcacaagaacgcggagtaccaacgaaaggctgaccacgaggctgacaagaaaagaaacctggagaacgatgtgaacagtctcaaggaccagttggaggacctaaagaaacgcaatcaaaattctcaaatttcaaccgagaaggtgaaccagctgcagagacagctagatgaaacgaatgctttactccgcactgagagcgacaccgcggcacggctgcgcaagacccaagctgaatctagcaaacaaatccaacagctggagagcaataaccgcgacttgcaagataaaaactgtctcctggagaccgccaaactcaaactggagaaagagttcatcaatctgcagagtgccctcgaaagtgagaggcgggatcgaacgcacgggtccgagattattaatgacctgcaagggcgcatttgcggcctagaggaggatctaaaaaatggaaaaatcctgttagccaaggttgaactggagaagcgccagttgcaggagaggtttaccgacctagaaaaggagaaatccaatatggagatagacatgacctatcaactgaaagtcatccagcaatccctggagcaggaagaagccgagcataaggccaccaaggccagactcgccgacaagaataaaatttacgagtctattgaggaggctaaaagcgaagcgatgaaggagatggagaagaagttactagaagagcgcactcttaagcagaaggtcgagaacctcctcttggaggccgaaaagcgctgctctctgctggactgtgatctcaaacaatcccagcagaagataaatgagctgctcaaacagaaggacgtcctgaacgaagacgttaggaatctaacacttaagatagagcaggaaacacagaaaagatgcctgacccagaacgatcttaaaatgcagacccagcaggttaacacgctaaagatgagcgagaagcagctcaagcaagagaacaaccacctgatggagatgaagatgaacctcgagaagcagaatgctgagctacgtaaagaacggcaggacgctgacggtcaaatgaaagagctccaagaccagttagaagcggagcagtatttcagcaccctttacaagacgcaggttcgggaactaaaagaagagtgcgaagaaaaaactaagctgggcaaagagctccagcagaaaaagcaggaattacaagacgagagagactccctggccgcccagctggaaataactctcaccaaagccgatagcgagcagctggctcggtcgattgcggaagagcagtacagtgatctggagaaggaaaagataatgaaagagttagaaataaaggagatgatggcccggcacaaacaagagctgacagagaaggacgcaacaatcgcgtctctggaggagacaaataggacacttacctcggatgtcgcaaaccttgcaaatgaaaaggaggaactgaacaacaagctgaaggatgtgcaggagcagttatctcgcctaaaggatgaggaaatctcagccgctgcgattaaggcccagtttgaaaaacagcttcttacagaaaggacactaaaaacccaagcagtgaacaagctggccgagatcatgaacaggaaggaacctgtgaagcgagggaatgataccgacgttcgaagaaaagagaaggaaaatagaaaactgcacatggagctgaaaagcgagagagagaaactgacccagcagatgattaaatatcagaaggagctcaatgaaatgcaagcacagattgccgaagagtcacagatcaggattgaactccagatgactctggacagcaaggactccgacatagagcagcttagatctcaattgcaggccctgcatataggcttggactcatcgtctatcgggagcggacccggcgatgctgaggcagacgatgggttcccggaaagccgacttgaaggctggctgagcctccccgtgaggaataataccaaaaagttcgggtgggtaaaaaaatatgttatagtgtcttctaagaagattctgttttatgacagtgaacaggataaagagcagtccaacccttacatggtcctagatatcgacaagcttttccatgtgcggccagtgacgcagacagatgtgtaccgagccgacgccaaggaaatacctcgaatcttccagattctttatgccaatgagggcgagtcaaaaaaggagcaggaatttccagtcgaacctgtgggcgaaaagagtaattatatctgccacaaagggcacgagtttatccccacactctaccactttcctacgaactgcgaggcctgtatgaagcctctctggcatatgtttaaaccgcctccagcactggagtgccgcaggtgtcatataaagtgccacaaggaccatatggacaagaaagaagaaatcatagctccttgcaaagtgtactatgacatctcaaccgctaaaaacctccttctcctggcgaatagcacagaggaacaacaaaaatgggtttccaggctggtgaagaagatcccgaagaagccgcccgcgccagatcccttcgctaggagcagcccaaggacctctatgaaaattcagcagaatcaaagtattcgcagaccctccaggcagttggcccccaacaagccatcatag

SEQ ID NO: 132625 - DNA, 2241 bp, synthetic construct
  misc_feature 1..2241: note = Description of Artificial Sequence: Synthetic coding sequence
  source 1..2241: mol_type = other DNA
atgatatacaaagtggaatgcgggttggaagaggatctgaagaacggaaagattcttctggctaaagtagaactcgagaaacggcagctgcaagaacgctttacagatcttgagaaagagaaatccaatatggagatagatatgacgtatcagttgaaagtgatccaacagtccctggagcaggaggaagcagaacataaggcaacaaaagcccgtctcgcagataaaaataaaatctacgagtcgatcgaggaggccaagtcagaggctatgaaggagatggagaaaaagctcttggaggaacgaacgcttaaacagaaggtcgaaaatctgctgctcgaagctgagaagagatgtagtttactggactgcgatctgaagcaatcacagcagaagatcaatgagctgttaaagcaaaaagacgtgcttaatgaggatgtgagaaatctgactcttaaaattgagcaggagacccagaagcgctgtctgacacagaatgacctgaaaatgcagacgcagcaggtgaatactctaaagatgtctgaaaaacagttaaagcaggaaaataaccacctcatggagatgaagatgaacttagaaaagcaaaatgccgagctccgaaaggaaagacaagatgcagacggacagatgaaggagttgcaagaccagctagaggccgaacaatatttctctaccctctacaagacacaggttcgggaactgaaagaggaatgtgaagaaaagactaaactaggcaaagaattgcagcagaagaagcaggaactccaggacgagcgggacagcttggcggcacagttggaaattactctgaccaaggcagattccgaacagctcgccaggtccatcgccgaggaacagtactctgaccttgagaaagaaaagattatgaaagaactggagatcaaggagatgatggctcgtcacaaacaggaattaactgagaaggatgccacaatcgcctctctcgaggaaaccaacaggacactgacttctgatgttgccaacctcgccaatgaaaaggaggagctcaataacaaactgaaagatgttcaggaacagttaagccggttgaaagacgaggagattagcgcggcggctattaaagctcaattcgaaaagcagcttctgacggagcggaccctgaaaacacaggctgttaataagctggccgaaataatgaataggaaggagcccgtaaaaagggggaatgacaccgatgtacgcagaaaagagaaggagaacagaaaactgcacatggaacttaagtccgaacgcgaaaaacttacacagcagatgatcaaataccagaaggagctcaacgagatgcaggcccaaatcgcagaagaaagtcagatcagaatcgaactgcaaatgaccttggatagtaaggacagtgatatagagcagctcaggtcacagctgcaggccttgcatatcgggctggatagctcatccatcggatctggacccggagacgccgaggctgatgatgggttccccgagagccgcttggagggatggctgtccttacctgtccgcaataacacaaagaagttcggatgggtcaaaaagtatgttattgtctcctccaaaaaaatattgttctatgactctgaacaggacaaagaacaatccaacccttacatggtgctggacatcgataagctgtttcacgtaaggccagtgacacagaccgacgtgtatcgcgccgatgcaaaagaaatacccagaattttccagattctttacgccaatgagggggaatccaaaaaagaacaagaatttccagtggaacccgtgggagaaaaatcaaattacatctgccataagggtcacgaattcataccgaccctgtatcatttccccacgaattgcgaagcgtgtatgaagcctctgtggcacatgttcaagccccccccggcccttgaatgccgccggtgtcacatcaagtgccacaaggatcacatggacaaaaaggaggagattattgccccatgcaaggtgtattacgacatctctacagcaaagaaccttcttctcctcgctaattctacagaagaacagcagaagtgggtgagccggctggtcaaaaagatcccgaaaaaacccccagcgcccgacccttttgcccggtcctcacctcgtacttcaatgaagatccagcagaatcagtccattaggcgtccaagcaggcagctggctcccaataagccaagctag

SEQ ID NO: 132626 - DNA, 3438 bp, synthetic construct
  misc_feature 1..3438: note = Description of Artificial Sequence: Synthetic coding sequence
  source 1..3438: mol_type = other DNA
atggttcactgtgacaccgcagtgggtacccccgactatatctcaccagaagtgctcaaatcccagggaggggatggcttctatggacgcgagtgcgattggtggagtgtaggagtattcttgtacgagatgctcgtcggcgacacacccttctacgctgattctctggtgggaacgtactccaaaatcatggaccacaaaaattctctgtgcttcccagaagacgcggaaatctccaaacatgccaagaacctcatctgtgcttttcttactgaccgtgaagttcgtttgggtaggaatggcgtcgaggaaattcgacagcatcccttttttaagaacgaccagtggcactgggacaatatccgcgagaccgccgctcctgtagtccccgagcttagttccgacattgactcaagtaatttcgacgacatcgaagatgacaagggggatgtcgaaactttccccatccctaaagcctttgttggaaaccagctcccatttatcggctttacgtattacagggagaatcttctgctgagcgattcgccctcctgccgcgagaccgactctatccagagcagaaagaatgaggaaagccaagagatacaaaaaaagctgtatactctcgaagaacatctgtccaacgaaatgcaggctaaagaagaacttgagcagaagtgcaagagcgtcaatacaaggcttgaaaagacagcaaaagagctggaggaggaaatcactctgcgcaagagcgtggagagcgctctcagacaacttgaaagggagaaggctcttctgcagcataaaaatgcagagtatcagagaaaagctgaccatgaagcagacaaaaaacgaaatttagagaacgatgtgaatagcttaaaggaccagctggaggacctcaaaaagcgaaaccagaactctcagattagcactgagaaggtgaaccagctccagcgccagctcgacgagaccaatgccctgctgcgaaccgagagtgacacagccgccagactgcggaagacccaggctgagtcctcgaagcaaatccaacagctggaatcaaacaatcgggacctgcaggataagaattgcctgcttgagactgccaaactgaagctggaaaaagagttcattaaccttcagtcggcccttgagagtgagagacgggatagaacacatggttcagaaataattaacgatctgcaaggccggatctgcggattggaggaggatctgaagaacggcaagattctgttggccaaggtagagcttgaaaaaagacagctgcaagaaagatttaccgatttggagaaggaaaagtctaatatggaaatcgatatgacctaccagctgaaggtgatccagcagagtcttgagcaggaagaggccgagcacaaagccacaaaggccaggcttgcagataaaaataagatttacgagtctatagaggaggccaagagcgaagcgatgaaagaaatggaaaaaaaattgctggaggaaagaactctgaaacagaaggtggagaatttgctgctggaagccgagaaaagatgctctttgcttgattgtgatctcaagcaatctcagcaaaagattaacgagctccttaagcagaaggacgtcctcaacgaggacgtacggaatctgacccttaaaatcgagcaggaaacgcagaagcgttgtctgactcaaaacgatttgaaaatgcaaacacaacaagtgaatactctgaagatgagcgagaagcaacttaaacaggagaataaccacctgatggagatgaaaatgaatctcgagaaacagaacgccgagctgcggaaagaacgccaggacgcagatgggcaaatgaaggaactgcaggaccagttagaggcggaacagtacttctccacactgtacaaaacacaggttcgcgagcttaaagaagagtgcgaagaaaaaactaaattaggcaaagagctccagcagaaaaagcaagagctgcaagacgaacgggattcactggcagctcagcttgaaattactctgaccaaggcagattcagagcagttggcaaggagcatcgcagaggaacaatactccgacttagagaaagagaagattatgaaagaactggaaataaaggaaatgatggcaagacacaaacaagaacttactgagaaagacgccacaatcgcatccctggaggagaccaaccggaccctgactagcgacgtcgccaaccttgcaaatgaaaaagaagaactgaacaacaagctgaaggacgtgcaggagcagcttagcagactcaaagacgaagaaataagtgcagcagccattaaggcacagttcgagaaacagctgttgactgagcgaacacttaagacacaggccgtgaacaagttggccgagattatgaatcggaaggaacccgtaaaaaggggcaatgacacagacgtgcgccgcaaagagaaggaaaatcggaaactgcatatggagttgaagtctgagcgtgagaagcttactcagcagatgataaagtaccaaaaagagctgaacgaaatgcaagcccagatcgccgaggagagccagatcagaattgagctccaaatgacactagactccaaggactcggacattgagcagttgcggtcacagcttcaagccctgcacataggcctggacagcagttccattggatctggaccaggggacgccgaggctgatgacgggttcccagaaagtcggttggaggggtggctgtctctccccgtgcgtaacaatacgaagaagttcggctgggtcaagaaatatgtgatcgtgagctccaagaaaatacttttttacgattctgagcaggataaagagcagtccaatccctacatggtgctcgacatcgacaagctgttccatgtccgaccagtcacacagacagacgtatacagggccgatgccaaagaaattccccgcattttccaaatcttgtatgcaaatgaaggggagtccaagaaagaacaggagttcccagtggagccagtgggggaaaagagcaattacatttgccacaagggacacgaattcattcctaccctctaccatttccctactaattgcgaggcttgtatgaagccactctggcatatgttcaagccaccgcccgctctggaatgcaggcgctgccacatcaagtgccacaaggaccacatggacaaaaaagaagaaatcatagccccgtgtaaggtgtattacgatatttccaccgcaaaaaacctcttgctcctggctaacagcacggaagaacagcagaagtgggtcagccgcctggtcaagaagatccctaagaaaccacccgcaccggatcctttcgctcgatcgtccccacggacctccatgaaaattcaacagaatcagagtatcaggcgccccagcaggcagctggcccctaataaacctagctag

SEQ ID NO: 132627 - DNA, 2568 bp, synthetic construct
  misc_feature 1..2568: note = Description of Artificial Sequence: Synthetic coding sequence
  source 1..2568: mol_type = other DNA
atgtcagaggcaagaagggactctacttcgagcctgcaaagaaaaaaaccgccttggctcaaacttgatataccgtctgctgtgcctttaacagctgaagaaccttcgttcctacagccattgcgacgccaggccttcctgagaagcgtgtcaatgccagcagagaccgcccacattagtagtcctcaccacgaactccgcagacccgtcctgcagcggcagacatctatcacccagacgattcggcgagggacggctgactggtttggcgtgtccaaggattccgattcaacgcagaaatggcagcggaagtcgatccggcattgttcccagagatacggcaaattaaaaccacaagtgttgagagaactggacttaccgtctcaagacaatgtctctctaacctccaccgaaacccccccccccctttatgtgggaccatgccagctggggatgcagaaaatcatcgatcctttagcccgggggcgagcctttcgcgtagcagatgataccgccgagggcctctcggcaccccacacacctgtaacccccggagcggcttcactgtgtagcttctcttcttcaaggtccgggtttcacaggctcccccggcgcagaaaacgggaaagtgttgcaaagatgagttttcgcgcagcagccgctctcatgaaagggagaagcgtgcgcgatggcacattccgtagagcccaacgcaggtcgttcacaccagcgtcatttcttgaggaagacacaactgacttccctgatgagctagacacttctttctttgccagggagggaatcctgcacgaagaactcagtacatatccagacgaagtgtttgagagtccttccgaagccgccttgaaggactgggagaaggcacccgagcaggccgatttaaccggcggcgcattggatcgttcagagctggaacgcagtcatctgatgctgccactggagcgtggatggcgcaagcaaaaagaaggagccgccgccccacaacctaaggtgcgactgaggcaggaagtcgtgtcaacagccggacccagacgcggtcaacgcattgccgtgccagttcgcaagcttttcgccagggagaagcggccctacgggctgggcatggtgggcagattgactaacagaacttataggaaacggatcgatagttttgtgaaaaggcagatcgaggacatggatgaccatagaccgttttttacatattggctcacttttgtccattctctggttactatcctggccgtctgtatttacgggattgccccagtggggttcagccagcacgagacagtggattccgtgttaagaaatagaggagtttatgaaaatgtcaagtacgtgcagcaggagaatttttggatcggccccagtagcgaggctcttattcacctcggcgcgaaattctcgccttgcatgagacaggaccctcaggtgcactcatttataaggtcagccagggaacgtgagaaacacagcgcctgctgcgtgcgcaacgacagaagtggatgcgtgcagacatcggaggaagagtgttcttctactctcgccgtctgggtgaagtggcctattcacccatccgcccccgagctggccgggcataaacgacagtttggcagtgtgtgccaccaggatcctagggtgtgcgatgagccttcctcagaggacccgcacgagtggccagaggacataactaagtggcctatctgcaccaagaactcggcgggcaatcacactaaccatccccatatggactgcgtcattacagggcgcccttgctgcatcggtaccaagggcaggtgcgagattacatccagggaatactgcgatttcatgcgaggttacttccacgaggaagctacattgtgctctcaagtgcattgcatggacgacgtctgtggccttctgcccttcctgaatcctgaagtgcccgatcaattctacaggctgtggctgtccctatttttgcacgccggcatattgcactgcctggtctccatctgctttcagatgacggtgttgagggatctggaaaaactcgccgggtggcaccggatcgccataatctatctcctgagcggcgtgacaggcaacctcgcctcagccatattcctcccctatcgcgcagaagtcgggcccgcgggctcccagttcggcatactcgcctgtctgttcgttgagctgtttcagtcctggcagatcctagcacgcccttggagggcgtttttcaagttgcttgcggtggttctcttcctgtttacctttggactgctgccctggattgataacttcgcccatattagcggcttcatcagcgggttatttttgagcttcgcgttcctcccctatatatcctttggtaagttcgacttgtaccgcaagagatgccagataattatattccaggtagtttttttggggctgttggcgggcctggtcgtcctattctatgtgtacccagtgaggtgcgaatggtgcgagtttctgacttgcatccctttcaccgacaaattctgcgagaagtacgagttagatgctcagctgcattag

SEQ ID NO: 132628 - DNA, 573 bp, synthetic construct
  misc_feature 1..573: note = Description of Artificial Sequence: Synthetic coding sequence
  source 1..573: mol_type = other DNA
atgtcagaggcgcgccgggactcaacaagttctctgcagcgcaagaaacctccgtggttaaaactggatataccctcggctgtgccccttacagctgaggagccctcattcctgcagcctctgcgacgccaggcattcctgagatcggtctcaatgcccgccgagaccgcacacatcagctcaccgcatcacgagctgaggcgaccagttcttcaacgccagacttcgatcactcaaacgattcgaagctcaagacaggttcgtttcggccgcgtgcacactttacccctgctgggccctcgtgcagcccgaagagcctttccacagagacaaagtctgtcctggtccctgctgcgaggcaccgcagactggttcggcgtgagcaaggatagtgatagtacccagaaatggcagcgcaagtccatccggcactgttcacaacgctacggcaaactcaagccccaagtcctgagggaattagacctgcccagtcaggacaatgtatcgttgaccagcactgaaaccccccctccactgtatgtcggcccctgccagctgggtatgcaaaaatag

SEQ ID NO: 132629 - DNA, 699 bp, synthetic construct
  misc_feature 1..699: note = Description of Artificial Sequence: Synthetic coding sequence
  source 1..699: mol_type = other DNA
tagaggccatgctgtattgggaccaagggaagatgcgagatcacgtcccgagagtattgcgattttatgcggggatactttcatgaagaggccacactttgtagccaggtacactgtatggatgacgtatgcggtctgctgcccttcttgaatccagagatgaccgtgctcagggatctcgaaaagctggccggttggcaccgaatcgctataatttatctgctctctggtgttaccggcaatttggcctctgctattttccttccatatcgcgccgaggtaggcccagccggctcccaatttggcatccttgcctgcctgtttgtggagttgttccagtcatggcagatcctagctaggccctggagagcctttttcaagctgctcgcggtcgttctattcctattcacattcggactcctcccatggattgataattttgcacatatctcagggtttatatccgggctgttcctgtcattcgcgtttctgccctacattagcttcggaaagtttgacttatacagaaagcgctgtcagatcatcatatttcaggttgtattcctggggctcttggcaggcctggtggtgctgttttacgtgtaccccgtgagatgcgagtggtgtgagttccttacgtgcataccattcactgacaagttttgcgagaagtacgaactggatgcacagttgcattag

SEQ ID NO: 132630 - DNA, 492 bp, synthetic construct
  misc_feature 1..492: note = Description of Artificial Sequence: Synthetic coding sequence
  source 1..492: mol_type = other DNA
atgagcgaggccaggcgggattccacttcctcgctccaacgtaagaaacccccctggctgaagttggatatcccctcagcagtgcccttgaccgcagaggagccctcctttctgcagcccctgcggcggcaggctttcttacgctccgtgtcgatgcccgctgaaactgcgcatatttccagccctcaccacgagctccgcaggcctgtactgcagagacaaacatcgattacccagacaataaggaggggcaccgcagattggtttggcgtgtcaaaagactcggatagtactcagaagtggcagcggaagtccatacggcactgttcccaaaggtacggcaagcttaagcctcaggtcctccgggagcttgacctgcctagtcaggacaatgtttctctgacatcaacagagactcctcctcctctctacgttgggccttgtcagttggggatgcaaaaaataatcgacccgttggccaggggccggtag

SEQ ID NO: 132631 - DNA, 1740 bp, synthetic construct
  misc_feature 1..1740: note = Description of Artificial Sequence: Synthetic coding sequence
  source 1..1740: mol_type = other DNA
atgtcagaggcccggcgggattctactagcagtttacaacgcaagaagcctccctggctcaagctggacataccttcagccgtgccactgacggcagaagagccgagctttctgcagcccctcagacggcaggcatttttgaggtccgtcagtatgccagcagaaacggcacacatttcaagcccccatcatgagctgagacggccagtgttacagagacagacatcaattacacaaactatccgccgggggaccgctgactggtttggtgtgtccaaggactcagactctacacagaagtggcagcggaagagcataaggcactgcagtcaacgatatgggaaattaaaaccccaggtccttcgcgaactcgatctgccctcacaggacaatgtgagtctaacgagtacggaaacgccaccacccctgtacgttggcccatgccaactcgggatgcagaaaattatcgatcccctagctagaggcagggcatttagagtggccgacgataccgccgaaggccttagtgctccgcacaccccagtgacccccggggctgcaagcctgtgttccttttccagtagtaggtctggatttcaccgactccctcggcggcgcaagcgagagtcagtggcaaagatgtctttccgcgccgccgctgctctgatgaaaggtcgctctgtgcgtgatgggacctttcgaagggcccagcgtcggagctttacaccagcctcctttctggaggaggacacaaccgacttcccggatgagctggacacttcatttttcgcgcgagaaggaattttgcacgaagagctcagtacttacccggacgaagtattcgagagccctagcgaggctgctctgaaggactgggaaaaggcccctgagcaggcagatctcactgggggcgcactcgacagaagtgagttggagagaagtcacctaatgctgccccttgagcgagggtggcgaaaacaaaaggaaggggcagcggccccccaaccaaaggtgagactacgacaggaggtggtgtcaaccgcagggccacgccgcggtcagaggattgctgtgcccgtaagaaaactttttgcgcgggaaaaaagaccctatggtcttgggatggtgggtaggcttacaaaccgaacctatcgtaagcgcattgattcatttgtgaagagacagatcgaggacatggatgatcatcgacccttttttacctattggctgacatttgtccactctctggtcacgattcttgctgtctgcatctacggtatagcgcctgtgggcttctcacagcacgaaacagtggactccgtgttgcgaaatcggggtgtctacgagaacgtgaagtacgttcagcaggaaaatttttggataggtcccagtagcgtgcggactggacttggggctgggccagccggggccggcccaggaggagcaagacgggggcaggaagcaccggattgtgggcgcagttctccaagccccgcaggcggtccccatcctccgggccggcaggtgtttgctctccatgcgccgggacccgcgggcgcccaactccatagtttgggggcaagggcccgtgaggctctcagacttctgcgggcccaaaggcaagttggcctcagagctgacctgggggggggcgtcctgggagctttcccccggccgggtctgccacccagttcagcccggtgctcattgttccgacctcagattgattccgcagaatag

SEQ ID NO: 132632 - DNA, 2571 bp, synthetic construct
  misc_feature 1..2571: note = Description of Artificial Sequence: Synthetic coding sequence
  source 1..2571: mol_type = other DNA
atggctagcgccgataagaatggcggtagtgtttcctctgtctctagcagccgtctccagtcaaggaagccaccgaatctcagcataaccattccccccccagaaaaagagacccaggcccccggagaacaagatagtatgttgcctgaaggattccagaacagaagacttaaaaaaagtcagccaaggacttgggccgcccacacgacggcctgtccaccatcgttcctgcccaagaggaagaacccagcctacctcaagtcggtgagcttacaagagccacgcagtcggtggcaggagtcaagcgaaaagagacctggttttcgcaggcaggcatcactcagccaatcaattagaaagggcgctgcccagtggtttggggtctcaggggactgggaaggtcagcgccaacaatggcaacgcagatcccttcaccattgcagtatgaggtatggtcgtctgaaggctagctgccagagggatctggagctgccctcccaggaagctccttcatttcagggcaccgaatccccgaaaccttgtaaaatgccaaagatcgtggatcccctggcccggggtcgcgctttccggcatcccgaagagatggacagaccacatgcacctcacccgccactgacccccggcgtgctgtcactcactagtttcacttcggtgaggtcaggatactcgcaccttccacgcagaaagcggatgtcagtcgcacacatgtctcttcaggccgccgcggctctgctgaagggaagatctgtgctggatgcaactgggcagcgctgtcgtgtagtcaagcgaagcttcgcattcccttcattcctggaggaggacgtggtggacggggctgacacctttgattccagtttttttagcaaggaagaaatgtcaagtatgcccgatgatgtgtttgagtcaccacctttatcagcatcatatttccgggggatcccccactctgcttctccagtcagcccggacggagttcagatcccgttgaaggaatacggacgcgcccctgtcccaggaccacgccgcggcaaaagaattgcctcaaaagtgaagcacttcgctttcgatcgcaaaaagagacactatggccttggggtcgtcggcaattggctcaatcgatcctacaggagatcaatatcatccactgtgcaacgccaactggagagcttcgacagccataggccatattttacttattggctgacctttgtgcacgttatcatcacacttctcgtcatttgtacctacgggatcgcgccagtgggctttgcccagcatgtaaccacccagctggtcttaaggaacaagggagtgtacgagagcgtaaaatacatccagcaggaaaacttttgggtgggcccatcttccatcgatcttatacacctgggagctaagttttcgccatgcattagaaaggacggccagattgagcaactcgtcctgagagaaagggacttagagagagacagcggatgttgcgtccagaacgaccacagtggctgtattcagacccagagaaaggattgttctgaaacactcgctacgttcgtgaagtggcaggacgacacaggcccaccaatggacaaaagcgacctcggtcagaagaggaccagtggggctgtctgccaccaggatccccgaacctgcgaagagcctgcatcctcgggagcacacatctggccagatgacatcacaaaatggcctatctgcaccgagcaggctaggtcaaatcacacggggtttctacatatggactgcgaaatcaaggggcgtccgtgttgtattggtaccaaggggtcttgtgagatcacaacccgcgagtactgcgagtttatgcatggctatttccatgaagaagcaacactgtgctcccaagtgcactgtttagacaaggtgtgcggactcctgcctttcttgaaccctgaagttcctgatcaattctacagactttggctgtccctgtttctgcacgccggcgttgtgcactgtctggtgtccgttgttttccagatgaccatcctacgcgatttagaaaagctggccggctggcaccggatcgcgatcattttcattcttagcggtattaccggaaacctggcctctgcgattttcctcccatatcgcgctgaggtgggtcctgctgggtcacagtttggtctcttggcgtgtttgttcgtggagctattccagagttggccactcctggaacgcccctggaaagcgttccttaatttgtccgctattgtgctgttcctcttcatctgtggcctgttgccctggatcgacaacatagcccacatcttcggattcctgagcgggctgctattggccttcgcatttctgccctacataactttcgggacatcagacaagtatcggaaacgcgctcttatactggtgtcgcttctggcattcgctggactgttcgctgctctggtactttggttatacatttatccaattaattggccatggatcgagcatctaacatgtttcccctttacatcaaggttctgcgaaaagtatgagctcgaccaagtcttgcactag

SEQ ID NO: 132633 - DNA, 2484 bp, synthetic construct
  misc_feature 1..2484: note = Description of Artificial Sequence: Synthetic coding sequence
  source 1..2484: mol_type = other DNA
atggcctccgcggataagaatggtggttcggtgtcatccgtttctagctctcgcctacagagccgaaaacccccgaacctgagcatcactataccccctcccgaaaaagagactcaggcacctggcgagcaagattccatgctccccgaaagaaaaaaccccgcgtatctgaaatcagtctctcttcaggaaccccgctccaggtggcaagagtcatctgagaaacggcccgggttccggaggcaggcttctctcagccagagtatccggaagggggccgcccagtggttcggtgtgagcggcgattgggaggggcagaggcagcagtggcagagacggtccctgcaccattgctcaatgagatatggtcgtctaaaagcatcatgccagcgcgacctggaactgccctctcaagaggctcccagtttccaagggaccgaatcgccaaagccctgcaagatgcccaagatagtggatccccttgccaggggccgcgcatttcgccaccctgaagagatggatagaccgcacgctccccacccccccctaacccccggggtgctgtccctaacctctttcacaagcgtccggtcaggatacagccacctgcccagaaggaaacgaatgtccgtggctcacatgtctttacaggcagcggcagccctgctgaagggcaggagtgtgttagatgcaactggccagcgatgcagggtggtgaaaaggtcctttgcttttcctagttttcttgaagaggacgtcgtggatggagcagacacgtttgatagctctttcttctctaaagaggaaatgtcctcaatgcccgacgacgtctttgagagccctcccctgtctgcctcttattttcgcggcatcccccacagtgctagccctgtctcccctgacggcgttcagatccctctcaaagagtacggccgtgcgcccgtgccagggcctaggcggggcaagcgcattgcttctaaagtgaaacattttgcatttgatagaaagaagcgccattatggactgggggttgttggcaattggcttaatcgttcctatcgcagatccattagtagtaccgttcagcgacagctcgagtccttcgactcacacagaccctatttcacctactggcttacttttgtgcacgtgataattactctcctggtcatttgcacatatggaatcgctcccgtgggcttcgctcagcatgttaccacacagttagtcctgcgcaataagggagtgtacgagtcagtgaaatatatccagcaggaaaatttctgggtcggcccgagcagcatagatttgattcacctcggtgccaagttctcaccgtgcataaggaaggacggtcagattgagcagttggtcttgcgggagagggatttggagcgagactccggctgttgtgtccagaacgaccatagtgggtgtatacagacacaaagaaaagactgctctgagaccttagcaactttcgtgaagtggcaggacgataccggtcctcccatggataagtctgacctgggccagaagcggacttcaggagccgtgtgtcatcaggaccccagaacctgtgaggagcctgcttcttctggcgcacatatatggccagacgatatcactaaatggcctatctgcacagaacaggcccgctcaaatcatacaggtttccttcacatggactgtgagatcaagggacgaccctgttgcatagggaccaaggggtcctgcgagattaccaccagagaatattgtgagtttatgcacggctacttccatgaagaggccactctttgcagccaggtccactgccttgacaaagtctgcggactcctgcctttcctgaacccagaggtaccggatcagttctatcgcctgtggttaagcctgtttctgcatgccggggtggttcattgcctggtatcagtagtgttccagatgacaatcctgcgcgacctcgaaaaactcgccgggtggcataggattgcaattatcttcatcctctcagggatcacgggcaacttagcctccgcgatttttcttccctatcgggccgaggtggggcctgctgggtcccagtttgggctgctggcttgcctctttgtggaactattccagtcctggccgttgctggagcgaccctggaaagcgttcctaaatttatctgcaatagtgctgtttctgttcatttgcggcctgctgccatggatcgataacattgctcatattttcggcttcttgagcggtctactccttgcatttgccttcctgccatatatcacttttggcaccagtgacaaatacaggaagagagctcttatccttgtatcactattagcttttgcagggctcttcgccgccttggtgctgtggctgtatatctatcctataaactggccctggatcgagcatcttacttgttttccctttaccagtcgcttctgtgagaagtacgagcttgaccaggtgctgcactag

SEQ ID NO: 132634 - DNA, 2151 bp, synthetic construct
  misc_feature 1..2151: note = Description of Artificial Sequence: Synthetic coding sequence
  source 1..2151: mol_type = other DNA
cctggttcctctcgctcccgacaccccctcctgctgctgatttggtccctcggtagttctcagggcccgcatcgccagataagaccacccccaccctgccgtcatgccggcactcatgtgccctccccactgccgcacacccaagtccatcgccgacgccaagcgtatgcccatctcagcctggtgtgctttcggcggggcgccgcccaatggttcggggtaagcggtgattgggagggacaacgacaacagtggcaaagacgatccctccaccattgtagcatgagatacggaagattaaaggcatcttgtcagcgggacctggaactgccctcccaggaggcaccatcattccagggcactgaaagccccaaaccctgcaagatgccaaagattgtggacccattggcccgcggccgcgcctttcgccaccctgaggagatggaccgcccccacgccccccatccaccactgactcctggcgtgttatctctgacctcctttacttccgtgaggagcggatattctcatctcccgaggaggaagagaatgtcagtggctcacatgtccctccaggcggcagccgctctgttgaagggtagatcggtcctggacgctaccgggcaaaggtgcagggtggtgaagaggtctttcgcttttccatcctttcttgaagaggacgttgtcgatggggcagatacctttgatagctcatttttctccaaagaagagatgtcttcgatgcccgatgatgtgtttgaatcacctcctctgtccgcctcgtatttcagagggatcccccatagcgcctcccccgtctcccctgacggggtgcagattcctttaaaggagtatggcagagccccagtgcccgggcctcgccggggcaagagaattgcatccaaagttaaacatttcgccttcgatcgcaagaagcgtcattacggcctaggcgtggtaggtaattggctcaatcggagctacaggcgttcgatctcctctaccgttcagcgacagttggaaagcttcgactcacacaggccatatttcacctattggctcacattcgtccacgtcattataaccctcttggtgatctgcacttacgggattgctccggtgggtttcgctcaacatgtgacgacccaacttgtcctcaggaacaaaggagtgtatgaaagcgtcaaatatattcagcaagagaatttctgggtgggtccgtcctccatcgacctcatacacctaggcgccaaattttctccttgcatcagaaaagacggacagatcgaacagctcgttctccgcgagcgggacctggagcgcgattccggatgttgtgtgcagaatgaccattctggctgtatacagactcagaggaaggactgttcagagaccctagctacctttgtgaagtggcaggacgatactggcccccctatggataagtctgaccttggccagaaacggaccagtggagccgtttgccaccaagatccccgtacatgtgaggagcccgccagtagtggagcccatatttggccagatgacatcactaaatggcccatttgcacggagcaggccagatctaatcatactgggtttcttcacatggactgtgagatcaaaggcaggccgtgctgcatcggcactaaaggatcctgcgaaattactacgcgcgagtactgcgaatttatgcatgggtatttccacgaggaggccactctatgctcccaggtgcactgcttagacaaggtatgcgggctgctcccctttcttaatccggaggtccctgaccagttttacagattgtggctgagtcttttcctgcacgcgggggtggtgcactgcctcgtctccgttgtttttcagatgactattctccgcgatttagaaaaactggctgggtggcaccgcattgctattatattcatcttgtccgggatcaccgggaacctggcctcagctattttcctcccctaccgcgccgaagtgcgcatgtggcgcatgggcccattaccacacattgggggccagccttgttgcagctatagtactcatctgggctcagcccggggaacacgctgcccctcctgcaccggtttacattcagggggtacagcaaatctgggagcatactggctcgtgagctag

SEQ ID NO: 132635 - DNA, 639 bp, synthetic construct
  misc_feature 1..639: note = Description of Artificial Sequence: Synthetic coding sequence
  source 1..639: mol_type = other DNA
atggcccagaccgacaaaccaacttgcattccgcccgaactgcccaagatgctgaaagaattcgctaaggctgcgattagggtccagccccaggacttgattcagtgggccgctgactattttgaggcactgagccggggggagacccccccagtgcgggagaggtccgaacgagtagctctctgtaacagagcggagttgactcccgaactgctcaagatcctgcacagccaggtagcaggcaggttgatcatccgcgctgaggagttagctcaaatgtggaaggtggtgaacctaccgaccgatttgtttaactccgtcatgaatgtgggcaggttcaccgaggaaatcgagtggctgaagtttctggctttggcatgctcagcacttggtgtgacgattacgaaaacgcttaaaattgtttgcgaagtgctaagctgcgaccataatggtggcagtccccgcattccctttagcacatttcagtttctgtacacctatatcgctaaggtcgatggagagattagcgcatcgcatgtgagtcgaatgctcaattatatggaacaggaagtgataggcccggacggcattattaccgttaacgactttactcagaatcctcgcgtgcaacttgagtag

SEQ ID NO: 132636 - DNA, 639 bp, synthetic construct
  misc_feature 1..639: note = Description of Artificial Sequence: Synthetic coding sequence
  source 1..639: mol_type = other DNA
atggcgcagacagacaaaccaacctgcatcccccctgaactccccaagatgcttaaagagtttgccaaagccgccatcagagtgcagccgcaggaccttattcagtgggctgcagattacttcgaggccctgagccgtggcgaaacaccccccgtgcgggagcggagcgagcgcgtggccctgtgcaatcgggctgagcttactcccgagttacttaagatcctgcactcccaggtcgccggacgtttgatcatccgggctgaggaacttgcacagatgtggaaggtggtgaacctgccaacagacctttttaactccgtgatgaatgtcggccgattcacagaagagatcgagtggctcaaattcctggccttagcctgcagtgcccttggcgtaacaatcaccaaaactctcaagatcgtttgcgaagtgctgtcctgtgatcataacggtggctcccctcgcatccctttcagcacgtttcagtttctgtacacttatattgctaaggtggatggagagatctccgcctcacacgtgtctagaatgcttaactatatggagcaggaagtcattggacccgacggcatcatcactgttaacgacttcactcagaatccacgcgtgcagctcgaatag

SEQ ID NO: 132637 - DNA, 351 bp, synthetic construct
  misc_feature 1..351: note = Description of Artificial Sequence: Synthetic coding sequence
  source 1..351: mol_type = other DNA
atggcacagaccgacaagcctacgtgcattcctcctgagcttccaaagatgctcaaagagtttgccaaagcggctattagggttcagccgcaggacctcattcagtgggctgccgactattttgaggcactctctcgtggtgagaccccccccgtccgcgaaagatcggaaagggtcgcattatgtaacagggccgaacttactcctgaactgctgaagattctgcacagccaggtggcggggagactgataattagggcagaagagctggctcagatgtggaaagtcgtcaacctccctaccgacctctttaattcggtgatgaacgttggtagattcaccgaggaatag

SEQ ID NO: 132638 - DNA, 393 bp, synthetic construct
  misc_feature 1..393: note = Description of Artificial Sequence: Synthetic coding sequence
  source 1..393: mol_type = other DNA
atggcacaaactgataagcctacctgcataccacccgagctgcctaaaatgcttaaggagttcgctaaggccgcgatcagggtacagccccaggatctcatccaatgggctgctgactactttgaggctcttagccgcggagagaccccccctgtcagagaaaggtcagagagagtggctctttgcaatagagcggaactaacaccagagctattgaaaatactacacagtcaggtggccggtaggcttataatacgcgccgaagagctcgctcagatgtggaaggttgttaacctgcctacagacctgtttaacagcgttatgaacgtggggaggttcaccgaggagatagagtggcttaaatttctggccttagcgtgtagcgccctttag

SEQ ID NO: 132639 - DNA, 312 bp, synthetic construct
  misc_feature 1..312: note = Description of Artificial Sequence: Synthetic coding sequence
  source 1..312: mol_type = other DNA
atggcccagaccgacaaacctacctgcattccccccgagctgcctaagatgctgaaggagtttgccaaggctgccattcgggtgcagccgcaggacctcatccagtgggcagcagactattttgaggctctctccagaggcgaaacacctccggtgcgagaacggtccgagcgtgtggccctgtgcaaccgggccgagctgacccctgagctgctgaaaattctgcattcccaggtcgcaggcaggctgataatccgcgcggaggaattggcacagatgtggaaggtggtgaacctacctacggatctgtag

SEQ ID NO: 132640 - DNA, 234 bp, synthetic construct
  misc_feature 1..234: note = Description of Artificial Sequence: Synthetic coding sequence
  source 1..234: mol_type = other DNA
atggcacagactgataaacccacttgtatccctcccgaactccccaagatgctgaaggaatttgccaaggctgccatcagagtccagccgcaggatctgattcaatgggccgccgattattttgaggccttgtccagaggcgagactccccctgttagagagcgatccgagagggtggcgttgtgcaatagagccgaactaacaccagagctcctcaaaatcctacattcctag

SEQ ID NO: 132641 - DNA, 693 bp, synthetic construct
  misc_feature 1..693: note = Description of Artificial Sequence: Synthetic coding sequence
  source 1..693: mol_type = other DNA
atgccgctcccagatactatgttctgcgcacagcaaattcatattcctccagagctcccagatatccttaagcagttcaccaaggcagcgatacgtacacagcccgcagatgtccttagatggagcgcaggatacttctctgccctgtcccgcggagatccattacctgtgaaagataggatggagatgccaaccgccacccaaaagacagatactggcctgacacaagggcttctgaaggtactccataagcagtgccatcacaaacgatatgtcgagctgaccgacctggagcagaagtggaagaatctgtgcctccctaaagagaaattcaaggccttgttacagctagatccttgcgagaataaaatcaaatggattaattttctggccttgggctgctctatgctgggaggcagcttgaacaccgccttgaagcacctttgcgaaattttaacggacgaccctgagggcggcccggcccggatcccttttaagacattttcatatgtctacagatatttagcaaggctggattctgatgtgagccctttggaaactgagagctaccttgcatccctgaaagagaatatcgatgcacggaagaatggaatgattggcctttcagatttttttttccctaagagaaagctgctggaatctattgagaatagtgaagatgttggacactag

SEQ ID NO: 132642 - DNA, 693 bp, synthetic construct
  misc_feature 1..693: note = Description of Artificial Sequence: Synthetic coding sequence
  source 1..693: mol_type = other DNA
atgcccctacctgacacaatgttttgtgctcaacagatccatatacctccagaactgcccgatatcctcaaacaattcacgaaggctgctattcgcacgcagcctgcagatgttcttaggtggtctgctggatacttttctgctctatcccggggagatcccttgccagtgaaggacagaatggagatgccaactgcaactcagaaaaccgatactgggctgacacaaggcctccttaaggtgctgcacaagcagtgccaccataaaagatacgtagagctcaccgatctcgaacagaaatggaagaatctgtgcctgcccaaggaaaaattcaaggcccttctgcagctcgatccttgcgagaacaagatcaaatggatcaatttcctcgccttaggttgctccatgttgggaggttctctcaatacagcgctcaaacacctctgtgagatcttgacagatgatcccgagggtggacccgctcggatcccattcaagacctttagttatgtctaccgatatctagcaagactggattccgatgtgtctcctctcgagaccgagtcatacctcgccagcctgaaggaaaatattgatgccagaaagaacggtatgattggcttgagtgattttttctttcctaaaagaaaacttctggaaagcatcgaaaatagcgaggatgtggggcattag

SEQ ID NO: 132643 - DNA, 2091 bp, synthetic construct
  misc_feature 1..2091: note = Description of Artificial Sequence: Synthetic coding sequence
  source 1..2091: mol_type = other DNA
atggacgccgatatggactatgagcgtcccaacgtagagacaattaagtgcgtggtggtcggagataatgccgtgggtaaaaccagactgatctgtgcccgggcttgtaatacaactctgactcaatatcaactgcttgccactcatgtgccaaccgtctgggccatcgaccaatatagagtgtgccaagaggtcttggagcggtcccgagacgtggtggatgaggtttctgtttctctgcggctctgggatacttttggcgaccatcacaaggatagaagattcgcttatggacgaagtgatgtggtagtcctgtgtttctccatcgccaaccccaacagtcttaaccacgttaaaagtatgtggtatcccgagattaaacacttctgtccacgcacccctgtgatcctcgttggatgtcagttggatctgaggtacgcggacctagaggcagtcaatcgcgctcgccggcccctggcccggccaatcaaaaggggggacattctgccccctgaaaagggccgcgaggtggcgaaagagctcggcctcccctactatgagacaagcgtattcgaccaattcggtatcaaggatgtctttgataatgcaatcagggcagccctcatttcccgtcgacatttgcagttctggaagagtcatttgaagaaagtccaaaaacccctcttacaagctccatttcttccgcccaaagctcctccaccagtcattaagatcccagagtgtcctagcatgggtacaaatgaggccgcttgccttcttgacaatcctctgtgcgcagacgtgctgttcatcctgcaggaccaggagcacatctttgcacaccggatctacttggccactagcagtagtaagttttacgacctgttcctgatggagtgcgaggagtctcccaatggttctgaaggcgcatgtgagaaggaaaagcagtcaagggattttcagggtcgaatcctttccgtggatccagaggaggagcgggaagaggggccaccccgaattccccaggctgatcagtggaaatcaagcaacaagagcctcgtcgaggccctgggcttggaagccgagggagctgtgcctgagacccagactcttacaggatggtccaaaggattcattgggatgcacagggaaatgcaggttaatccaataagcaaaagaatgggtccgatgactgtggtcagaatggacgcttccgtccagccaggtccctttaggacacttctgcagttcttgtacaccgggcagctggacgagaaagaaaaggacctagtgggcctcgcccaaatcgctgaagtgctggaaatgttcgatctccgcatgatggtggaaaacatcatgaacaaggaagcttttatgaatcaggagatcaccaaagcattccatgttcgcaaggccaatcgaatcaaggagtgcctttctaagggaaccttctccgatgttaccttcaaactggacgatggagccatctccgctcacaagcctctgttaatttgcagctgcgaatggatggcagcaatgtttggcggatcttttgtagaaagcgccaactccgaggtttacctgcccaacataaacaaaatatccatgcaggccgtgctcgactatctttacacgaagcagctctcgcccaacctggacctggatcccctggagctgattgccctggccaatcgtttttgcttgccccatttagtggccctagcagaacaacacgccgtacaggagctgaccaaagccgccacatcaggcgtggggatcgacggcgaggtactgagttatctggaactggctcagttccacaatgcccatcagctggcagcatggtgtctgcatcacatttgtacgaattataactctgtctgcagtaagtttaggaaggaaataaagtcaaaatctgccgataaccaggaatacttcgagcggcatcggtggcctccggtctggtacttgaaggaagaggatcattaccagagggttaaacgcgaaagagagaaagaggatattgctctcaacaagcatcgcagtcgccgcaagtggtgtttttggaactcctcccctgccgtagcctag

SEQ ID NO: 132644 - DNA, 2091 bp, synthetic construct
  misc_feature 1..2091: note = Description of Artificial Sequence: Synthetic coding sequence
  source 1..2091: mol_type = other DNA
atggacgccgatatggattatgagagacctaacgttgaaaccattaagtgcgtggtggtaggagataacgccgtaggaaagacacgcctcatctgcgcccgtgcatgcaataccaccctcacacaataccagctgcttgctacacacgttccaaccgtctgggccatagatcagtaccgagtgtgccaagaagtgttagagaggtcgagagacgtcgttgatgaagtctcagtcagccttaggctctgggatacatttggagatcatcataaggaccgtcggtttgcctacggacggtcagacgtggtggtgctgtgtttcagcattgcaaaccccaactccctgaatcatgtgaaaagtatgtggtacccagagatcaaacatttctgccctcgcacacccgtgattctggttggctgccagttggatctgcgatatgctgacctggaagccgtcaatcgcgcccgcaggccactagctagacctataaaaaggggcgacattctgccgccggagaagggcagagaggtagctaaggaattgggcttgccttattacgagaccagcgtgtttgaccagttcggaatcaaggatgtttttgacaatgccatacgtgctgcccttatctccaggcggcatctgcagttttggaagtctcatctcaagaaggtccagaagccactcttgcaggccccctttctcccccctaaagcgccacctccagtgatcaagattccagagtgtccttcaatggggactaatgaggctgcttgcttactcgataatcccttatgtgctgacgtcctgttcattttacaggaccaggaacacatcttcgcccaccgcatatatctggccacctcctccagcaagttctacgacctgttcctgatggaatgtgaggaatctcctaacggcagtgagggggcttgtgaaaaggagaagcagagcagagactttcagggacggatactgtctgttgatccagaagaggagcgcgaggaggggcccccgagaatccctcaagctgaccagtggaaatcgagcaacaaatctcttgttgaggcactgggcctggaggccgaaggcgcagtccccgagacccaaacactgactgggtggtctaaaggctttatcggtatgcacagagaaatgcaagtgaaccctatttccaaacgtatggggcccatgaccgtggtgagaatggatgcctctgtgcaacccggcccattcaggactcttctgcaattcttatacacaggccagctggatgaaaaagaaaaggatctcgtggggcttgcccagattgcagaagtgctggaaatgtttgatctaagaatgatggttgagaatatcatgaacaaagaggcatttatgaaccaggaaatcaccaaggcttttcatgttaggaaggccaatcgaatcaaggagtgtttgtctaagggaacattctcagacgtgacctttaagctcgatgatggggccatttccgcccataagccgctcttaatatgttcttgtgaatggatggcagctatgttcgggggaagctttgtagaatcagcaaactccgaggtgtacttgcccaacatcaacaagatctccatgcaagctgtgctggactacctctatactaagcagctgagtcctaatctcgaccttgaccctctagaactgatcgctctcgcgaacagattctgcttgcctcacttggttgctctggccgaacagcacgccgtccaggaactgacgaaggcagctacttcgggcgtggggattgacggcgaggttctgtcttatctggagctggcacagttccataatgctcaccagctcgctgcttggtgccttcaccacatctgcaccaactataactctgtgtgttcaaaattccgtaaagagatcaagtctaagagtgctgataatcaggaatactttgaacggcaccgttggccacccgtatggtatctcaaagaagaggaccactatcagagagtgaaacgagaacgcgaaaaggaggatatcgctctgaacaaacacaggtcacgaagaaagtggtgcttctggaacagcagccctgctgtagcatag

SEQ ID NO: 132645 - DNA, 300 bp, synthetic construct
  misc_feature 1..300: note = Description of Artificial Sequence: Synthetic coding sequence
  source 1..300: mol_type = other DNA
atggatgctgacatggattacgagcggcctaacgttgagacgatcaagtgcgtggttgttggcgacaatgcagtgggcaagacgaggctgatctgcgcgcgggcctgcaatacgaccctaacccagtaccagctgctggccacccatgtgccaaccgtctgggcaatagatcagtaccgcgtctgccaagaagttttagagcgcagccgggacgtcgtggacgaggtatctgtaagcctgagactctgggatacattcggagaccaccataaagatcgtcgctttgcttacggccgctag

SEQ ID NO: 132646 - DNA, 2184 bp, synthetic construct
  misc_feature 1..2184: note = Description of Artificial Sequence: Synthetic coding sequence
  source 1..2184: mol_type = other DNA
atggacagcgatatggactatgaaagaccaaatgtggagactattaaatgcgtcgtggtcggggataacgcagtcgggaaaacacgcttgatatgtgcaagggcttgtaacgctacattgacgcagtatcagctcttagctacccacgtcccaactgtgtgggctattgaccagtatcgcgtctgtcaggaggtgctggagagaagcagggatgtcgtcgatgacgtgtccgtgagccttcggctgtgggataccttcggggaccatcacaaggacaggcgctttgcctacggccggtctgacgtcgtggttttatgtttcagcattgcaaaccctaatagcctgcaccacgttaagaccatgtggtaccctgagattaaacacttctgtccgcgcgcccccgtcatacttgtaggatgccagctggacttgaggtatgccgacctggaggccgtgaacagagcccgaaggcccttggccagacctattaaaccaaatgagatccttccccccgagaaggggagagaggttgcgaaagagttgggcattccatactatgagacaagcgtagtcgcgcaatttggcattaaggacgtcttcgataatgctattagggccgctttaatttcgcggcggcaccttcagttctggaagagtcatctgagaaacgtgcagaggcccctgctgcaagcaccctttctcccccccaaaccccccccaccaataatagtcgtgcccgaccccccatcctcgtccgaagagtgcccagcgcacttgcttgaggaccctctatgtgccgacgtgattctggtcttgcaggagagagtacggatttttgctcataaaatttatctgtccacatcctcaagtaaattctacgatttattcctgatggacctgagcgagggtgagctgggcggccccagtgaacctgggggtacccacccagaggatcaccaggggcactccgaccagcatcatcatcaccaccaccaccaccatgggcgcgactttcttttacgggccgcgtcctttgacgtctgtgagtcagttgatgaagcaggcgggtcaggtcctgccggattgagagccagcacctccgacggaatcttgcgggggaatggcactggataccttccaggaagaggcagggtgctcagcagctggagtcgagcttttgtttcaatccaggaagagatggctgaggatccgttgacttacaaatcacgccttatggtggtcgtcaagatggactcatccatccaacccgggcctttccgcgctgtgctgaaatacttatacactggagaactggacgaaaatgagcgcgatttgatgcacatagcacatatcgctgagctgcttgaagttttcgatctgcggatgatggtcgcgaacatccttaataatgaagcattcatgaatcaagagataacaaaagcattccacgtgcgcagaactaaccgtgtgaaagaatgcttagccaagggcaccttttcagacgtgacttttatcctcgacgatgggacgattagtgctcacaagcccctgctaatttcttcttgtgactggatggcagcaatgtttgggggcccattcgttgaatctagtactcgagaggtcgtctttccctacacctctaagagttgtatgagagcagtgctggagtacctgtataccggaatgttcacttcaagtcccgatctggacgacatgaaattgatcatcctggcaaatcggctttgcttgccgcatttagtcgccctcacagaacagtacaccgtcaccgggctgatggaagctactcagatgatggtcgacatcgatggcgacgtgctggtcttcttggagttggcacaatttcattgcgcttaccaactggctgactggtgtcttcaccatatctgcacaaactataataacgtctgtcgtaagttcccccgcgatatgaaagcaatgagtccggaaaaccaggagtattttgaaaaacaccgctggccccccgtttggtacctgaaggaggaggatcactaccagcgagcacgtaaggagcgcgagaaggaagattacttgcatttaaagcgacaacctaagcgacgttggttgttctggaactcaccctctagccctagcagtagcgccgcctcttctagttccccaagttcctcaagcgcagtcgtatag

SEQ ID NO: 132647 - DNA, 2250 bp, synthetic construct
  misc_feature 1..2250: note = Description of Artificial Sequence: Synthetic coding sequence
  source 1..2250: mol_type = other DNA
atgcaggcttggcgcaaggggcccgacgggccacagaaaacatcatctgatagcatgagtaggctcatggacagcgatatggattacgaacgcccgaacgtagaaaccatcaaatgtgttgtcgtgggcgataatgcagtggggaagacacgattgatttgtgcacgggcatgtaatgccacactgacacagtaccaactcctcgctactcatgtgcccaccgtgtgggccatcgaccaatatagggtatgccaggaggttttggaaaggtcaagagatgttgtggacgatgtgtctgtcagtcttcgcctttgggacaccttcggggaccatcacaaggaccgccggttcgcctacggacgttccgatgtagtcgtactgtgctttagcattgctaatcccaattccttgcaccacgtcaagacaatgtggtaccctgagatcaaacacttttgtccaagagcaccagtgattctcgtgggctgtcagctggacttgcgatatgcggatctggaggccgttaaccgggcccgccgtcccctcgcacggcctattaagccgaacgaaattctgcctcccgaaaagggtagagaagtggccaaagagctggggataccatattacgaaacaagcgtggttgcacaatttggcatcaaggacgtctttgacaatgccattagagctgctctaatctctaggcgacatctccagttctggaagtcgcatctcaggaatgtccaacgcccactcctgcaggcacccttcctgccaccaaaaccacctcccccgattatcgttgttcctgaccccccaagctccagcgaggagtgccctgcccatttattggaagaccctctgtgcgcggatgtcatacttgtcctgcaggagcgggtacgaatattcgcccataagatctatctctccactagttcctcaaagttctacgatttgttcctgatggatctttcggaaggagagctcggcgggccttcagagccagggggaacacacccagaggatcaccaggggcactctgaccagcatcatcatcatcaccaccaccaccacggaagagacttcctgttacgggccgccagttttgacgtgtgcgagagcgtggatgaggcgggcggatctggaccagccggcttacgcgcctccaccagcgacgggatcctccggggcaacggcacaggatatctccctggcaggggtagagtgttgagcagctggtcgagagctttcgtttctattcaggaagagatggctgaagatccactgacctataaatcgcggctgatggttgttgtcaaaatggactccagtatacagcccggtcccttccgtgccgtgttaaaatacctgtacactggagagctcgacgagaacgagcgagatctgatgcacatagctcacatcgccgagttgcttgaagtctttgacttaagaatgatggtggcaaacatcctgaacaacgaggcctttatgaatcaggaaatcaccaaagcattccacgtgcgccgtaccaatcgagtgaaggaatgtctcgccaaggggacttttagcgatgtcaccttcattctggacgatggaacaatctcagctcataaacccctgctaatttcctcctgtgactggatggccgccatgttcggaggaccgtttgtggaatcgtctacacgagaggttgtgttcccgtatactagtaagagttgcatgcgcgccgtactggagtatttatacaccggtatgttcacttcttccccagatctcgacgatatgaaactgatcattctggccaacaggctgtgcttgccacacttagtagctctgaccgaacagtacactgtgacggggttaatggaagctacacagatgatggtggacatagacggggacgtcctcgtatttctcgagttggcccagttccattgcgcttaccaattggctgactggtgcttacatcacatttgcacgaattacaataatgtctgtaggaaattccctagagacatgaaagcaatgtcccccgaaaaccaagaatactttgaaaaacaccgctggcctcctgtctggtatctgaaagaggaggatcactatcagagggcgaggaaggagcgcgagaaagaggattacctccatctaaagcgtcaacccaaacggcgttggttgttctggaatagcccatcaagtccatctagcagcgccgcttcaagcagcagcccttcttcgtcctctgcggttgtgtag

SEQ ID NO: 132648 - DNA, 2205 bp, synthetic construct
  misc_feature 1..2205: note = Description of Artificial Sequence: Synthetic coding sequence
  source 1..2205: mol_type = other DNA
atgaaagcccggagcaggttgatggactccgatatggattacgaaagacccaacgtggagactattaagtgcgttgtggtcggagacaatgctgtgggaaaaacgcgcctgatatgcgcacgagcctgcaacgccacattaactcagtaccagttgcttgctacacacgtgcccacagtttgggccattgatcagtaccgggtctgtcaggaagttctggagcgatcgcgggacgtggtggatgatgtcagcgtttcactccgtctatgggacactttcggagaccaccacaaagatcggagattcgcttatggacgctcagacgtcgttgtcttgtgtttcagcattgctaatccaaatagcctgcatcatgtgaagactatgtggtatcctgaaattaagcacttctgccctcgcgcccctgtgatactggtaggatgtcaattagatctgcgttacgccgatttggaggcagtaaacagagcgcgacggccgctcgcccggccaattaagcccaatgagatccttccacctgagaaagggagagaggtcgccaaggagctcggcatcccttactacgagacctcggtggtagcgcagtttggtatcaaggatgttttcgacaacgccatccgggctgcactgatttcgcggcggcaccttcagttttggaagagtcatctgcgcaacgttcagaggcccctcttacaggccccatttctgccacctaagccgccccctcccatcatcgtggtgccagacccccctagttcctcagaagaatgtcccgctcacctactcgaggaccccctctgcgcggacgtcatcctcgttctgcaggaacgcgtgagaatattcgcacacaagatctacctgtctacttcttcatccaagttctacgacctcttcctgatggacctgagcgagggagagctgggcggtccaagcgaacccgggggcactcacccggaagatcaccaaggacactctgaccagcatcaccaccaccatcatcaccaccatggacgtgattttttgctgagggcagcatccttcgacgtgtgtgaatcagtggacgaggcgggggggagtggacccgctggtcttagggcaagcacgtctgatggcatcctgcgagggaatggcacaggctatctgccaggtagagggcgcgtgctcagttcctggagtagggcctttgtctccatccaggaggagatggcggaggaccctctgacgtataaatcccggctgatggtggtcgtcaaaatggactcctcaattcaaccggggcccttccgggccgtcctcaagtacttatatacgggtgaactggacgaaaatgaacgggacctaatgcatatcgctcatattgccgaacttctggaggtgttcgatctgaggatgatggtggccaacattcttaacaacgaggcttttatgaaccaagagatcacaaaggcctttcatgtgcgccggactaatcgcgtgaaggaatgcctggccaaggggaccttctccgacgtcacattcatcctcgacgacggtaccatcagtgcccacaagcctttgttgatcagctcctgtgattggatggccgcaatgtttggcggcccctttgtggaaagtagtacccgcgaagtggtgtttccgtacacgtcaaagtcatgtatgcgcgcagtgcttgagtacctctacacagggatgttcacaagttctcctgatctagacgatatgaaactcattattttagccaaccgcctgtgcctgccccatctcgtggcacttaccgaacaatacacagtcaccgggctcatggaggccacccagatgatggtcgacatcgatggggacgttctggtgttcttagaactggcacaatttcattgtgcctatcagctggctgactggtgtctccaccacatttgtactaactacaacaatgtctgtagaaagtttcctagagacatgaaagcgatgtctcccgagaaccaggagtattttgaaaagcatcggtggccgcctgtctggtatcttaaggaagaagatcattatcagagggcacgcaaggagagggagaaagaggactacttgcacctcaaacgtcagcctaaaagaaggtggttgttttggaatagccctagctccccgtcatcaagcgcggcgtctagttcatctccctcgagcagttctgccgtcgtatag

SEQ ID NO: 132649 - DNA, 1836 bp, synthetic construct
  misc_feature 1..1836: note = Description of Artificial Sequence: Synthetic coding sequence
  source 1..1836: mol_type = other DNA
atgagcatacacatagtggctcttggtaacgagggggatactttccatcaggataataggccctccggtctcatccgtacatacctcgggaggagccccctggtcagtggagacgaaagtagcctcctcctgaatgcagcgtcaaccgtggcacggccagtcttcaccgagtatcaggcctccgctttcgggaatgtgaaactagttgtgcacgattgcccagtgtgggatatatttgactctgattggtacacgagccgaaaccttatcggcggcgcagacataatcgtaatcaaatataacgtaaatgacaaatttagcttccatgaagtgaaggataactacatccccgttatcaagagggccctcaactctgttcctgtcattattgccgcagtgggaactagacagaacgaggagctgccatgcacgtgtccgctctgtacaagtgaccgagggagctgtgtgtcaacaaccgaggggattcagctcgctaaagaactaggcgccacatatcttgagcttcattccctggacgatttttatattggcaagtacttcggcggcgtccttgagtacttcatgattcaggctttgaaccagaaaacaagcgaaaagatgaaaaaaaggaaaatgtccaattccttccatggcattcgacctccacagctggaacagcccgagaagatgcccgtgctgaaggccgaagcctcacattataacagcgacctgaacaacttgttgttctgctgtcagtgtgtggatgttgtgttttataatccaaacctgaagaaagttgttgaagcccataaaattgtgttgtgcgcagtgtctcacgtctttatgttgctatttaacgtcaagtctcccacagacattcaagattcttccatcattcggactacacaggatctgtttgcaatcaacagggatacagcctttccaggtgctagccatgagagcagcggaaaccctccactcagagtgatagttaaggacgctctattctgctcttgtttgtctgatatcctcaggttcatctactccggtgcttttcagtgggaggagctggaagaagacattagaaagaagcttaaagactctggagacgtgagcaacgttatagagaaggtgaagtgtattttgaagactcccgggaaaattaactgcctgaggaactgcaagacttaccaggctagaaagcctctatggttttataacacgtccctcaaatttttcctgaacaagcctatgctcgccgatgtagtcttcgaaatccagggcacgacagtgccggcccatcgggccattttagtggcgcgttgtgaggtcatggctgccatgttcaacgggaactacatggaggcaaaatccgttctgattcccgtttatggggtatccaaggaaacctttctgagttttttggagtacctatacacggattcgtgttgcccagccggaatatttcaggcaatgtgcctgttaatatgcgcggaaatgtaccaggtgtccagactgcagcacatttgcgagctgttcatcataactcagctacagtctatgccctcacgggaactggcctcaatgaatctggacattgtggacctgctgaagaaggccaagtttcaccactctgattgccttagtacatggctgttgcattttatagcaactaattatttgatattctctcagaagcccgaatttcaagatttatctgtcgaagagcgctctttcgtcgaaaagcatcgctggccaagcaatatgtatttgaagcagctcgccgagtacagaaagtacattcactccagaaaatgtaggtgcctggtgatgtag

SEQ ID NO: 132650 - DNA, 354 bp, synthetic construct
  misc_feature 1..354: note = Description of Artificial Sequence: Synthetic coding sequence
  source 1..354: mol_type = other DNA
taagaaatgtaccaggtgagccgcctgcagcacatctgcgaactctttattatcactcaactgcaaagcatgccatcccgcgagcttgcgtctatgaacctggacatagtcgatttgttgaaaaaggccaaatttcaccacagcgactgcctgtccacctggcttctgcatttcatcgcgaccaattacttgatcttctcacagaaacccgaatttcaggacctgagtgttgaggagcgaagcttcgtcgagaaacatagatggccttccaatatgtatcttaaacagctggcggaatatagaaaatacattcatagcaggaagtgccgctgcctagtgatcaagcgacactag

SEQ ID NO: 132651 - DNA, 1692 bp, synthetic construct
  misc_feature 1..1692: note = Description of Artificial Sequence: Synthetic coding sequence
  source 1..1692: mol_type = other DNA
atgttttcgcgcaatcaccgctcgagagtaacggtggcaagagggtccgcccttgagatggaattcaagaggggaaggttccgcctgagccttttctcagacttacctgaggacactgaactgcagcgcaaactggaccacgaaatcagaatgcgcgagggcgcctgtaagctgctggccgcatgcagccaaagagagcaggcgctggaagccaccaagtctctgctggtgtgcaatagccggatactgagttatatgggcgaactgcaacggagaaaagaagcgcaggtcctgggaaaaaccagcagaaggcctagtgactcgggaccaccagccgaacgctcgccatgcagagggcgtgtgtgcattagcgatcttcgcatacccctgatgtggaaggatacagagtatttcaagaataaaggtgatcttcatcgatgggcggtgtttctgctacttcagctcggtgaacatatacaggacacggaaatgatactggtggatcgaactctgactgatataagcttccagagcaatgtgttgtttgcagaggcaggacccgactttgaactgcgtctggagttatacggagcgtgcgttgaagaggagggcgcgctcacaggtggccccaagcggctggccactaagttgagttcaagcctcggtaggtcttcaggaaggcgcgtccgcgcctcactggatagcgccgggggctctggatctagccctatcctgcttcccacaccagtggtaggcgggccgcgatatcacctcctggcccacacaaccctgacactcgccgccgtgcaggacggctttcgaactcacgacctgaccttggcatcacatgaggagaatcccgcttggttgccactgtacggctcggtgtgttgtcgactcgccgcgcagcccttgtgtatgacacagccgaccgcaagtggaacgctccgggtccagcaggcaggagaaatgcaaaattgggcccaggtacacggggttctgaagggaacgaatctcttttgctataggcagcctgaggacgcagacacgggcgaggagcctctcttaacgatcgctgtgaacaaggagactagagttcgcgcgggggaactggaccaggcgttgggacggccttttacgcttagcattagtaaccaatacggcgacgacgaagtgactcatacgctgcagaccgagtcccgtgaggccctccagtcatggatggaagccctgtggcagctttttttcgatatgagtcaatggaagcagtgctgtgacgagattatgaaaatcgagacacccgcgcccagaaagccccctcaggctttagcaaagcagggaagtctgtaccatgagatggcaatcgagcccctcgatgacattgcagctgtcactgacatcttaacccagagagaaggcgcgaggctggagactcccccaccatggcttgcaatgttcacagatcagcccgcactgcctaatccttgctcacctgcttccgtcgcccccgctcccgactggacccatccactgccgtggggccgaccacgaactttctcactagatgctgttcctcctgaccacagtcccagagctaggtcggtagcacctttaccaccgcagcgctcccctcgcacccggggactttgctctaaaggccagccaagaacttggctacagtcacccgtatag

SEQ ID NO: 132652 - DNA, 1653 bp, synthetic construct
  misc_feature 1..1653: note = Description of Artificial Sequence: Synthetic coding sequence
  source 1..1653: mol_type = other DNA
atgcaggaccgtctgcacatcctggaagatctcaacatgctatacatccgccaaatggccctctctttggaagatactgagcttcagaggaagctagatcacgaaatacggatgagggagggagcttgtaagctgctggctgcctgttctcaacgggagcaggccttggaggctacaaaaagtctgctagtctgcaatagtagaatcctctcgtatatgggagagttgcagcgacgaaaggaagcccaggttcttgggaagaccagtcgtagaccttctgattcaggtcccccagcggagaggtccccgtgccgggggagggtgtgcattagcgacctgaggattccccttatgtggaaagacactgagtattttaagaacaaaggtgacctgcaccggtgggccgtattcttgctcctacagttgggcgagcacatacaagacaccgaaatgatcctggtcgatcgcactttgaccgacatttcatttcagagcaacgtcctgtttgcagaggccgggcccgactttgaattacgactggagctttacggggcatgcgtcgaggaggagggcgccttaaccgggggacccaagagactggctacgaaactgtccagcagtctcggcaggagctcaggaagaagggtgcgggcttcacttgatagtgccggggggtcaggcagctctcccatccttctccccacgcccgtggtgggcggcccacgatatcatttgctggcccacaccacactgacgctggccgcagttcaggacggattcagaacacacgacctgactctcgcctcccacgaggagaaccccgcttggctgcctttatatggttctgtgtgctgccggctcgccgcccagccactgtgcatgacccaacccacagcctccggcaccctacgtgttcagcaagctggagagatgcagaactgggcccaggtccatggcgtgctgaagggaacaaatctgttttgctaccgccagcctgaagatgcagatacaggcgaagaacctctgctgacgattgccgtgaataaggaaaccagggtgcgcgctggggagctagaccaggcactaggaaggccattcaccctgagcatcagcaatcagtatggggacgatgaggtgacacacacactacaaacagaatctagagaagctctccagagttggatggaagctctgtggcagttgttcttcgatatgtctcagtggaagcagtgctgcgacgaaatcatgaagatagagacccctgctccaagaaaacccccacaggctctagcaaaacagggttcattataccacgaaatggctattgagccattagacgatatcgccgccgtgaccgacatcctcactcaaagggaaggtgctagacttgaaacccctcctccctggctcgcaatgttcacagatcagcctgccctccccaatccctgttcgcccgcttccgtggccccggcacccgattggacccacccattaccttggggacggccaagaacttttagtctggatgcggtgccacctgaccattctccaagagcgaggagcgtggcacccctacccccccaacgcagcccaaggacgcgcggcctgtgttcaaagggtcagccgcgcacgtggctccagagccccgtttag

SEQ ID NO: 132653 - DNA, 4635 bp, synthetic construct
  misc_feature 1..4635: note = Description of Artificial Sequence: Synthetic coding sequence
  source 1..4635: mol_type = other DNA
atggatagtggaccagtgtatcacggtgatagcagacagttgagtgcctctggtgtccctgtaaacggagcaagggaacctgcgggcccctcactgctgggaacgggaggaccatggcgagtcgatcagaaacccgattgggaagccgctccaggaccagcccacacagccagactcgaggatgcccatgatctggtagctttctccgcagtggcagaagctgtcagttcgtacggtgccctgagtacccggctatacgaaacatttaatcgagagatgagccgtgaagctgggaacaattccagaggaccccgccctggacccgagggctgctccgcaggcagtgaggatctcgatactctgcaaaccgctctagcgctggccagacatggaatgaagcctccaaattgcaactgcgacgggccagaatgtccagactacctagaatggttggaagggaaaatcaaatctgtcgtgatggagggtggagaagagcgcccccgactgccaggaccattaccaccaggtgaagccgggctccctgctccctcaacacgaccactgttgagcagcgaggttcctcagatctcaccacaggaggggctccccttgtcccagtcagccttgagcattgctaaggaaaagaatatttcactacagactgcgatcgccatcgaagcactgacgcagctgagctcagctttgcctcagcctagccatagcaccccgcaagcatcttgcccccttccagaggccctctctccacccgcaccatttcgttcaccccaatcctacctgcgcgccccgagttggcctgttgttcccccagaagaacacagcagttttgccccggacagtagcgcatttccccccgctacccctcggacagagtttccggaggcctggggaaccgatactcctccggccactcctcgaagctcttggccgatgcctcggccctctccagaccctatggccgagctggaacaactcctaggcagtgcttccgactacatccagtcggtcttcaagagacctgaggccctcccgaccaagcctaaggtaaaggttgaggccccatcaagctcccctgctcccgccccatcccccgttctgcagagagaggctcctactccctctagcgagccagacacccatcagaaggcccagaccgcactgcagcagcacctacaccacaagcggtccctattcctggaacaggtccacgacaccagctttcctgctccctccgagccgtccgcgcctggatggtggccgccacctagtagcccagtcccaagattgccagacagaccccccaaggaaaaaaagaagaaacttcccacccctgcagggggaccagtgggcacggaaaaagctgccccgggcataaagccctcggtccgcaaacctatccaaatcaaaaaaagtcgccctagggaggcacagccactctttcctcctgttcgtcagatcgtcctcgaagggcttagatctcccgcctcccaggaggtacaagctcacccccctgcccctctgcccgctagtcaggggtccgctgttcccttacctcctgagcctagtttggcacttttcgcaccctcgccaagccgtgatagcctgctgccccccactcaggagatgcgtagcccttcccctatgaccgccctacagccagggtcaacggggcccctgccccccgcagacgataagttggaggaattaatccgtcaatttgaggcagagtttggcgatagcttcggcttacctgggcctccttctgtccccatccaagatccggaaaaccagcaaacttgccttcctgcccccgaatctccatttgccacccgcagccccaaacagataaaaattgaatcaagtggtgccgtgacagtactatctacaacttgcttccacagtgaggagggcggccaggaggcaacccctactaaggccgaaaaccctctgacacctaccctgagtggctttttggagtcgcctctgaagtatttggatactcctaccaagtcattgctggacacacctgcgaagagggcccaggctgagtttccgacatgtgattgtgtggagcagattgtagaaaaggacgaaggaccatattatacgcatctgggttcgggacccactgttgccagcatccgggaactcatggaggaacggtatggcgaaaaaggcaaagcaatcagaattgagaaagtgatctatactggcaaagagggcaagtcgagtcgaggttgccccatcgccaaatgggttatcagacgacacaccctggaggagaagcttctctgcttggtccgacacagggctggccaccactgccagaatgccgttattgttatcctgattctggcatgggaaggcatcccaagaagcctcggagataccttgtatcaggaattaaccgacacacttcgaaagtacggaaatcccacttcccgcagatgtgggctgaacgacgatcgtacatgtgcttgtcaaggcaaagatcccaatacttgtggcgcatccttcagcttcggatgctcctggagtatgtacttcaatggctgtaagtatgcccggtccaagacacctaggaaattcaggctcgccggggacaacccaaaagaggaagaggtgctcagaaaatcattccaagacctggcaacagaggtagctcctctctataagagactggccccccaggcctatcagaaccaggtgaccaatgaggagattgctatcgactgcagattgggactcaaggagggtagaccctttgctggcgtcacggcatgcatggatttttgtgcccacgctcacaaagatcagcataatctgtacaatggctgtacagtggtgtgcacccttaccaaggaggataatcgatgtgttggaaagatcccagaggacgagcagttacatgtccttcctctgtacaaaatggcaaacaccgacgaattcgggagcgaagagaaccagaatgccaaggtagggtctggggcaatccaggtacttactgctttcccgcgcgaagtcagacgcctgcccgagccagcgaaatcctgccgccagcgacaactagaggctaggaaggctgccgccgagaagaaaaaaatccagaaggaaaaactgtcaacccccgagaagattaagcaggaggcactggagctggcggggattacgtctgacccaggcctttccttgaagggcggtttatcacaacaggggctgaagccatcccttaaggtcgagccacagaatcacttcagttcattcaaatattccggcaacgctgtcgtcgaaagctacagtgttctgggcaactgtaggccctctgacccttactccatgaatagtgtttactcctaccattcttactatgctcaaccctcccttacatccgtcaacggattccatagtaagtatgcccttccgtcattttcttactatgggtttcccagtagcaatcctgttttcccgtcacagttcctgggacctggcgcctgggggcatagtggctcgtccggcagctttgagaaaaaaccagatctgcacgcgctccataactccctgtcacctgcttatggtggggctgagttcgccgaattaccttcacaggccgttccaacggacgcacatcaccccactccccatcaccagcagcccgcttatccaggccccaaggaatacctgttaccgaaggcccctctactgcattccgtgtcgagagatccctctccctttgctcagtcgagtaattgttacaacagaagtatcaagcaggagcccgtagatcccctgacacaagccgaacctgtcccacgtgacgcgggaaagatgggaaagaccccactctccgaagtgtcccagaatggaggaccgtcccatctttggggacagtattcgggcggcccgagcatgtctccaaaacgcacaaatggtgtgggcggaagctggggcgtcttctcaagcggcgagagcccagctattgttcctgacaagctcagctcctttggtgcttcttgtctggctccttctcatttcaccgacggacagtggggcctgtttcccggcgaaggtcagcaggccgcctcccactcagggggccggctgcggggcaagccctggagtccctgcaagttcggaaactccacaagcgccctggctggcccctctctgactgaaaagccttgggccttaggagccggggattttaatagcgcgttgaaggggtccccgggcttccaagataagctgtggaaccccatgaaaggagaggagggtcggattcctgccgctggcgcctctcaattggtcttctatcagcacaagaacttaaatcagcctaatcacggactcgccctgtgggaagctaaaatgaaacagcttgccgaacgcgcacgcgctcgacaggaagaggctgcgaggctcggcttaggccagcaggaggctaaactgtacgggaaaaagcggaagtggggggggaccgttgttgcagagccccagcaaaaggaaaagaagggggtggtacctacccgccaggccctagcggtgcctactgattcagctgtaacagtgagttcctacgcttacacaaaagtgaccgggccatactcccggtggatttag

SEQ ID NO: 132654 - DNA, 468 bp, synthetic construct
  misc_feature 1..468: note = Description of Artificial Sequence: Synthetic coding sequence
  source 1..468: mol_type = other DNA
atgcgccacttaccttacttctgtagggggcaggtcgtaagaggcttcggccgagggagcaagcagctcggcatccctactgctaatttccctgagcaggtggtcgacaacttgcccgcggacatttcaaccgggatctattacggatgggctagtgtcgggagtggagatgtgcacaagatggtcgtaagtataggctggaacccttattataagaatacaaagaaaagtatggagacccatatcatgcatacattcaaagaggacttctatggagagatcctcaacgtagctatcgtcggatatctccggcctgaaaagaacttcgattccctcgagagcctgatctccgctatccaaggtgacatcgaagaagccaagaaaaggctggagttacctgagcacctgaagatcaaggaggataacttcttccaggtgagcaaatccaagatcatgaatggacactag

SEQ ID NO: 132655 - DNA, 969 bp, synthetic construct
  misc_feature 1..969: note = Description of Artificial Sequence: Synthetic coding sequence
  source 1..969: mol_type = other DNA
atggctgcaagtggcgagccccagcgacagtggcaggaagaagttgcagctgtagtggtcgtgggctcttgcatgacggatcttgtttcccttacttctcggctacctaaaacaggtgagaccatacacggacacaagttcttcatcgggtttggcggcaaaggagcaaaccagtgtgtgcaagccgcaagacttggagctatgacaagcatggtgtgtaaggttgggaaagacagcttcgggaatgactacatcgagaacttgaaacagaatgatatctcaacggagttcacatatcagaccaaggacgcagctaccggcacagcctcaatcatcgtaaacaacgaagggcagaacatcatcgttattgttgctggtgcaaatctgctgcttaacactgaggacttgcgcgccgcagcaaacgtcatttcacgcgctaaggtaatggtttgtcagcttgagatcacccctgccactagtcttgaagccttgacaatggcacgaagaagtggcgtcaagactctctttaatccggcccccgccatagcggacctggacccacagttttataccctgtccgatgtgttttgctgcaacgagagcgaagcggagatcctgactgggctgacggtgggcagcgcagctgacgccggggaagctgccctggtgctcctcaagagaggctgccaggtcgtcatcattactctgggggccgaggggtgtgtggtcttgtcacaaaccgagccagagcccaaacacatacccactgagaaggtgaaggctgtcgacactacaggcgccggagatagttttgtgggtgccttagccttttatctggcttactatcctaatctgtcactcgaggacatgttaaaccggagcaacttcatcgcagcagtgtctgtgcaggccgcaggtacacaatcttcctacccatacaaaaaagatctccctctcactttgttttag

SEQ ID NO: 132656 - DNA, 861 bp, synthetic construct
  misc_feature 1..861: note = Description of Artificial Sequence: Synthetic coding sequence
  source 1..861: mol_type = other DNA
atggccgcatccggggagccccagcgacagtggcaggaggaggtcgctgcagtggtcgtcgtaggatcgtgcatgaccgatcttgtaagcctcactagtcgcctcccgaaaaccggcgagactatccacgggcacaaattctttattggctttggggggaagggtgctaatcaatgtgtccaagccgccagactgggagcgatgacctctatggtatgcaaagtaggtaaggacagtttcgggaacgactatatcgagaaccttaagcagaacgatatttcaaccgagttcacgtatcaaacgaaggatgcagccacaggtactgcctcgatcattgtgaacaatgagggccaaaatattattgtcattgtcgctggggccaatctgctactgaatacagaagatttaagagccgccgctaacgttataagccgggcaaaggtgatggtgtgtcaattagaaataacacctgccaccagcctggaggcgttgactatggctagacgatcgggcgtgaaaaccctcttcaaccctgctcccgctatagccgacctggacccgcagttttataccctgtccgatgtcttttgctgtaacgaatcggaggcagaaatcctgaccggcctcactgtgggctcagccgctgatgccggcgaagcagctttggttctgttgaagagaggatgccaagtagtaattatcacgctgggcgctgaaggatgtgtggtgctgagtcagacggagccagaacccaagcacatcccaactgagaaagtgaaggcagttgacacaacatgtagacctggttctaggcccaaaagcgaggcagcatccgtgaagaaacagaagcattacaagtag

SEQ ID NO: 132657 - DNA, 861 bp, synthetic construct
  misc_feature 1..861: note = Description of Artificial Sequence: Synthetic coding sequence
  source 1..861: mol_type = other DNA
atgagttggctcctctttctggctcacagggtcgccttagctgctctcccatgccgtcgtggtagtcgaggattcggtatgttctacgcagtgcggcgagggcgcaaaaccggagtctttctaacttggaacgagtgtagagcacaggtggatcgatttcctgccgcaaggtttaaaaaattcgctaccgaggacgaggcctgggcctttgttaggaaaagcgctagtccagaagtctccgaagggcacgaaaaccagcacggacaggaatccgaggcaaaggcgagcaagcgtctgcgggaaccacttgacggcgatggtcatgagtcggctgaaccctacgctaagcacatgaaaccctccgtcgagccagcacctccagtctcgagggacacattctcttatatgggagattttgtggtggtctatactgacggctgttgttcaagcaatggcagaaggcggccccgagccggtattggggtgtactggggccccgggcatcccttaaatgtggggatacgcctccccggacgccagaccaatcagcgggctgagatccatgcagcttgcaaggccatcgagcaggcgaagacacagaatataaataaactcgtactgtacacggattcgatgttcactatcaacgggattaccaattgggtccagggttggaaaaagaacggatggaaaactagcgcgggcaaggaagtgatcaataaggaggatttcgttgccctggagaggctcacccaaggaatggatattcaatggatgcatgtgcctggccattctggattcattggaaatgaagaagcagataggctggccagggaaggtgctaaacagtctgaggattag

SEQ ID NO: 132658 - DNA, 1683 bp, synthetic construct
  misc_feature 1..1683: note = Description of Artificial Sequence: Synthetic coding sequence
  source 1..1683: mol_type = other DNA
atggaattccggcaggaggaattcagaaaattggccggtagggctctcgggaagcttcataggctgcttgaaaagaggcaggaaggcgcagagactctggagctcagtgcggacggcagaccagtcacaacgcagacacgggacccacccgttgtagattgtacctgttttggtctgccacgcaggtatatcattgcaatcatgagcggactggggttctgcatctcctttgggattagatgcaacttgggagtggcaatcgtgtccatggtcaacaactccaccacacatcgagggggacacgtggtggtccagaaggcacagttttcatgggaccccgagactgtggggctaatccacggttcattcttttggggctacatagtgactcagatccctggcgggtttatctgtcaaaaattcgcagccaatagagttttcggttttgcaatcgttgcaacaagcaccctcaatatgctcatccccagtgctgctcgagtgcactatggatgtgtgattttcgttagaattctgcaggggcttgtggagggtgttacgtatccagcatgccatggtatctggtccaaatgggcaccaccactcgaaagatcacgcttggccaccactgccttctgcgggtcttacgcgggggccgtggtcgctatgcctttggccggagttttggtgcaatattccgggtggtcttcagtgttttacgtctacggaagttttggcatattttggtatcttttctggcttctggtgagctacgaaagccctgcgttgcacccttccatatcagaggaagagcgtaaatacatcgaagatgccattggcgaatcggctaaactgatgaacccactcaccaagttctctaccccctggcgaaggttcttcaccagtatgcctgtgtatgccatcatcgtcgcgaatttttgccgttcatggacattctacctccttcttatatcccagccagcctactttgaagaagtatttggattcgagatttcaaaagtcggcctggttagcgcacttccccaccttgtcatgaccataattgtgccaatcggcgggcagatcgccgatttcttaagatcccgcagaattatgtcaaccacaaacgtgcgcaaactgatgaattgtggcgggttcgggatggaggctacattactgctggttgtggggtattcccatagcaagggagtcgctataagcttccttgtgctggccgtggggttctcaggctttgccatttccggattcaatgttaatcacctggatatagctcctaggtatgcaagtatacttatgggcatttccaatggtgtggggaccctgtctggaatggtgtgcccgatcatcgtgggcgccatgacaaaacataagacccgcgaggaatggcagtacgtgttcctcatagcttcgctggtgcactacggcggggtgatcttttatggagtgttcgcttctggcgagaaacagccatgggctgagcctgaggaaatgtcagaggaaaagtgtgggttcgtcggtcatgatcagttggcaggctctgatgacagcgagatggaagacgaggcagaacctcctggggccccacccgcaccccctccgagctatggggctacccactctacattccagccaccccgtccaccgcccccggtccgcgactactag

SEQ ID NO: 132659 - DNA, 939 bp, synthetic construct
  misc_feature 1..939: note = Description of Artificial Sequence: Synthetic coding sequence
  source 1..939: mol_type = other DNA
atggctgcgggcgtcgattgcggagatggagtgggcgctaggcagcatgtgtttctggtgtcagaatatctcaaagacgcctcaaagaaaatgaaaaatgggctaatgttcgtaaagctcgtcaacccatgctcaggggaaggagcaatatacttgttcaatatgtgcctgcagcagctgttcgaagtgaaggtattcaaggaaaagcatcactcctggtttattaatcagagcgtgcagagcggagggctcctacactttgcgacacctgttgaccccctgttcttgttactgcactacctgattaaagcggacaaagaaggaaaatttcagccacttgaccaggtcgtggtagataatgtttttcctaactgcatcttactgctcaagttaccgggcctggaaaagctgctccaccacgtgaccgaggagaagggaaaccctgaaatagacaataagaaatactacaaatactcaaaagagaaaacactgaagtggctcgagaaaaaagtgaatcagaccgttgccgcactgaagactaataatgtgaacgtgagctcaagggtgcagtccacggccttttttagcggtgaccaagcgtcgactgacaaggaggaagactatataagatatgcccacgggctcatatctgattacatacctaaggaactctcagatgatctgtccaaatacttgaaactcccagaaccttccgccagcctgcctaaccctccgtccaaaaagattaagttgagcgatgagccagttgaagctaaggaggactataccaagttcaacacgaaagatttgaagaccgaaaagaaaaacagcaagatgacagcggcacaaaaagctcttgcaaaggtggataagagcggtatgaaatcaatagacacatttttcggggtgaaaaacaagaagaaaattggaaaagtgtag

SEQ ID NO: 132660 - DNA, 774 bp, synthetic construct
  misc_feature 1..774: note = Description of Artificial Sequence: Synthetic coding sequence
  source 1..774: mol_type = other DNA
atggcagccggcgtcgattgcggtgacggggtgggcgcccggcagcacgtgtttcttgtatccgagtatctgaaggatgctagcaagaaaatgaaaaacggcctgatgtttgtgaagttagtcaatccctgttccggtgagggggcgatctacctgtttaatatgtgcctgcaacagctgtttgaggtgaaggtgtttaaagaaaaacaccattcctggttcataaaccagtccgtgcagtctggaggcttactgcatttcgccacacctgtggatcccctgtttcttttgcttcattacctgattaaggccgataaggagggcaagtttcagcctttggatcaggtcgtggttgacaacgtgtttccaaactgcatactgctcctgaagctccccggcctggagaaactgttgcatcatgttaccgaggaaaagggtaatcctgaaatagataataaaaagtactacaaatattccaaagaaaaaacactgaaatggctcgagaagaaagtgaatcagacagtggcggcccttaaaaccaataatgtgaatgtctccagccgcgtgcaatccaccgcgttcttctccggcgaccaggcctctactgacaaggaagaggactatattcggtacgcgcatggactgatcagcgactatataccgaaggaattgagtgacgatctgtctaaatatctgaaactgcctgaaccctctgcttcccttcctaacccaccctctaaaatggcagctcaaaggcagaagcgagggaaatag

SEQ ID NO: 132661 - DNA, 996 bp, synthetic construct
  misc_feature 1..996: note = Description of Artificial Sequence: Synthetic coding sequence
  source 1..996: mol_type = other DNA
atggcagccggcgtggattgtggggacggcgtcggtgcccgccagcatgtgtttctcgtgtccgagtatcttaaagatgccagtaagaagatgaagaatggtttaatgttcgtcaaactggtcaacccgtgtagcggggaaggagctatctatttatttaatatgtgcctacagcagctgttcgaagtgaaggtgtttaaggagaagcaccactcctggtttattaaccaatctgtacagtccggcggcctgctccattttgccacgcctgtggatcctctctttctcctgctccattacttgatcaaggctgacaaggagggtaagttccagccgctggatcaagtcgtcgtcgacaatgtgtttcccaattgcatcttgctgctaaagcttccaggtttggagaagctgcttcaccatgttaccgaggaaaaaggcaatccggagatagacaacaagaagtactataagtactcgaaagaaaagactttgaaatggctggagaagaaagtgaatcagaccgtggcagcactgaagaccaataacgttaacgttagctcccgagtgcaatcaaccgccttttttagcggagatcaggccagtactgacaaagaagaggactacatcaggtatgcacacggcctcatcagtgactacatcccaaaggagcttagtgatgatttatcgaaatatctgaagttgcccgagccaagtgctagtctacccaaccctccctccaaaaaaataaagttgagtgacgagccagtggaggcaaaggaggattacacaaaatttaacacgaaggacctcaagaccgagaaaaaaaacagtaaaatgactgcggctcaaaaagccctggccaaagtcgacaagagtggcatgaaatctattgatacttttttcggcgtgaagaaaaagctggaacgcttcgagaccttgaaaatcaagtccagcaagaatatttgttttctccacgtgtctgtctgccctagctag

SEQ ID NO: 132662 - DNA, 495 bp, synthetic construct
  misc_feature 1..495: note = Description of Artificial Sequence: Synthetic coding sequence
  source 1..495: mol_type = other DNA
atggagtccggcgacgaggctgccatcgaaagacaccgagtgcatttgcggagtgccactcttcgagacgccgtgcctgccacactgcatttgctgccgtgcgaagtagctgtcgacggacccgccccagtgggcaggttctttacgcccgcgataagacagggacccgagggcctggaagtgtcctttaggggtagatgcttgcgtggggaagaggtcgccgtcccccctggtctggtgggttacgtgatggtcaccgaggaaaagaaagtgtctatgggaaaacccgatcccctcagagattctgggactgatgatcaagaagaagagccactggagcgggacttcgatcgtttcattggtgcaacggcgaacttcagccgattcaccctctggggcctcgaaaccatcccaggccccgacgccaaggtccgaggcgcactaacgtggccatccctggcagccgcaatccatgctcaagtgcctgaggattag

SEQ ID NO: 132663 - DNA, 2226 bp, synthetic construct
  misc_feature 1..2226: note = Description of Artificial Sequence: Synthetic coding sequence
  source 1..2226: mol_type = other DNA
atggagtctcgagaccataataatcctcaggagggacccaccagctcatcaggtcgaagagcggccgtcgaagacaatcacctgctgataaaggcggtgcagaacgaagacgtggatctggtacagcagttgttagagggcggtgcaaatgttaatttccaggaggaagagggaggatggaccccgttgcataatgcggtgcagatgagtcgcgaagacattgttgaactgctgctccggcacggagccgatccagtgttaaggaagaagaatggggccactccattcatactggctgcgatcgctgggagtgtgaagctccttaaattgtttctttccaaaggcgccgacgtcaacgagtgcgacttctacggttttaccgcttttatggaggctgcagtctatggtaaggtgaaggccttgaaattcctgtataaaaggggtgctaacgtgaaccttaggcgcaagacgaaggaagaccaggagcggctgcggaaaggaggggctacggcactgatggatgctgcagaaaagggccacgtggaggtgttgaagatcctgctggacgagatgggagcagatgtaaacgcctgtgacaatatgggccgcaacgctcttattcacgcccttttgtccagcgacgattcagacgtagaagcaatcacacatttgttactggatcacggtgccgacgtcaatgtgagaggtgaacgaggcaagacaccgctgatactcgccgttgagaagaagcatctaggcctggtccagcgcctcctggagcaggaacacattgagattaatgataccgactccgatggcaaaaccgccctgctgctggcagttgaattgaagctcaagaagattgcggagctgctttgcaaacgtggggccagcacagactgcggggacttagtgatgactgcgagaaggaattacgaccacagtttagtaaaggtgctacttagtcatggagctaaagaagacttccatcctcccgccgaagactggaaacctcagtcctctcattggggcgctgcactcaaggacctccatcgcatctaccgtcctatgatcggaaagctgaagttcttcatcgatgagaagtataagatcgcggatacatcagaggggggcatttacttaggcttctatgagaagcaagaggtcgctgtcaagaccttttgcgaaggctccccccgggcccagcgcgaagtctcctgcctccagtcttctcgtgagaactctcacctcgtgaccttttatggatccgagtcccacagagggcacctgtttgtgtgcgtgactttatgcgagcagacattagaggcctgtctcgatgtccatagaggggaggatgtcgaaaatgaggaggacgaatttgccagaaacgtgctgtcttccattttcaaggcagttcaagaattacacttatcatgtggttatactcatcaggacctgcagccacagaacatactcatcgatagcaagaaggcggcgcacctggccgactttgataagagcatcaaatgggccggggatccccaggaggttaaacgcgatctcgaagatctcggaaggttggtgctgtatgtggtcaaaaagggtagtatcagcttcgaggacctgaaagcccagtcaaatgaggaggttgttcagttgtctcccgacgaggagacaaaggatctgatccaccgattgtttcacccaggagaacatgtgagggactgcctgtcggatctgctcgggcatcccttcttttggacatgggagagtcgctatagaacgctgcgcaacgtcggtaatgaaagcgacattaaaactaggaagagcgaatccgagatcctccgcttactccagccaggcccaagtgagcattccaaaagcttcgacaagtggacgacaaaaattaacgaatgcgtgatgaagaaaatgaacaagttctatgaaaagcgaggaaatttctatcagaataccgtgggtgacctactgaagtttatacgaaatctcggggaacacatagacgaggagaaacacaaaaaaatgaagctcaaaattggcgatccctcgctctatttccagaagacatttcccgatctagtaatttatgtttacaccaagctgcagaataccgagtaccgcaagcatttcccccagacccatagcccaaacaaaccgcaatgtgacggagcgggtggcgcctcaggattggcaagccctggttgttag

SEQ ID NO: 132664 - DNA, 2226 bp, synthetic construct
  misc_feature 1..2226: note = Description of Artificial Sequence: Synthetic coding sequence
  source 1..2226: mol_type = other DNA
atggaatctcgagatcacaacaacccacaggagggccccacaagctccagcggacgcagggctgccgtggaggacaatcacctgcttataaaagcggtgcaaaatgaggacgtcgatctggtgcaacagctgttggaggggggagccaatgtgaactttcaggaggaggagggggggtggacgccgctgcataatgctgttcagatgtctcgggaggacatcgtagagctgctcctcagacatggagcagacccggtactccgcaagaaaaatggcgccaccccatttatcctggccgcaattgccggatccgtgaagcttcttaaattgttcctatctaagggagcagacgtgaacgagtgtgacttctatggatttacagcctttatggaggcagccgtgtacggaaaggtgaaggctctgaagttcttgtacaagcgcggcgcaaacgtgaacctacgaagaaagacgaaggaagaccaggaacgcctccgaaaggggggagctacggcactcatggatgccgcagagaagggacatgtggaagttctgaagatactgctggacgaaatgggtgctgatgtgaacgcctgcgataatatggggaggaatgccctcatacatgccctgctttcctccgacgatagtgacgtcgaagcgatcacccacctgcttctggaccatggggctgatgtgaacgtgcgcggagagcgaggcaagacacctttaatccttgcggtggagaagaagcacctgggtctcgttcaacggctgctggaacaggagcacatagagatcaatgataccgactcagatggcaagacggcgttgctcttggccgtggagctgaagctgaagaagattgccgagcttctgtgtaaaaggggcgcaagtaccgactgtggagacctggtcatgactgctcgacggaattacgaccacagcctcgtgaaggtgttgctttcccacggagctaaggaagacttccaccccccagctgaggactggaagccccaaagcagccactggggtgccgcgttaaaggatctccatcggatctatcggcctatgatcggcaagctcaaatttttcattgatgagaagtataagatagcggatactagcgagggcgggatctatttggggttttatgaaaagcaagaggtggctgtcaagactttttgcgaagggtcccctcgagcccagcgggaggtgagctgtctccaaagttctcgcgagaattcccacttggtgacattctacgggagtgagagtcacagaggtcacctgtttgtctgcgtaaccctttgtgaacagaccttggaagcctgtctggacgttcacagaggcgaggacgtggagaacgaagaagatgaattcgcaagaaacgtactatcgagcatattcaaggctgtgcaggaactacacttgtcctgtggctacactcatcaggatctccagccacagaatatcttaattgactccaagaaagctgcacatctggccgatttcgacaaatccataaagtgggccggcgacccccaggaagttaagagggaccttgaggatctgggaagactggtcctgtatgtcgttaagaaggggtctatctccttcgaagacctgaaagcgcagtccaacgaggaggtagtccagctgtcacctgatgaggagaccaaggatctcatccaccgccttttccatccaggtgagcatgtacgggactgcctctcagacttgctgggccacccattcttttggacttgggagtctcgatacagaacattaagaaacgtggggaacgagtccgacatcaaaacacggaagtcagaaagcgagatcttgcggcttctgcagcccggcccaagcgagcatagtaagtccttcgacaaatggactaccaaaatcaacgagtgtgtgatgaagaaaatgaataagttctatgaaaaaagagggaatttttaccaaaacacagtcggggacctgttgaaattcattcgcaatcttggagaacacatcgatgaggagaagcacaagaagatgaagctaaaaattggcgatcccagcctgtatttccaaaaaacttttcctgatcttgtgatctatgtgtacactaagctccagaacacggaatatagaaagcatttccctcagacacatagccccaataaaccacagtgtgacggtgcgggcggcgcgtccgggttagcaagtcctggatgctag

SEQ ID NO: 132665 - DNA, 1959 bp, synthetic construct
  misc_feature 1..1959: note = Description of Artificial Sequence: Synthetic coding sequence
  source 1..1959: mol_type = other DNA
atggagtcccgcgaccataacaacccacaggagggccctacgtcctcctcaggcaggcgcgcggccgtcgaggacaatcatttgctgatcaaggctgtgcaaaatgaggatgttgatttggtgcaacaattgctggaaggcggcgccaatgttaactttcaagaagaagagggtggatggactcctctccacaacgccgtacagatgagtagggaagacatcgtcgagctccttctaagacatggcgccgaccccgtgttacggaagaaaaacggagccacaccatttatcctggctgccatcgcgggctccgtgaaactgcttaaactgtttttaagcaaaggtgctgacgttaacgagtgcgacttttatggcttcaccgctttcatggaggccgccgtgtatggtaaagttaaagccctgaaattcctatacaaaaggggcgctaacgtcaacttgcgaaggaagactaaggaagaccaggaaagactacggaaaggcggcgcgactgctctgatggacgcagccgagaaggggcacgtcgaggtgcttaagatcctgctggacgaaatgggtgctgatgttaacgcctgtgataatatgggaaggaatgcactcatccacgccttgctgtcctccgatgattcagacgtcgaagccataacccacctgctgttagaccatggagccgatgttaatgtgcgcggcgaacgcgggaaaacacccctgatcttagctgtcgagaaaaagcacctggggctggtgcagcgcttgttggagcaggaacatatagaaatcaacgacacagactctgatgggaaaaccgctctgttgctggcagtggagttgaaactgaagaagatcgccgaacttctatgcaagcgcggagctagtactgactgtggagacctggtgatgactgcacggaggaactacgaccattcactggttaaggtgctgctgtcccacggcgctaaggaagattttcatccaccggccgaggattggaagccccaatcctcccactggggcgctgccctgaaggaccttcaccgaatttacaggcccatgataggtaagcttaaattttttatcgatgaaaaatacaaaattgcagatacatccgaaggtgggatctatctggggttctacgagaaacaggaggttgctgtgaaaactttctgcgagggctctccccgtgcccaaagggaagtatcctgccttcaaagttcacgagagaatagtcacttggttactttctatggcagcgaaagccaccgagggcatttgtttgtttgcgtgacactgtgtgaacagaccctcgaagcctgcttggatgttcaccgcggtgaagatgtggagaacgaagaagatgaattcgccaggaacgtgctgtccagtattttcaaagccgtgcaagagttacacctgagctgcggttatactcaccaggatctgcagccccagaatattctgatagactccaagaaggccgcccatctggctgactttgacaagtccataaagtgggcaggtgatcctcaggaggtaaaacgcgaccttgaagatctggggcgactcgttttatacgtggttaagaagggttccatttcctttgaggacctcaaggcccaatcaaacgaagaggtggttcaattgtctcccgatgaggagaccaaggatctgatccaccggcttttccacccaggggaacatgttagggactgtctgtcagacctacttggccacccctttttctggacttgggagagccgataccgtaccctccgcaacgtgggaaatgagtctgatataaagacacgcaagtctgagtctgagatcctgcggctgttgcagccaggcccaagcgaacatagcaagtctttcgacaagtggaccactaagatgagtaagctgaggcaccgccaaattatattcccaacaacacagaatcagtag

SEQ ID NO: 132666 - DNA, 465 bp, synthetic construct
  misc_feature 1..465: note = Description of Artificial Sequence: Synthetic coding sequence
  source 1..465: mol_type = other DNA
atgatagggaaattgaaattctttattgacgagaaatacaaaattgctgatacttctgagggtggcatttacctgggcttctatgagaagcaggaagttgccgtcaaaacattttgtgagggcagccctagggcacagagggaagtctcttgcctgcagagttcccgagagaacagccacctggtcaccttttacggaagcgaaagtcacagaggccacctgttcgtttgtgtgacgttatgtgaacagacactggaggcttgcttggatgtgcacaggggtgaggacgtagagaacgaagaagatgagttcgctagaaacgtgctgtcctccatctttaaagccgtgcaagaactccatctgagctgtggatatacgcatcaggatctccagccacagaatatactcatcgggccttggaccgcgggcccattgtgcggcaaggaggggaaacacctgatctag

SEQ ID NO: 132667 - DNA, 465 bp, synthetic construct
  misc_feature 1..465: note = Description of Artificial Sequence: Synthetic coding sequence
  source 1..465: mol_type = other DNA
atggctggccccgtcaaagaccgggaagcttttcaacgccttaatttcctgtatcaggctgcccactgtgtcttagcccaagaccctgagaaccaggcactcgctcgtttctattgttacacggagaggactattgcaaagagactggttcttagacgtgatcctagcgtgaagcgaacgctgtgccgtgggtgttcatctcttctcgttcccggactgacctgtacacagcgccagagaagatgtaggggccagcggtggacggtgcagacatgcctgacttgccaacgcagccagcgctttttaaacgatcctggacacctcttatggggcgaccgtccggaggctcagttgggatctcaggcagattccaagccactccaaccattgccaaacaccgcgcactcgattagcgataggctgcccgaggaaaagatgcagacccagggaagctcgaatcaatag

SEQ ID NO: 132668 - DNA, 489 bp, synthetic construct
  misc_feature 1..489: note = Description of Artificial Sequence: Synthetic coding sequence
  source 1..489: mol_type = other DNA
atggctggacccgtcaaggaccgcgaagccttccagcggttgaacttcctttaccaggccgcacattgtgtgcttgcccaggaccccgagaatcaggccctggcacgattttattgctacactgagagaaccatcgcaaaaagacttgtccttcgcaggccattatcctcctctgcaccacgggacccaagtgtgaagcgaactttgtgcagaggttgctcttcacttctggtgccgggcttaacctgcactcagagacagagaagatgccgcgggcaaagatggaccgttcagacgtgtcttacatgccagcgatcacagagattcctcaatgaccctggacacctgctgtggggagacaggcccgaggctcagttaggcagccaggccgactccaagcccctccaaccactgcccaataccgcccattcgatctctgatcgcttacccgaagagaaaatgcagactaaaggcagcagcaaccagtag

SEQ ID NO: 132669 - DNA, 534 bp, synthetic construct
  misc_feature 1..534: note = Description of Artificial Sequence: Synthetic coding sequence
  source 1..534: mol_type = other DNA
atggcaggcccagtgaaggatcgggaagcattccaaaggctgaattttctctatcaggtcagcctacgccagggaccccacggcgacggcgccagaagacccagggtgacggcgccgctgccccaagctgctcactgcgtgctggcacaggaccctgaaaaccaggctcttgcacgcttctattgctataccgagagaacaattgctaagcgcctcgtgctgcggagggatccttctgtgaagagaacactctgtcgtggatgctctagcctgctcgttcccggcctcacgtgtacccagcggcaacggaggtgcagggggcagaggtggactgtgcagacctgtctgacgtgtcaaaggtcacagagatttctgaacgaccccggtcacctcctttggggtgatcggccagaagcgcagttgggctcccaggccgacagcaagcctttgcagccacttcctaacaccgcgcactccattagcgacaggctgcccgaagagaaaatgcaaacccaaggctcctcaaaccagtag

SEQ ID NO: 132670 - DNA, 489 bp, synthetic construct
  misc_feature 1..489: note = Description of Artificial Sequence: Synthetic coding sequence
  source 1..489: mol_type = other DNA
atggccgggccggtaaaagatagagaggcttttcaacggttgaattttctgtaccaagctgcccactgcgtcctagctcaggaccccgaaaaccaggcactcgcacggttttactgttacacagagagaaccatagctaaacgtctcgtattgagaaggccactatctagttccgcgcccagggatccttccgtcaaacgcacactgtgtagaggctgctcctctttgctggtcccaggacttacttgcacccaccgtcagcggagatgcaggggccaacggtggaccgtccagacgtgcctgacctgtcaacgcagccagagatttctcaacgacccaggccacctgctatggggagatagacccgaggcacaactggggagccaagccgactccaagcctctgcaacctcttccaaacactgcgcattctattagcgacagactgcccgaggagaagatgcaaacccagggcagcagtaaccaatag

SEQ ID NO: 132671 - DNA, 534 bp, synthetic construct
  misc_feature 1..534: note = Description of Artificial Sequence: Synthetic coding sequence
  source 1..534: mol_type = other DNA
atggccggccccgtgaaggatagggaagctttccagcgactcaattttctttatcaggtttctctgcgacagggccctcacggcgacggcgctagacgaccccgagttactgctcccctgccgcaggcagcccactgcgtgctagcccaagaccccgagaaccaggccctggcgcgtttctactgttacacagaaaggaccatcgctaaacgactcgttcttaggagagaccccagcgtcaagcggactctgtgccgcggatgctcctcacttttggttccagggctaacttgcactcaaaggcagcgtaggtgccgggggcagaggtggacagtgcagacatgtctgacctgccaacgctcccagcggttcctgaacgatcccgggcatcttctgtggggcgataggcctgaagcgcagctgggctcccaggcggactcaaaaccattgcagccgttacccaatactgcccacagtattagtgatcggctgccagaagagaaaatgcagacgaagggctctagcaatcaatag

SEQ ID NO: 132672 - DNA, 465 bp, synthetic construct
  misc_feature 1..465: note = Description of Artificial Sequence: Synthetic coding sequence
  source 1..465: mol_type = other DNA
atggccggaccggtaaaagaccgagaagcatttcagaggcttaacttcttgtaccaagccgcccattgcgtattggctcaggatcccgagaaccaagccctcgcccgattctactgttacacagaaagaaccattgctaagcgtttggtcctgaggcgggatcccagcgtcaaaagaaccttatgtagaggctgctcctctctgttggttccgggcctgacttgtacccacaggcagcgtaggtgtcggggccaaagatggactgtccaaacttgtctcacttgtcagagatctcagcgcttcttaaatgaccctggccatctgttgtggggggatagaccggaagcccaactaggcagtcaagccgacagtaagcctctccagcccttgcctaacaccgctcatagcatttcggatcgactgcccgaagagaaaatgcagacacagggcagttcgaatcagtag

SEQ ID NO: 132673 - DNA, 435 bp, synthetic construct
  misc_feature 1..435: note = Description of Artificial Sequence: Synthetic coding sequence
  source 1..435: mol_type = other DNA
atggcagggcctgtcaaggaccgcgaggccttccagcggttgaacttcctgtaccaagccgcccactgtgtcctggcccaggaccctgagaaccaagcactggcccgattttactgctacacggagcgaactatcgccaagagactggtgcttaggcgagatccatccgttaaacggacgctgtgcagaggatgcagttctctgctggtgccggggctgacttgtacccagcggcagagaaggtgccgaggacagagatggacagtacagacctgcctgacatgccaaagaagtcagaggttcttgaatgaccccggccaccttttatggggcgaccgcccagaggcccagctgggaagtcaggccggagaacggttccagaccaccacaaccctggctaaacactccccactgcacttcaggcccccctcgtag

SEQ ID NO: 132674 - DNA, 465 bp, synthetic construct
  misc_feature 1..465: note = Description of Artificial Sequence: Synthetic coding sequence
  source 1..465: mol_type = other DNA
atggctgggccagtaaaagatcgggaagcatttcagcgactgaattttctgtaccaggctgcccactgcgtacttgctcaagatcccgagaaccaggcactggccagattctattgctacacagagcggacaatcgccaagcgcctggtcctacgcagggacccttccgtaaaaagaactctgtgcagaggttgttcatcattacttgtcccggggctcacatgcacacacagacaacgccgctgccgaggccagcgctggactgtccagacttgcctgacatgccagcggtcacaaagatttctgaatgatccaggtcaccttctgtggggagatcgtcccgaggcccaactcggatcgcaagcggactctaagccactgcagcccctgcctaacaccgcccattccatctcagatagacttcccgaggaaaagatgcaaacacagggatcatcaaatcagtag

SEQ ID NO: 132675 - DNA, 465 bp, synthetic construct
  misc_feature 1..465: note = Description of Artificial Sequence: Synthetic coding sequence
  source 1..465: mol_type = other DNA
atggcgggccctgtcaaggatcgcgaagccttccaacggctcaattttctgtatcaagcggcccactgcgtgcttgctcaagatccggagaatcaagccctggctcgcttttactgctacacagagagaacaattgcaaaaaggctggtgcttcggcgagatcccagcgtgaagcggacgctttgtagggggtgtagttctctgctcgtccccggcctgacgtgtactcagagacagcggaggtgtagaggacagcggtggacagtacagacgtgtctcacctgtcaacggtcccagagattcttaaacgacccaggccatttgttgtggggcgatcgcccagaggcacagctgggctcccaagcggacagcaagcccctgcagccactacctaataccgcccatagcataagtgatcggttgcctgaggaaaaaatgcagaccaagggcagctccaaccagtag

SEQ ID NO: 132676 - DNA, 534 bp, synthetic construct
  misc_feature 1..534: note = Description of Artificial Sequence: Synthetic coding sequence
  source 1..534: mol_type = other DNA
atggccggtccagtgaaagatcgcgaagccttccaacggctgaacttcttataccaagtaagcctgagacagggcccccacggcgatggagcgagacggccacgggttacagccccgctgccacaggctgcacactgtgtcctggctcaggatcccgaaaatcaggctcttgcccgcttctattgctacactgagaggacaatagctaagaggttggtgctgaggcgtgatcctagcgttaaaaggaccttatgtagaggatgttccagtcttctcgttccagggttgacctgcacacaccgacaaagaagatgcagggggcaacgttggacggttcaaacgtgccttacatgtcaaagatctcaacgtttcctaaacgatcctgggcatttgctgtggggtgataggccggaggcacagttgggatctcaggcagattccaaaccactgcagcccctgcctaacactgcacattccataagtgaccggctgcccgaagagaagatgcaaacacagggctcctcaaatcagtag

SEQ ID NO: 132677 - DNA, 435 bp, synthetic construct
  misc_feature 1..435: note = Description of Artificial Sequence: Synthetic coding sequence
  source 1..435: mol_type = other DNA
atggcgggccctgttaaagacagggaggctttccaaaggttgaattttttgtaccaggcagcccactgcgtcttggcacaggaccccgagaaccaagctctggccaggttctattgttataccgagcgcaccattgccaaacggctggtgttgcgcagggacccatctgtgaaacgcactctctgcagaggctgctccagtcttctcgtcccaggtctaacctgcacacatagacagaggcgctgccgagggcaaagatggaccgtgcagacgtgtctgacctgccagaggtcgcagcgctttctgaatgacccaggtcatttactatggggtgatcgcccagaagcccagctgggcagccaggctggagaacgcttccagacaacgaccacgttagctaagcattcaccacttcactttaggcctcccagttag

SEQ ID NO: 132678 - DNA, 465 bp, synthetic construct
  misc_feature 1..465: note = Description of Artificial Sequence: Synthetic coding sequence
  source 1..465: mol_type = other DNA
atggcgggcccggttaaagacagggaggcctttcaacgcctcaatttcttatatcaagccgctcactgcgtgctggcacaagatccagaaaatcaggccctcgcgagattctattgttatactgagaggaccattgcaaagcggctggtcctccgcagagacccaagtgtcaagagaactctttgtcgcggttgcagctctctcttagtgccaggtttgacttgtacacagcggcaacgccgctgcaggggccagagatggaccgtgcaaacctgcctgacgtgtcagaggagtcaacgattcctcaatgacccgggccatctgctctggggagatagaccagaggcgcagctgggctctcaagcggacagcaagcctcttcagcccctgccgaacaccgctcactccatcagtgatcggcttccagaggagaaaatgcagactcaggggagcagcaatcagtag

SEQ ID NO: 132679 - DNA, 489 bp, synthetic construct
  misc_feature 1..489: note = Description of Artificial Sequence: Synthetic coding sequence
  source 1..489: mol_type = other DNA
atggcagggcccgttaaggaccgggaggccttccagcggctcaatttcctgtaccaggcagcccactgtgtccttgcacaggacccagaaaaccaggcattagctcggttttattgctacaccgaacgcacaattgcgaaaagattagtattaagaaggcccttatcgagctcagcaccacgagacccatccgtgaaaagaacactgtgccgggggtgctcaagcctcctcgtccccggtcttacctgcacgcagaggcaacggcgttgcagaggacagcgctggactgtccagacctgtcttacctgtcagcgaagccaacggttcctgaatgaccccggccacctgctctggggcgatagacctgaggcccaactgggctctcaggcagactccaaaccactccaaccactcccaaacaccgctcatagtatcagcgatcgattgcctgaagagaagatgcagactcagggtagttctaaccagtag

SEQ ID NO: 132680 - DNA, 435 bp, synthetic construct
  misc_feature 1..435: note = Description of Artificial Sequence: Synthetic coding sequence
  source 1..435: mol_type = other DNA
atggctggacctgtgaaagacagagaggccttccagcgccttaatttcctgtatcaggccgctcactgtgttctggctcaggacccagagaaccaagccctggcccgcttttattgttacaccgaaaggactattgctaagcgcctagtgttgagacgggatccctctgtgaaacgtacattatgtagagggtgctcctccctgctcgttcccgggctcacttgtacacacagacagcgacgatgcagagggcagcggtggaccgtccaaacatgcctgacgtgccagagaagtcagagatttctgaacgaccccgggcatctactctggggtgacaggccagaagcacaactgggatcacaggcaggtgaacggtttcaaactacaaccactctcgcgaaacacagtcctctgcactttagaccccccagctag

SEQ ID NO: 132681 - DNA, 534 bp, synthetic construct
  misc_feature 1..534: note = Description of Artificial Sequence: Synthetic coding sequence
  source 1..534: mol_type = other DNA
atggccggcccggtgaaagacagggaagctttccaacgcctgaactttctgtatcaagtgtctcttcgccagggacctcatggggatggtgcccggaggcctcgcgtcactgcccccctgccccaggccgctcattgcgttttggctcaggaccccgagaatcaggctttagcacgtttctactgttatactgagcgcacaatagcaaaaagactggtactcaggcgtgatcccagcgtgaagcgcaccctctgcagaggctgcagctctctgctcgtgcccgggctgacttgtacccagagacaaagacgatgtcgtggccaacgttggaccgttcagacttgcctgacctgccagagatcccagcgcttcctgaacgatcctggacatttgctatggggagaccgccccgaggcgcaattaggaagccaggctgacagtaagcccctccaaccgcttcccaacaccgcgcacagtatttctgatcggctgcccgaggaaaaaatgcagactcagggctcatcaaaccaatag

SEQ ID NO: 132682 - DNA, 489 bp, synthetic construct
  misc_feature 1..489: note = Description of Artificial Sequence: Synthetic coding sequence
  source 1..489: mol_type = other DNA
atggcgggtcccgtcaaggaccgcgaggcctttcagcgcctgaatttcttgtaccaagctgcccactgcgtactggcgcaggatccagagaaccaggctttagcccgattttactgttacactgagagaactatcgccaaacgcctggtcctcagaaggcccctgagctcaagtgctccaagggatcctagtgtgaaacgaaccttatgtcgagggtgcagttccctgctggtgccagggctaacctgtactcataggcagcgtcggtgccgcggccaacgctggaccgtacagacttgcctcacgtgtcagaggagtcagcgctttctcaacgaccctggccatctcctgtggggggatcgacctgaagcccagctggggtctcaggcagactcgaagcctctgcaacccctaccgaacacggcacactcaattagcgatcgcctccccgaggagaaaatgcagactcaggggtcttctaaccagtag

SEQ ID NO: 132683 - DNA, 534 bp, synthetic construct
  misc_feature 1..534: note = Description of Artificial Sequence: Synthetic coding sequence
  source 1..534: mol_type = other DNA
atggcaggccctgtgaaagaccgcgaggcatttcaacgtctgaactttctatatcaggtgtcccttagacaggggccccatggagatggggccagacgacctcgagtcacggcgccacttcctcaagccgcgcactgtgtgctggcacaagacccagaaaatcaggctttggcccgcttctactgctacacagagcggacgatagctaagagactggttctcagacgcgacccgtctgtgaaacgtacgctttgtcgcgggtgcagttccctactggtaccagggttaacttgcacgcagagacagcggagatgtagggggcagcgctggacagtccaaacctgcctcacttgccagcggagtcagcgctttctcaatgatcctggccatctactttggggggatcgccccgaggctcagttgggttcccaggctgacagcaagcctctgcagcccctgccaaatactgcccactccatctccgatcgccttcctgaggagaagatgcaaactcagggctccagtaatcagtag

SEQ ID NO: 132684 - DNA, 489 bp, synthetic construct
  misc_feature 1..489: note = Description of Artificial Sequence: Synthetic coding sequence
  source 1..489: mol_type = other DNA
atggccggtcctgtgaaggatcgcgaagccttccagagactgaatttcctctaccaagccgcacattgcgttctggctcaggaccctgaaaaccaggcccttgcccgattttactgctacaccgagcggacaatcgcaaaaaggcttgttctcaggagacctcttagtagttccgccccaagggatccttcagtcaaaaggacactgtgtcgcgggtgctccagtcttctggtcccaggcctgacctgcactcagcgccaacggcgctgtagaggccagcgctggacagtgcagacctgtctgacctgtcaacgaagccagcgttttcttaacgatcctggacacctgctgtggggagatagacctgaggctcaactgggaagtcaggccgactccaaacctttgcagccactgcctaacacagctcattccatctcagatagacttcccgaggaaaaaatgcaaacacagggatcctcaaatcagtag

SEQ ID NO: 132685 - DNA, 465 bp, synthetic construct
  misc_feature 1..465: note = Description of Artificial Sequence: Synthetic coding sequence
  source 1..465: mol_type = other DNA
atggctggacccgtaaaggaccgggaggccttccagagacttaacttcctgtaccaagctgctcactgcgtcctggcacaggacccagaaaaccaggctctcgctcggttctactgctataccgaaaggaccattgcgaaaagactggtactccgccgtgaccctagtgtaaagagaacactctgcaggggatgctcctcattgctggttcccggcctcacctgtactcatcgacaaaggcggtgtcggggccaaagatggacggtccagacctgcctgacctgccagcgaagtcagcggttcttgaatgatccagggcacctactgtggggagatcgccccgaggcgcaactggggtcccaagccgacagcaagcccctgcagcccctgccaaacacggctcactctatttcagacaggctccccgaagagaagatgcagacccagggctctagcaatcaatag

SEQ ID NO: 132686 - DNA, 435 bp, synthetic construct
  misc_feature 1..435: note = Description of Artificial Sequence: Synthetic coding sequence
  source 1..435: mol_type = other DNA
atggctggcccagtaaaagaccgtgaagcctttcaacgactcaattttctctaccaagccgcgcactgcgtgttagctcaggatccagaaaaccaggctcttgcacggttctattgttatactgagaggaccatcgcaaaacgcctagtattgaggcgagatccttccgtgaagcgcacattatgtagaggctgttcctcacttctggtgcctgggctgacttgtactcagcgccagcgaagatgcaggggacagcggtggacagttcagacgtgtttgacatgccagcggagccaacggttcctgaacgaccccggacatttgctgtggggggacaggcccgaggcccagttgggttcacaggcgggtgaacggtttcagacgaccactaccctcgccaagcattccccgctccacttccgcccaccaagctag

SEQ ID NO: 132687 - DNA, 435 bp, synthetic construct
  misc_feature 1..435: note = Description of Artificial Sequence: Synthetic coding sequence
  source 1..435: mol_type = other DNA
atggctggcccggtgaaggaccgggaagcctttcagagacttaattttctgtatcaagctgcccactgcgtgttagcacaggatcccgaaaaccaggcactcgctaggttttattgttatactgagagaactattgcaaagcggttagtgttgagaagagatccaagcgtgaaacgtactctgtgccggggatgttcctctctgctggtgccaggcctcacttgcacccagagacagaggaggtgcaggggccagcggtggactgtacaaacgtgtctgacatgtcagcgcagccagcgattcttgaacgaccctggacacctactctggggcgaccgaccagaggcccagctggggtcacaagccggcgagcgatttcagacaacaacaactctcgccaagcattcccccctacactttaggcccccgagttag

SEQ ID NO: 132688 - DNA, 435 bp, synthetic construct
  misc_feature 1..435: note = Description of Artificial Sequence: Synthetic coding sequence
  source 1..435: mol_type = other DNA
atggctgggccggttaaggaccgggaggccttccagcgactcaattttctctatcaggctgcgcattgcgtgctcgcacaggatcccgaaaatcaagcactagctaggttctattgttatacggagcgcaccattgcaaagcgcctcgtgctcagaagggacccctctgttaagcgcactctctgtagaggatgctctagcctgctggtcccgggtcttacttgcacgcaaagacagcgccggtgccgggggcagcgttggaccgtccagacgtgtctgacatgtcaacgctcccagagatttctgaatgatcccggccacctcctatggggcgacagacctgaagcccaattgggttcccaggccggtgagcggttccagacgacgaccacacttgcgaagcactcacccctgcattttcgccccccaagttag

SEQ ID NO: 132689 - DNA, 534 bp, synthetic construct
  misc_feature 1..534: note = Description of Artificial Sequence: Synthetic coding sequence
  source 1..534: mol_type = other DNA
atggccggcccagtcaaggatagagaggcattccagagactcaactttttatatcaggtatctctacgccagggaccccacggagacggagcgagacgccctcgcgtgactgcaccactgccccaagctgcccattgtgtgctagctcaggacccagagaaccaagccttggccagattctactgctacacagaaagaacaattgctaaaaggcttgtgctgcgcagagacccatctgtgaagagaaccctttgtagagggtgctccagccttttggtgcctggactcacttgcactcaccgccagcgccgttgtagaggccagcggtggaccgtgcagacctgtctgacgtgtcagaggtcccagagattccttaacgatcctgggcacttgctatggggggataggccggaagctcagctggggtctcaggcagatagcaagcccttgcagccactgcctaacacagcgcatagtatcagtgatcgactcccggaagagaagatgcagacacagggctccagcaaccagtag

SEQ ID NO: 132690 - DNA, 435 bp, synthetic construct
  misc_feature 1..435: note = Description of Artificial Sequence: Synthetic coding sequence
  source 1..435: mol_type = other DNA
atggccgggcctgtgaaagatagggaagccttccaacgcttgaattttttgtatcaagctgcacattgtgttctcgcccaggatcccgagaatcaagctctagcccgcttctattgctatacagagaggactatcgccaagcgactggtgctcaggcgtgatccatccgtgaagagaacactatgcaggggctgtagcagcctgcttgtccccggtttgacttgcacccaccgtcaacggcgttgccgggggcagcggtggacggtgcagacttgcctcacatgtcagcgatcccagaggttcctaaacgatcctgggcatcttctgtggggcgataggccagaagcccagttaggatcccaggccggtgagaggttccagacgacaaccacgttagctaagcacagcccgctccatttccggcccccctcgtag

SEQ ID NO: 132691 - DNA, 465 bp, synthetic construct
  misc_feature 1..465: note = Description of Artificial Sequence: Synthetic coding sequence
  source 1..465: mol_type = other DNA
atggccgggcccgtgaaggatagagaagctttccagcgactcaacttcctgtaccaggccgcccactgtgtcctggcccaggatcccgaaaaccaagctctggcccgcttctattgctacaccgagagaaccatcgccaaacgtttggttcttcgccgcgacccttctgtcaaacgaactctgtgcagaggatgctcatctctactcgtgcctggcctgacctgcacccagagacagcggaggtgcaggggacagcgatggaccgtccagacctgcctgacgtgtcagcggagccaaagatttctgaacgacccaggccatctcctgtggggggaccgccccgaagcacagctgggatcacaagctgattctaagccgctgcaacccctgcccaacacagcccatagtatcagcgacagattgcccgaggaaaagatgcaaacacaagggagctccaaccagtag

SEQ ID NO: 132692 - DNA, 534 bp, synthetic construct
  misc_feature 1..534: note = Description of Artificial Sequence: Synthetic coding sequence
  source 1..534: mol_type = other DNA
atggccggcccagttaaggatcgtgaggccttccaaagacttaattttctatatcaagtctccctccggcaaggaccccacggtgacggagcccgacggccacgcgtgactgcacccttgcctcaggctgcacattgcgtccttgcccaggatcctgagaaccaggccctggccagattttattgctacactgaacgtaccatcgctaagcgtcttgttctccgaagggatcctagtgtaaaaagaacactgtgcagaggctgcagcagtctactggttcctggcctcacgtgcactcacaggcagagacgctgccgcggacagaggtggaccgttcagacatgcttgacatgccagcgttcccaacggttcctgaacgacccgggacacttactctggggagatagacctgaggcgcagctcggctcacaggcagactctaaaccattgcaacccctccccaacaccgctcactccatctcagacagactccccgaggaaaaaatgcagacccaggggtcgtccaaccagtag

SEQ ID NO: 132693 - DNA, 489 bp, synthetic construct
  misc_feature 1..489: note = Description of Artificial Sequence: Synthetic coding sequence
  source 1..489: mol_type = other DNA
atggcagggcccgttaaagaccgggaagctttccaacgcctgaactttctgtaccaggccgcccactgtgttctagcacaggatccagaaaaccaggcgttggccaggttctattgttataccgaacgaaccatcgccaaacggttggtacttagacgccccctctcctcttctgcaccccgcgatccctccgtgaagaggacactgtgcagagggtgtagctctctcctggttcccggattgacctgcacccaaaggcagcgtcggtgtaggggccagcggtggaccgtgcaaacctgtttaacttgtcagaggagtcaaaggttccttaacgaccccgggcatcttctctggggcgatagacctgaagcccaacttggctcccaggccgacagtaaaccactgcaaccactgcccaacacagcccatagcataagcgaccgcttacccgaggagaaaatgcagacacagggatcttctaaccagtag

SEQ ID NO: 132694 - DNA, 489 bp, synthetic construct
  misc_feature 1..489: note = Description of Artificial Sequence: Synthetic coding sequence
  source 1..489: mol_type = other DNA
atggccggccccgtcaaagatcgggaagcgttccaacgcctaaatttcctttatcaagccgcccactgcgtactcgcgcaagatcccgagaaccaagcgctggctagattttactgttacactgaaaggacaatcgcaaaacggctggtgctgcggaggcccttgtcaagctcggcccctcgggacccctccgtgaagcgcaccctctgtaggggctgttccagtctgctggtacctggcctcacctgtacacatcggcagagacggtgccggggccagcgatggaccgtgcagacttgtctgacatgccagagaagtcaacgctttctaaacgacccgggccacctgctttggggtgataggccagaggcgcagctggggagccaggccgattccaagcccctgcagcccctgccgaatacggcacacagcattagcgaccggctccctgaggagaaaatgcagacccaagggagctctaaccagtag

SEQ ID NO: 132695 - DNA, 765 bp, synthetic construct
  misc_feature 1..765: note = Description of Artificial Sequence: Synthetic coding sequence
  source 1..765: mol_type = other DNA
atggcggtctttgcagacctggacttgcgcgctggtagtgatttgaaggcactcagaggtttagtcgagacggccgctcatcgtgaattgccaaggttgcgggcttggcctacctcatgtcacccagaccaccgggcaactctccggataggctacagcgtcgtggccataaatcacatagtggacttcaaagagaagaaacaggaaattgagaaaccagtggcggtctcagagctgtttaccacgctgccaatagtacaaggcaagagcagaccaatcaagatcttgacaaggctgaccattattgtctccgatcctagccactgtaacgtgctgcgagcgacatcaagccgggccaggttgtatgacgtggtcgcagtgttcccgaaaactgagaaactcttccacatcgcctgcactcatctggacgttgatctggtctgtatcaccgtaactgagaagctacccttctacttcaagcgaccacctattaatgttgctatcgatcgcggcctggcattcgagcttgtgtattctcctgcaatcaaggattcaactatgagacggtacaccatctccagtgctctgaacctcatgcaaatttgtaaaggtaagaatgttatcatttctagtgccgccgagagacctctggagatccgagggccttatgatgtggcaaaccttggcctgctctttgggctgagcgagagtgacgccaaagctgccgtgtctacaaactgtcgagccgctctgctgcatgggtag

SEQ ID NO: 132696 - DNA, 807 bp, synthetic construct
  misc_feature 1..807: note = Description of Artificial Sequence: Synthetic coding sequence
  source 1..807: mol_type = other DNA
atggccgtattcgccgacctggatttgcgggctggatccgacctgaaggcactccggggcttagttgaaacagccgcccacttgggatacagcgttgtggcgataaatcatattgtcgacttcaaagagaaaaaacaggaaatcgagaaacccgttgcagtctccgagctcttcactaccctgcctatcgtgcagggaaaatctcgccctattaaaatcctcaccagattgacaatcatagtgtctgatccctcacattgcaatgtcctgcgggcaacatcctccagggcgaggctctacgacgtagttgctgtgtttcccaagaccgagaagctcttccacattgcctgtacacatttggacgttgatctggtgtgtataaccgtgacagagaaactccctttctatttcaagagaccccctataaatgtggccatcgaccgcgggttggctttcgaactggtgtattctccagccatcaaggactctacaatgcgacggtacaccatcagttcagctttgaacctaatgcagatatgcaaggggaagaatgtgattatttcttccgcagccgaaaggccgcttgagatccgcggcccatatgacgtggccaatcttgggctgctattcggacttagcgagagcgatgccaaagctgcggtgagtacaaactgcagggcggccctgttacacggggagacaagaaaaacggcctttggcattatttcgaccgtaaagaagcctcggccttcggaaggtgacgaggactgcctcccagcatcaaaaaaagcaaaatgcgaagggtag

SEQ ID NO: 132697 - DNA, 768 bp, synthetic construct
  misc_feature 1..768: note = Description of Artificial Sequence: Synthetic coding sequence
  source 1..768: mol_type = other DNA
atggcagtgttcgccgacctggacttgagagctggaagtgatctgaaagctctgagaggcctggtagagaccgccgcccacctcgggtattccgtggtggcaattaatcacatcgttgatttcaaagagaaaaagcaagagatcgaaaaacccgttgcagtgagcgagctattcactacgctgcctatcgtgcagggcaagtcgagaccgataaaaatactcaccaggttgaccatcatcgtcagcgacccttcacattgtaatgtgctcagggcaacttcaagtcgggcccgcctgtacgacgtcgtggcagtgttcccaaagactgaaaaactattccacatcgcctgtacgcatctcgatgtggacctggtctgtatcacggtgacagagaagttacccttttactttaagaggcctcctatcaatgttgccattgacagaggcctggctttcgaattagtctatagccctgcaattaaggattcaacaatgcgccggtacactatcagtagtgccctgaacttgatgcaaatatgtaagggcaagcctttggaaatcagaggcccttatgacgtggcgaatctgggactcctttttggccttagcgaatctgacgcaaaggcggccgtgagcaccaactgtcgagccgctcttcttcacggagagactagaaagacagccttcggtataattagtaccgtgaaaaagccaaggccttccgagggggacgaagactgcctgcccgccagcaagaaggccaagtag

SEQ ID NO: 132698 - DNA, 969 bp, synthetic construct
  misc_feature 1..969: note = Description of Artificial Sequence: Synthetic coding sequence
  source 1..969: mol_type = other DNA
atggcagtgttcgctgatctggacctaagagcgggcagcgacctgaaggcactgagggggctggtggaaaccgcagcgcatctgggatattcagtggttgctattaatcacatcgtggacttcaaggaaaagaagcaagaaattgagaaaccagtcgctgtatctgaactgttcacgacactgcctatagttcagggcaaaagtcgccccattaaaatactgactaggctgaccataatagtgagcgacccttcccactgcaacgtcctgcgggccacatcctcacgcgctcgactgtacgacgtagtggcagtgtttccaaaaaccgagaaactgtttcacatcgcttgcacccatctggacgtggatctggtgtgcattacagtgactgagaagttgccattctactttaagcggcccccaatcaacgtggcgattgatcgggggttggctttcgaactggtctactctcccgcaattaaagactcaacgatgagacgttatacgataagctctgctctgaatcttatgcagatatgcaagggtaagaacgtgattattagttcagcagcggagcgccccctagagatacggggaccctacgatgtggctaacctgggtctgctttttgggttgtcagaatccgacgccaaggccgccgtgtccacaaactgcagagcagctctcctgcatggggagacccggaagaccgcattcggcataattagcaccgtgaaaaagccaaggccctctgaaggcgacgaggactgcttacctgcgtcaaagaaggcgaagtggagccattcagttactcaggccggcgtgcagtggcataacctgggtagtttacagcctctgccgttgggcctgaaaccatcatcgcatctttctctcccaaggaccaggatccaacagagacagctgctgatctctcatcagcgagaccacacgccaaagaaccgcctgtag

SEQ ID NO: 132699 - DNA, 639 bp, synthetic construct
  misc_feature 1..639: note = Description of Artificial Sequence: Synthetic coding sequence
  source 1..639: mol_type = other DNA
gaaattgaaaagcctgttgccgtgagcgaattgtttacaactctgcccatcgtgcagggcaaatctagaccaattaaaattctgaccaggctgaccattatcgtgtccgacccatcacactgcaatgtgctgagggccacctcaagtcgcgctagattgtatgatgtggtcgccgtatttccgaagacagaaaagctctttcatatcgcatgcacgcatctcgatgtggaccttgtttgcattaccgtgaccgaaaaattgcccttctatttcaagcgtccaccgattaacgtggccatcgacagaggcttggcctttgagctggtgtacagtccagccatcaaggattctacaatgaggcgctatacaatctcttccgctctaaatctcatgcagatctgcaaggggaaacctttagaaattcgagggccatatgatgtcgctaatctggggttactgtttggactctccgaaagcgatgccaaggccgccgtgagcaccaactgcagagccgctttgttacacggggaaacccgcaaaaccgcgttcggcataatctctaccgtcaagaaacctcgcccttctgagggcgacgaggactgcctgcctgcctcaaaaaaagcaaagtgcgagggctag

SEQ ID NO: 132700 - DNA, 852 bp, synthetic construct
  misc_feature 1..852: note = Description of Artificial Sequence: Synthetic coding sequence
  source 1..852: mol_type = other DNA
atggccgctgccccacaggcccctgggagaggcagcctgaggaaaactcgccccctcgtagttaaaacgagtctgaataatccctacattatcaggtggtccgccttggaatccgaagatatgcacttcatactgcaaaccctcgaagataggttgaaagctattggcctgcagaaaattgaagacaaaaaaaagaagaacaaaacaccattcttgaaaaaagaaagccgagagaagtgcagtatcgctgtcgacatatctgagaaccttaaggaaaagaaaacggatgctaagcagcaagtgtccgggtggacccccgctcatgtccggaagcaactcgctatcggcgtaaatgaggtgacccgcgccctagagcggagagagctgcttttagtgctagtctgtaaaagtgttaagccggcaatgatcacttcccatttgatccaactctctctgtcacgaagcgtacccgcttgccaggttccaagacttagtgagcggatcgcccctgtgatcggcttgaaatgcgtgcttgcactagcctttaagaaaaacacaaccgatttcgtggatgaagtgagggctataatccccagggtgccgtcgctgtccgtgccttggctgcaggaccgcatcgaggattctggcgagaacctcgagacagagccactggaaagccaggatcgtgagttactcgacactagcttcgaagacctgtccaagccgaaaagaaaacttgcagacggaaggcaggcttcagtcacactacaacctttgaaaatcaagaagcttatacctaatcctaacaaaattcgcaaaccccccaaatctaagaaagcgaccccaaagtag

SEQ ID NO: 132701 - DNA, 504 bp, synthetic construct
  misc_feature 1..504: note = Description of Artificial Sequence: Synthetic coding sequence
  source 1..504: mol_type = other DNA
atggcagccgccccccaggccccaggtcgaggatctctacggaaaacccggcccctggtcgtgaaaacctctctcaacaacccctacatcattcgctggtcagccctagagagcgaggatatgcacttcattttacaaaccctagaagaccgactcaaagctattggcctacagaagatcgaagacaaaaagaagaaaaacaagaccccttttctgaagaaagagtcgcgcgagaaatgttctattgcggtggatatttcagagaacctgaaggaaaagaagactgatgccaaacagcaggtttccggatggacacccgctcacgtgcggaagcagctagcaatcggtgtgaatgaggtgacacgagcactagaaagaagggaactcctgctcgttctagtgctgacactgctcccccggctagagtgttctggggtgatcccagcacactgcaacccagcctcttgggtgcaggcgattctgctgccgcagccgccggaatag

SEQ ID NO: 132702 - DNA, 852 bp, synthetic construct
  misc_feature 1..852: note = Description of Artificial Sequence: Synthetic coding sequence
  source 1..852: mol_type = other DNA
atggcggcagcaccccaggcacccggtagaggctccctgcgtaaaacaaggccacttgtggtgaagacgagcttaaataacccttacattattagatggtcagcactcgagagcgaagatatgcacttcattctgcagacactcgaagatcgcctgaaggccatagggctgcagaagattgaagacaagaagaaaaagaataagacacccttcctgaagaaagagtcgcgggaaaagtgctccatcgctgtagacattagcgaaaacttaaaagagaagaagacggacgctaagcagcaagtgagcggatggacgcccgcacacgtgcgaaagcagctagccatcggggttaacgaggtgaccagggctctcgagcgcagggaattgctgctagtgctggtgtgcaagtcagtcaaacctgcgatgattaccagccatctgatccagctgagcttgtcacggtctgtgccagcctgtcaggtccctcgcctctctgaaaggatagcccccgtgatcggattgaagtgtgtgctggcactggccttcaaaaaaaacactactgactttgtggatgaagtgcgcgcaatcattccccgcgtgccttccctttccgtgccctggctccaggaccggattgaagatagtggggagaacctagaaaccgagcccctcgagtcccaggatcgggaactgttagacaccagcttcgaagacctgtctaagcccaaaagaaaattagcagatggtagacaagcctctgtgactctgcaaccattgaaaataaaaaagctcataccaaaccccaacaagattcggaagccacccaagagcaaaaaagccacaccgaaatag

SEQ ID NO: 132703 - DNA, 852 bp, synthetic construct
  misc_feature 1..852: note = Description of Artificial Sequence: Synthetic coding sequence
  source 1..852: mol_type = other DNA
atggccgctgcccctcaagcgccaggccgtggctctctaaggaaaactcggcctttagtcgtgaaaacatctctgaacaacccctacattatacggtggtccgcgctggagtccgaggacatgcattttattctccagaccctcgaagacaggctcaaggctatcggcctgcagaaaatcgaagacaaaaaaaaaaagaacaaaacacctttcctcaagaaagagtcaagggagaaatgtagtattgccgtagacatttcagaaaatcttaaggagaaaaagactgacgctaaacagcaagtctccggatggactcccgcccacgtgcgcaaacagctggctatcggcgtcaatgaggtgactcgcgcactggagagacgcgaactgttacttgtgctggtgtgcaaatccgtaaagcccgcaatgattacaagccatttgatccagctgagcctttcccgctctgttcccgcttgtcaggttcccagactgtctgaacggatcgccccagtgatcgggttgaagtgcgtattagcactggcctttaagaagaacacaaccgacttcgtggatgaagtacgggctatcatccctagagttccctccctgagtgtcccctggctacaggaccgcatcgaggattctggcgaaaatctggagacagaacctctggagtctcaggatagggagctcttggataccagctttgaggacctgagtaaacctaaacgaaagctcgcagatgggcgccaggcatctgtgaccctgcagcctctgaagatcaagaagttaattcctaacccaaataaaatccgcaagcctcctaagagtaagaaagctacccctaagtag

SEQ ID NO: 132704 - DNA, 510 bp, synthetic construct
  misc_feature 1..510: note = Description of Artificial Sequence: Synthetic coding sequence
  source 1..510: mol_type = other DNA
atggctgccgcacctcaggctccaggccgagggagcttaagaaaaaccagacccctcgttgtgaaaaccagtctcaacaatccgtacataataaggtggtctgcactggaaagcgaagatatgcactttatacttcaaacgttagaggataggctcaaagcaatcggactccagaagatcgaagacaaaaaaaagaagaacaaaactcctttcctgaaaaaagagtctagggagaaatgttcaattgccgtggatattagcgaaaatttaaaagagaaaaaaactgacgctaagcaacaggtgagcggttggacacccgcccatgtgaggaaacagctggcaattggcgtcaacgaagtaactagagccctggaaaggagagagctgttgctcgtcctcgtctgtaaatctgttaaacctgctatgataactagccatttaatacaactgtccctctccagatccgtgcccgcatgccaggtgccacgcttgagcgaacggatcgcctag

SEQ ID NO: 132705 - DNA, 1092 bp, synthetic construct
  misc_feature 1..1092: note = Description of Artificial Sequence: Synthetic coding sequence
  source 1..1092: mol_type = other DNA
atggctacccttcggagactgcgagaagccccaagacacctgcttgtctgcgaaaagtccaactttggaaaccataaatctagacacagacacctggtgcagacccactattacaattaccgagtgagctttctgatcccagaatgcggaatactctctgaggagctaaaaaatctggtgatgaacacagggccttactattttgtaaagaacctgcccctacacgagctgatcacacccgaatttataagcacttttattaagaaaggctcttgctatgccctaacttacaatactcacatcgatgaggataatactgtagccctgctcccaaatgggaaactgatcctgtccctcgataaagacacctacgaggaaactggtctccagggccaccccagtcaattcagtggccggaaaataatgaaatttatcgtgagcatcgacctgatggaactgtctctcaacctggactctaaaaaatacgagagaatctcttggtcatttaaggagaaaaaacctctaaaatttgactttctgttggcctggcacaaaaccggtagtgaggagagtacgatgatgagttatttcagcaagtaccaaatccaggaacaccagcctaaggtggccctctctactttacgcgatctgcaatgtcccgtactgcagtcatcagagctggagggtaccccagaggtctcctgcagggcgttggagcttttcgactggttgggcgctgttttcagcaatgtggacttgaacaatgaacctaacaattttatttcgacttactgctgtcccgaaccaagcaccgtggtggctaaggcgtatctttgcacaatcactggcttcattctgccggaaaagatctgtctcctgctggaacacctctgtcactactttgatgaaccaaagctggcgccctgggtgacactgagtgtgcagggattcgccgacagtccagtcagctgggagaagaatgaacatggatttagaaaaggtggcgagcatttgtacaatttcgtcatctttaataatcaggactactggttgcagatggcagtgggagctaatgatcattgccctccatag

SEQ ID NO: 132706 - DNA, 912 bp, synthetic construct
  misc_feature 1..912: note = Description of Artificial Sequence: Synthetic coding sequence
  source 1..912: mol_type = other DNA
atgaatactggtccctattattttgtcaaaaacctccccctccacgagctgatcactcccgagttcatctcaactttcattaagaagggaagttgctacgctctgacttataacactcacattgacgaggacaacacagtggctttattacctaatggtaaactgatcctctcgttggataaagatacttatgaggagactggcttgcaaggacacccctcacagttctcaggaaggaagataatgaagttcattgtgagtatcgacctcatggagctcagcctcaatctggattccaagaaatatgagcgcatttcctggagcttcaaggagaaaaagcccctcaaatttgattttttattggcttggcacaagacagggtctgaggagagtactatgatgtcttatttctcgaaataccagatccaagagcatcagccgaaagtagcgctctccaccctgcgcgatctgcaatgccctgttctgcagtcgtctgagcttgagggcactccggaggtgtcatgtcgtgccttagagctctttgattggctgggtgcggtgttttcaaacgtcgatttgaacaacgagcctaataactttatcagtacatattgttgtccagagccttcaacggtcgtggcaaaggcatacctgtgtaccataacaggttttattctgcccgagaaaatttgcctcctcctggagcatctgtgccattacttcgacgagcctaaactggcaccttgggttactcttagtgtgcaaggctttgcagactctcccgttagctgggagaagaatgagcacgggttcagaaagggtggtgagcacttatacaattttgtcatatttaataaccaggattattggctgcagatggccgtcggggcgaatgatcattgtccaccttag

SEQ ID NO: 132707 - DNA, 717 bp, synthetic construct
  misc_feature 1..717: note = Description of Artificial Sequence: Synthetic coding sequence
  source 1..717: mol_type = other DNA
atgagaccagccgccctgcgcggagccctattgggttgcttatgcctggccttgctgtgcctcgggggggctgacaagcggctcagagacaatcacgagtggaagaagttaattatggtgcagcattggcccgagacagtgtgcgagaagattcagaacgactgccgggacccacctgattattggactatccacggactgtggccagataagagcgagggctgcaaccgatcttggcctttcaacttggaagagatcaagaagaactggatggagatcactgactcgagcctaccatctcccagcatgggacccgcccctcctcggtggatgcggtcgacaccccgacggagcacactggccgaggcctggaacagcacggggagttggactagtacgggaggttgtgctcttccccctgctgcattgccaagcggggatttgtgttgtcgtcccagtctgacggctggctcccgtggggtgggggtggacttgaccgccttgcagcagctgctccacgtccactacagcgccactggcattattcccgaagaatgtagtgaaccaactaagccctttcagattatactgcaccatgaccatacggagtgggttcagagcattggtatgccaatctggacgatatcatcatctgaatctgccattggcaaaactcgcacccagccagcatgcgcagtgctaagccacgattcttag

SEQ ID NO: 132708 - DNA, 624 bp, synthetic construct
  misc_feature 1..624: note = Description of Artificial Sequence: Synthetic coding sequence
  source 1..624: mol_type = other DNA
atgagaccggcagcactccggggggccctccttggctgtctttgcctggccttgctttgtctcggaggggctgataaacggctcagggacaaccacgagtggaaaaagcttataatggtccaacattggccggagaccgtgtgtgagaagatccagaatgactgtcgcgacccccctgactactggacaattcacggcctctggccagacaagtctgagggctgtaatcgcagctggccctttaacctggaagagatcaaaaagaattggatggagatcacagactcttccctgccaagcccgagcactgatctgctgcccgaaatgagagcatattggcccgatgtgattcacagcttcccaaatagaagtaggttttgtgggacttgtgccgcccaggtggatgccctcaacagccagaaaaagtattttggccgctcgctcgaactgtatagggagctagacttgaataggtgggtgaggccatcacccggctgtacaagccaatggggtagcctcctgtctcccaaaccagattcatggatccaaggttcaggctgcaggcctcactgtccgcccgcagcttccgcatgcgctctcttcggatactgggatcatagctag

SEQ ID NO: 132709 - DNA, 921 bp, synthetic construct
  misc_feature 1..921: note = Description of Artificial Sequence: Synthetic coding sequence
  source 1..921: mol_type = other DNA
atgagacctgccgcactccgaggagctctgcttgggtgtttatgcctggccctgctgtgcctgggcggcgctgacaaacggctccgagataaccatgaatggaagaaactgatcatggtacagcattggccggagactgtgtgtgagaaaatccagaacgactgtcgtgaccctcccgactattggactatccacggactgtggcaagtgagccacacctcacgaagagggctgctgttcctattcaagaatatcttctccctttcgtcgcgtaatttttcattctattccctacaaacatcaatgaaaaagcccccccagccaagcctgatattcttaattttctcattcaaacccgataagtccgaaggttgtaacaggtcttggccatttaatcttgaggaaattaaagacctcttgcccgaaatgcgtgcttactggccagatgtaatccactctttcccgaaccgctctcggttctggaaacacgaatgggaaaaacacggaacctgtgccgcccaagtggacgcgctgaactcgcagaagaagtattttgggaggtctctggagctgtaccgggagttagacttgaactcagttctcctcaagctgggcattaaaccctccataaattactatcaagttgcggactttaaggatgcattagctcgagtgtacggcgttatccccaaaatccagtgtttacccccatcccaagacgaggaggtgcaaactatagggcagatagagctgtgcctcactaaacaggaccaacagctgcagaactgtacggaacccggtgaacagccttcacccaaacaggaggtttggctggcaaacggtgcagctgagagccggggattgcgcgtctgtgaggatggacccgttttctaccccccccctaaaaaaacaaaacactag

SEQ ID NO: 132710 - DNA, 771 bp, synthetic construct
  misc_feature 1..771: note = Description of Artificial Sequence: Synthetic coding sequence
  source 1..771: mol_type = other DNA
atgagacccgctgcgttgaggggcgccttgctcggttgcctgtgcctcgctctcttatgtctcggcggggccgataaaaggcttcgagacaaccacgaatggaaaaaactgatcatggtccagcattggccagagactgtctgcgaaaagattcaaaacgattgtagggacccacctgactactggactatacacgggctgtggcccgacaagtcggaagggtgcaataggagctggccattcaatctcgaggagatcaaggatctgttgccagaaatgcgagcttactggcccgacgtcattcactcctttccaaaccggagtcggttctggaaacatgaatgggagaagcacggcacatgcgcggcccaggtggacgccctgaacagtcagaaaaagtacttcggtcgctctctggaactgtaccgggaactcgatctgaacagtgtgttactcaaattaggcatcaagccctcaatcaactattaccaggttgccgacttcaaggacgctttggctagggtttatggtgttatccctaagatacagtgccttcccccatctcaggacgaagaggtgcagacaattggtcagattgaactatgcttgaccaagcaagatcagcaactgcaaaactgcaccgaacctggagaacagcctagcccgaagcaggaggtgtggctagcgaacggggccgccgagagtcgagggctgcgtgtctgtgaggatggccctgtgttttacccaccgcccaagaaaactaaacactag

SEQ ID NO: 132711 - DNA, 765 bp, synthetic construct
  misc_feature 1..765: note = Description of Artificial Sequence: Synthetic coding sequence
  source 1..765: mol_type = other DNA
atgagacctgcagcgctgaggggagctctgctgggttgtctgtgcctcgctctgttgtgcctgggtggcgcagataaaagactgagagacaaccacgaatggaagaagctcatcatggtacagcactggcccgaaaccgtctgtgagaaaatccaaaacgactgccgtgacccccccgactactggacaattcacggtctttggcctgataagagcgaaggatgcaaccgtagctggcctttcaatctagaggagatcaaggacttgctcccggaaatgagagcctactggccagatgtgatccattcgttcccgaatcggtcgcggttctggaagcacgagtgggagaaacatggcacctgtgccgcgcaggtggatgctctgaacagccaaaagaaatactttggtcgctctttggaactctatagggaattggatctaaactctgtgctgcttaaactgggcattaagccttctattaattattatcaggtggctgactttaaggatgcgcttgcaagagtgtatggcgtaattcccaagattcagtgtctgccacccagccaggatgaagaggtccagacaattggacagatcgaactctgcctaacaaagcaggaccagcagctgcaaaactgcactgagcccggcgagcaaccttcccccaagcaggaggtttggcttgcaaacggcgcagcagaaagccggggcctgcgggtctgtgaggatggccctgtcttctatcccccaccaaaaaaaacctag

SEQ ID NO: 132712 - DNA, 771 bp, synthetic construct
  misc_feature 1..771: note = Description of Artificial Sequence: Synthetic coding sequence
  source 1..771: mol_type = other DNA
atgcgcccggccgccttgagaggcgcccttctgggctgtctgtgcctggccttgctgtgtcttgggggcgccgacaaaaggttacgcgataaccatgagtggaaaaagctcatcatggtacaacactggcctgagaccgtgtgtgagaagatccagaacgactgtagggacccccctgattactggactattcacgggctgtggcccgataagagcgaaggctgcaaccggagctggcctttcaacctagaggagataaaggatctgctaccagagatgcgcgcctattggcccgacgtgatccatagctttcctaaccggagtcgattttggaagcatgaatgggaaaagcatggaacatgcgccgcgcaggtagatgccctgaactcccaaaaaaaatactttgggcggtccctcgagctatatcgggaactcgatctgaactcagtcctacttaagctgggaatcaagccctcaattaattattaccaggtagcggactttaaggacgcattagcgcgagtctatggcgtgattccaaagatccagtgcttgccaccctcccaagacgaagaggtgcagaccataggacaaattgaattgtgtctgacaaagcaggatcagcaacttcaaaattgtaccgagcccggagagcagccttccccaaagcaagaagtctggctggcaaacggagcagccgaatccagaggactacgtgtctgtgaggatggccctgtcttctaccctccaccgaagaagacaaagcactag

SEQ ID NO: 132713 - DNA, 471 bp, synthetic construct
  misc_feature 1..471: note = Description of Artificial Sequence: Synthetic coding sequence
  source 1..471: mol_type = other DNA
atggctcttgagaaatctctcgtgagactgctgctccttgtgctcattctcctggtacttgggtgggtgcagcccagcctgggtaaagaatcgcgggctaagaagttccagagacagcacatggactcggattccagtccttcgagctcttcaacttactgtaaccagatgatgcgacggcggaatatgacacaagggagatgcaagccagtcaacacctttgtccacgagcctctggttgatgttcaaaacgtttgtttccaagaaaaggtgacatgcaaaaacggtcagggaaactgttataagtccaattcttccatgcacatcactgattgcaggttaacaaatggtagccgctaccctaattgtgcctacagaactagccctaaggaaagacacatcatcgtggcttgtgaagggagcccctacgtcccagtccactttgatgcatccgtcgaagacagcacatag

SEQ ID NO: 132714 - DNA, 471 bp, synthetic construct
  misc_feature 1..471: note = Description of Artificial Sequence: Synthetic coding sequence
  source 1..471: mol_type = other DNA
atggctctcgagaaatctctagtgaggctcttgcttctggtgttgattctcctggtactcggctgggtgcaaccgagcctaggcaaggagtctcgggctaagaagttccagcggcagcacatggattcagactctagcccttccagttcctccacatattgtaatcaaatgatgaggaggaggaacatgacacaggggcggtgtaagccagtgaacacgtttgtgcatgagcctctggtggatgtgcagaatgtatgctttcaggaaaaggtcacctgcaagaatggccaaggcaattgttacaaatctaactcgtccatgcatataactgactgccgcttgaccaacggctcccggtacccaaattgtgcttatcgtacatcccccaaggaaaggcacatcatcgtcgcatgcgagggctcaccttacgttccagtgcacttcgacgcgtcagtggaggattccacgtag

SEQ ID NO: 132715 - DNA, 471 bp, synthetic construct
  misc_feature 1..471: note = Description of Artificial Sequence: Synthetic coding sequence
  source 1..471: mol_type = other DNA
atggcactggagaaatctctggtgagactcctgctgctcgtgctaatcctgcttgtcctgggatgggtgcaaccaagcttaggaaaggagtctagggcaaagaaattccagcggcagcacatggatagtgacagctccccttcaagtagtagtacttactgtaatcagatgatgcgaagacggaacatgactcaggggcggtgcaagccagtgaacactttcgttcatgaacctcttgtggatgtgcagaacgtttgtttccaggaaaaggtgacctgcaagaatggccaggggaattgttacaagagcaactcctctatgcacattaccgattgtcgcctcaccaacggatccaggtatcctaattgtgcataccgcaccagtcctaaggagcggcacatcatagtggcctgcgaggggtccccctatgtgcccgttcattttgacgcctctgttgaagactccacatag

SEQ ID NO: 132716 - DNA, 471 bp, synthetic construct
  misc_feature 1..471: note = Description of Artificial Sequence: Synthetic coding sequence
  source 1..471: mol_type = other DNA
atggctctcgagaagagcctcgtcaggctgctgctgctggtgctgatactgttagtgctcggctgggtgcagccgagcttgggcaaggagagccgggctaaaaaattccagagacagcatatggattccgatagttctccatctagtagctccacttattgtaatcagatgatgcgcaggagaaacatgacgcagggcagatgtaaaccagtgaacaccttcgtacacgaaccattggtagacgtgcagaacgtgtgcttccaggagaaagtgacatgcaagaatgggcaaggcaactgttacaagtcaaactctagtatgcatattacagattgccgtctcactaatggatcacggtaccctaactgcgcttaccgcacttcgccaaaggagcgacacattatcgttgcatgcgaggggagtccgtatgtgccggtgcactttgacgcctccgtggaggacagtacatag

SEQ ID NO: 132717 - DNA, 486 bp, synthetic construct
  misc_feature 1..486: note = Description of Artificial Sequence: Synthetic coding sequence
  source 1..486: mol_type = other DNA
atggtccccaaactgttcacatcccagatttgcctgctgctgttactgggcctgctggccgtggaggggtcccttcacgtgaagcctcctcagttcacgtgggctcagtggttcgaaacacagcatataaacatgacttctcagcagtgcactaatgccatgcaagttatcaataactaccaaagaagatgtaagaaccaaaacactttcctgcttaccacattcgcaaacgtggtaaacgtgtgtggaaaccctaatatgacttgtccttctaataagacgaggaagaactgccatcatagcggatcacaagtaccattaatacactgcaatttgacaactccttcaccacagaacatttcaaactgtcgctacgcccagacaccagccaacatgttttatatcgtggcttgcgacaatcgagatcagcgccgggaccccccgcaataccccgtcgtgccagtgcatctcgatagaataatctag

SEQ ID NO: 132718 - DNA, 483 bp, synthetic construct
  misc_feature 1..483: note = Description of Artificial Sequence: Synthetic coding sequence
  source 1..483: mol_type = other DNA
atggttccaaagctgtttacaagtcagatttgtctgctgctgctgctagggttgatgggagttgaaggctccttgcacgctcgccctccacagttcactagagcccagtggttcgctatccagcatatcagcctgaatcccccaaggtgtacgatcgcaatgcgcgccatcaacaactaccgatggcgttgcaagaaccagaatacctttttgcgcacgaccttcgctaatgtggtgaatgtgtgtggtaatcagtccatccgatgcccacacaaccggaccctgaacaattgtcaccggagtaggtttcgggtccccctcctgcattgtgacctgataaaccctggtgcgcagaatatctcaaattgtacatacgcagatcgcccaggccgccgcttttacgtggtggcctgtgataaccgggacccccgggactcccccaggtatccagtggttccagtacatctggacaccactatatag

SEQ ID NO: 132719 - DNA, 444 bp, synthetic construct
  misc_feature 1..444: note = Description of Artificial Sequence: Synthetic coding sequence
  source 1..444: mol_type = other DNA
atggccttgcagcgcacccatagcctgttgctgctgctcctgcttacgctgctcggccttggcctcgtccagcccagctacggacaggatggtatgtatcagaggttcctgcggcagcacgtgcatcccgaagagaccggagggagcgaccggtattgcaatctgatgatgcagcggcgcaaaatgacgctgtatcactgtaaaaggttcaacacatttatccacgaagatatttggaatattcggtctatttgctcgaccacgaatattcagtgcaaaaacggtaagatgaattgccacgagggtgtcgtgaaggtgaccgactgtcgagatacagggagcagccgcgctcctaactgcaggtatagggccatcgcttccactagacgtgtggtgatcgcatgcgagggtaatccccaggttccggtgcacttcgatggatag

SEQ ID NO: 132720 - DNA, 444 bp, synthetic construct
  misc_feature 1..444: note = Description of Artificial Sequence: Synthetic coding sequence
  source 1..444: mol_type = other DNA
atggccttgcagcggacccatagtctcctcttattactacttttgactctgttaggcctgggcctcgtgcaaccaagttacgggcaggatggaatgtatcagagatttctgcggcagcatgtgcatcccgaggaaaccggaggttcggaccgctattgtaacttaatgatgcagagacgaaagatgactctatatcattgtaaacgctttaatactttcatacatgaggatatttggaatattcggagcatctgcagtaccaccaacatccagtgtaagaatgggaaaatgaattgtcatgagggtgttgtgaaggtcactgattgcagggacaccggatcgagtcgtgcccctaactgccgttaccgcgcgattgcttccacaagacgcgtagtgatcgcatgcgaaggcaatccccaggttccagttcactttgatggctag

SEQ ID NO: 132721 - DNA, 444 bp, synthetic construct
  misc_feature 1..444: note = Description of Artificial Sequence: Synthetic coding sequence
  source 1..444: mol_type = other DNA
atggctctacagcggactcattcactgttgctgttattgttgcttacattgctcggtctgggtctcgttcagcctagttatggccaggacggcatgtatcagaggttcctacggcagcacgtgcatccggaggagaccggcggatccgaccgttactgtaacctgatgatgcaacgccggaagatgaccctgtaccattgcaaaaggttcaatacatttatccacgaagatatctggaacatacgctctatttgttctacaaccaatatccagtgtaagaatgggaagatgaattgccatgagggagtcgtcaaagtgaccgattgcagagacacaggttccagccgagcccccaattgcagataccgagctattgcttctaccagaagggtggtcatcgcctgtgaggggaacccccaggtccctgtccactttgacggctag

SEQ ID NO: 132722 - DNA, 465 bp, synthetic construct
  misc_feature 1..465: note = Description of Artificial Sequence: Synthetic coding sequence
  source 1..465: mol_type = other DNA
atggccccagcccgggcaggctgctgccctctgctgctccttctcttagggctatgggtcgccgaggtgctggtccgtgccaaaccaaaagacatgaccagctcccaatggttcaagacacagcatgtccagccgtcaccacaggcctgcaattcggcaatgtccatcatcaacaaatatactgagaggtgcaaagacctgaatacatttttgcatgaacccttttcctccgtggccatcacctgtcagacgcccaatatagcgtgcaagaactcatgcaagaactgtcaccagtcgcacgggccgatgtccctgaccatgggagagctcacctccggaaaataccctaattgccgttataaagaaaagcacctgaataccccttatatagtcgcctgcgatcctccccagcagggagacccagggtatccgctggtacccgtgcaccttgataaggttgtgtag

SEQ ID NO: 132723 - DNA, 453 bp, synthetic construct
  misc_feature 1..453: note = Description of Artificial Sequence: Synthetic coding sequence
  source 1..453: mol_type = other DNA
atggttctttgttttcccctgctgctcttgctcctggtactgtggggaccggtctgtccgttgcatgcttggcctaaacgcctcactaaggcgcactggtttgagatccagcatattcaaccgagtcccttgcaatgtaatagagccatgtccggcatcaataactacactcagcactgcaagcatcagaatacattcctgcacgactccttccagaacgtcgccgccgtgtgtgacctgctctcaattgtgtgcaagaatcgtaggcataattgccatcagagtagtaaacctgttaatatgacagattgccggttgacatccggtaagtacccgcagtgcagatactctgcggcagcccagtataaatttttcatcgttgcttgcgaccctccacagaagtctgaccctccatacaaattagtgcccgtccaccttgattccattctatag

SEQ ID NO: 132724 - DNA, 2271 bp, synthetic construct
  misc_feature 1..2271: note = Description of Artificial Sequence: Synthetic coding sequence
  source 1..2271: mol_type = other DNA
atgccactcaggcccggaagtctggttcccgagggcgccggctttcccaaaatggctgccgacgtctcagtaacccaccggccacctctctctccaaaatctggcgcagaagtggaagctggggatgccgctgaacgccgcgcccccgaagaggaattgccccccctcgatcccgaagagatacggaagcgcctggaacatactgagaggcagtttcggaataggcggaaaatattgatcaggggactgcctggggacgtgactaaccaggaggtgcatgatctgctgagcgactatgagctgaaatactgttttgttgacaaatataaggggactgcttttgtaaccctgctgaatggtgagcaggctgaggctgctatcaacgcctttcaccagtctaggcttcgagaaagggagctatccgtgcagctgcagccgaccgacgccctattgtgtgtagctaacctgccaccatccctcacacagcaacagtttgaggaactggtgcggccatttggcagccttgagagatgctttctggtttacagtgaacgaaccggccaaagtaaaggctatggcttcgccgagtacatgaagaaggacagtgcagctagagccaagtcggatctcctcggcaagccccttggtcccaggaccctctatgtacattggactgacgccggccaactgacgcccgcactgctgcactcaaggtgtctgtgcgtggacaggctgcccccaggttttaacgacgtggatgccctgtgccgggcactttccgccgtccacagccctaccttctgtcagctggcctgcgggcaggatggccagctcaaaggattcgctgtactggagtacgaaacggctgaaatggcggaggaagcccagcagcaggcggacggtttgagcttagggggttcccatttgagagtgagtttttgcgcacctggtccccctggacgatctatgctcgccgcgctgatcgccgcgcaggccacagcgttaaatagaggaaaggggctgttgcctgagcctaatatcctacaactgctgaacaatcttgggccctccgcatccctccagttactgctgaaccccttgcttcatggcagcgccgggggaaaacaaggcctcctcggcgcgcccccagctatgccacttctgaacggaccagcgctttctacagccctgcttcaactggccctgcaaacgcagggtcagaagaaaccgggcatcctgggcgatagccccctgggggcactgcagcctggcgcacaaccagctaatccgctgctaggcgagctcccagcagggggcgggctgcctcccgagctccccccgcgcagaggaaaaccccccccacttctccctagtgtcctgggcccagctggcggggaccgcgaggccctcgggttaggtcctcccgccgctcagcttacacccccacctgcccctgtcggactgcggggttctggtctaaggggtttgcagaaggacagcggccccctcccaactccgcccggtgtatccctactgggagaacctcctaaggattacaggattcccttgaatccatatctaaacctgcatagtttgctgcctgcctccaatctggcgggaaaggaggcacggggttggggaggtgccggaagatcgaggcgaccagcggaagggccacccactaacccccccgcccccggcggcggatcttcatcatccaaagcattccagctgaagtccagattgttatcacctctgagttcagcaaggctgccgccagaacccgggctctctgacagttattcatttgattaccccagtgacatgggcccaagacggctcttctcccatccgcgcgaacccgccctcgggcctcatggacctagtagacataagatgtctcctccacccagtggattcggcgagcgaagttctggaggatctggagggggcccactttcccacttttactcaggaagccccacatcttactttacatctggcctgcaagctgggcttaagcagtcgcacctctctaaggccataggctcttccccattgggatcaggcgaagggttgctcgggctgtctcccggaccgaacgggcacagtcatttgttgaaaacacccctgggtggtcagaagcggtcatttgcccacctcctgccctctccagagccttctcctgagggatcttacgtcgggcagcactcacaggggctaggcgggcactacgccgatagctacctaaaaaggaagaggatcttctag

SEQ ID NO: 132725 - DNA, 1821 bp, synthetic construct
  misc_feature 1..1821: note = Description of Artificial Sequence: Synthetic coding sequence
  source 1..1821: mol_type = other DNA
atggccgccgacgtgtcagtcacacacaggccccccctcagcccaaaaagtggcgcagaggtcgaagctggggatgccgcagagagacgagctcccgaggaagagctgcccccactggacccggaggaaatcaggaagcgccttgagcacacggagagacagttcagaaaccgccggaagatcctcattcgtggtctgccaggtgacgtaactaatcaggaggttcacgatctactctctgactacgagttaaagtactgcttcgtggataagtataaagggaccgcattcgtgactttactaaacggtgagcaggcagaggccgcaattaacgcattccatcaaagccggctgcgggagagagaactgtccgtacaactgcaacctactgatgctttactgtgcgtcgctaacttgcccccatcactcacacagcaacaattcgaagaactcgtacggccttttggaagccttgaacgctgtttcttggtctacagtgagagaacaggccagagtaaggggtatggattcgccgagtacatgaagaaagactccgctgcccgggccaaatctgacctgcttggaaaaccactcggcccaaggacactgtacgtccactggacagacgccggccagctgacaccagctttgctccatagccgctgcctatgcgtggacagactaccgcctggcttcaacgatgtcgacgctctgtgccgcgccctgagcgccgtccattcccccacattctgccagttggcctgtggtcaggatggccagctcaaaggatttgccgtacttgagtacgaaaccgccgaaatggccgaagaagcccagcagcaggccgatggcctctctctgggagggtcccacctccgggtgtcgttctgcgcccccggtcccccaggcagaagcatgctggcagcgctcatagccgcacaggcaacagcccttaacaggggaaaggggctactaccagaaccaaatatattacagttacttaataacctcggcccctcagcgagcctgcagcttctactcaaccctctccttcacggtagcgcaggaggaaagcagggactgctgggtgcacccccggccatgcctctgttaaacgggcctgccctctcgaccgccctgcttcagttagcgctgcagacacaggggcagaagaagccgggcattctgggggacagcccgttgggagcgttacagcccggagcccaacctgcaaacccccttctgggggagttgccagcggggggtggactgccccccgagctgccaccccgccgcggcaaacctcctccactactaccgagcgtgctagggccagctggtggggatagggaggcccttgggcttggccctcccgccgcccagctgacgccaccacctgcccccgttggcctgcggggttccggactccgcggcccactgagccacttttacagcggttcccctacctcctacttcacctctggcctccaggccggactcaagcagtcacacctgagtaaggctatcgggtcaagtcctcttggatcaggtgaaggactactgggattgagtccggggcctaacgggcactcccatctgttgaaggtccgagctggcgggggcgatatgcagggctgggaagccccggcccctcagcgtcctctcacccgtcccgccctacccagcgtaagtcgaccacactgggccgcgaggaacgccgctttgcctacttgttgcccacggccctcccctgcacaaaaggcagcaatgtgggctagcacacccagagcctctgccgccaccacgcggacgcctacatag

SEQ ID NO: 132726 - DNA, 2076 bp, synthetic construct
  misc_feature 1..2076: note = Description of Artificial Sequence: Synthetic coding sequence
  source 1..2076: mol_type = other DNA
atggcagccgccgctggcgacggaggtggggaggggggggcagggctaggaagcgctgcaggtttagggcccgggcccggtttgagaggccagggaccaagtgcggaggctcacgagggggcccccgatcctatgccagccgcactccaccctgaggaggtggcagctaggctgcagagaatgcaacgcgagttgagtaatagacgaaagatcctggtcaaaaacctgcctcaagattccaattgtcaggaagtgcacgacctcctcaaggattatgatctgaagtactgctacgttgacagaaacaaaaggacagcttttgttaccctcctcaacggagagcaggcgcaaaatgctatccaaatgttccatcaatatagttttagggggaaggacttgatcgttcaactgcagcctactgatgcgttgctatgcataaccaatgtccccatctccttcacctccgaagaattcgaagagctcgtgagggcctatggcaatatcgaaaggtgtttcctcgtgtattcggaggtaactggccattccaaaggctacggatttgtggagtacatgaaaaaggatttcgcagcgaaggctcgcctggagcttctaggcaggcagctgggagcctctgctctgttcgcacaatggatggatgtgaatctgctcgccagcgagttaatacattccaaatgcttatgcattgacaagcttccctcggattatcgagattctgaagagctcctgcagatttttagcagcgtgcacaaacccgtcttttgccagctggcccaggacgagggctcttacgtgggcggctttgctgtggtcgagtactctactgcggagcaggccgaagaggtgcagcaggcagctgatggcatgacaatcaaaggttctaaagtgcaggtttcgttctgtgcccccggcgccccaggaaggtctacattagccgctctcatagcagcccagagggtcatgcacagcaaccaaaagggcctgctgcccgagcctaatccagtccagattatgaagtcactcaataatcctgctatgttacaggtcctgctacaacctcagctgtgtgggcgggccgtgaaaccagccgtcctagggactccccacagcctcccccatctcatgaatccctccatcagtccagccttcctacacttgaacaaagcccaccagagttcggtgatggggaatacatccaacctgttcttgcaaaacttgtctcatataccactggctcagcagcaactcatgaaattcgagaacatccatacgaacaataagcccggcttgctgggcgaaccacccgccgttgtcctgcaaacggccctcgggatagggtctgtattgccactgaagaaggaacttgggcatcaccatggggaggcccacaaaacttccagcttaatccccacgcagacgactataactgcagggatgggaatgctccctttttttcccaaccaacacatcgcgggtcaagctggaccagggcactctaacacgcaagagaaacagccagctactgtgggaatggctgaaggaaacttttccgggagccagccttatctccagagtttcccgaatttggcggctggaagcctcttagtcggacaccacaaacaacagcagagccagcctaaggggacggagatcagttctggggccgccagcaaaaatcaaaccagcttattgggggaacccccgaaggagatacgcctatccaagaatccatacctgaatctcgcctccgtcttgcccagcgtttgcctcagtagcccagctagtaagactaccctccataaaactggtattgcctcctccattctggacgccattagtcaggggtcagagtcccaacacgcgctggagaaatgtatcgcgtattccccccctttcggagactacgcgcaggtcagctcactcaggaacgagaaaagaggtagcagttacctgatctctgcccctgagggaggaagcgtggagtgcgtcgatcagcacagtcagggcactggggcatactacatggagacgtatctgaagaagaaaagggtgtattag

SEQ ID NO: 132727 - DNA, 2037 bp, synthetic construct
  misc_feature 1..2037: note = Description of Artificial Sequence: Synthetic coding sequence
  source 1..2037: mol_type = other DNA
atggccgccgcggccggcgatggaggtggagagggcggcgcaggactgggatctgccgctggcctgggccccggaccagggctcagaggtcaaggaccatcagcagaggcccatgaaggggctccagacccaatgcctgccgctctccacccagaggaggtagctgcgcgattacaaagaatgcagcgtgagctatccaacagaaggaagattttagtgaaaaacttaccccaggattcaaactgccaggaagttcacgatctgcttaaggattatgacttaaagtattgctacgtcgacagaaataagcgcactgcctttgtcacactattaaacggggagcaggctcagaacgctattcaaatgttccaccagtacagcttcagagggaaggatcttattgtccagttacaacccacagacgccttgctatgtatcacaaatgttcccatcagctttacttcggaagagttcgaggagttggtgagagcatacgggaacatcgagaggtgctttctggtgtacagtgaggtaacagggcattccaagggctatggttttgtggagtatatgaaaaaggacttcgctgcgaaggccagactggagctgctcggcagacagctaggagcctccgccctttttgcccagtggatggacgtcaaccttctggctagcgagctgattcacagtaaatgcctgtgtatcgacaaattgccaagcgattaccgcgacagcgaagagctgctgcagatcttttcttcagtacataaacctgtgttttgccagcttgcccaagacgaaggatcctatgtgggcggctttgccgtcgttgagtattccaccgctgaacaagctgaagaggttcagcaggccgcagacggaatgacaatcaaggggagtaaggtgcaggtatctttctgtgcccccggcgcccctggtagatcaacactggctgctctcatagcagctcagagggtgatgcacagcaaccagaagggactcctacctgaaccaaaccctgtccagatcatgaaaagcctgaataacccagcaatgctgcaggtgttgttacagccccagctctgcggccgagcagttaaacccgccgtgcttggaaccccgcacagtctcccacatctcatgaacccaagcatttcgcctgcctttttgcatctaaacaaagctcaccagaacctatcacacatcccacttgcccagcaacaactgatgaaattcgaaaacattcacacaaataacaagccgggtctgctcggagaacctccggcagtggtgttacagacagccctgggaataggaagcgtactccctctaaaaaaagagcttggtcaccatcacggagaggcgcacaaaacctcttccctaattccgacgcaaactaccatcaccgcgggaatgggcatgctgcccttctttcccaaccagcacatcgcaggacaagctggtcccgggcattctaatacacaggaaaaacagcccgccactgtggggatggcagaaggaaatttcagcggatcccaaccgtatctgcaatctttccctaacctcgccgctggcagtctcctagtgggtcatcataagcagcagcagagccagcctaaagggaccgagatctcctccggcgccgctagcaagaaccagacaagtctgctgggagaacctcctaaggagattaggttatctaaaaatccttatctgaatctggcttccgtgctgcctagcgtctgcctctcctcccccgcgtctaaaaccaccctccacaagaccggaatcgcgtcctccatcctcgatgccatctcgcagggcagcgagtctcagcacgcacttgaaaaatgtatcgcctacagccctccattcggtgactacgcccaggtctccagcttgcgcaacgagaaaaggggctcatcgtacttgatcagtgcacccgaaggtggctccgttgagtgtgtcgatcagcattcccagggtacaggcgcatattacatggaaacctaccttaaaaagaagagagtttattag

SEQ ID NO: 132728 - DNA, 693 bp, synthetic construct
  misc_feature 1..693: note = Description of Artificial Sequence: Synthetic coding sequence
  source 1..693: mol_type = other DNA
atgaccatcaaaggcagcaaggtccaggtctctttttgcgcacccggtgcccccggaaggagtacccttgctgccctgatcgccgctcagcgcgtgatgcattcaaaccagaaaggattgctgcctgagcctaatcctgtgcaaatcatgaaatccctgaacaatcccgctatgctgcaggttctgttgcaacctcaactgtgcggcagagccgtgaaaccggccgtcctgggaaccccacattcattaccccatctcatgaacccaagcatctccccagccttcctgcacctgaataaagcccaccagaatcagactagcctccttggagaaccgcccaaagaaatacgacttagcaagaacccttacttaaacttggccagcgtgctgccaagcgtgtgccttagctcaccagcctcgaagaccactctgcacaaaacgggaattgcatcttcaattctggacgctatctcccaaggcagcgagtcccagcatgccctcgaaaaatgcattgcttactccccgccttttggtgactacgcccaagtttccagccttagaaacgagaaacggggtagttcctacctaatcagtgccccagaagggggttccgtggagtgcgtggatcaacacagtcagggtaccggtgcctattatatggagacctacctgaaaaaaaagagagtttattag

SEQ ID NO: 132729 - DNA, 2379 bp, synthetic construct
  misc_feature 1..2379: note = Description of Artificial Sequence: Synthetic coding sequence
  source 1..2379: mol_type = other DNA
atgcatgtcatcaaaagagatgggagacaggagcgtgtcatgtttgacaagattaccagtagaatacagaaactgtgttacggccttaatatggactttgtggaccctgcccaaattaccatgaaagtgattcagggactgtactccggagtgacgaccgtggagctggacacactggccgcagagacagcggctacactgaccactaaacaccctgactacgctattctggccgctcgaatagcggtgagtaacctacacaaagaaaccaagaaggttttctctgatgtgatggaggatctctacaattatattaacccacacaatggaaagcacagtccaatggtagccaagagcactctcgacatcgttctagcaaataaggacaggctcaattctgctatcatctacgacagagatttttcatataactattttggctttaagacgctggaacgctcctatctcctcaaaatcaatggtaaggtggcggagcgcccccagcatatgctcatgagggtgtctgtggggatccacaaagaggacatagacgcagctatagagacgtacaacctgctgtcagagaggtggttcacccatgcatcgccaactctgtttaacgccggcactaacaggccgcagctttcctcatgctttctgctcagcatgaaggacgattcaattgaaggaatctacgatacccttaagcagtgcgcgctgatctctaagtctgccggcggaattggcgtggcggtgtcctgtattagagccactgggtcatacatcgcaggaacaaatggtaattctaatggcctcgttcctatgctacgggtgtacaataacacagctagatacgtcgatcaagggggcaacaaaagaccaggggcatttgctatctacctggagccgtggcatctcgatatctttgaatttcttgacctgaaaaagaacactggtaaggaggagcaacgtgctcgcgaccttttcttcgccctgtggattccagacttattcatgaaaagggtagaaacaaatcaggactggtccttaatgtgtcctaacgagtgccccggcctggatgaagtctggggggaagagttcgaaaagctctacgcgtcctacgagaaacaagggagggtgaggaaggtagtcaaggcccaacagctttggtacgctataatcgagtcccaaactgaaaccggaacaccgtacatgctgtacaaggactcatgcaaccggaaatccaatcaacagaaccttggcactattaaatgttctaatctgtgcactgagattgtcgaatatacatccaaagatgaagtggccgtgtgtaacctcgcctctctggccctgaatatgtacgtgacttccgagcacacctatgattttaaaaagttagcagaagtcaccaaagtcgttgtgcggaatttgaacaagatcattgacattaactactacccggtgccagaggcgtgcttgtcgaataaaaggcatagacccattggtatcggtgtccaagggctggctgacgcattcattctgatgcgctatccctttgagtctgcggaggctcagctcctgaacaagcagatcttcgagaccatctactatggggctctggaggcgtcttgcgatctggccaaggaacaggggccatatgaaacttacgaaggaagccccgtctcaaagggaattcttcagtatgatatgtggaatgttaccccaacagatctctgggactggaaagtcttaaaagaaaagatcgctaaatacggaatccggaattcactcctgatcgcccctatgcctaccgcctctaccgcccagattctgggaaataatgagagcatcgagccttacacctctaatatttacacccgccgggtcctgtccggtgagtttcagattgtcaacccacacctgctgaaggacctgaccgaaagaggactgtggcacgaggaaatgaaaaatcagatcatcgcctgcaacggcagcattcagtccattcctgagattcccgacgacctcaaacagctttataaaacggtgtgggaaatcagtcagaagacggttctcaagatggccgcagaaaggggcgcattcattgaccagtcacagtcactgaatatccatatcgcggagcctaactacggtaagttgacctcaatgcatttttacggttggaagcagggcttaaagactggcatgtattatctaagaaccaggccagcagccaacccaatccagttcaccctgaataaagagaagttgaaagataaagagaaagtcagcaaggaggaggaagaaaaggagcggaataccgccgccatggtgtgctctctggagaaccgggacgaatgcctaatgtgtggatcttag

SEQ ID NO: 132730 - DNA, 2088 bp, synthetic construct
  misc_feature 1..2088: note = Description of Artificial Sequence: Synthetic coding sequence
  source 1..2088: mol_type = other DNA
atggaagatttgtacaattacattaacccgcataatggaaagcactcccctatggttgccaaaagcaccctagacatcgttcttgcgaacaaggacagattgaactccgctattatatatgatagagatttctcctacaattattttggtttcaagactttggaacgttcatacctcctgaagataaatggaaaggtggctgaaaggcctcaacatatgctgatgcgagtgtccgtcggaatccacaaggaagatattgacgccgcaattgaaacatataatctcctgagcgagcgttggttcacccacgccagccccaccctattcaacgccggcacaaacagacctcaattatcctcgtgttttctgttgtccatgaaagatgacagtattgagggcatctatgacacactcaagcagtgtgccctgatctcaaaatccgccggaggaataggcgtggccgtgtcgtgcatccgggctactggtagctacatcgccggaacaaatggcaattccaatgggctagtgcccatgctgagagtctataataataccgcaaggtacgtggatcaaggaggcaataaacgtccaggcgcttttgccatttacctcgagccctggcacctcgatattttcgagtttctggacttaaaaaagaatactgggaaagaggaacagagggcacgggacctcttttttgctttgtggattcctgacctgtttatgaaaagggtggaaacaaatcaggattggtcactgatgtgtcctaacgagtgtcccggcctggacgaagtgtggggggaagagttcgaaaagctgtacgctagctacgagaaacaaggaagagtcagaaaagtcgtaaaggcccagcagctctggtacgccataattgaatcacagaccgagaccggcacaccttatatgctatacaaggattcatgtaataggaagagtaaccagcagaatctcgggacaatcaaatgctccaatttatgtactgagatcgtcgagtacactagtaaagacgaggtggcagtctgtaatctggcctcacttgccctgaatatgtatgtgacaagtgaacacacttacgattttaaaaaactcgcagaggtgacgaaagtggtcgttaggaacttgaataagattatcgacatcaactactatcccgtccctgaagcttgtctctctaataagcgacatcggcctattggcattggcgtgcagggccttgctgacgccttcatcttgatgcgttatccatttgagtccgcagaagcacaactgctaaacaagcaaatttttgagactatttactacggcgccttggaggcctcatgtgatctcgctaaggaacaaggtccctacgagacctatgaaggatcccctgtcagcaagggaatactacagtatgatatgtggaatgtaacaccaaccgatctgtgggactggaaggtcctgaaagagaaaattgccaaatacgggattcggaactctctcctgatagctcccatgcctaccgccagtacagctcagattctgggcaacaacgaatcaatagaaccatacacctccaacatatacacccgcagagtgctctcaggcgaattccaaatcgtgaacccccatctgcttaaagaccttacagagagggggctgtggcacgaagaaatgaagaaccagatcattgcctgtaatggctccatccagtctatccctgagattcccgatgacctcaaacaactgtacaagactgtctgggaaatttcgcagaaaaccgtgctaaaaatggctgccgaacgcggcgcatttattgaccagagccagtcgctgaatattcacatcgccgagcctaattatggtaaactgacatcaatgcatttttatggctggaagcagggactgaagacaggcatgtattatcttcgtactagacctgcagcgaaccccatccaattcacccttaacaaagaaaaactgaaggataaagaaaaggtttctaaggaagaggaggagaaggaacgcaatacagcggctatggtttgctcccttgagaaccgcgacgaatgtctgatgtgtggcagctag

SEQ ID NO: 132731 - DNA, 2118 bp, synthetic construct
  misc_feature 1..2118: note = Description of Artificial Sequence: Synthetic coding sequence
  source 1..2118: mol_type = other DNA
gatggtcgacaagaacgggtcatgttcgataagatcacaagcaggatccagaaattatgctacggcttaaacatggattttgtggaccccgcccagattacgatgaaggtgattcagggactctactcgggagttaccacagtcgagctagatacattagccgccgagactgccgcaacactcaaaaccctggaacggtcttatttactcaaaatcaatggcaaagtggctgagagacctcagcacatgttgatgcgagtttcggtcgggatacacaaagaggacattgacgcggccatcgagacatataatctgctgagcgaacgatggtttacacacgcttctccaacgctgtttaatgccggcaccaacagaccgcagttgtccagctgctttctgctgagcatgaaagacgatagtatagaggggatctatgacactctcaagcagtgtgctctaatttctaagtctgctggaggtatcggcgtcgctgtgtcatgcatccgcgcgacaggttcgtatatcgcgggcaccaacggaaactcgaatggccttgtgcctatgctccgggtctacaacaacacagctagatatgtagaccagggtgggaataaacgccctggggcatttgcaatataccttgaaccctggcacttagatatttttgaattcctcgatctgaagaaaaataccggaaaagaagagcagcgcgcaagagacttgttctttgctctgtggattccggacttgtttatgaaaagggtagaaactaatcaggattggagtctaatgtgcccaaacgagtgtcccgggctggatgaagtgtggggagaggagtttgagaaactatacgctagctacgaaaaacagggccgggtgagaaaggtggtcaaagcccaacaactctggtacgccataatcgagtcccagaccgagaccggcaccccttacatgctttacaaagacagctgtaatagaaaaagcaaccaacagaacttgggcaccataaagtgtagcaacctgtgcactgaaatcgtggagtacactagcaaggatgaagttgccgtgtgcaacttagccagcctcgccttgaacatgtatgtgacatccgagcacacgtatgacttcaaaaagctcgcggaggtgaccaaggtggtggtgcgcaatctgaataaaattatcgacataaactactatccagttccggaggcatgcctgagtaataagagacaccggcccatcggcatcggggtgcagggcctggctgacgcattcattttgatgaggtatccatttgagtctgcagaggctcaactcctgaataaacagatctttgagacgatctattacggagccctagaggcatcttgtgatctggcgaaggagcagggaccgtacgagacctatgaggggagccctgtgtctaagggcatcctgcagtacgacatgtggaacgtgacccccacggatctctgggattggaaggtgctgaaggagaaaatcgctaagtacggaatccgcaactcactgctcatagcaccaatgcctactgccagcaccgcccagatcttgggcaataacgagagtatagagccttacacctccaatatttatactagacgcgtgctgtcaggcgaatttcaaatcgtgaacccacatctgcttaaggacttgacggaaagaggactttggcacgaagaaatgaagaaccagattattgcttgcaacggttccatccagtctatccccgaaatccccgatgacttgaagcagctgtataaaacagtatgggaaatctcccagaagacggtactgaaaatggcagctgaacgtggagctttcattgaccaaagccagagcctgaatatccacattgctgaacctaattatggcaaacttacttctatgcatttctacggatggaagcaaggactgaagaccggcatgtattacttgcgaactcgacctgccgccaaccccatacagtttaccctgaacaaggaaaagcttaaagacaaggagaaggtttctaaggaggaggaagagaaagagaggaacaccgcggccatggtctgctctctggagaaccgggatgaatgtctgatgtgtggctcctag

SEQ ID NO: 132732 - DNA, 1365 bp, synthetic construct
  misc_feature 1..1365: note = Description of Artificial Sequence: Synthetic coding sequence
  source 1..1365: mol_type = other DNA
atgaagcgggtggaaaccaaccaggactggagtcttatgtgtccaaacgagtgtccaggacttgacgaggtgtggggcgaggaattcgaaaagctgtacgcgagttacgaaaagcaaggaagagtgaggaaagtcgtgaaagcccaacagttgtggtatgcaatcatcgagtcgcagacagaaactggaactccctacatgctgtacaaagactcatgcaacagaaagtcgaaccagcagaatttaggcactattaaatgcagcaacctgtgtacagagattgtggaatacacatcgaaggatgaagtagccgtttgcaacctggcctcactggctcttaacatgtacgtcacatccgagcacacttatgacttcaagaaattggccgaagttactaaggtcgtcgttcgcaacctgaacaagatcattgacataaattattatcctgtacccgaggcgtgcctgtcaaataagaggcataggccaattggaattggcgtgcaagggttagccgacgcttttattctcatgcggtacccttttgagtctgctgaggcccaacttttgaacaaacaaatcttcgagaccatttattatggcgccttagaagcatcctgcgacctggccaaagagcaagggccctacgaaacatatgaaggcagcccggtcagcaagggcattctccagtacgatatgtggaacgtcactccgaccgacctgtgggactggaaggtgctcaaggaaaaaatagccaaatatggaattcgaaactccctgctgattgcccccatgccaaccgcgtctaccgcccagatcctggggaacaacgaaagtattgagccttataccagtaacatttataccagaagagttctctccggcgaattccagatcgtgaatccccacctactcaaagacctgacagagagaggactctggcatgaggagatgaagaatcagatcattgcatgtaacggctcgatacagtcgatccctgagattccagatgatctcaaacagctctacaaaacggtgtgggaaatctctcagaagacagttctcaagatggctgctgaaagaggtgcctttatcgaccaatcacagtccttaaacatccatatcgcagaaccaaattacggtaaactgacttcaatgcatttctatgggtggaagcaaggtctaaagaccgggatgtattacctgcggactaggccagcggccaaccccattcaattcaccctgaacaaggagaagttaaaagacaaggagaaggtgagtaaggaagaggaggagaaagagcgcaacaccgccgcaatggtgtgctccctggaaaaccgagatgaatgtctcatgtgtggttcatag

SEQ ID NO: 132733 - DNA, 1170 bp, synthetic construct
  misc_feature 1..1170: note = Description of Artificial Sequence: Synthetic coding sequence
  source 1..1170: mol_type = other DNA
atgttgagccttcgcgtgccgctggcacctataaccgatccccaacagttgcagcttagcccactgaaaggcctatcactggttgataaggaaaataccccaccagccctgtccggtacacgggtcctggccagcaagactgctaggagaatattccaagaaccgaccgagcctaagactaaggccgccgcaccaggggtggaagacgaaccactgctaagggagaacccacgacgattcgtcattttccctatcgaataccatgatatctggcaaatgtacaaaaaagccgaggcaagcttctggacagctgaggaagtggatctgagcaaggacatccaacactgggaatcacttaagccagaggaacggtacttcatttctcatgttctcgctttctttgccgccagcgacggaattgtgaacgagaacctggtcgagcgtttcagccaggaggtacagattacagaagcccgctgtttctacgggttccagatagcgatggagaatatccactccgagatgtactcccttctgattgacacttatataaaggatcccaaagaacgcgaattcctgttcaacgcgattgagacgatgccatgcgtcaaaaaaaaggccgattgggcgctgagatggattggcgataaggaggccacctacggcgagcgcgtagtagcttttgcagctgtggagggtatctttttttcaggatcctttgcgagcatcttctggttgaagaaacgaggactcatgccaggactaacatttagtaacgagttaattagtagagacgaaggactccactgcgactttgcatgcctgatgttcaaacatctagtccataagccttcagaggagagagtgagagaaattattataaacgcagtgcggatcgaacaggagttcctgacagaagctttgccagtcaaactaatcggcatgaactgtacgctgatgaaacaatacattgagtttgtggccgaccgcctgatgctcgaactggggttttcaaaggtgtttcgggtcgaaaaccccttcgatttcatggaaaatatttctctggagggcaaaacaaatttttttgagaaacgggttggggaataccagcgcatgggtgttatgagctctccgacagagaactctttcactctggacgccgatttctag

SEQ ID NO: 132734 - DNA, 1350 bp, synthetic construct
  misc_feature 1..1350: note = Description of Artificial Sequence: Synthetic coding sequence
  source 1..1350: mol_type = other DNA
atgggcagagtaggaggaatggcgcagcctatgggcagagccggcgcccccaaacctatgggacgtgcaggtagcgccagacgcggaagattcaaggggtgttggtccgaaggatctcctgtccacccggtgcccgctgtgctctcctggcttctggcattgctgcgatgcgcgtctacgatgctctccctacgggtgcctctggcaccgatcacggacccccagcaactccagctgtccccccttaaggggctctcattagtggataaggagaatactcctcccgccttgagcgggactcgggtgctagcatccaagaccgctcggcgaatctttcaggagcctacggaaccaaagaccaaagcagccgcaccgggtgtggaggacgagcccctgctgcgtgagaaccccagaaggtttgtgattttccctattgaataccacgatatctggcagatgtacaagaaggcagaggcatctttttggaccgccgaggaagtcgatctgtccaaagacatccagcactgggagagcctgaagcccgaggagaggtacttcatctcacacgtgctggccttctttgcggcctccgacggaatagtaaatgagaacctcgtcgagcgattttctcaagaagtccagattacagaggcccggtgcttctacggctttcaaattgctatggaaaacattcactctgagatgtattctctcctaattgacacatacataaaggatcctaaagaacgggaattcctatttaatgccatcgaaactatgccttgcgttaagaaaaaggccgattgggcgctcaggtggattggagacaaagaagctacttatggcgagagggtggttgctttcgctgccgttgaagggatcttcttctctggatcctttgcctctattttctggctgaagaagagaggcctgatgccgggcttgacattctccaacgaactcatctcgagagacgaaggcctgcactgcgatttcgcatgtctgatgtttaaacatctcgtgcacaaacccagtgaggagcgggtgagagagatcatcattaatgccgtgagaatcgagcaagagttcctgactgaagccctaccggtgaagcttatcgggatgaattgtaccctgatgaagcagtacattgagttcgtggcagaccgcctaatgcttgagctgggttttagtaaagtctttagggtcgagaatccttttgactttatggagaacatctcgctagagggaaaaactaacttcttcgagaaacgcgtcggagagtatcagagaatgggcgttatgagcagtccaaccgagaacagcttcacactcgacgcggatttctag

SEQ ID NO: 132735 - DNA, 1056 bp, synthetic construct
  misc_feature 1..1056: note = Description of Artificial Sequence: Synthetic coding sequence
  source 1..1056: mol_type = other DNA
atgggggaccctgagagaccagaggccgctggcctggaccaagatgaacggtcttcgagtgatacaaacgagtctgagatcaagagtaatgaggagccactgcttcggaaatcctcacgtcggtttgtgatcttccctatccagtaccctgacatctggaagatgtacaaacaggctcaggcctccttctggacagcggaggaggtcgatttaagtaaggatttaccacattggaacaaactcaaggccgatgaaaagtacttcatctcccatatcttggcattctttgcagcatcagacggaatagtgaatgagaatttggtcgaacgcttctcacaggaagtccaggtccccgaagcccggtgcttctatggctttcagatccttatcgagaatgtacatagtgagatgtactcactgctgatagacacctatattagagatccaaagaagagggaattcctgttcaatgcaatcgaaacaatgccttatgttaaaaaaaaggcggattgggctctgcggtggattgccgaccgaaagtcaacgttcggtgaacgggtggttgcattcgcagctgttgaaggggtgttcttctcaggctcttttgccgccatcttctggctgaagaagcgtgggctgatgcctgggcttacattcagtaacgagctcatcagtcgcgacgaaggactccattgtgacttcgcatgtttaatgtttcagtacctcgtaaataaacctagtgaggaacgggtgagggagattattgtggacgccgtcaaaatcgagcaagaattccttactgaagcgctgcctgttggtttgatcggcatgaactgtatcctgatgaagcagtacattgaattcgtcgccgaccggctcctcgtagaactcggcttttccaaagtgttccaggcagaaaatccattcgatttcatggagaatatttccttggaaggaaagaccaatttttttgaaaaaagagtctccgagtaccagaggttcgccgtaatggctgaaaccacagacaacgtcttcacgctcgacgcagacttttag

SEQ ID NO: 132736 - DNA, 900 bp, synthetic construct
  misc_feature 1..900: note = Description of Artificial Sequence: Synthetic coding sequence
  source 1..900: mol_type = other DNA
atgggtgaccccgaaaggccggaggcagccgggttggaccaggatgaggtggacttgtctaaggatcttcctcactggaacaaactcaaggctgatgaaaaatacttcataagccacatcttggcattctttgctgctagtgacggtatagtgaacgagaacttggtggagcgtttcagtcaagaggtgcaggttcccgaggcccggtgcttttacggcttccagatcctcattgaaaatgttcactctgagatgtattctcttctaattgacacttacattagggatccgaaaaaacgggagttcttgttcaacgcgattgaaactatgccatacgtaaaaaagaaagccgactgggcactgaggtggatcgccgacagaaagagcacattcggggagcgggttgttgcatttgcggctgttgaaggtgtttttttcagtgggagctttgccgccatattttggctgaaaaagcggggcctcatgccaggtttgactttttcaaatgaactgatctcgcgagatgaggggctgcactgcgattttgcctgcctgatgtttcagtacctggtgaacaagcctagcgaagagagggtgagagaaattatagtggatgcggtcaaaatcgagcaggagttccttacggaagcactgcctgtaggccttattgggatgaactgcatacttatgaagcaatacatcgagttcgtggcggatcgactccttgtggaacttggcttctccaaggtgttccaggccgagaacccattcgacttcatggaaaacatctccctggaaggaaaaacgaactttttcgaaaagcgggtgtctgagtaccagcggttcgctgtgatggccgaaacaaccgacaatgtgttcaccctagatgctgacttctag

SEQ ID NO: 132737 - DNA, 420 bp, synthetic construct
  misc_feature 1..420: note = Description of Artificial Sequence: Synthetic coding sequence
  source 1..420: mol_type = other DNA
atgggcgacccagagagaccggaggcggccggcctagatcaggatgaagggctccattgtgacttcgcatgcctaatgttccagtacttagttaataaaccaagcgaagagagagtgagagagataatcgtagacgctgtcaagatagagcaagaatttctcactgaggcactcccggtcggtctgatcggaatgaattgcatcttgatgaagcagtacatcgagttcgtggccgatcgtctcctcgtggaactcggattctctaaagtcttccaggcagagaatccttttgactttatggagaacatcagtttggaaggcaaaacaaatttcttcgagaagcgggtttctgaatatcagcgctttgccgtcatggcagaaacaaccgataatgtattcaccctagacgcagacttctag

SEQ ID NO: 132738 - DNA, 201 bp, synthetic construct
  misc_feature 1..201: note = Description of Artificial Sequence: Synthetic coding sequence
  source 1..201: mol_type = other DNA
atgggcgaccccgagcgccccgaggccgctgggctagaccaggatgaggtcttccaggcagagaatccatttgatttcatggagaacatcagtttagaggggaaaaccaatttcttcgagaagagggtatcagagtatcagaggtttgcagttatggcagaaacaactgacaatgttttcacccttgacgccgatttttag

SEQ ID NO: 132739 - DNA, 132 bp, synthetic construct
  misc_feature 1..132: note = Description of Artificial Sequence: Synthetic coding sequence
  source 1..132: mol_type = other DNA
atgggagatccagaacggcccgaggccgccgggctcgaccaggacgagaggtccagcagtgacacaaacgaatcagaaatcaagtccaatgaggagcctctcctccggaagagttctcggcgctctttttag

SEQ ID NO: 132740 - DNA, 894 bp, synthetic construct
  misc_feature 1..894: note = Description of Artificial Sequence: Synthetic coding sequence
  source 1..894: mol_type = other DNA
atgtacaagcaggcccaggcttctttttggaccgccgaagaagtggatttaagtaaggatctgccccactggaataaactgaaagccgatgaaaaatacttcatttcacacatcttggctttctttgcagcatcagacggaatagtgaacgagaaccttgtggagaggttcagccaggaagtgcaggtgccagaagctagatgcttctacggattccagattctcatcgagaatgtgcattccgaaatgtatagtctactcatagacacgtacatccgcgatccaaagaagcgggagtttctgttcaacgcaatcgaaaccatgccctacgtgaagaaaaaggcggactgggcactgagatggattgctgatcgcaagtcaacattcggagagcgcgttgttgcttttgcggcagtagaaggagtattcttttctgggagtttcgcagcgatattctggctgaagaagagaggcctgatgcctgggcttactttctctaacgagctgatctcccgcgatgagggtctgcattgtgattttgcctgcttgatgttccagtacctggttaacaaaccttcagaggaacgtgtccgggagatcatcgttgacgcagtgaagattgaacaagagtttctcaccgaagcgttgccagtgggtttaatcggcatgaactgcatcctcatgaaacagtacatcgaatttgtcgctgataggttactagtcgagcttgggttctcaaaagtgttccaagctgaaaatcccttcgacttcatggagaatatttctctggaaggaaagacaaactttttcgagaagcgggtctctgagtaccaacggtttgccgttatggccgaaactaccgataatgtttttacactggatgcagacttctag

SEQ ID NO: 132741 - DNA, 1824 bp, synthetic construct
  misc_feature 1..1824: note = Description of Artificial Sequence: Synthetic coding sequence
  source 1..1824: mol_type = other DNA
atggaagcgccagcagccggtttatttctgttgctactcctaggcacgtgggcccctgctcctgggtccgctagcagcgaagccccacctctgatcaacgaggatgttaagagaacagtggaccttagcagccatctggcaaaagttaccgctgaagtcgtgctagctcacctcggagggggcagcacaagcagggcaacctccttcctgttagcattagaaccagagttggaagcccggctggcccacctaggagtgcaggttaagggcgaggacgaagaggaaaacaatttagaggtgagagagactaaaattaaggggaaaagtggacggtttttcaccgtcaaactgcccgtggctctggatccaggggccaagatttccgtcatagtcgagaccgtgtacacccatgttttacacccctatcctacccaaatcactcagagcgaaaaacagttcgttgtcttcgagggaaatcactatttttacagcccctatccaaccaagacgcagaccatgcgtgttaagctcgcttcccgcaacgtggaaagttacacgaagcttggcaatcccacaagatcagaagatttgctcgactacggtccttttcgcgatgtgcccgcatacagccaggatactttcaaggtacactacgaaaataattccccttttctcacaatcacgtctatgactcgggttatcgaagtcagccattggggaaatatcgccgtggaggagaatgtagacttgaagcacaccggtgcagtcttaaagggacctttcagtagatacgattatcagaggcagcccgatagtggcattagctctattaggagtttcaagactattttacccgcggccgcccaggacgtctattaccgtgacgaaattgggaacgtgtcaacttcacacctgctgatactagatgactccgtcgagatggagatcagacccaggttccctctctttgggggctggaagacccattatatcgttggttataaccttccgtcatatgaatatctgtataatcttggagaccaatacgctctgaagatgcgatttgtcgaccacgtgtttgacgagcaggtgatagactcactgacagtgaagattatacttccagaaggcgcgaagaatattgagatcgatagcccgtacgaaatttcccgcgcccctgacgagctccactatacgtacctggacacattcggccggccagtgattgttgcatacaagaagaacctcgttgagcagcacattcaggatatagttgtgcattacactttcaacaaagtgctcatgctccaagaaccgctgctggtcgttgccgctttttatatcttattcttcacagtcatcatctatgtgcggctggatttcagtattaccaaagaccctgccgccgaggcacggatgaaagttgcatgcatcaccgaacaggtgcttacactggtgaacaagcggattggcttatatagacatttcgatgaaaccgtcaataggtataagcagtcccgcgatatctctacattaaacagcggcaaaaagtcgttggagactgagcataaggcgctcactagcgaaatcgcgctgctccaaagccgtttaaaaaccgaagggagtgatctgtgcgaccgcgtgagcgaaatgcagaagttggacgctcaggtgaaagagcttgttctgaaaagtgcagtggaggccgagcggctggtcgcggggaagctcaagaaggacacttacatcgagaatgaaaagttgatcagtggaaaacgtcaggaattggtcaccaagattgaccatattctcgacgctctgtag

SEQ ID NO: 132742 - DNA, 1308 bp, synthetic construct
  misc_feature 1..1308: note = Description of Artificial Sequence: Synthetic coding sequence
  source 1..1308: mol_type = other DNA
atgcgcgtgaagctggcctcccgcaacgtggaaagctataccaagttaggaaacccaacccgatccgaggatctcctcgactatggccctttccgcgatgtgcctgcctacagccaggatacgtttaaggtccactacgaaaataactccccattcttgacgatcacctccatgactcgggttatcgaagtatctcattggggaaacatcgctgtggaagagaatgtggatctaaaacatacgggggccgttcttaaaggccccttctcccgttatgattaccagcgacaacctgactcaggtatttcaagcatacgcagcttcaagacgatcctaccagccgcggcccaggatgtatactaccgggacgagataggcaacgtttccacatcccacctgctcatcttggacgacagtgtcgagatggaaatccggcctagattccccctcttcggcggatggaagacccactatattgtcggctacaacctccccagctacgagtatctgtataatcttggtgaccagtacgctctgaagatgaggttcgtggaccacgtattcgatgagcaagtgatcgactccttgactgtgaaaattattctgccagagggcgctaagaacattgagattgacagcccatacgaaataagtagagcccccgacgaactgcattacacctacctagacaccttcggaagacctgtgattgttgcgtacaagaaaaacttggtggagcagcacattcaagacattgtcgtgcactacactttcaataaagtgttgatgctgcaggaaccattgctcgtcgttgccgcattttacatcttattctttaccgtgatcatatacgttcgcttggacttttcaattacgaaggatcccgctgctgaagcaagaatgaaagtagcgtgtattacagagcaagtgctgactctggtgaacaagcgtatcggactgtatcgtcatttcgacgaaaccgtgaacagatacaaacagagcagggatatctccactcttaacagtggcaaaaaatccttggagacggagcacaaggccctcacaagcgagattgccctactgcagtcccgacttaaaaccgagggctccgatttgtgtgacagggtgtccgaaatgcagaagttggatgcacaggtgaaagagcttgttttgaaatcggccgtggaagctgagcgtctcgtagcaggaaagttgaaaaaggacacttacattgaaaacgagaaacttattagcggtaagaggcaggagctcgtgactaagatcgaccacatccttgatgctctgtag

SEQ ID NO: 132743 - DNA, 1137 bp, synthetic construct
  misc_feature 1..1137: note = Description of Artificial Sequence: Synthetic coding sequence
  source 1..1137: mol_type = other DNA
atgacacgagtgattgaggtctcacactgggggaatattgccgtggaagaaaacgtggacctgaaacatacaggcgcagtgttaaaaggacccttcagtaggtacgactaccaacgccaaccagactcgggcatttcctccattagatcattcaaaaccattctccccgccgccgcgcaggacgtttattaccgcgacgagattggtaatgtgtctacatctcacctacttatcctagatgacagtgtggaaatggaaattcgtccgcgctttccactatttgggggctggaagacccactatattgtgggatacaatttgccaagctacgagtacctgtacaatttgggcgatcagtatgcacttaagatgcgtttcgttgatcacgtgttcgacgaacaggtgattgacagcctcacggtcaagatcatacttccagaaggagccaaaaatattgagattgactctccctacgagattagtcgggcacctgacgaactacactatacgtacctggacaccttcggacggccagtgatcgtggcctacaagaagaatttggtggagcagcatatccaggacatcgtagtgcactatacttttaataaggtgcttatgctgcaggaaccactgcttgtggtggctgctttttacatcctattcttcactgtgatcatctacgtccgccttgatttctccattactaaggaccccgccgctgaggctcgcatgaaggtagcctgcattactgagcaagtcctgacactcgtcaataagcgcattggtctgtataggcatttcgacgagacagtaaaccgctacaagcaatctagggatatctctacactgaacagcggaaagaagtctctggaaacagaacataaagctctgacttcagaaatcgctctgctgcagtcccgtcttaagaccgaaggatccgacctttgcgatagggtgtccgaaatgcaaaagttagatgcacaggtcaaggagctcgtgctgaaatccgctgttgaagcagagcgacttgtcgccggcaaactgaaaaaggacacctatatcgagaacgaaaagctgatcagcggtaaaaggcaggagctcgtgacaaagatcgatcacatccttgacgctctgtag

SEQ ID NO: 132744 - DNA, 1746 bp, synthetic construct
  misc_feature 1..1746: note = Description of Artificial Sequence: Synthetic coding sequence
  source 1..1746: mol_type = other DNA
atggaagctccagcggccgggttgttccttctgctgttactggggacatgggccccagcccccggctcagcctcatctgaagctcctccactgatcaacgaagacgtgaaacgaactgttgacctgtcatctcatctggctaaggttaccgctgaggtggttcttgcccatcttggggttcaggtgaagggggaagacgaggaggagaataacttggaggtgcgggaaacaaagattaagggcaaatctgggagatttttcacggtgaaactgccagtcgccttagatccaggcgctaaaatttcagtgatcgtagaaacagtatacactcacgtgctgcatccctaccctactcagatcacacagagtgaaaaacagtttgtcgtcttcgagggcaatcactacttctactctccatacccgaccaagactcaaaccatgcgggtaaaacttgcttccaggaacgtggaatcctatactaagctcggcaaccctaccaggtccgaggaccttttggactacggcccgttcagagatgtcccggcttattcccaggacacattcaaggtccactacgagaacaacagtcctttcctgaccatcaccagtatgacccgggttattgaggtcagtcactgggggaatattgcagttgaagagaacgttgatttgaaacacacaggcgccgttctgaagggcccattcagcaggtacgattatcagagacaaccagattcgggcatcagcagtatccgatcattcaaaacaattctgccagctgcagcacaggacgtgtactaccgcgatgagatcgggaatgtgagcaccagtcacctgctgattctggacgattccgtggaaatggaaataaggccaaggttcccattatttggagggtggaaaacccactatattgtgggctataatctgccttcctatgagtacctctacaatctgggtgatcagtatgcccttaagatgcgattcgtcgatcacgtatttgacgaacaggtgattgactctctgactgtgaaaatcatcctgcctgaaggcgctaaaaacatcgagatcgacagcccctacgaaataagtagggcacccgatgaactgcattacacctacttggatacatttggtcgcccggtgatcgttgcctacaagaagaacctggtagaacagcacatccaggacatagtcgtgcactatacattcaacaaggttttgatgcttcaggagccactgctcgtggtagccgccttctacatattatttttcactgtgatcatctatgttcgtctggatttctcaattacgaaggatcctgccgccgaggcaaggatgaaagtggcatgtatcacagagcaagtccttacactggtgaacaagcgtattggtctgtaccgacacttcgacgagaccgtgaaccggtacaaacagagtcgagacattagcacactgaacagcggaaagaagagcctggagactgaacataaggccctgaccagcgaaattgccctgttacagtcaaggttgaaaacagaagggtccgacttgtgcgaccgcgtatcagagatgcaaaagctggatgcccaggttaaggagttagtcttaaagagtgccgtcgaggccgagcggctcgtagccggcaaattaaaaaaggacacttacatcgaaaacgaaaagctgattagcggaaagaggcaagagctggtgaccaagatagaccatatactcgacgccctgtag

SEQ ID NO: 132745 - DNA, 1896 bp, synthetic construct
  misc_feature 1..1896: note = Description of Artificial Sequence: Synthetic coding sequence
  source 1..1896: mol_type = other DNA
atggcacctcccggcagtagcactgtttttctgttagcactcacaatcattgcaagcacttgggctctgaccccaactcactatctgaccaagcacgacgtcgaacggcttaaagcctccttagataggccctttaccaacctggaatccgccttctactcaattgtaggcctgtctagcctgggggcacaggtgccagatgccaagaaggcatgcacttacatcagatcaaacctggacccttccaacgttgattccttgttctacgctgcgcaggccagccaggccctttctggttgcgaaatcagcatctccaacgaaactaaagacctattgcttgccgccgtttctgaagactcctctgttacacagatctaccatgcagtcgccgccctgtctgggttcggcctgccactggccagccaggaagctctgagtgcgctgacagcccggctgagcaaagaagaaacagtcttggccacagttcaggcacttcagactgcaagtcatctgtctcagcaagctgacctgcggagtatcgtggaagagatcgaagatctggtcgctcggctggacgagctcggaggagtttatctccagtttgaggagggactggagactacagccctatttgtggcagccacatacaagctaatggaccatgtgggcacagagccttccatcaaggaggaccaggtaatacagcttatgaacgccatatttagcaagaaaaattttgagtctctgtcagaggccttttccgtagcatctgcagcggccgtcttgtcccataatcggtaccacgtgcccgttgtggtcgtccccgagggttcagcatctgatactcacgaacaagctattctgaggttacaagtaactaatgtgctctcccagccgctgacgcaagccacagtgaagctggagcacgcaaagtccgtggccagtcgggctacagtacttcagaagactagtttcactcctgttggtgatgtatttgagctgaacttcatgaatgttaaattttcctccggctattatgactttcttgttgaagtggagggcgataaccggtatattgcaaatactgtagagctccgtgtgaagatctctacagaggtgggaattaccaatgttgacctatcaacggtcgacaaggaccaatcaattgcccctaaaaccacccgagtgacctatcccgcaaaagctaaggggacattcatcgctgactcacaccaaaattttgcccttttcttccagctggtcgatgtgaataccggcgccgaactgacgccccaccagacattcgtgcggctgcacaatcagaagactggccaggaggtagttttcgtggctgaacctgataacaagaatgtgtataaatttgaattggacacctcagagaggaaaatagagttcgattcggcctccggtacttacaccctttacctcatcattggcgacgccactctcaagaacccaattctctggaacgtggcagatgttgtgataaagttcccagaagaagaggcccccagcacagtcctgagccagaacttatttacccccaagcaagagattcaacacctgttcagagaacctgaaaagcgcccccctaccgttgtgtccaacactttcaccgccctcatattaagcccactgctgcttctgttcgccctgtggatccgaattggcgccaacgtatccaattttacttttgcgcctagcacaataatcttccacctcggccacgcagccatgctagggttgatgtatgtatattggacccaactcaatatgttccagactctaaagtatttagccatcttaggttccgtgacctttctggctggcaaccgaatgttggctcaacaggccgtgaagaggaccgcccactag

SEQ ID NO: 132746 - DNA, 1038 bp, synthetic construct
  misc_feature 1..1038: note = Description of Artificial Sequence: Synthetic coding sequence
  source 1..1038: mol_type = other DNA
gtctcaccacaaggtagctctacagtgtttctgcttgccctgactattattgcctctacatgggccctgacacctacacactacttgacgaaacacgatgttgaacgactgaaggcctctcttgatcgtccttttactaatctagagtctgctttctactctatcgtcggactttcatctctcggcgcccaggtcccagatgccaagaaggcctgtacatatatccgctccaatttagacccatccaatgtcgattccctgttctatgcagctcaggctagccaggccctgagtggatgtgagatctccattagtaatgagactaaagatctcctgctggcggccgtcagtgaagactccagcgtgacccaaatatatcacgcagtggctgctctctccggctttggcttgccactggctagtcaagaagcactatctgctctgaccgcacgtctctcgaaagaggagactgttttggcccgggtctggtccacggtgttagagagccgatcactgtttagcaagcgtaccgtccaggccctacagacagcgagccatttgtcacaacaagctgatctgcggtctatagttgaggaaatagaggacctggtcgctcggcttgatgaactgggtggggtgtatttgcagttcgaggaaggcctggaaactaccgctctcttcgtggccgcaacatacaaactcatggaccacgtgggtaccgaacctagcattaaggaagatcaggtcattcaattaatgaatgccattttttccaaaaaaaatttcgagtcactctcggaagcatttagtgtggcttccgctgcagctgttttgtcgcataacaggtatcacgtcccagtggttgtggttcccgaagggtccgcctctgacactcatgagcaggctattctaaggctgcaggtcactaatgtgttgtctcagcctctcacccaggcgaccgtaaaactggagcatgccaaaagtgtcgcatctcgggcaacagtcctccaaaaaacttcatttactcccgtggggtag

SEQ ID NO: 132747 - DNA, 1848 bp, synthetic construct
  misc_feature 1..1848: note = Description of Artificial Sequence: Synthetic coding sequence
  source 1..1848: mol_type = other DNA
atggccccgccagggtcgagcactgtctttctgctggcactcacaattattgcctcaacctgggcactcactccaactcattatttaacaaagcacgacgtcgagagattgaaggccagtcttgataggccctttacaaatctagagtctgctttctacagcattgttggcctatcatcgctaggggcacaggtccccgacgcaaaaatttccatcagcaatgagactaaagacttattgctggcagcagtttcggaggatagttcggtaacacaaatctatcatgctgtggctgcactatctggttttggactgccgctggctagtcaggaggccctcagtgctttgaccgcacggttgtcgaaagaagagacagtgttagcgactgtccaggcattacagacggcctcacatctcagccagcaggccgatttgaggtcaattgtggaagagatcgaggatcttgtggctcggctggacgagctgggtggggtgtatctccagtttgaagaaggcctggagacgaccgctttattcgtggccgctacctataagctgatggaccacgttgggaccgaaccttccattaaggaggaccaggtgattcaactgatgaatgccatcttctcgaaaaaaaactttgagtccctgtcagaagcctttagcgtcgcatccgctgctgctgtgctgtctcacaacagatatcatgtgcctgtggtggttgtgcctgagggatcagcgtctgatacgcacgaacaggccattcttcggttgcaggtgaccaacgtcctgtcgcagcctcttacacaggctactgtaaagctcgaacacgcaaaatcggtcgcatctagagctacagtcctgcaaaagacttctttcacccctgttggagatgtcttcgaactcaattttatgaacgtaaaattttcttccggctattatgattttctcgtggaagttgaaggcgacaacaggtacatcgcaaatacggttgagttgcgggttaagatctccaccgaggtaggaattactaatgtcgatctgtccaccgtggataaagaccaatctatcgctccaaagacaactcgggtgacatatcccgccaaggccaagggaacattcattgccgatagtcaccagaacttcgcgctgttcttccagctggttgatgtcaataccggcgctgaactcaccccccaccaaacatttgtgcggttacacaatcagaaaaccggccaggaggtagtgtttgtggccgagccagacaataaaaacgtttataaattcgagctggatacttccgagcggaaaatcgagtttgactccgccagtgggacctacacattatacttgattatcggagatgccaccttaaagaatcccattctctggaatgtggccgacgtggtcatcaaatttcctgaggaggaagccccttcaacggtccttagtcagaatctgttcacacctaaacaggaaattcagcacctgttccgcgagcctgagaagaggcctcctaccgttgtctctaacacattcactgccctgattctctctcctttgctgcttctttttgccctgtggatcaggatcggcgcgaatgtgagcaactttaccttcgcgcctagcactattatcttccacctaggccatgcagccatgttgggcttaatgtacgtctattggacccagctgaacatgtttcagaccctgaaatacctggcgattttgggcagtgtgaccttcttggcagggaataggatgctggcccagcaggcagtgaaaagaattgcagcagagcagtctagccgtctggccaagtataggacccttcgaacagcccactag

SEQ ID NO: 132748 - DNA, 441 bp, synthetic construct
  misc_feature 1..441: note = Description of Artificial Sequence: Synthetic coding sequence
  source 1..441: mol_type = other DNA
ggaacctacacactgtatctcatcattggagatgccacacttaagaaccccatactctggaacgtcgccgacgtagttatcaaattccctgaggaggaggcccccagcaccgtgctgagtcagaatctcttcacccccaagcaggaaattcagcacctgttcagggagcctgagaagagacctccaaccgtggtgtcaaatacatttaccgccttaatcctctccccgctccttctgctgtttgccctctggatcaggatcggtgctaacgtgagcaatttcactttcgcacccagtactatcatttttcatctagggcacgccgagcagcacattagctctaggcgcaagatggagatactgaagactgaatgtcaggaaaaggaatctcgtaccatccacagcatgaggaggaaaatggagaaaaagaattttatttag

SEQ ID NO: 132749 - DNA, 1038 bp, synthetic construct
  misc_feature 1..1038: note = Description of Artificial Sequence: Synthetic coding sequence
  source 1..1038: mol_type = other DNA
atggcccccccaggttcatccacagtgttcctgctggctttaaccatcattgcaagcacctgggctctgacaccgactcactatttgaccaagcacgacgtggaaagactcaaagccagcctcgacaggcccttcaccaatcttgaatccgcattttactccattgttgggctgtcaagtctgggcgcacaagtgcccgacgctaagaaagcttgtacctatatccgctctaatctggacccgtcaaatgtggacagtctgttttacgctgcccaggcgagtcaggccttatcagggtgtgagattagcatatccaacgagacaaaagatctgttgttagctgcagtgtctgaagacagttccgtcacacagatctaccacgccgtggccgctcttagtggtttcggcttgcctcttgcctcgcaggaggccttgagcgcccttacggctaggttatccaaagaggagaccgtcctcgcacgggtgtggagcaccgttctggagagcaggtccctgttttccaaacggactgtacaagcactccagacagccagccatctttctcaacaggcagacctgagaagcatcgttgaagaaatcgaagatctggtcgcgcggctggacgagctggggggtgtgtacctgcaatttgaggagggattggagactacagcactcttcgtggctgcaacctataaacttatggaccacgttggcactgaaccgagtattaaagaagatcaggtgatacagctgatgaacgcaattttttctaaaaagaacttcgagtctctgtccgaagcttttagtgtggcttctgctgctgctgtgctcagccacaatagataccatgtgccagtggttgtggtgcccgagggctctgcctccgatacacatgaacaggccatcctccgcttgcaagtcacaaatgttttgtcccaacccctgacacaggccaccgtcaagctggagcacgctaaatctgtagccagtagggccactgttctacagaaaacgtcctttacccccgtgggctag

SEQ ID NO: 132750 - DNA, 417 bp, synthetic construct
  misc_feature 1..417: note = Description of Artificial Sequence: Synthetic coding sequence
  source 1..417: mol_type = other DNA
gaacttgacactagtgagcggaagattgaatttgatagcgcttcaggtacttatacactatatctgattataggggacgcgaccctgaagaatccaatcctatggaatgtggctgatgtagttatcaaatttcccgaagaagaagcgccttcgactgtattgagccagaaccttttcactccaaagcaggaaattcaatggatccggatcggcgcgaacgtctcgaactttacattcgctcctagcaccatcatctttcatctgggacatgccgcaatgctgggcttaatgtatgtatactggacccaactgaacatgttccagaccctgaagtatctcgctatcctggggtcggtgacctttctcgcgggcaaccggatgctcgcccagcaggccgtcaagagaaccgctgagtag

SEQ ID NO: 132751 - DNA, 417 bp, synthetic construct
  misc_feature 1..417: note = Description of Artificial Sequence: Synthetic coding sequence
  source 1..417: mol_type = other DNA
gagctggacacaagtgaacggaaaatcgaatttgactcagcgagcggcacatacacgttgtatcttattatcggcgatgccacactgaagaacccaatcttatggaacgtggctgatgttgtaataaagttccccgaggaggaggctccaagcacagtgctgagccaaaacttgttcacccccaagcaagaaattcagtggattagaatcggcgcaaacgtttctaactttacttttgcccctagtaccatcatatttcatctaggtcatgccgccatgctagggctaatgtatgtctactggacccagctcaacatgttccaaacactgaaatacctggccatattgggatcagtcactttcctggctggaaaccggatgctggcacaacaggctgtcaaacgcacagcacactag

SEQ ID NO: 132752 - DNA, 504 bp, synthetic construct
  misc_feature 1..504: note = Description of Artificial Sequence: Synthetic coding sequence
  source 1..504: mol_type = other DNA
atgcaacggaccgtgcaagctctgcagacggcctctcacctctcccagcaggccgatctccggtctattgtggaagagattgaggatctcgtggccagactggatgaactgggaggggtctatctgcagtttgaggagggtctcgagaccaccgccctgtttgtggccgctacctataagctcatggatcacgtcggaactgagccgagcatcaaggaagaccaggttattcagctgatgaacgccatcttctccaagaagaatttcgaaagccttagcgaagcgttctccgtagcctctgccgctgccgtgctgagccataacaggtatcacgtgcccgtcgttgtcgtgccagaggggagtgccagtgatacccacgagcaagcgatcctcaggctgcaggtgacaaatgttctcagccagcccctgacccaggccacagttaaactggaacatgcaaaatcagtggcatctcgagctacggtcctgcagaagacttcttag

SEQ ID NO: 132753 - DNA, 444 bp, synthetic construct
  misc_feature 1..444: note = Description of Artificial Sequence: Synthetic coding sequence
  source 1..444: mol_type = other DNA
tgaggaacttacacactgtacttaattattggtgatgcaacgttgaagaaccccatactgtggaacgttgcggacgtagtgatcaagtttccagaagaggaggcaccatcaactgtcctttcccagaacctgtttacacccaaacaagagattcagcacttgttccgcgaacccgagaaaaggccgcctacagtggtgagtaacacctttacagctcttattctgtctcccctgttgctcttgtttgcactgtggattcgcattggggctaacgtgtctaattttactttcgccccttcgaccatcatatttcaccttggacatgcagagcagcatatctcttcaagaaggaagatggagatcctcaagacagagtgtcaggagaaagagagcagaactatccactccatgcgaaggaagatggaaaagaaaaattttatatag

SEQ ID NO: 132754 - DNA, 936 bp, synthetic construct
  misc_feature 1..936: note = Description of Artificial Sequence: Synthetic coding sequence
  source 1..936: mol_type = other DNA
atgcagcgtcccggtccatttagcaccctctacggccgggtgctcgcgccactgccgggccgggccgggggcgctgcgtcaggaggtggcggcaattcctgggacttgccgggttcccatgtaagattacctgggcgcgctcagagcggtaccagagggggggccggtaacaccagcacatcctgtggcgattccaactccatttgtccagccccatctaccatgtccaaggcggaagaggcgaagaagttggccggaagagccgcagtggagaaccatgtccgcaacaaccaggttctcggtatcggttccggatctaccatcgtgcatgccgtacaacggatcgctgagcgggtgaagcaggaaaatctgaatctggtctgtattcccaccagctttcaggccagacagctgatactccagtacgggttaaccctgtcggacctagataggcaccctgaaatcgacctggcaatcgacggtgctgatgaagtcgacgcagacttaaatctgatcaagggaggtgggggatgtctaacccaagagaaaatagtcgcaggctacgcgagccggttcatagtgattgcggatttcaggaaagattccaagaatctaggagaccagtggcataaggggataccgattgaggtgattccaatggcgtacgtgcccgtgtctagagctgtgtcccagaagttcggcggggttgttgagctgagaatggccgttaacaaagcgggaccagtcgtcacagacaacggaaactttattctcgattggaagttcgacagggtccataagtggagcgaggtaaatactgccatcaagatgatcccaggagtggtggacaccggtctgttcatcaacatggccgaaagggtttatttcggaatgcaagacggttcagtcaacatgcgcgaaaaacccttttgctag

SEQ ID NO: 132755 - DNA, 534 bp, synthetic construct
  misc_feature 1..534: note = Description of Artificial Sequence: Synthetic coding sequence
  source 1..534: mol_type = other DNA
gcccgtcagctgatcttacagtacggcttgaccctgtctgatctcgatcgacatcccgagatagatcttgctatcgacggagcagacgaggtcgatgcagacctgaacctcattaagggcggcggcggatgcctgacccaggagaagatcgtggctggctacgcatctcggtttattgttatagcggactttcgaaaggattccaagaatctaggggatcaatggcacaaagggattcccatcgaggtgattccaatggcctatgttcctgttagccgggcagtgagccagaagtttggaggggttgtggagcttcggatggccgttaataaggcaggccccgtcgtgaccgataacggtaactttatcctggattggaaatttgatcgtgtgcataagtggtccgaggtcaatacagccatcaagatgattcccggcgtggtggataccggtctgttcatcaatatggcagagcgtgtctactttggtatgcaggatggtagcgtcaatatgagggagaaacccttctgctag

SEQ ID NO: 132756 - DNA, 492 bp, synthetic construct
  misc_feature 1..492: note = Description of Artificial Sequence: Synthetic coding sequence
  source 1..492: mol_type = other DNA
atgcgcatcgaaaaatgttacttttgttccggcccaatttacccagggcacggcatgatgttcgttcgcaacgattgcaaagttttccgtttttgcaagtccaaatgtcacaagaactttaaaaagaagcgcaatcccaggaaagtgagatggaccaaggctttccgaaaagccgccggtaaggaattgactgttgacaattcctttgaattcgaaaaacggcgtaatgagcctattaagtaccagagggagctctggaacaaaactatcgacgcaatgaagcgcgtcgaggagataaaacagaaaagacaagctaagttcatcatgaatcgcctgaagaaaaacaaggaactccaaaaggtgcaggatatcaaggaagtgaaacagaatattcatctcattcgcgccccgttagcaggcaagggaaaacagctggaggagaagatggtgcagcagctgcaggaggatgtcgatatggaggatgctccatag

SEQ ID NO: 132757 - DNA, 1161 bp, synthetic construct
  misc_feature 1..1161: note = Description of Artificial Sequence: Synthetic coding sequence
  source 1..1161: mol_type = other DNA
atgtgctcaagtgtcgcagctaaactgtggtttctcacagacagacgcatacgggaagattatccgcagaaggagattctacgagccctgaaagcgaaatgctgcgaggaagaattggatttcagagctgttgtgatggatgaggtggtcctgacgatcgagcaaggtaaccttggcttgaggatcaatggtgaactcatcaccgcataccctcaagttgtggtggtgagagtgccgaccccatgggtacagtcagactcagatataactgtgctgagacacctggagaagatgggttgccgactgatgaaccgccctcaggcaatcctcaactgtgttaataagttttggacatttcaggaacttgctggtcacggagtgcctctgcctgataccttttcatacgggggtcatgagaacttcgccaagatgatagacgaagctgaagtgctagagttcccgatggtggtgaaaaatacaagaggacatcgaggcaaggcggtgttcctagcacgtgacaagcatcatttggcagatttgtcacacctgatacgccacgaagcaccttatctcttccaaaagtacgtgaaagaatcccacggacgcgatgttcgcgtcattgttgtgggtggcagggtggtggggaccatgttgcgatgtagcacggatggaaggatgcagagtaattgctcgctcggtggtgtcggcatgatgtgcagtctgtctgaacagggcaaacagctcgcaattcaggttagcaatatcctgggaatggacgtgtgcggcatagacttactcatgaaggatgacgggtcattttgcgtgtgcgaagcgaatgcaaatgttggattcatagcctttgataaagcctgcaacctggatgtcgccggcattatcgcagattatgctgcgtctctcctgccctccggacgcctgactcgccgaatgtcactcctgtccgttgtatccaccgcgtcagagacaagtgaacccgaactcgggccacccgcatctacggccgtcgataacatgagcgcctcatcctcaagtgttgattccgaccccgagtctaccgaaagagagctcctcaccaaacttcctggaggtctatttaatatgaatcagctgttagccaacgagatcaagttgttggtcgactag

SEQ ID NO: 132758 - DNA, 1161 bp, synthetic construct
  misc_feature 1..1161: note = Description of Artificial Sequence: Synthetic coding sequence
  source 1..1161: mol_type = other DNA
atgtgctcttccgtagcagccaaactgtggtttctgaccgacagaagaattagagaagactacccccagaaagaaatactcagggcccttaaggcgaagtgctgcgaggaggaactggatttccgggcagttgtgatggacgaagtagtactgacaatagagcaaggaaatttgggactcaggatcaacggggaactcatcacagcctacccgcaggtagtggtggtgcgtgtccccaccccctgggtgcaatctgattccgatattaccgttttgagacacctggaaaaaatgggctgtagattaatgaacaggcctcaggccattctaaattgcgttaataagttctggacctttcaagagctcgcaggccatggagtgcctctccccgacaccttctcctatggtggtcatgagaacttcgctaagatgatcgatgaggcggaagtgttggaatttcctatggttgtaaagaacactagaggccaccgtggtaaagctgttttcctggcaagagataagcatcatctggcggacctgagccacctgattcggcacgaagccccctatttatttcaaaaatacgtcaaagagagccacggccgggacgtccgtgtaatcgtggtgggaggacgagttgtgggcacaatgcttcgctgttctacagacggccgaatgcagagcaattgtagcctgggtggcgtgggaatgatgtgctccctgagtgagcagggcaaacaacttgcaatccaggtctcgaatatcctcgggatggacgtgtgcggcatcgatttactgatgaaagacgatggaagtttctgcgtgtgtgaagctaatgccaacgtgggatttattgccttcgataaagcctgcaatttagacgttgctgggattatcgcagattatgccgcgagcctgttaccctcaggcaggttgacacggcggatgtcccttctttcagtggtgagtacggcctcagaaactagcgagccagagctgggacctcccgctagtaccgccgtggataacatgtccgcgtcctctagttccgttgacagcgacccggagtccacggagagagaattgctgaccaagttgcccggtggtctgtttaacatgaatcaactgttagccaatgaaattaagctgctagtcgattag

SEQ ID NO: 132759 - DNA, 1161 bp, synthetic construct
  misc_feature 1..1161: note = Description of Artificial Sequence: Synthetic coding sequence
  source 1..1161: mol_type = other DNA
atgtgctcttccgtagccgcaaagctgtggttcctgaccgataggagaatcagagaggactacccacagaaagagattctgagagctctgaaggctaagtgttgcgaagaggaattggacttccgcgcagtggtgatggacgaggtcgtgctgactattgaacagggaaatctgggtctgagaattaacggagagctgattactgcttaccctcaggtcgtggttgtccgagtccccacaccctgggttcagagtgactcagacattacggttttgcgacatctggaaaagatggggtgtaggttgatgaacagaccacaggcaatcctcaactgcgtaaataagttctggacctttcaggaattggctgggcatggagtgccattaccagacacctttagttatgggggacatgaaaactttgctaagatgatagatgaggccgaggttttggagttccctatggtggttaagaacaccagaggacaccgtggcaaagccgtattcctggcaagggataaacatcacttggcagacctaagtcatctgatccggcatgaggccccatacctgtttcagaagtatgtgaaagagagtcacgggcgggatgtaagggtgattgtggtcggaggcagggtcgtgggcaccatgctgcgctgcagcacagacggtcgaatgcaatccaactgcagcctgggaggagtgggaatgatgtgtagcttgtccgagcagggcaagcagctggctatccaagtgtccaacatattggggatggatgtgtgcgggatagacctactcatgaaggatgacggctcgttttgtgtgtgtgaggctaatgcgaatgtgggcttcatcgctttcgacaaagcttgcaacttggacgtagcaggtatcattgccgactacgccgcatccctgttaccttccgggcggctcactcgaaggatgagcctcctttctgtggttagtacggctagcgaaacctccgagcctgagctggggccccccgcatcaactgccgtcgacaatatgtccgctagctcctcctctgtcgattccgaccccgaatccactgagcgcgaattgctcactaaattgcctgggggcttattcaatatgaatcagttgctagccaatgaaataaaactgctggtcgactag

SEQ ID NO: 132760 - DNA, 288 bp, synthetic construct
  misc_feature 1..288: note = Description of Artificial Sequence: Synthetic coding sequence
  source 1..288: mol_type = other DNA
atgtgcagttccgtagccgcaaagctgtggttcctgaccgacagacgcattagagaggactacccacagaaagagattttgagggctttaaaggccaaatgctgcgaagaggaactcgacttccgagctgtagtgatggatgaagtcgtgttgacaatcgagcaggggaatctggggcttcggatcaatggagaactgattacggcctatcctcaggtggttgtagtccgtgtacctacgccctgggtgcagtctgattccgacataacagtcttacggcacctttag

SEQ ID NO: 132761 - DNA, 345 bp, synthetic construct
  misc_feature 1..345: note = Description of Artificial Sequence: Synthetic coding sequence
  source 1..345: mol_type = other DNA
atgtgcagctccgttgcggccaagttgtggttcctgacggaccggagaattcgggaagactatccacagaaagagatcctaagggcactaaaggctaagtgctgcgaagaggagctcgacttcagggccgtggtgatggacgaagtcgttctgactatagaacagggaaacttgggattacggatcaacggtgaacttatcaccgcttacccacaggtcgtggtggtgagggtgcctacgccatgggtgcagtccgatagtgatataacggttctccggcatctggagaagatgggatgccgccttatgaaccgacctcaagccattctgaattgcgttaattag

SEQ ID NO: 132762 - DNA, 645 bp, synthetic construct
  misc_feature 1..645: note = Description of Artificial Sequence: Synthetic coding sequence
  source 1..645: mol_type = other DNA
atggggaggaggccagcccgttgctatcgctattgtaagaataagccctatcccaaatcacgcttttgcagaggcgtacctgacgctaagatcagaattttcgacctcggtagaaagaaggcaaaggttgatgagttccctctctgcggccacatggttagtgacgagtacgagcaactatccagtgaggcccttgaagctgcacgcatatgtgccaataaatacatggtgaagagttgtgggaaagatggatttcatatcagagtgcgtcttcaccctttccatgtgatccggatcaacaagatgctgtcctgtgctggcgcagaccggttgcagaccggcatgcggggcgcattcggcaaaccccaggggacggtggcgagggtccatatcggacaggttattatgagcattcgcacaaagctacaaaataaggaacacgtcattgaagccctccggagagcaaagtttaaatttcctgggcgccagaagatccacataagcaaaaaatggggattcactaagttcaacgctgacgagttcgaagacatggtggccgaaaagaggcttatacctgacggctgtggagtgaagtacatccccaatcggggacccttagacaaatggcgggcactgcacagctag

SEQ ID NO: 132763 - DNA, 645 bp, synthetic construct
  misc_feature 1..645: note = Description of Artificial Sequence: Synthetic coding sequence
  source 1..645: mol_type = other DNA
atgggccgacgcccggcccgttgttacagatattgtaagaataaaccataccccaagtctcggttctgccgcggagtcccggatgcaaagatcaggatcttcgacctcggacgcaagaaggctaaagtagatgagttcccactgtgtgggcacatggtgtccgatgagtatgaacaactgtcctctgaagccctggaagcagcccgcatctgcgccaacaagtatatggtgaagagttgcgggaaagacggcttccatatcagggtcagactccacccattccatgtcatacgcattaataaaatgctatcttgcgcgggggccgaccgtctgcaaacaggcatgcggggtgccttcgggaagccacaaggcacagttgcgcgcgtccacatcgggcaggtaatcatgagtatccgaaccaagctccaaaataaagaacacgtgattgaggcactcagacgagcgaagtttaagttccctggcagacagaagatccacattagcaagaagtggggattcaccaaatttaatgctgatgagtttgaggatatggtagctgaaaaaagactcatacctgatggctgcggggtcaagtatattccaaaccgaggacctctggacaaatggcgggcacttcactcgtag

SEQ ID NO: 132764 - DNA, 645 bp, synthetic construct
  misc_feature 1..645: note = Description of Artificial Sequence: Synthetic coding sequence
  source 1..645: mol_type = other DNA
atgggcaggagaccagccagatgttaccgatattgcaaaaacaaaccctacccaaagtcacggttctgcagaggagtccccgacgccaaaatccggatcttcgacttaggacgcaagaaggctaaggtcgatgagttcccactttgcggacatatggtatctgacgaatacgaacagctgagttccgaggccttagaagccgcaagaatctgcgcgaacaagtacatggtgaaatcttgtggcaaagatggattccatatcagagtgcgactccacccctttcacgtcatcaggattaataaaatgctgagttgtgctggagctgatcgcctgcaaacggggatgcggggtgcttttggtaagcctcagggcacagttgccagagttcacatcgggcaggtcattatgagcatccggacaaagctgcaaaacaaagaacacgtgattgaagccctaagacgagctaagttcaagtttccgggccggcagaaaatccatatttccaaaaagtggggattcacaaagtttaacgcagacgagtttgaagacatggtcgccgaaaagcggctgattcctgatgggtgtggagtcaagtatattccaaatcgaggccctctggacaagtggcgggctctccattcttag

SEQ ID NO: 132765 - DNA, 606 bp, synthetic construct
  misc_feature 1..606: note = Description of Artificial Sequence: Synthetic coding sequence
  source 1..606: mol_type = other DNA
atggggaggcggccagcgagatgttaccggtactgcaagaataaaccctacccaaagtccaggttttgtagaggcgtgccagatgcaaagattaggatctttgacctcggtaggaaaaaagccaaagtcgatgaattccccctctgcggacatatggtgagcgatgagtacgaacagctctcttcagaagccctggaggccgcacggatttgcgcaaacaagtatatggtgaagagttgcggcaaggatggattccacattcgggtgaggctccacccttttcacgtcatcaggattaacaagatgctgagctgcgccggagcagacagactccagacaggtatgaggggagcttttggaaagcctcagggcaccgttgctcgcgtccacataggccaggtgatcatgtctatcagaacaaagctgcaaaacaaggagcacgtaatagaggctctcagacgtgccaagttcaagtttccaggtcggcagaaaattcatatcagcaaaaaatggggcttcactaaatttaacgctgacgaatttgaggatatggtggctgaaaaaagactgatcccagatggatgtggcgtaaaatacatcccctag

SEQ ID NO: 132766 - DNA, 327 bp, synthetic construct
  misc_feature 1..327: note = Description of Artificial Sequence: Synthetic coding sequence
  source 1..327: mol_type = other DNA
cctaagagtcgcttctgtcgcggggtgcctgacgcaaagatacggatctttgacctggggagaaagaaggcgaaagtggacgagttcccactgtgtggacacatggtttccgatgaatacgagcaattgagcagcgaagctctggaggctgcccggatctgcgcaaataagtacatggtaaagtcctgtggtaaggatggctttcatatcagggtacgcctgcacccttttcatgtgattcgcattaacaaaatgctctcatgtgccggagccgaccgacccacccttctgtgtcaatgctgggaaaccagccgcaacacgtcgtag

SEQ ID NO: 132767 - DNA, 546 bp, synthetic construct
  misc_feature 1..546: note = Description of Artificial Sequence: Synthetic coding sequence
  source 1..546: mol_type = other DNA
atgggtaggcggcctgccaggtgctacagatactgtaagaacaaaccttacccaaagtcgagattctgtcggggcgttccggatgccaaaatcaggatatttgacctgggacgtaagaaggcaaaggtggacgagtttcctttatgcggacacatggtgtcggacgaatacgaacagctgtcttcggaggcactagaagctgcgcgcatctgtgccaacaagtacatggtgaagagttgcggcaaggacggattccatattagggtgcgcctccatcctttccatgttatcagaatcaataagatgctctcctgtgcaggagccgatcggtcaaccagtcagcggtctggcgcctccccaagttctatgcttatgaaccttaagacttggtggctgaaatctgggtcatcccagatggctgttggttcatcgacttctccaattgtcgccctatggaccagcggtggcccctgtactcacgagggctttcagtgcgctgcacctctgctgatactgacgaacaagttctactttctctccacctag

SEQ ID NO: 132768 - DNA, 537 bp, synthetic construct
  misc_feature 1..537: note = Description of Artificial Sequence: Synthetic coding sequence
  source 1..537: mol_type = other DNA
atggcccaggatcagggggagaaagagaaccctatgcgggaactacggattaggaagctgtgcctaaatatctgcgtaggagagagtggggaccgcctgactcgcgctgccaaggtgctcgagcaactcacaggccaaacacccgtgttctcgaaagccagatacacagtccgctctttcggcatccggagaaacgagaaaatagcggttcattgcactgtgcggggcgcaaaggctgaagagattctggagaagggcctcaaagtgagggagtacgagctccgaaagaacaattttagtgacaccggcaacttcggtttcggaatccaagagcatatcgatctcggaattaaatacgatccttccatcggcatttacgggctagacttttacgtggtgcttggaaggcctggattttcgattgcggacaagaagcgaaggaccggatgtattggcgctaagcatcggatctcaaaagaggaggccatgagatggttccaacagaagtacgatggcattattctaccgggaaagtag

SEQ ID NO: 132769 - DNA, 396 bp, synthetic construct
  misc_feature 1..396: note = Description of Artificial Sequence: Synthetic coding sequence
  source 1..396: mol_type = other DNA
caagatcaaggcgaaaaggagaatccaatgagggagttgcggattagaaaactctgcctgaacatttgcgtaggtgagagtggagatcgactcactagagccgccaaggtgctagagcagcttactggtcagacgccggtttttagcaaggctaggtacacagtgaggagtttcggaattaggagaaacgaaaaaattgccgtgcactgtactgtgcggggcgctaaggctgaggaaattttggagaaggggctgaaggttcgcgaatacgaactccggaagaataactttagcgatactggcaattttggtttcggcatccaagagcatatcgatctgggaattaagtatgaccctagcattggaatatacggattggacttttatgtagtgtag

SEQ ID NO: 132770 - DNA, 525 bp, synthetic construct
  misc_feature 1..525: note = Description of Artificial Sequence: Synthetic coding sequence
  source 1..525: mol_type = other DNA
caggatcagggagagaaggaaaaccccatgagggaactaaggatcagaaaattatgcttgaacatttgtgtgggggagagcggggaccgactgacgcgtgctgcaaaggtgcttgaacaactgacgggccaaacgcctgtattcagcaaagctcggtataccgtgcggtcttttgggatccggcgaaatgaaaagatagccgtgcactgcaccgtccgaggcgcgaaagcggaggaaatcttggaaaagggactcaaggtccgcgagtacgagctgcgaaagaacaattttagtgatacggggaattttggctttggaattcaagaacacattgatctcgggatcaagtacgacccgtctattgggatatatggcttggacttttatgtggtgctcggacgtccaggcttctccattgctgacaagaaaagacgcactggatgcattggggcgaagcatcgcatcagtaaggaggaggccatgaggtggttccagcagaaagtaaagttgatttatctgaagtag

SEQ ID NO: 132771 - DNA, 498 bp, synthetic construct
  misc_feature 1..498: note = Description of Artificial Sequence: Synthetic coding sequence
  source 1..498: mol_type = other DNA
atgccccctaaattcgatcccaatgaaatcaaagtggtctatctgcggtgtaccgggggggaagtgggggctacatccgccctggccccaaagataggacctctagggctgagccctaagaaggttggggatgatatcgcaaaggctaccggcgattggaagggtttgaggattaccgtgaagctaaccatacagaacaggcaagcccaaatcgaagtcgttccctcagcttctgcactgatcatcaaggccctgaaggaaccaccgcgcgaccgcaagaagcaaaagaacatcaagcattcaggcaatatcacattcgatgagattgttaacatagccagacaaatgaggcatcgctccctggcacgagagctatctggtacaatcaaggagatcctcggcaccgcccagtccgtgggttgcaatgtcgacgggagacaccctcacgacataatcgacgacatcaattcaggagccgtcgaatgccccgcctcttag

SEQ ID NO: 132772 - DNA, 399 bp, synthetic construct
  misc_feature 1..399: note = Description of Artificial Sequence: Synthetic coding sequence
  source 1..399: mol_type = other DNA
atgcccccaaagtttgaccctaatgaaataaaagttgtgtatctacggtgtaccggcggtgaagtcggagctacctccgccctcgctcccaagatagggccccttgggttgatagaagttgtgccgagcgcatcagccctgatcattaaagcacttaaagaaccacctagggatcggaaaaagcaaaagaatattaagcattctgggaacatcacattcgacgagatcgtcaacattgccagacaaatgaggcatagatctctggcaagggagctgtctgggacaatcaaggagatcctggggaccgctcaaagcgtagggtgtaacgttgatggtagacatccgcatgatattatagatgacatcaactctggggctgtggaatgccccgcatcatag

SEQ ID NO: 132773 - DNA, 636 bp, synthetic construct
  misc_feature 1..636: note = Description of Artificial Sequence: Synthetic coding sequence
  source 1..636: mol_type = other DNA
atggcacctagccggaatgggatggttttaaagcctcactttcacaaggattggcagaggcgcgtggccacttggtttaaccagccggctcggaagatccgtagacgcaaagccagacaggcgaaagcgcggagaatcgctccacgaccggcctcaggccctattcgccccattgtgaggtgtccaacagtcagatatcacaccaaggttagggccggccgaggcttctcacttgaggaactacgggtcgccggcatccacaagaaagtagctcggacaatcggaatcagtgtggatcccagaagaagaaacaagagtacagaatctctgcaagccaatgtacagagattaaaggagtaccgatccaagttgatcctgtttccgagaaagccttccgcaccaaaaaagggggattcaagtgcagaggaactgaaactggccactcagttgactggccctgtcatgcccgtccgcaatgtgtacaaaaaagaaaaagccagggtgattacggaggaggagaagaactttaaagctttcgccagcttgagaatggcgagggcaaatgcccgactgttcggaattcgggctaaacgggccaaagaggcagcagaacaagacgtcgaaaaaaaaaagtag

SEQ ID NO: 132774 - DNA, 636 bp, synthetic construct
  misc_feature 1..636: note = Description of Artificial Sequence: Synthetic coding sequence
  source 1..636: mol_type = other DNA
atggccccaagtagaaatggcatggtcttgaagcctcacttccacaaagattggcagaggcgagtcgccacttggtttaaccagcctgcccggaagattaggcgaagaaaagcgcgccaagcgaaggctaggaggattgcccctcgcccggccagcggccccattcgaccaatagttcggtgccctaccgtccgataccataccaaggtgagagccggccgagggtttagcctggaggaactcagagtcgcgggaatccataaaaaggtcgccaggactatcggcatatctgttgatccccggcgaaggaataaatccacagagagcctacaggccaacgtgcaaagactaaaggagtacagatccaaattgattttgttcccacgaaaaccgagtgcccccaaaaagggtgattcttccgccgaggagctgaaactggcaactcagctcacaggccccgtcatgcccgtgcgcaacgtctacaaaaaggagaaggcacgagtaatcaccgaggaggaaaaaaattttaaggcatttgcaagtctgcgtatggcgagggcgaatgcccgcctgtttggtattcgggccaagagggcgaaggaggcggctgagcaagacgtggaaaagaaaaaatag

SEQ ID NO: 132775 - DNA, 495 bp, synthetic construct
  misc_feature 1..495: note = Description of Artificial Sequence: Synthetic coding sequence
  source 1..495: mol_type = other DNA
atggcgcccagcagaaatggaatggtgttgaagcctcacttccataaggactggcaacggcgggtggccacctggtttaaccagccggcccgcaaaatccgccggcggaaagccaggcaagcgaaagcacgcaggattgcccctcggcccgcttccggccccattcgtcccatcgtccggtgtccaacagtgcggtatcacaccaaggtgcgtgctggaaggggtttctcactggaggaactcagagtagccggtattcataaaaagggcgattcatctgccgaggagctgaagttggccacacagctcactgggcccgtcatgcctgtgaggaacgtgtataaaaaggagaaggcgcgcgtgataacggaggaagagaagaatttcaaagcatttgccagccttcggatggcgagggccaatgccaggctctttgggatccgagcaaagagggccaaggaggccgctgaacaagacgtcgagaaaaagaagtag

SEQ ID NO: 132776 - DNA, 615 bp, synthetic construct
  misc_feature 1..615: note = Description of Artificial Sequence: Synthetic coding sequence
  source 1..615: mol_type = other DNA
atgggggcatacaagtacattcaggagctttggagaaagaaacagagtgacgtgatgaggtttcttctgagggtacgttgctggcagtacagacagctgagtgcactccacagagcacccaggccaacaaggccagataaagcacgccggctggggtataaggctaagcaaggatacgtaatctaccggattcgtgtgaggcgagggggacggaaacgcccggtgccaaaaggggcaacctacggcaagcctgtgcaccacggcgtgaatcaattaaagttcgcccgaagcctgcagtctgtggcagaagagcgggccggcagacattgcggcgccttaagagtcctaaattcttattgggtgggtgaggatagcacctataaatttttcgaagtcatcctcatcgatccctttcataaagctattaggcggaaccctgacactcagtggatcaccaaacccgtgcataaacatcgtgagatgaggggcctcaccagcgctggcagaaagtctcgagggcttgggaaagggcacaaattccaccatactatcggaggcagcagaagggctgcatggcgacgcaggaacacgctacagctgcatcggtatcggtag

SEQ ID NO: 132777 - DNA, 615 bp, synthetic construct
  misc_feature 1..615: note = Description of Artificial Sequence: Synthetic coding sequence
  source 1..615: mol_type = other DNA
atgggggcctataaatatattcaggagttgtggaggaagaagcaaagtgatgttatgcgctttctgctgcgggtcagatgctggcagtaccggcagttatccgctctgcatagggctcccaggccaacacgtccagacaaagctcggcgactggggtacaaggctaaacaagggtacgtgatttatagaattagagttcgacgagggggtcgcaaacgtccagttcctaaaggagccacttatggcaagccggttcaccacggcgtgaaccagctgaagttcgcccggtcactacagagtgtggccgaggagagagcaggtcgtcactgcggtgccctgagagtgttgaattcctattgggtgggcgaagactccacatataagttcttcgaggtgatcctcatcgacccgtttcacaaggccattagacgtaaccccgacactcagtggatcacgaagcccgtacacaagcatcgggaaatgcggggactcacttctgctggacggaaatcgcggggcctgggcaaggggcacaaattccaccacaccattggcggctctagacgcgctgcatggcggcgaaggaatactctacagttacatcggtacaggtag

SEQ ID NO: 132778 - DNA, 528 bp, synthetic construct
  misc_feature 1..528: note = Description of Artificial Sequence: Synthetic coding sequence
  source 1..528: mol_type = other DNA
atgggggcgtacaaatatatccaggagttgtggagaaagaagcaatccgacgtgatgaggtttctgctccgcgtgaggtgttggcagtatcgccaactgagtgcgctacaccgagcaccccgacccactcgaccagacaaggcccgccgactggggtacaaagcaaaacagggatacgtgatctatagaataagagttcgcagggggggaagaaagcggcccgtgcctaagggcgcaacctacggaaaacccgtgcaccacggcgtgaaccagctgaaattcgcacgttcgctgcagtctgtggccgaagtgaacgctggccgccactgtggcgccctccgcgtgctgaacagctactgggtgggcgaggactccacttataaattcttcgaggttatcctgattgaccctttccacaaggcaatacgccgcaacccagacacgcaatggattactaaaccagtccataaacatcgggagatgcgcggcctaaccagcgcggggaggaagtcgagggggttgggatag

SEQ ID NO: 132779 - DNA, 615 bp, synthetic construct
  misc_feature 1..615: note = Description of Artificial Sequence: Synthetic coding sequence
  source 1..615: mol_type = other DNA
atgggcgcatacaaatacatccaggaactgtggcgcaagaagcaatcagatgtaatgaggtttcttctgagggtcagatgttggcagtatcgccaactatctgctctgcacagggcaccacgacccacgcgacctgataaagcccgccggctgggctacaaagccaaacaaggctatgtaatatacagaatccgagtgagacgcggcgggcgaaagcggccggtgcccaagggggccacatatgggaaacccgtgcatcatggtgtgaaccaactgaagttcgctagaagcctgcagtctgttgcagaagaacgagccggacgccactgcggggccttgagagttctgaatagctactgggtaggcgaagactccacctataagttcttcgaagtgatcttaatagacccattccataaggcaatccggcgcaaccccgatactcagtggattacaaagcctgttcacaagcaccgcgaaatgcgggggctcactagcgctggaaggaagtctaggggcctgggcaaaggtcacaaatttcatcatactatcggcggttcaaggagagccgcctggcgcaggagaaataccctccagctccaccggtaccggtag

SEQ ID NO: 132780 - DNA, 615 bp, synthetic construct
  misc_feature 1..615: note = Description of Artificial Sequence: Synthetic coding sequence
  source 1..615: mol_type = other DNA
atgggtgcctacaaatatatccaggaactatggaggaagaagcaatccgacgtcatgcgtttcctactccgcgtgagatgctggcaataccgccagctgtccgccttgcacagggctcctcgtccaacccgcccagataaggcccggcgcctggggtacaaggctaaacagggttatgtgatataccgtatacgagtgcggagaggcggccgcaagcgcccagtgccgaaaggcgctacctacggtaagcccgtgcaccatggggtgaaccagctgaaatttgctaggtccctgcagtctgtagcagaggaacgcgccggccggcactgcggcgcactgcgagtactgaacagctactgggttggggaagactccacctataagttttttgaagtcattttgattgatccgtttcataaggctattcgcaggaaccccgatacccagtggattacgaaacctgtccacaagcaccgtgagatgcgagggctgactagcgctggccggaaatcccgtggtctgggcaagggccacaagttccatcatacaattggggggtctagacgtgctgcatggagacgtaggaacacgctgcagttgcaccggtataggtag

SEQ ID NO: 132781 - DNA, 402 bp, synthetic construct
  misc_feature 1..402: note = Description of Artificial Sequence: Synthetic coding sequence
  source 1..402: mol_type = other DNA
atgggggcatacaaatatatccaggagttatggagaaagaagcagtctgatgtgatgcgcttcctgctgagagtgagatgctggcagtacagacaattatctgcccttcacagagcacctcgaccgacgagaccagataaagctagaaggctaggctataaagcaaagcagggctacgtgatctaccgaattagggtcaggaggggcggtcgcaagcgacctgtgcctaaaggggcaacctatgggaaacccgttcatcacggagtaaatcagcttaagtttgctaggtctttgcagtctgtggccgaggaacgcgcgggacgtcactgcggcgctctgcgggtgctcaattcgtattgggtcggggaagatagcacatataagttctttgaagttatttag

SEQ ID NO: 132782 - DNA, 525 bp, synthetic construct
  misc_feature 1..525: note = Description of Artificial Sequence: Synthetic coding sequence
  source 1..525: mol_type = other DNA
atgggggcctacaagtacatccaggaactttggcggaagaaacaatccgatgttatgagattcctccttcgagtgagatgttggcagtaccggcagttgagcgccctacatcgcgcccctagaccaactcgccccgacaaagcacgtcgcctcggttataaggcgaaacaggggtatgttatctacaggatcagagtccgtcgcgggggacgcaagaggccagtaccgaagggcgccacatatggcaagcccgtgcatcatggcgtgaatcagctcaagttcgccagaagcctccagagcgtggcggaagagagagccggtcgccactgcggagctctcagggtgttgaactcatactgggtgggcgaggattcaacatacaagttctttgaggttattttgattgatcctttccacaaagccataaggaggaaccctgatacacagtggatcacaaaacctgtgcataaacacagggagatgcgcggtctgacaagcgctggccgtaagtctcggggactctag

SEQ ID NO: 132783 - DNA, 615 bp, synthetic construct
  misc_feature 1..615: note = Description of Artificial Sequence: Synthetic coding sequence
  source 1..615: mol_type = other DNA
atgggcgcttacaagtacattcaagaactgtggaggaaaaaacaaagcgacgtgatgcggttccttttacgggtccgatgttggcagtatcgccagctctctgccctccaccgggctccaaggcccactagacctgataaagctaggcgccttggatataaggctaagcaaggatacgtgatctataggattcgcgtccgaagagggggtcggaaaaggcctgtgccaaaaggagccacatacggcaaaccagtgcatcacggtgtgaaccagttaaagtttgcaaggagcctccagagtgtggctgaggagcgcgccggaaggcactgcggggcattaagggtgttgaactcctattgggtcggagaggactcaacatacaaattttttgaggtgattttgattgacccattccacaaagcgatccgacgcaaccctgatactcagtggataacaaagcccgtgcacaaacaccgagagatgagggggctgactagcgccggtcgaaaaagccgcggtcttgggaagggtcacaagttccatcataccatcggcggctctcgacgtgccgcttggcgtcggcgaaacaccctgcaactacaccgatacaggtag

SEQ ID NO: 132784 - DNA, 180 bp, synthetic construct
  misc_feature 1..180: note = Description of Artificial Sequence: Synthetic coding sequence
  source 1..180: mol_type = other DNA
atgggagcttacaagtatatccaggagctgtggagaaaaaagcaaagtgatgtcatgcggtttttactgcgagtccgttgctggcaataccgtcagttatcggcgcttcacagagcacctaggcccacaagacccgataaagccagaaggctgggttataaggctaaacagggcacctag

SEQ ID NO: 132785 - DNA, 438 bp, synthetic construct
  misc_feature 1..438: note = Description of Artificial Sequence: Synthetic coding sequence
  source 1..438: mol_type = other DNA
atgggcgcctacaaatacattcaggaactgtggaggaaaaagcagagtgacgtgatgcggtttctgctgcgcgttcgctgctggcagtatagacaactgagcgccctgcaccgcgctccacggcctacaaggcctgataaggccagacgcctgggttataaggcgaaacaagggtacgttatctaccgtatccgagtgaggagaggtgggcgtaaaagacccgtgcccaaaggagctacatacggtaagcctgtgcatcacggtgtcaatcagttgaaatttgctaggtctctacagagcgtggctgaagaacgcgctggaagacactgcggggcccttcgggtgctcaattcctattggatggaatcccatagtcacagcgggggatctgccgttggacagagcagactcaccgccacttccgtctcacgggtctag

SEQ ID NO: 132786 - DNA, 495 bp, synthetic construct
  misc_feature 1..495: note = Description of Artificial Sequence: Synthetic coding sequence
  source 1..495: mol_type = other DNA
atgggagcttacaagtacattcaggaactgtggcgaaagaagcagagcgatgtgatgcggttcctgctgcgcgtccggtgctggcagtacagacagctgtctgctctgcacagggctccacgccccacaaggccggataaggctcgtaggctaggctacaaagctaaacagggctacgtcatttatagaattcgcgtgcgacgggggggacggaaacggccggtaccaaaaggggccacgtatgggaaaccagttcaccatggagtaaatcagttgaaatttgcccgtagcttacagtctgtggccgaggaacgcgctggccggcactgtggggcactgcgagtccacaagcacagggagatgaggggactcacgtcagcgggtcgaaagtctaggggattaggaaagggccacaaatttcaccataccattgggggctcgaggagagccgcctggcgtagaagaaacacactgcaattgcacaggtaccgatag

SEQ ID NO: 132787 - DNA, 441 bp, synthetic construct
  misc_feature 1..441: note = Description of Artificial Sequence: Synthetic coding sequence
  source 1..441: mol_type = other DNA
atgcatattcgcaaagccacgaaatatctaaaagatgtaaccttacaaaagcaatgcgtacccttcagacggtataatggaggggttggcagatgtgcccaagccaagcagtggggatggacccaaggtcgctggcccaagaaaagcgccgaattcctgttgcacatgctaaagaatgctgagtccaatgctgagttaaaggggctggatgtggatagcttggtgatcgagcacatccaggtcaataaggctcccaagatgcgccggcgcacctacagagcccatggacggattaacccgtatatgagttccccctgtcacatcgagatgattctcaccgagaaagagcagatcgttcccaaaccagaggaggaggtggctcaaaagaagaagatcagccaaaagaaacttaaaaagcagaagctgatggcgagggagtag

SEQ ID NO: 132788 - DNA, 555 bp, synthetic construct
  misc_feature 1..555: note = Description of Artificial Sequence: Synthetic coding sequence
  source 1..555: mol_type = other DNA
atggtccggtacagcctggatcccgagaatccgactaaatcctgtaaaagcagaggttccaacctgagagtgcacttcaagaacactcgcgaaaccgcccaggccatcaagggcatgcatattcgcaaggcaacaaagtacttgaaagacgtgacacttcagaaacagtgtgtgccctttcgtaggtacaatggcggagtggggcgctgcgcccaagcgaaacagtggggttggacgcaaggacggtggcctaaaaaatcggcggagttccttttacacatgcttaaaaatgctgagtcaaatgccgaattaaaaggattggatgtggatagcctcgtgattgagcacattcaggtcaacaaggcaccaaagatgaggcgtcggacctacagagcccacgggcggatcaatccttacatgtcgagtccctgtcatattgagatgatactgactgagaaggagcagatcgtgcccaagccggaggaagaggtggcacagaagaagaagatctcacagaagaagctgaaaaagcagaaactaatggccagagagtag

SEQ ID NO: 132789 - DNA, 555 bp, synthetic construct
  misc_feature 1..555: note = Description of Artificial Sequence: Synthetic coding sequence
  source 1..555: mol_type = other DNA
atggtcaggtatagccttgaccccgagaatccaacgaaaagttgcaaaagtaggggaagcaacctgagggtacactttaagaatacccgtgagacagcccaggctatcaaggggatgcatattcggaaggctactaaatacctcaaagatgtcaccttgcagaaacagtgtgtgcctttccggaggtataacgggggcgtaggccgctgtgcacaggctaagcaatggggttggactcagggcagatggcccaaaaagtccgccgagtttctgctccatatgttaaaaaacgccgaatcaaacgccgaactgaaggggttggatgtcgactcattggtaattgaacacatccaggttaacaaggcacccaaaatgagaaggaggacgtatagggcccacgggagaatcaatccgtatatgtcttctccttgccacatcgagatgatcttgactgaaaaggagcagatcgtgcccaagccagaggaggaggtggcccaaaaaaaaaaaattagccagaaaaaactgaagaagcaaaaactgatggcgcgtgaatag

SEQ ID NO: 132790 - DNA, 573 bp, synthetic construct
  misc_feature 1..573: note = Description of Artificial Sequence: Synthetic coding sequence
  source 1..573: mol_type = other DNA
tgacctcagggggttgatatccggcacaacaaagacaggaaggtacggagaaaagagcctaagagtcaggatatttacctgcgcttgctggtgaaattatacaggttccttgccaggcggaccaattccacgtttaatcaggtggtgctgaaacgcttgttcatgtcaaggacaaacagaccccctctgtccctttctcgaatgattcgtaaaatgaagttacctggtagagaaaacaaaaccgccgtggtcgttggtactattacagatgacgtaagagtgcaggaggttccgaagttgaaggtttgcgctttaagagtcacgtctcgggcccgttccagaatcctaagggctggggggaagattctcacatttgaccagcttgcacttgactccccaaaaggatgcgggacggtcctcctttctggccctaggaagggaagagaggtgtaccgacatttcggcaaggcaccagggacaccacattctcatacgaagccctatgtgaggagtaaaggccgtaaattcgaaagagccagaggcaggagggctagcaggggctacaaaaattag

SEQ ID NO: 132791 - DNA, 408 bp, synthetic construct
  misc_feature 1..408: note = Description of Artificial Sequence: Synthetic coding sequence
  source 1..408: mol_type = other DNA
atgggggtggacattagacataataaggacaggaaggtcaggagaaaggaacctaaaagtcaggatatataccttaggctcctggttaagttgtacaggtttctggctagaaggactaatagcactttcaaccaagtggtgctaaagcggctctttatgtcccggactaatcgaccgcccctgagcctaagcagaatgatccgcaaaatgaaacttccaggaagggagaataagaccgccgttgttgttggcactattactgatgacgtgcgtgtgcaggaagtcccgaagttaaaggtgtcatggcgcgggctggggagacccatccgccccctgttatactgtgctgtgctatgctgtgccgtgctctgctgtctagtgcatccccagagctgtcatcggtggtag

SEQ ID NO: 132792 - DNA, 567 bp, synthetic construct
  misc_feature 1..567: note = Description of Artificial Sequence: Synthetic coding sequence
  source 1..567: mol_type = other DNA
atgggagtggacatccgacacaacaaggaccgaaaggtgagaagaaaagagccgaaaagccaggacatttacctcagacttcttgtgaagctgtaccgttttttggcgcggcggacgaatagcacattcaaccaggtagtgttgaaaagactcttcatgagcagaaccaaccgcccacctctctcactgagccgtatgatccgcaagatgaagctccctggcagggagaataagactgctgtcgttgtcggaactatcaccgatgatgttcgggtccaggaggtgcctaagctgaaggtctgcgccctgcgggtgacctcacgcgcccgatcccgcatcctgcgggcaggcgggaaaatccttacctttgatcagctggccttggactctccaaagggatgcggaacagtgctgttatcaggtccacgcaaagggcgcgaggtgtataggcactttgggaaggcccctggcacaccacactcacatactaaaccttacgtgaggagcaaaggtaggaagtttgaacgagcacggggtaggcgggcctcccgcgggtacaaaaactag

SEQ ID NO: 132793 - DNA, 480 bp, synthetic construct
  misc_feature 1..480: note = Description of Artificial Sequence: Synthetic coding sequence
  source 1..480: mol_type = other DNA
atgctgtacaggtttctggccagacggactaacagcactttcaaccaggtggtgctcaagcgtttgtttatgagtcggactaatagacctccacttagcctcagtagaatgatcagaaaaatgaagcttccaggcagagaaaacaagactgccgtcgtcgtcgggacaattaccgatgacgttagggtgcaggaagttcccaaattgaaagtttgtgccctccgtgtaaccagcagagcaagaagtagaatcctccgcgccggaggcaaaatcttaactttcgatcagctggctctggacagtcctaaagggtgtggcaccgtgttactctctggccctaggaaaggcagagaggtataccgtcactttggaaaagctcctggaacaccccactcacacacaaaaccttacgttcggagcaaggggcggaagtttgaacgcgctcggggaaggcgggcttcacgcgggtacaagaactag

SEQ ID NO: 132794 - DNA, 795 bp, synthetic construct
  misc_feature 1..795: note = Description of Artificial Sequence: Synthetic coding sequence
  source 1..795: mol_type = other DNA
atgaatattttgcctaagaaatcttggcacgtacgcaacaaagacaatgtggcacgggtcagacgagacgaggcccaagcaagggaggaggaaaaggagcgggaacgtagggttttactggcccagcaggaggccaggaccgagtttctgcgcaagaaagcacggcaccagaattctctgcctgagctagaagccgctgaggctggcgcccccggttctggacccgttgatctctttcgtgaacttctggaagaagggaagggtgtgattcgtggaaataaagaatatgaagaagagaagaggcaggagaaagagcgacaggagaaggctttggggatcctcacctacttgggccagagcgctgccgaagcccaaacacagcccccgtggtaccagctcccaccaggccggggaggcccaccccccgggccagctccggacgagaaaattaaaagcagactggatccactgagggagatgcagaagcacttagggaagaagcgtcagcacggaggtgacgaggggagccgttccaggaaggagaaagaaggtagcgagaaacagcggcccaaggagcctccatctctggaccagctgagagccgaacgactacggagagaggccgccgaaaggagtagggctgaggccctcctggcacgtgtccaaggacgcgcacttcaagagggacaaccggaagaggacgagactgacgatagacgtcgccggtataacagccagttcaacccccagcttgctagacggcccagacagcaagacccccatcttacccactag

SEQ ID NO: 132795 - DNA, 465 bp, synthetic construct
  misc_feature 1..465: note = Description of Artificial Sequence: Synthetic coding sequence
  source 1..465: mol_type = other DNA
atgaaggccagcgggacactgagggaatacaaggtcgtcggtaggtgccttcccacgcctaaatgtcacacaccccccctgtacaggatgcggatttttgctcctaaccatgtggtggccaagtctcgcttctggtatttcgtatcgcaattaaagaaaatgaagaagagttctggggagatagtctactgcgggcaggtattcgagaaaagccccttacgggtcaaaaattttgggatctggctacggtacgattctagatcaggaacgcacaatatgtaccgcgaatatcgagacctgactaccgccggtgccgtaacccagtgctaccgagacatgggggccagacaccgcgccagagcgcattccatccagatcatgaaggttgaggagattgccgctagcaagtgccgccggcagcacaaacctcggttcaccaccaagagaccaaacacatttttctag

SEQ ID NO: 132796 - DNA, 1278 bp, synthetic construct
  misc_feature 1..1278: note = Description of Artificial Sequence: Synthetic coding sequence
  source 1..1278: mol_type = other DNA
atggggggcggggacctgaatctgaagaaatcttggcaccctcaaacactccgcaacgtggagaaagtgtggaaagctgagcaaaagcacgaagccgaacgtaagaagatcgaggaacttcagagagaactcagagaagaaagagcacgggaggagatgcagcgctatgcagaggatgttggagccgtgaaaaaaaaggaggagaagttggattggatgtaccaaggccccggcgggatggtgaaccgcgacgagtatctgttgggtcgacctatcgacaaatatgttttcgaaaaaatggaagagaaagaagcaggttgctcttcagaaactggtttgctccctggatcaatctttgcacctagcggcgcaaatagtctgctggatatggctagtaagatcagagaagatccactgtttattataagaaaaaaagaggaagaaaagaaacgcgaggtgctgaacaaccctgtgaaaatgaaaaaaatcaaggagctgctgcagatgagcttagagaagaaagagaagaagaagaagaaagagaaaaaaaagaagcacaagaagcataaacaccgatcctcatcttctgacaggagttctagcgaggacgagcactctgccggtcgtagccagaagaaaatggctaattcatcgcccgtgctcagcaaggtgcctgggtacgggctccaagtccgaaacagtgatcgaaatcagggcctacaggggcctttaactgccgaacagaagcgcggtcatggtatgaagaaccactccaggagtaggtccagtagccactcccccccccggcacgcatccaaaaaatccacaagggaagccggatctcgagaccggcggtccaggtcattgggcaggcgctctagatcacctagaccctccaaactgcacaactcgaaggtgaaccggcgggagactggccaaacacgctctccctctccaaagaaagaagtctatcaaagacgccacgctcccggctatacaaggaaactgagcgccgaggaacttgagcggaagaggcaggagatgatggagaacgccaagtggcgcgaggaggagcgacttaacatcctcaaacgacacgctaaagacgaggaaagggaacaacgtttggaaaagctcgactcccgggacggtaaattcatccaccgcatgaaattagagagcgcatctacatcttccctggaggaccgcgtaaaacgtaacatatacagcctgcagcgtacctctgttgcactggagaagaactttatgaaaagatag

SEQ ID NO: 132797 - DNA, 483 bp, synthetic construct
  misc_feature 1..483: note = Description of Artificial Sequence: Synthetic coding sequence
  source 1..483: mol_type = other DNA
atgacaaatacgaagggaaaacgacggggaactagatatatgtttagtcgcccttttaggaagcatggggtggtaccactggctacgtacatgaggatctataaaaagggggacattgtggacattaaaggcatggggactgtgcagaagggaatgccgcacaagtgctaccacgggaagactggaagggtttacaatgttacacaacacgctgtcggaatagtagtgaataagcaagtgaaaggcaaaattctcgctaagagaataaatgtgaggatcgaacacattaaacactctaaatctagggattccttcctgaagcgggtcaaagaaaatgatcagaaaaaaaaagaagcgaaagaaaagggcacatgggtccagctaaaacggcagccagctcccccccgggaggcccactttgtgagaaccaatggcaaggagccggaacttctcgaacccattccatacgaattcatggcatag

SEQ ID NO: 132798 - DNA, 483 bp, synthetic construct
  misc_feature 1..483: note = Description of Artificial Sequence: Synthetic coding sequence
  source 1..483: mol_type = other DNA
atgaccaacactaagggcaagcgtcgcgggacgcgctatatgttctctcgaccattccgcaagcacggcgtggtgcctctggcgacatatatgagaatatataagaagggggatatcgtagatatcaaaggaatgggaacggtgcagaagggtatgccccataagtgttaccatggcaaaaccgggcgagtatacaatgtgactcagcacgcggtgggcatcgtcgtgaacaagcaggtcaagggtaagattttggcaaagcgaattaacgtcaggattgagcatatcaagcacagcaagtccagagatagttttctgaaaagagttaaggaaaatgaccaaaagaaaaaggaggccaaagaaaaaggcacctgggtgcaactcaaacgccagccggctcctccacgagaagcccacttcgtcagaacaaatggcaaagaacccgagttgctggagccaataccatacgaattcatggcatag

SEQ ID NO: 132799 - DNA, 483 bp, synthetic construct
  misc_feature 1..483: note = Description of Artificial Sequence: Synthetic coding sequence
  source 1..483: mol_type = other DNA
atgacaaacacgaagggcaagagaagaggaaccagatacatgttctcaagaccctttagaaaacacggtgtggttccacttgcaacttacatgagaatctataagaagggcgatatcgtggatatcaaggggatgggcactgttcaaaaaggcatgccccataaatgttaccacggtaagacagggagagtctacaacgttactcagcacgctgttggcattgtggtgaataaacaggtgaagggaaaaattctcgcgaagcggattaatgttcgcatcgagcatatcaaacattcaaaatctagggacagcttcctaaaacgtgtgaaggagaacgatcaaaaaaaaaaagaggctaaagagaaggggacatgggtccagctaaagcggcagccagcccccccaagggaggctcatttcgtgcgtaccaatggcaaagaaccagagctactagagccgatcccctacgaattcatggcctag

SEQ ID NO: 132800 - DNA, 483 bp, synthetic construct
  misc_feature 1..483: note = Description of Artificial Sequence: Synthetic coding sequence
  source 1..483: mol_type = other DNA
atgaccaacactaagggcaagcggagaggtaccagatatatgttctcaaggccgtttagaaagcatggggtcgttcccttagcaacctatatgaggatatataagaagggagacattgtggatatcaagggtatgggcactgtccagaaggggatgccccacaagtgttatcacggcaaaaccgggcgggtgtacaatgtcacccagcacgccgttggcattgtggttaataaacaggtcaaagggaagatcctggctaaaagaattaacgttcgtatcgaacatattaagcattccaagtctagggacagctttctcaagagagtcaaagagaacgaccagaagaagaaggaagccaaggagaaaggtacttgggttcagctgaagaggcaacccgctcctcctagagaggcccatttcgtcagaacaaatggcaaggagcctgagctcctggagccgattccttacgagtttatggcctag

SEQ ID NO: 132801 - DNA, 972 bp, synthetic construct
  misc_feature 1..972: note = Description of Artificial Sequence: Synthetic coding sequence
  source 1..972: mol_type = other DNA
atggctgctcctaagggtagtttgtgggttcggactcaacttggtctgcccccactcttgctccttaccatggctttagccggagggtcaggaaccgcttccgctgaagcctttgattctgtgctgggggacactgcttcctgccatagagcatgccagctgacatatcctctgcacacctaccctaaagaggaagagctgtatgcttgccaacgcggctgcaggctgttcagcatttgccaattcgttgacgatggaattgacctcaatcgtacaaagctggaatgcgaatctgcttgtacggaggcttactcccaaagcgacgagcaatacgcctgccatctcggatgccagaaccagctgcccttcgccgagttacggcaagagcaactgatgtcactgatgcccaagatgcatcttctattcccccttacgctggtcagatctttctggtcagacatgatggatagtgctcagtcctttattacaagttcttggaccttctacctgcaggcagacgacggcaagatagtgattttccagagtaagcccgaaatccagtatgctcctcatctcgaacaagagcctacaaatcttagggagagcagtctttccaaaatgtcttatctgcaaatgagaaattcacaggcgcacaggaattttctggaagatggcgaatccgacgggtttctgcggtgtctgagtctcaacagtggctggattctcactacaactctagttctgtctgtcatggttctgctatggatttgttgtgccacagtggccacagctgtagagcagtatgtaccttctgagaaactctccatttatggcgacctggaatttatgaacgaacagaaattaaatcggtacccagctagctccttggtggtagttagatcaaaaacagaagaccacgaggaggctggcccactgcccacaaaggtcaatctggcacattcggaaatctag

SEQ ID NO: 132802 - DNA, 276 bp, synthetic construct
  misc_feature 1..276: note = Description of Artificial Sequence: Synthetic coding sequence
  source 1..276: mol_type = other DNA
atggccggttcccggagggagtgtaggcggggaggatcatctggggccaagttcaggatttcgttaggtctgcctgtcggtgcggttattaactgtgcggataatactggagcgaagaacctgtacataatctctgttaaaggcatcaaaggtagactcaaccgactcccggctgccggagtgggcgatatggtgatggcaaccgttaaaaagggaaaacccgagttaagaaaaaaggtacatcctgccgtggtcatcagacagagaaaaagctag

SEQ ID NO: 132803 - DNA, 423 bp, synthetic construct
  misc_feature 1..423: note = Description of Artificial Sequence: Synthetic coding sequence
  source 1..423: mol_type = other DNA
atgtcgaaacgcggcagaggaggatcatccggggccaagttccgcattagtctcggactgccggtgggcgcggtgattaactgtgccgataataccggggcaaaaaacctgtacattatctccgtcaaaggcattaagggccgcttgaaccgccttcccgccgccggggtcggcgacatggtgatggctaccgtgaagaaaggcaaacctgagcttcggaaaaaggtccatccagccgtggtgattcgccagcggaaaagctatcggcgtaaggacggtgtttttctgtactttgaggacaatgcaggggtaatcgtcaataacaaaggagagatgaaggggtccgccattacaggcccggttgccaaggaatgcgctgatctgtggccaagaattgcttccaacgcaggctccatagcttag

SEQ ID NO: 132804 - DNA, 345 bp, synthetic construct
  misc_feature 1..345: note = Description of Artificial Sequence: Synthetic coding sequence
  source 1..345: mol_type = other DNA
atgtctaaaagaggcagagggggaagtagcggagctaagtttcgcatatctctgggcctcccagtgggcgcagtaatcaattgtgctgataatacaggcgcaaaaaacctttatatcatttctgttaagggcatcaaaggcaggctcaatcgtctcccagccgctggggtaggggatatggtgatggccactgtgaagaaggggaagccagaacttcgcaagaaggtcctgctgtgccatacaggatggagcgctgttactcctcttaaacttacagtgacattaaattgttggacgtggaacccacctgcagtggctttcaaagggctccagctccaggtgtag

SEQ ID NO: 132805 - DNA, 423 bp, synthetic construct
  misc_feature 1..423: note = Description of Artificial Sequence: Synthetic coding sequence
  source 1..423: mol_type = other DNA
atgtcaaagagggggcggggcggaagctccggggcaaagtttcgcatttcactgggcctgccagtgggagctgtcatcaattgcgctgataacacaggggctaaaaacctctacatcatttctgtgaaaggtatcaaaggtcgtctgaatcgcttgcctgccgctggggtgggtgatatggtcatggctaccgtgaaaaaaggcaaacccgaactgcgcaaaaaagtccacccagccgttgtgatccgccagagaaagtcttatcgacgcaaggatggcgtctttctttattttgaagataatgccggagtcatagtgaataataagggtgaaatgaagggaagcgcaatcactgggcctgtcgctaaagagtgcgccgacttgtggcctcgaattgcctcaaacgcaggaagcatcgcatag

SEQ ID NO: 132806 - DNA, 477 bp, synthetic construct
  misc_feature 1..477: note = Description of Artificial Sequence: Synthetic coding sequence
  source 1..477: mol_type = other DNA
tgactggtcggtgcgccatgcccgagggcctcccccgccccacctaaggcagaagcgaaggccaaagcactgaaagcaaaaaaggctgtgttgaagggcgtgcactcacacaagaaaaagaagataaggaccagccctactttccggcgccccaagactctgagattgaggcggcagccgaagtaccccagaaaatctgctccccggcggaacaaactggaccattacgccattattaaattcccgttgactacagaatcggccatgaagaaaattgaagataataatacacttgtgttcattgtagatgtaaaggccaataagcatcagattaagcaagctgtgaagaagttatacgatatcgatgttgctaaggtgaacacactgatcagacccgatggagaaaagaaagcatatgtgcgcctcgctcccgattatgatgctttagacgtggctaataagattggaatcatctag

SEQ ID NO: 132807 - DNA, 477 bp, synthetic construct
  misc_feature 1..477: note = Description of Artificial Sequence: Synthetic coding sequence
  source 1..477: mol_type = other DNA
atgagcccaggactggttgtgcttcgatgggctcctgctccgcccaaggccgaggctaaagccaaggcactaaaagccaaaaaggccgttctgaagggagtgcactcccacaagaaaaaaaagattcgtacttcacctacattcagacggccaaagaccctgcgtctccgacggcagcctaagtatccgcgaaagagcgccccgagacggaataaacttgatcactacgctataatcaagtttccgttaaccactgagtctgccatgaagaagattgaggataataacactctggtgttcatcgtcgacgtgaaagctaataaacaccagatcaaacaggccgttaagaagctctatgatatcgatgttgcaaaagtgaatactctgattagaccagatggagaaaagaaggcctatgttcgcctggctccagactacgacgccttggatgtagccaacaaaatcggtatcatctag

SEQ ID NO: 132808 - DNA, 585 bp, synthetic construct
  misc_feature 1..585: note = Description of Artificial Sequence: Synthetic coding sequence
  source 1..585: mol_type = other DNA
atgcacccccttgttggggccccctgcccacgcgcctgtaaagaactggtgccctctgcgctaaccattttcctcctcgtgcacgttcagccaggctacattacacgaccctcactgcggtcagttgtgctgcggtgggctccggcccctcccaaggctgaggctaaggccaaagctcttaaagcgaagaaggcggtcctcaagggagtccattcccacaagaagaagaaaattcgtacttctcccacttttcggcggcctaaaacactccgattgcggcggcagcctaaatatcctagaaaatctgcccccagacgcaataagctcgatcattacgctatcatcaaatttccactaacgacagaatcagctatgaagaagatcgaagataataataccttggtttttatagtcgatgtcaaagcaaacaaacatcaaatcaagcaggcagtgaagaagctgtacgatatcgacgtggccaaggtaaatacattgattaggccagatggtgagaaaaaggcttacgtgcgccttgcaccagattacgacgccttagacgtggcaaacaaaatcggcatcatttag

SEQ ID NO: 132809 - DNA, 471 bp, synthetic construct
  misc_feature 1..471: note = Description of Artificial Sequence: Synthetic coding sequence
  source 1..471: mol_type = other DNA
atggctcccaaagcaaagaaggaagcacctgcgcccccaaaagctgaagccaaggcaaaagccttgaaagcaaagaaggcagtgcttaaaggggtgcattcccataagaaaaagaaaattagaacgagtcctaccttccgccgacctaagacactacggctaagacgacagcctaaataccctagaaagtcagcccctagaaggaacaaactagaccactatgccatcattaaattcccgctgaccactgagtctgcaatgaaaaaaatcgaagacaataacacactggtctttatcgtggacgtgaaggcaaacaaacatcagatcaagcaggctgtaaaaaaattgtacgatatcgatgttgcaaaggtgaataccctgattcggccagatggggagaaaaaggcctacgtgcgcttggcacctgactacgacgcccttgatgtcgcaaacaagattgggatcatctag

SEQ ID NO: 132810 - DNA, 474 bp, synthetic construct
  misc_feature 1..474: note = Description of Artificial Sequence: Synthetic coding sequence
  source 1..474: mol_type = other DNA
atgaaagttgagttgtgctcctttagcggctacaagatttaccctgggcatggaagacgttacgcccgcaccgacgggaaagtctttcagttccttaacgccaagtgtgaatcagccttcttgagtaaacgaaaccctaggcagatcaactggacggtgctctaccgacggaaacacaagaagggacagagtgaagagatccagaagaagcgcacgcggagggccgtcaaatttcagcgagcaattaccggggcctctctggcagatatcatggctaaacgtaatcagaaaccagaagtccgcaaagcgcagcgggaacaggcgatcagggccgccaaggaagccaagaaagctaagcaagcctccaaaaagaccgccatggccgcagccaaggctcccaccaaggcagccccaaaacagaagatcgtcaagccagtgaaagtgtccgccccaagggttggcgggaagcgctag

SEQ ID NO: 132811 - DNA, 453 bp, synthetic construct
  misc_feature 1..453: note = Description of Artificial Sequence: Synthetic coding sequence
  source 1..453: mol_type = other DNA
atgaaagtcgagctatgctcattctccgggtacaaaatctacccgggccacgggagaagatacgcacgaaccgacggcaaggtgttccaatttctcaatgcaaagtgcgaaagcgccttcctttctaagcgcaatccaagacagataaactggaccgtgctgtatcggagaaaacacaagaaagggcagtcggaggaaattcaaaaaaaaaggactcgccgcgccgtaaagtttcaacgtgccatcactggcgctagcctggccgatatcatggccaaacgaaaccagaagcccgaggtgcgcaaagcgcaacgcgagcaggctataagagctgcaaaggaagcgaaaaaggccaagcaggcctcgaagaaaaccgcaatggccgctgccaaggtcatcatgggctttctttattttttagagcagtacaataggaagatatttttcttttag

SEQ ID NO: 132812 - DNA, 438 bp, synthetic construct
  misc_feature 1..438: note = Description of Artificial Sequence: Synthetic coding sequence
  source 1..438: mol_type = other DNA
atgaaattcaatccattcgtgaccagtgataggtctaaaaacagaaagcggcacttcaacgctccatcccatattaggcgcaagatcatgtccagccccctgtccaaagagctgaggcagaaatataacgtgaggagcatgccgattcgcaaggacgacgaggtgcaagtggtacggggccactacaaaggacagcagattgggaaggtcgtgcaggtctataggaagaaatatgtcatatatatcgagagggtgcagcgtgaaaaggccaatggaaccaccgtacatgtgggcattcacccttcaaaggtagtaatcacaaggctgaagctggacaaggaccgcaaaaagatcctcgagcgtaaagccaagtctagacaagtcgggaaagaaaaagggaaatacaaggaggagactattgagaaaatgcaggagtag

SEQ ID NO: 132813 - DNA, 411 bp, synthetic construct
  misc_feature 1..411: note = Description of Artificial Sequence: Synthetic coding sequence
  source 1..411: mol_type = other DNA
atggggaaatttatgaagcctggcaaggtggtgctggtccttgctggcaggtactcaggcagaaaagccgtaatcgtaaagaacatcgacgatgggacttccgatagaccatattcacacgccctggtggccggcatcgaccgttacccccggaaagttaccgccgctatgggcaaaaaaaaaattgctaaaagatctaagattaagagtttcgtcaaggtctataattacaatcacctgatgcccacacgatactcagtcgacatcccactggataagaccgtggtgaataaggatgttttccgcgatcctgctctgaagcgaaaagccaggcgcgaggccaaagttaagtttgaagaacggtataagactggaaagaacaagtggttctttcagaaactccgcttctag

SEQ ID NO: 132814 - DNA, 447 bp, synthetic construct
  misc_feature 1..447: note = Description of Artificial Sequence: Synthetic coding sequence
  source 1..447: mol_type = other DNA
atgcctagcagactgcgaaagacccggaaactgagaggacacgtttctcacggtcatggccgaattgggaagcaccgcaagcatcctggcggcaggggtaatgctggcggccttcaccaccacagaatcaattttgataaataccaccctggatatttcgggaaagttggcatgaaacactatcatttgaaaagaaatcagtctttttgtcccacagttaacctcgataaattgtggaccctcgtctctgaacagacaagggtgaatgcagcaaagaataagactggtgccgcacccattatagacgttgtacgctctggatactacaaggtgctgggcaaaggaaagcttcccaagcaaccagttattgtaaaggcgaagttcttcagtcgccgggctgaagaaaagattaagagcgtcggaggcgcttgcgttctagtggcttag

SEQ ID NO: 132815 - DNA, 327 bp, synthetic construct
  misc_feature 1..327: note = Description of Artificial Sequence: Synthetic coding sequence
  source 1..327: mol_type = other DNA
atgcctagcagactcagaaaaacacgaaagctgcgtggccacgtctcccacggccatgggagaattggcaagcacaggaaacacccaggaggcagaggcaatgcgggtggcttgcaccaccaccgcattaactttgataaataccacccaggatactttggtaaagtgggaatgaagcactatcacctgaagcgaaaccagagtttttgcccaacggtgaacttggacaagctgtggacattggtcagcgagcagacaagggtcaacgccgctaaaaacaaaaccggcgcggctccaataatcgacgtcgtgaggagcgtgtcttag

SEQ ID NO: 132816 - DNA, 414 bp, synthetic construct
  misc_feature 1..414: note = Description of Artificial Sequence: Synthetic coding sequence
  source 1..414: mol_type = other DNA
atgtccgctcaccttcagtggatggtcgtgagaaactgctcctcattcctcattaaacgcaataaacagacctattcgacagagcctaacaacctcaaggcgcggaattccttcaggtacaatgggctcatccatcgcaagacggtaggagttgaacctgccgcggatggtaaaggtgtggtggtggtgatcaagcgcagatctgggcagcggaaacccgcaacaagttacgtgcgcaccaccatcaataagaatgccagagcaactctgagctccattagacacatgatcagaaagaacaaatacaggcctgatctaagaatggcagccattcggagagcttctgcaatcctgagatcgcagaaaccagtgatggttaaacgaaagaggactagaccaactaagtcatcttag

SEQ ID NO: 132817 - DNA, 210 bp, synthetic construct
  misc_feature 1..210: note = Description of Artificial Sequence: Synthetic coding sequence
  source 1..210: mol_type = other DNA
atgtcggcccatttgcagtggatggtcgttcggaattgcagcagttttctcatcaagcgaaataaacagacttatagcacagagcccaacaacctgaaggcccggaatagcttccgctacaatgggttaatacatagaaaaacggttggggttgagccggctgctgacggtaagggtgtcgtggtagtcattaaacgtagatccgagtag

SEQ ID NO: 132818 - DNA, 264 bp, synthetic construct
  misc_feature 1..264: note = Description of Artificial Sequence: Synthetic coding sequence
  source 1..264: mol_type = other DNA
atgtccgcacatctgcagtggatggtggtaagaaactgtagctcattcctgatcaaaagaaacaagcaaacctactcaaccgaaccaaacaatctgaaagcccggaatagttttcgctacaatggacttattcatcggaagactgttggggtagagccagcagccgacggcaagggagtggtggttgtgattaagcgccgtagcggagagttctgcctcgtttgggcccgggagagacctctgagccgtgtctgggaactgtag

SEQ ID NO: 132819 - DNA, 510 bp, synthetic construct
  misc_feature 1..510: note = Description of Artificial Sequence: Synthetic coding sequence
  source 1..510: mol_type = other DNA
atgtcggcccaccttcaatggatggtcgtgcggaactgctctagtttcctgatcaaaagaaataaacagacttactccaccgaacctaataacttgaaagctcggaactcctttcggtacaacggcctcattcatcggaaaaccgtcggggtggagcccgcagccgacgggaaaggcgttgtcgtggttataaagaggcgtagcgggcagcgaaaaccagcaacttcttatgtacgcacaacaatcaataagaacgctagagccactctctccagtatcaggcatatgatcaggaagaataaatatcgacccgatctccgcatggacatgctcgccagcactgggtctggtctgtgttgtagcgtggctgtccagccttgggcctctagcagcacatctctatgcttacgtaccctgatttgcaacatgagagtggataggccgtactattccggcctgatgcgcagacttaacgtacagaaccttttggattgcgctcataagtcatag

SEQ ID NO: 132820 - DNA, 510 bp, synthetic construct
  misc_feature 1..510: note = Description of Artificial Sequence: Synthetic coding sequence
  source 1..510: mol_type = other DNA
atgtcagcacacctgcaatggatggtcgtcagaaactgcagctccttccttatcaaacgtaataagcagacatactctaccgaaccaaataacctcaaggctcgaaatagttttagatacaatggactgatccatcggaaaacagtgggcgtggagcctgccgctgacgggaaaggtgtagtagtggtgattaagagaagaagcggtcaacgcaagccggctacctcttatgttcgaactaccatcaataagaatgcccgtgccaccctgtctagcattaggcacatgataaggaagaataaataccgtcctgaccttaggatggacatgctggcttctactggatccgggctgtgttgctctgtggccgtgcaaccttgggcaagcagttccacatccttatgtctccgcacgctgatctgcaatatgcgtgtggatcggccctactactctggacttatgcgacgactgaacgtgcagaacctcctcgactgcgctcacaaatcatag

SEQ ID NO: 132821 - DNA, 414 bp, synthetic construct
  misc_feature 1..414: note = Description of Artificial Sequence: Synthetic coding sequence
  source 1..414: mol_type = other DNA
atgagtgctcatctgcagtggatggtggtcaggaattgtagctcctttctgatcaaaaggaataaacagacctactccacggaaccaaataatttgaaggcgcggaactcatttcgctacaacggcctcattcaccgcaagacagtgggggtggaaccagccgccgacggcaaaggagttgttgttgtgatcaagagacggagtgggcagcggaagccagccacttcatacgtccggacgactatcaacaaaaatgcacgggcaacgcttagtagtatccgccacatgatccgcaagaataaataccggcccgatctccgcatggccgctatcaggcgggcatcagctatcctaaggagccaaaaacctgtcatggtgaagagaaagcggaccagacctacaaagagttcatag

SEQ ID NO: 132822 - DNA, 492 bp, synthetic construct
  misc_feature 1..492: note = Description of Artificial Sequence: Synthetic coding sequence
  source 1..492: mol_type = other DNA
atgtccgctcacctgcagtggatggttgttagaaattgcagtagtttccttatcaagcgtaacaagcagacctacagcaccgagcccaacaacctcaaagccaggaattccttcaggtacaacgggctcatccaccgaaaaacagtgggggtcgagcctgcagctgatggcaagggagtcgtggtggtcatcaaacgccgaagtggccaacggaagccagcaacctcttacgtccggacaacaatcaacaagaatgctagagccacgctgagctcaattaggcatatgatcaggaaaaataaatataggcccgatttgaggatggtttcctggggactcggcatcagactcggcgagacgggacagtgctgtggggaaggccctcccactacggggtgtaacatgggctggcgcggaatggattcatgtttccaacctactccccacacccagcattggcctcggggcaggctcgttgagtgtatgggctag

SEQ ID NO: 132823 - DNA, 480 bp, synthetic construct
  misc_feature 1..480: note = Description of Artificial Sequence: Synthetic coding sequence
  source 1..480: mol_type = other DNA
atggctaagtcaaagaaccacactacccacaaccagagccggaagtggcacaggaatggtatcaagaaacctaggtcccagagatacgaatccttgaagggcgtggatccgaagttcctgaggaacatgcgtttcgctaaaaaacacaacaaaaaggggctcaagaaaatgcaggcgaacaacgctaaggccatgtcagcccgcgccgaggccatcaaggcattggtgaagcccaaagaagtgaaacctaagataccaaaaggggtttcccgtaaactggatagactggcctacattgctcaccctaagttaggaaagcgcgcaagagcaagaattgcgaaggggctcaggctgtgtcggcctaaggctaaagccaaggccaaggccaaggaccaaacaaaggcccaggcagctgcgccggcttcagtgccagctcaggcaccaaaacgcactcaggcaccgacgaaagcgtctgagtag

SEQ ID NO: 132824 - DNA, 480 bp, synthetic construct
  misc_feature 1..480: note = Description of Artificial Sequence: Synthetic coding sequence
  source 1..480: mol_type = other DNA
atggctaaatcgaaaaaccacaccacccataaccagtctcgaaaatggcaccgtaatgggatcaaaaagccccggagccaacggtacgaaagccttaaaggggtagatcctaaatttctgagaaacatgagattcgcaaaaaagcacaacaagaaaggcctcaagaagatgcaggcaaataatgctaaggcaatgtctgctcgcgcagaagctatcaaagccctggtgaagccgaaggaggtgaaaccaaagatccctaagggagtctccagaaagttggatcgcttggcctatattgcccatcccaaattggggaaaagagcccgggcccggatcgcaaaggggctgcgactgtgtaggcctaaggcgaaagctaaggctaaagcaaaagaccagaccaaggcccaagctgccgcccctgcaagcgtcccagcacaagcccccaaacgcactcaggcccccacaaaggctagcgaatag

SEQ ID NO: 132825 - DNA, 480 bp, synthetic construct
  misc_feature 1..480: note = Description of Artificial Sequence: Synthetic coding sequence
  source 1..480: mol_type = other DNA
atggcaaagtcaaagaaccatactacccataaccaaagcagaaaatggcacagaaacggaatcaaaaagccgagatcgcagagatatgagtctctcaaaggcgtagaccccaaattcctcaggaacatgcgcttcgcaaagaaacataacaagaagggccttaagaaaatgcaagcaaataacgcgaaggcaatgtctgctagagccgaagcgattaaggcattggttaagcccaaggaggtaaaaccaaaaatacctaaaggggtcagcaggaagttggatcgcttagcatacattgcacaccctaaattgggcaagagggctcgcgccaggatcgctaaggggttacggttgtgtagaccgaaagctaaggctaaagctaaggccaaagaccagacaaaagcacaggctgcagctcctgcaagtgtgcccgctcaggccccgaagagaacccaggcccctaccaaagcttccgaatag

SEQ ID NO: 132826 - DNA, 480 bp, synthetic construct
  misc_feature 1..480: note = Description of Artificial Sequence: Synthetic coding sequence
  source 1..480: mol_type = other DNA
atggctaagagcaaaaaccacacaacgcacaatcagtcccgcaagtggcataggaatgggattaagaagccccggtctcagcgttatgagtctctgaagggagtcgaccccaagttcttgaggaacatgcggtttgccaagaagcacaataagaaaggcttgaaaaagatgcaggccaacaatgctaaggccatgtcagccagagccgaggcaattaaggccttggtgaagcctaaagaagtgaagcctaagataccaaagggagtttcacggaagcttgaccgcctggcatatatcgcccatcccaagctcggtaaaagggcacgcgccagaattgcgaaaggcttgcggttgtgccgcccaaaggctaaagcaaaggcgaaggctaaggaccagacgaaggcgcaggccgcggcccccgcctccgtgcccgcccaggctcccaagcgcacgcaggcccccactaaggcttcagagtag

SEQ ID NO: 132827 - DNA, 480 bp, synthetic construct
  misc_feature 1..480: note = Description of Artificial Sequence: Synthetic coding sequence
  source 1..480: mol_type = other DNA
atggccaagtccaagaaccacacaacccataatcagtcgaggaagtggcatcgaaatggcatcaaaaaacctagaagccagagatacgaaagcctgaagggggtggacccaaagtttctgcggaatatgcggtttgctaaaaagcataataaaaaggggctcaagaagatgcaggccaataatgccaaagctatgagcgcacgcgccgaggcaattaaggccctcgttaagcccaaggaggtgaagccaaaaattcctaagggggtgagtaggaagctggataggctcgcctacattgcacacccaaagctgggaaaacgggcccgagcgcggattgctaaagggctccgcctgtgccgaccgaaggcgaaagctaaagctaaggcgaaggaccagaccaaagcccaggcggctgcgccggcttcggtgcccgctcaggcacctaagagaacccaggccccaaccaaagcctcagaatag

SEQ ID NO: 132828 - DNA, 480 bp, synthetic construct
  misc_feature 1..480: note = Description of Artificial Sequence: Synthetic coding sequence
  source 1..480: mol_type = other DNA
atggctaaatccaagaaccacacaactcataatcagtctaggaagtggcataggaatgggataaagaaaccgcgctctcagcggtatgagagcttgaagggagtggacccaaaatttttaagaaatatgcggtttgcgaaaaagcataacaaaaagggccttaaaaaaatgcaagcaaacaacgccaaagccatgtccgccagagctgaggccattaaggctctcgtaaagccgaaggaggtgaaacctaaaattcccaaaggagttagccgcaagctggatcgtctggcatacatcgcccatccgaaactcggcaagagagcccgtgccagaatcgctaaaggacttcgactctgccggcccaaggcaaaagctaaagctaaagccaaggatcagactaaggctcaagcagccgccccagcctccgttcccgcacaggctccaaagaggactcaggcccccactaaggcaagcgagtag

SEQ ID NO: 132829 - DNA, 648 bp, synthetic construct
  misc_feature 1..648: note = Description of Artificial Sequence: Synthetic coding sequence
  source 1..648: mol_type = other DNA
atgccattccatcctgtaacagctgctttgatgtatagaggaatttacaccgtccccaacctgctttccgaacaaaggcccgttgacatcccggaggatgaactggaggagatcagggaagctttcaaggtgtttgatcgggatggcaatggcttcatctcaaagcaggaattaggcaccgccatgcgttctttgggatatatgccaaacgaggtcgaactcgaagtgattatccaaaggttggatatggacggggatggccaggtcgactttgaagaattcgtcaccctccttggacctaagctctcaacgtctggtattcccgaaaaattccacggaaccgactttgacaccgtattctggaagtgtgacatgcagaagcttacagtggatgaacttaaacggctgctgtacgatacattctgcgagcacctttcaatgaaagacatcgagaatatcatcatgacagaagaggagtctcacctcggaacagcagaggaatgtcccgtagacgtcgagacatgttccaatcagcagataagacagacctgtgtccggaaaagcctcatttgtgcttttgcaatcgcctttattatttccgtgatgctgattgccgccaaccaggtgcttcgcagtggaatgaaatag

SEQ ID NO: 132830 - DNA, 1056 bp, synthetic construct
  misc_feature 1..1056: note = Description of Artificial Sequence: Synthetic coding sequence
  source 1..1056: mol_type = other DNA
atgacacacatcgtgagagaagtcgatagaccgggcagtaaggtcaacaaaaaggaggtggtggaggctgtgacaattgtggagacaccgccaatggtggtggttggaatcgtggggtatgtagaaaccccacggggtctgcgtactttcaaaacagtgtttgctgaacatatcagcgatgaatgtaagagacgtttttataagaactggcataaaagcaagaaaaaagcttttacgaagtactgcaaaaaatggcaggacgaggacggaaagaaacagctcgaaaaagacttctcttccatgaagaagtactgtcaagtgatcagagtgatcgctcatacccagatgagactactgccactgcgacagaagaaagcccatttgatggaaatacaagtaaatgggggcaccgtcgctgagaagctggattgggccagggaacgcctggaacaacaggtcccagtgaatcaagtgtttggtcaggacgagatgatagacgtcatcggtgttacgaaaggaaaaggttataagggcgtcactagccgctggcacaccaagaagcttccaagaaagacacaccgcggcctccgcaaagttgcatgtatcggagcgtggcaccccgcacgtgtagccttcagtgtggctcgtgcgggccagaaagggtatcatcatagaacagagattaacaaaaagatctacaaaattggccaggggtatctgatcaaggatggcaaactcataaaaaacaacgcttccacagattatgatttatcagacaagagtatcaatccccttggcggtttcgtacattatggggaagtcaccaacgattttgtgatgttaaaaggttgcgtggtggggaccaagaagcgggttctcactttaagaaagagcctccttgtgcagaccaaaaggagagcattggagaaaatagacctgaagtttattgacaccacaagcaagtttggacacgggagattccagactatggaagaaaaaaaagcctttatgggccctctgaaaaaagaccgtatagctaaggaagaaggagcatag

SEQ ID NO: 132831 - DNA, 348 bp, synthetic construct
  misc_feature 1..348: note = Description of Artificial Sequence: Synthetic coding sequence
  source 1..348: mol_type = other DNA
atggttgctgccaagaaaacaaaaaagtcattggagtccattaactcgcggctccagctcgtgatgaaaagtggaaagtacgtgctgggatacaagcagactttaaaaatgattcgacaaggcaaggcaaaattagtgattctcgcaaataactgtcccgctctgcggaagtcagagattgagtactacgccatgcttgctaaaaccggggtgcatcactattccggaaataacattgagttgggcaccgcatgtggaaaatattacagagtgtgcacgctggccatcatcgatcccggagattccgacatcatcagaagtatgccggagcaaactggagaaaagtag

SEQ ID NO: 132832 - DNA, 348 bp, synthetic construct
  misc_feature 1..348: note = Description of Artificial Sequence: Synthetic coding sequence
  source 1..348: mol_type = other DNA
atggtggccgccaaaaagacgaaaaagtccctggagtccattaatagcaggctccagctggtgatgaaatcagggaagtacgttctgggctacaaacagacgttaaaaatgatccgccagggcaaagctaagctggtaattctggccaacaattgtcctgccctcagaaaaagcgaaatcgagtattatgcaatgttagctaagaccggcgtacatcactacagcggtaataacatagaactcggaaccgcctgcggaaagtattatcgagtctgtactctggcaattattgatccaggcgacagtgatatcatccgctccatgcccgaacagaccggcgaaaagtag

SEQ ID NO: 132833 - DNA, 345 bp, synthetic construct
  misc_feature 1..345: note = Description of Artificial Sequence: Synthetic coding sequence
  source 1..345: mol_type = other DNA
atggtggctgcaaaaaaaacaaaaaagtctttagagagtatcaactctcgcctccaattggtgatgaagagcggtaagtacgtactggggtataagcaaaccctcaagatgattcggcagggaaaagcaaaactggtgattctggctaacaactgccctgctctgagaaaaagcgagatagaatattatgcaatgctggccaaaacgggcgtccaccattactcaggtaacaacatcgagctcggtacagcttgtggcaagtactaccgagtgtgcactcttgcgatcatcgaccccggggattctgacattatcagaagtatgcctgagcaaacgggtgaatag

SEQ ID NO: 132834 - DNA, 285 bp, synthetic construct
  misc_feature 1..285: note = Description of Artificial Sequence: Synthetic coding sequence
  source 1..285: mol_type = other DNA
atgagcggaagactgtggagcaaagccattttcgcaggatacaaacgtggactgagaaatcagagagagcacactgctctgcttaaaatcgagggggtgtacgccagggacgaaaccgagttttatctgggcaaacgttgcgcatatgtgtataaagccaagaataataccgtcacaccagggggaaaacctaacaaaacaagggtgatctggggaaaagtgactcgcgcgcatggaaactccggcatggtgagggcgaaattccgcagcaatttaccggcgtag

SEQ ID NO: 132835 - DNA, 333 bp, synthetic construct
  misc_feature 1..333: note = Description of Artificial Sequence: Synthetic coding sequence
  source 1..333: mol_type = other DNA
atgtctggtcgcctgtggtccaaagctatctttgcaggctacaagaggggcctgcgtaaccagcgcgaacacactgcactccttaagatcgagggggtctacgcccgggacgagacggaattttaccttggaaagagatgtgcgtacgtgtataaggcgaaaaacaacacagtcacgccaggtgggaagcccaacaagacgcgagtaatctggggaaaagtgacgcgtgcccacggaaattctggcatggtcagggcaaaattccggtccaacctgcctgccaaagctattgggcaccggataagggtgatgctataccccagcagaatctag

SEQ ID NO: 132836 - DNA, 333 bp, synthetic construct
  misc_feature 1..333: note = Description of Artificial Sequence: Synthetic coding sequence
  source 1..333: mol_type = other DNA
atgtcaggacgactgtggtccaaggctatttttgctggctacaagaggggactgcgaaaccagcgggaacatactgccttgctcaagatagaaggggtgtacgctagggacgaaaccgaattctacctcggcaagcgatgtgcttacgtctacaaagcaaaaaataacacagtaactccgggggggaagccaaataaaacccgcgtgatctggggtaaagtcaccagagcacatggcaactccggcatggtccgtgccaaatttcgcagtaatctaccagccaaagcgatagggcataggattcgagtgatgttatacccctctagaatatag

SEQ ID NO: 132837 - DNA, 396 bp, synthetic construct
  misc_feature 1..396: note = Description of Artificial Sequence: Synthetic coding sequence
  source 1..396: mol_type = other DNA
tgattgccatttgcaagccgttttctcagcttccgagcagattccgctcacgccagcatggtcaacgtacccaaaaccaggaggactttttgtaagaagtgtggtaagcaccagcctcacaaggtaacccagtacaaaaagggaaaggacagtctctacgcacagggcaaacgaagatacgacagaaagcagtccggttacgggggacagacaaagccgatcttcaggaagaaggccaagactactaaaaagatcgtgttacggctggaatgcgtggagccgaattgtcgtagtaaacgcatgcttgcaattaaacgctgtaagcactttgagttgggtggggacaaaaaacggaaggtttataactatggatggaaagtgcaaagcttctcttag

SEQ ID NO: 132838 - DNA, 429 bp, synthetic construct
  misc_feature 1..429: note = Description of Artificial Sequence: Synthetic coding sequence
  source 1..429: mol_type = other DNA
atgattgcgcccaccgacagccacgaagaagtccggtctggtaccagctacattcttcctttcgcttcacgattcctctcttttagggcagattcggctcacgctagcatggttaatgtgccaaaaacacggaggaccttttgtaagaagtgcggaaagcaccagcctcacaaagtgacccagtataagaagggcaaagacagcctctacgcacagggtaagcgccgctacgatagaaagcagtccggttacggtgggcagaccaagcccatatttaggaaaaaggccaaaactacaaaaaaaatcgttttgcggctggaatgtgtggagccaaattgcaggagcaagcggatgctggctataaaaagatgcaaacattttgagctcgggggcgataaaaagcgtaaaggacaggtgatccagttttag

SEQ ID NO: 132839 - DNA, 321 bp, synthetic construct
  misc_feature 1..321: note = Description of Artificial Sequence: Synthetic coding sequence
  source 1..321: mol_type = other DNA
atggtgaacgttcctaagacccggaggaccttttgtaaaaagtgtggcaagcaccaaccccataaggtaacacagtacaaaaaggggaaagactcgctatatgcgcaggggaagagaagatacgaccggaaacagagtggatacggaggacagaccaaacctatttttcgtaagaaagctaaaacaacaaaaaagatagtgcttcgattagaatgcgtcgagccgaactgtcggagtaaacggatgctcgctataaagcgctgcaaacattttgagctcggtggcgacaagaagcgcaagggacaagtaattcagttttag

SEQ ID NO: 132840 - DNA, 321 bp, synthetic construct
  misc_feature 1..321: note = Description of Artificial Sequence: Synthetic coding sequence
  source 1..321: mol_type = other DNA
atggtgaacgtccccaagacgcgtcgcaccttctgcaaaaaatgtggcaaacaccagccccataaagtgactcagtacaagaaaggtaaggactctctttacgcccaaggcagaagaaggtacgacaggaagcaaagcggctacgggggccagacaaagccaatctttcggaagaaagccaaaacaactaagaaaatcgtgctgaggctcgaatgtgtggagcccaattgccggagtaaacgcatgcttgctataaaacggtgcaaacatttcgaattggggggcgacaagaaacggaaaggacaggtcatccagttttag

SEQ ID NO: 132841 - DNA, 294 bp, synthetic construct
  misc_feature 1..294: note = Description of Artificial Sequence: Synthetic coding sequence
  source 1..294: mol_type = other DNA
atgacaaaaggaaccagttcgttcgggaagcgccgaaataagacgcatactctttgcaggcgctgcggcagcaaagcctatcacctgcagaagagcacctgcggcaaatgcggctatcccgcaaagaggaagcgtaagtataactggtccgccaaggctaagaggcgcaacacgacaggaacaggacggatgcgccatctgaagattgtgtatcgcaggtttcgacacggatttagggaaggcacaacccctaaacccaagagggctgcagtggccgcatcgtcctctagttag

SEQ ID NO: 132842 - DNA, 207 bp, synthetic construct
  misc_feature 1..207: note = Description of Artificial Sequence: Synthetic coding sequence
  source 1..207: mol_type = other DNA
atggtaaaaaaaatagagatttctcagcacgccaagtacacctgttcgttttgtggtaaaacgaagatgaagaggagggctgtcgggatttggcactgtggctcttgcatgaagactgtcgcaggaggtgcttggacatataacactacctccgccgtgacagtgaagtcagccattagacgtctcaaggagctgaaggaccagtag

SEQ ID NO: 132843 - DNA, 279 bp, synthetic construct
  misc_feature 1..279: note = Description of Artificial Sequence: Synthetic coding sequence
  source 1..279: mol_type = other DNA
atggcgaaacgaactaaaaaagttgggatcgtggggaagtacggcacccgctacggtgctagtctccgtaaaatggtcaagaaaatcgaaatttcacagcacgctaaatacacatgctccttctgcgggaagaccaaaatgaagaggagagccgtcgggatatggcactgcggctcatgtatgaagaccgtcgcaggcggcgcttggacatacaatactacaagtgccgttacggttaagtcggccatccggcggctgaaggaattaaaggatcagtag

SEQ ID NO: 132844 - DNA, 213 bp, synthetic construct
  misc_feature 1..213: note = Description of Artificial Sequence: Synthetic coding sequence
  source 1..213: mol_type = other DNA
atgccgcggaaaatcgaggaaatcaaggacttcttactcaccgctcgcagaaaagatgccaagtccgtgaaaatcaaaaaaaataaggataatgtgaagttcaaagtgaggtgtagcaggtacctatacactctggtgattacggataaggaaaaggccgagaaattaaagcagagcctgcccccgggtttagccgtcaaagaactgaaatag

SEQ ID NO: 132845 - DNA, 213 bp, synthetic construct
  misc_feature 1..213: note = Description of Artificial Sequence: Synthetic coding sequence
  source 1..213: mol_type = other DNA
atgccaagaaagatcgaagagattaaggatttcttacttaccgcgcgacggaaagatgctaaatcagtcaagataaagaagaacaaggacaatgtgaagttcaaagtccgctgctcccgttatttgtatacactcgtaatcaccgacaaggagaaagccgagaaattgaaacagtcattgccgccagggctggccgtcaaagaactcaagtag

SEQ ID NO: 132846 - DNA, 213 bp, synthetic construct
  misc_feature 1..213: note = Description of Artificial Sequence: Synthetic coding sequence
  source 1..213: mol_type = other DNA
atgccccgtaaaatcgaggaaattaaagattttctcctgacagctaggcgaaaggacgctaaatctgtgaaaatcaagaaaaataaagacaacgtgaagttcaaggtcaggtgcagccgctacctatataccttggtcataaccgataaggaaaaggccgagaaactgaagcagagccttccacccggtctcgcagttaaagagctcaagtag

SEQ ID NO: 132847 - DNA, 156 bp, synthetic construct
  misc_feature 1..156: note = Description of Artificial Sequence: Synthetic coding sequence
  source 1..156: mol_type = other DNA
atgtcatcccacaagaccttcacgatcaaacgcttcctggctaagaagcagaagcagaataggcctatccctcagtggattcagatgaagcccggtagcaagatccgctataattccaagcggcgacactggcgccgaactaagcttgggctgtag

SEQ ID NO: 132848 - DNA, 156 bp, synthetic construct
  misc_feature 1..156: note = Description of Artificial Sequence: Synthetic coding sequence
  source 1..156: mol_type = other DNA
atgtcctcacataaaacctttacaatcaaacggtttctggctaagaaacagaagcagaatcgccctatcccacagtggattcagatgaagcctggtagtaagattcgctacaatagtaaacgccgccactggaggagaaccaaattggggctctag

SEQ ID NO: 132849 - DNA, 156 bp, synthetic construct
  misc_feature 1..156: note = Description of Artificial Sequence: Synthetic coding sequence
  source 1..156: mol_type = other DNA
atgtcttcccacaaaactttcacgatcaaacgctttctggcaaagaagcagaaacagaaccggcccatccctcagtggatacagatgaagcccggaagcaaaatccggtacaactccaaacggcgccattggaggcggacaaaactcggcctgtag

SEQ ID NO: 132850 - DNA, 1284 bp, synthetic construct
  misc_feature 1..1284: note = Description of Artificial Sequence: Synthetic coding sequence
  source 1..1284: mol_type = other DNA
atggcctgtgcaagacccttgatcagtgtgtacagtgaaaaaggcgagtctagcgggaagaatgttacgctccccgcggtctttaaagcgcccataagacctgacattgttaatttcgttcatactaatcttcggaagaataacaggcagccgtatgccgtcagcgagctggcgggtcatcagaccagcgccgagtcatggggtacaggccgggccgttgcacgtattcctagggtgagaggtggggggactcatcgctccggacaaggggctttcggtaacatgtgtcgggggggccgtatgtttgctcctacaaaaacctggaggcgctggcaccggcgagtaaacacaacccaaaagcggtatgccatctgttccgcacttgcagcgtctgcactccccgcccttgtgatgagcaaaggacaccggatcgaggaggtgccagagctgccgctggtagttgaggataaagtcgaagggtacaaaaagaccaaagaggccgttctgttactgaagaaactgaaggcttggaacgatatcaaaaaggtgtacgcttcccagcggatgcgcgcggggaagggcaagatgcgcaatagaaggaggattcaacgccgcggaccttgtattatatataatgaagacaacggaattattaaggcatttcggaacatcccgggcataactctcctcaacgtgagtaagttgaatatccttaagctggctcccggaggacacgtcggccgcttttgtatctggacagaaagcgcctttagaaagctagatgagctgtatggaacttggaggaaggcagccagcctgaagtccaactataacttacccatgcacaagatgattaacacagacctctccaggatccttaagtcccccgaaatccagcgggccctgcgggcccctcgcaagaaaatccacaggagagtgctgaaaaagaaccccctcaaaaacctgagaattatgctaaagcttaacccatatgccaaaaccatgcgcaggaatacaatcctgcggcaagcgcgcaatcataagctcagagtggacaaagcagccgctgctgctgctgctcttcaagcgaaatcagacgagaaggccgcggtggctggaaaaaagcccgtggttggtaagaaaggcaaaaaggctgcagtgggcgtcaaaaaacagaagaaacccttagtcggcaaaaaggcagccgctaccaaaaaacctgcacctgagaaaaagcctgctgaaaagaaaccgactacagaagagaaaaagcccgcggcttag

SEQ ID NO: 132851 - DNA, 1221 bp, synthetic construct
  misc_feature 1..1221: note = Description of Artificial Sequence: Synthetic coding sequence
  source 1..1221: mol_type = other DNA
atggcctgcgcccggccgttaatatctgtgtactcggagaaaggggagagcagcgggaaaaatgtaacgttgccagccgtcttcaaggctcccatccggcctgatatagtgaattttgtccatacgaacctacgtaagaataaccgccaaccttatgcggtcagcgagcttgccggccaccagacatccgcggagagctggggtactggtagagctgtggccaggatcccgagagtgcgcggtggcgggacacataggtcaggacagggagcatttgggaatatgtgtagaggcggtcgcatgttcgcacctaccaagacctggcgacggtggcataggcgcgtaaacactacacagaagcggtacgcaatctgttctgcgctggccgcgtctgccttgccggcgctggtcatgtcaaaggggcacaggatcgaggaggtgcccgagctgcctctcgtcgtggaagataaggtggaaggctataagaagacaaaggaggcagtgctgctgctaaaaaagttaaaggcttggaatgacatcaagaaagtatatgcttcccagaggatgcgcgctggcaagggaaaaatgagaaatcgcagacgtatccagagaagaggtccatgtatcatatataatgaagataacggtatcatcaaggcctttcggaacatccctgggattacactattgaatgtctccaaactgaacattttgaagctcgctcctggaggccacgttggacggttctgcatttggactgagtctgcatttaggaagttggatgagctgtacggaacctggagaaaggcagcatccctgaagagcaactacaacctgcccatgcacaagatgattaacaccgatttgagccgcattcttaagagtcctgaaatacagcgggcactgagagcacctaggaagaaaatccacagaagggttctcaagaaaaaccctttgaagaacctccgcatcatgctcaagctgaatccctacgctaaaactatgcgacgtaacactatactccggcaagcccggaaccacaaactgagagtggacaaggcggccgctgccgccgccgctctacaggctaagagtgatgaaaaggctgctgtagcaggaaaaaagcccgtcgtaggcaagaaaggtaagaaagctgctgttggcgagaaaaagcctgcagagaaaaaaccaaccaccgaagagaagaagcctgcagcttag

SEQ ID NO: 132852 - DNA, 456 bp, synthetic construct
  misc_feature 1..456: note = Description of Artificial Sequence: Synthetic coding sequence
  source 1..456: mol_type = other DNA
atggcttgtgcccggcctttgatctctgtctactctgagaaaggagagagcagcggcaaaaatgtgacattaccagctgtgttcaaggcccccatccggcccgatatcgtgaatttcgtgcacaccaacctgaggaagaacaaccgacaaccctatgctgtgtctgaacttgctggccaccagaccagtgctgagagctggggcacaggccgtgcggtcgcacggattcctagagtgagaggtggcggtactcaccggtctggccagggcgcttttgggaatatgtgtagaggaggcagaatgttcgctcccacgaaaacttggagaaggtggcaccgcagggtgaatacaacccaaaagcttgagaaccacgtggaggccaagccaatttgcaaagaccatgcgcctgagcaccattcttccccagggcaagaatcacaggctccaggagggtag

SEQ ID NO: 132853 - DNA, 78 bp, synthetic construct
  misc_feature 1..78: note = Description of Artificial Sequence: Synthetic coding sequence
  source 1..78: mol_type = other DNA
atgagggcaaagtggcgaaaaaagcggatgcggaggttgaaaagaaaaagacgcaagatgcggcagcggtctaaatag

SEQ ID NO: 132854 - DNA, 78 bp, synthetic construct
  misc_feature 1..78: note = Description of Artificial Sequence: Synthetic coding sequence
  source 1..78: mol_type = other DNA
atgcgggcaaagtggcgcaaaaaacgaatgaggcggcttaaaaggaagcggcgaaaaatgaggcagagatcgaagtag

SEQ ID NO: 132855 - DNA, 381 bp, synthetic construct
  misc_feature 1..381: note = Description of Artificial Sequence: Synthetic coding sequence
  source 1..381: mol_type = other DNA
atgatcgtgcgggtgacaaaccgcgatattatctgtcagattgcctacgcccgtatcgagggggatatgattgtgtgcgctgcctatgcccacgagctgcccaagtatggggtcaaagtgggactcacaaactatgccgcagcctattgtactggtcttttactcgctcggcggcttctgaacaggtttggcatggacaaaatttacgagggacaggttgaagtcacaggggacgagtacaacgtagagagcatcgacggacaaccaggcgccttcacctgttatctggatgcagggctggcacgtactacaaccggcaataaagtgtttggggcgctgaaaggcgctgtggatggcggtctcagtatacctcaccgctag

SEQ ID NO: 132856 - DNA, 894 bp, synthetic construct
  misc_feature 1..894: note = Description of Artificial Sequence: Synthetic coding sequence
  source 1..894: mol_type = other DNA
atgggatttgttaaggtcgtcaaaaacaaagcctatttcaagcggtaccaggtgaagtttagaaggcggagggagggcaagacggattactacgcccggaaacgtctggtcatccaggacaaaaacaagtacaacacgcctaagtaccggatgatcgtgcgcgtcaccaatagggatattatatgtcaaattgcttatgcccggatcgagggagacatgatcgtctgcgccgcttatgcacatgagcttcccaaatacggcgtcaaagtgggactgacaaactatgcggctgcctattgtactggtctgttgctggcccgcagactgctcaaccggtttggtatggacaagatctacgagggccaagtggaagtgactggtgacgaatacaacgtggagtctatcgacggccagccgggggcctttacttgctatctggatgcagggctggccaggactaccaccgggaacaaagttttcggggccctaaagggtgccgtggacggaggactatccatcccccactctaccaagagattccccgggtatgactcggagtcaaaggaattcaacgctgaggttcatcgtaaacacatcatgggccagaacgtagccgactacatgagatatctgatggaagaggacgaagacgcatataaaaagcagttttcccagtatattaaaaactccgtgacccccgacatgatggaagaaatgtacaagaaggcacacgcagccatccgggagaatcctgtctacgaaaaaaagccgaaaaaggaagtaaaaaagaagagatggaatcggcctaaaatgtccctggcacagaaaaaggaccgggtcgcgcagaaaaaggcatcatttttaagagcgcaggagcgggcagcggaaagttag

SEQ ID NO: 132857 - DNA, 744 bp, synthetic construct
  misc_feature 1..744: note = Description of Artificial Sequence: Synthetic coding sequence
  source 1..744: mol_type = other DNA
atgattgttagagtcaccaatcgcgatataatttgtcagatcgcttacgccaggatcgagggggatatgatcgtctgtgccgcctatgctcatgagttacctaaatacggcgtgaaagttggcttaacaaactatgccgccgcatactgtaccggcctgctcctggcgagacgcctgctgaataggtttggcatggacaagatctacgagggccaggttgaggtcaccggagacgaatataacgtcgaatctatcgatggccagcccggcgcatttacatgttatcttgacgccggattagccaggacgaccactggcaacaaggtctttggtgctctgaagggtgcggttgacgggggattatctatccctcacagtacaaagcgctttcccggatatgatagcgaatcgaaggaatttaatgccgaagtacaccggaagcatataatgggacagaatgtcgccgattacatgcgctatctgatggaggaggacgaggatgcttacaagaaacaattcagccagtacatcaagaacagtgtcacccccgacatgatggaggaaatgtacaaaaaggcccacgccgccattcgggaaaatccagtttacgagaaaaaaccgaaaaaagaggtgaagaaaaaaaggtggaacagacccaaaatgagtttggcccagaagaaggaccgcgtggctcagaagaaagccagctttctgcgagcccaagaacgggctgcagaaagctag

SEQ ID NO: 132858 - DNA, 867 bp, synthetic construct
  misc_feature 1..867: note = Description of Artificial Sequence: Synthetic coding sequence
  source 1..867: mol_type = other DNA
atggctggcgaaaaagtcgagaaacccgacacaaaggaaaagaagccagaggccaagaaagtggacgccggagggaaagttaagaaaggaaatctgaaggccaagaaacccaagaaagggaagccccattgttccagaaatcccgtgttggttcggggaatcgggaggtactcccgatccgccatgtacagccgaaaggccatgtacaaaaggaaatattcagccgctaagagtaaggtggagaagaaaaagaaggagaaggtgctagctaccgtgactaaacccgttggaggcgataaaaacggagggacacgagtggtgaagctgagaaagatgcctcggtactaccccactgaggacgtgccacgcaaactcctcagccacggaaagaaaccgtttagccagcatgttcgtaaattaagggcgagcatcacccccggcaccatactcatcatcctgaccggccgacacaggggcaaaagagtcgtcttcctgaagcagctggcctcaggcctgctcctggtcactggcccactcgtgttgaaccgcgtgcccctgcgtagaacccatcaaaagttcgtgatagccactagcacgaaaatcgacatatctaatgtgaaaattcctaagcacctgacagatgcatactttaaaaaaaaaaagttgcggaaacctaggcaccaggaaggggagattttcgatacagagaaggagaagtacgagattacagagcagcgcaagattgatcagaaggctgtggattcccagatactgcccaagataaaggccattccccaactgcaaggctacctgagaagcgtgttcgccttgaccaacggcatctatccccacaaactggtcttttag

SEQ ID NO: 132859 - DNA, 867 bp, synthetic construct
  misc_feature 1..867: note = Description of Artificial Sequence: Synthetic coding sequence
  source 1..867: mol_type = other DNA
atggccggagagaaggtcgagaagcctgacactaaggaaaaaaaacccgaagccaagaaggtggacgctggtggcaaggtgaagaagggaaacctgaaagccaaaaaaccaaagaaggggaaaccacactgtagccgaaaccccgtgctcgtaagaggaatcggacggtactctcggtctgcaatgtattctagaaaggcgatgtacaagaggaaatacagtgccgccaagagcaaagttgaaaaaaagaagaaagagaaagttctcgctactgtcactaagccggtgggtggagacaaaaacggggggactcgagtggtaaaacttaggaaaatgccgcgttactatccaactgaagatgtccctaggaagctgctctcccacggaaagaagcctttttctcagcacgtcaggaagcttcgcgcttccatcaccccgggcaccatccttattatccttacagggcgtcatcgagggaagagagtggtgtttttaaaacagctggcatctgggctccttctggtaaccggtccactcgtgcttaaccgtgttcctctgcgaagaacacatcagaagttcgtgatagcgacctccacaaagattgacatctccaacgtgaagattcccaaacatctgaccgacgcctatttcaagaagaaaaaactgaggaaaccccgacatcaggaaggggagatctttgataccgaaaaggagaagtacgaaattactgaacagcggaagatcgatcagaaagcagtggattcacagatcctccccaagattaaagccattcctcaattacagggttacctgcgcagcgtattcgccttgacaaatgggatctatcctcacaagttggtgttttag

SEQ ID NO: 132860 - DNA, 318 bp, synthetic construct
  misc_feature 1..318: note = Description of Artificial Sequence: Synthetic coding sequence
  source 1..318: mol_type = other DNA
atggctggggaaaaagtcgagaagccagacactaaggagaagaagcctgaagccaagaaagtggatgccggcggaaaggtgaaaaagggcaatctaaaggctaagaaacctaagaaaggaaagccacattgctcaagaaaccccgtgttggtgcggggtatcggaaggtactccagatccgcaatgtacagcaggaaagcaatgtacaagcggaaatactctgccgctaaaagtaaggttgaaaagaagaagaaagagaaggtcctcgccacagtgaccaagcctgtggggggggataaaaacggaggtacacgttag

SEQ ID NO: 132861 - DNA, 219 bp, synthetic construct
  misc_feature 1..219: note = Description of Artificial Sequence: Synthetic coding sequence
  source 1..219: mol_type = other DNA
atggctggcgagaaagtggaaaaacccgataccaaagaaaagaaaccggaggcaaaaaaggtcgatgccggcggcaaggtgaaaaagggcaacctaaaggccaagaagcccaagaaaggcaagccacactgttcaagaaacccagtgctcgtcagaggaataggacgctattctcgctctgcgatgtactccaggaaagcaatgtataagcgcaagtag

SEQ ID NO: 132862 - DNA, 480 bp, synthetic construct
  misc_feature 1..480: note = Description of Artificial Sequence: Synthetic coding sequence
  source 1..480: mol_type = other DNA
atggcaggcgaaaaggtggaaaagcccgacacgaaagagaagaagcctgaagccaagaaggtggacgctggcggtaaggtgaaaaagggaaatctgaaggcaaaaaagcctaagaaaggcaagccacactgcagtaggaatccagtgctggtcagaggtatcggtaggtactcccgaagcgctatgtattccaggaaagctatgtataagcggaagtactcagccgctaagtctaaagtggagaagaaaaagaaggaaaaagtgttagctacggtgacaaaaccagtgggtggagacaagaacggtggcacgagggtggtcaagctgagaaagatgccaaggtattatccaacggaagacgtgccccgcaaacttctgtcacacgggaaaaagccattttctcagcatgtgcggaaattgcgggctagcattacgccaggcaccatcctaataatcctgaccggccggcaccgcggctag

SEQ ID NO: 132863 - DNA, 345 bp, synthetic construct
  misc_feature 1..345: note = Description of Artificial Sequence: Synthetic coding sequence
  source 1..345: mol_type = other DNA
atggctggcgagaaagtcgaaaagccggacactaaggaaaagaaacccgaagcaaaaaaggtcgacgccggcggaaaagttaagaagggcaatttgaaagccaaaaagccaaagaagggcaagcctcattgttcaagaaatcccgtactggtacggggtattgggaggtactcaagatctgccatgtattctcggaaagctatgtataagagaaaatattcagccgccaagtccaaagtcgagaaaaaaaaaaaggaaaaggttctggccaccgttacaaagcctgtggggggagacaaaaacggtggaacacgtgtggtcaaactgaggaagatggtccgatag

SEQ ID NO: 132864 - DNA, 345 bp, synthetic construct
  misc_feature 1..345: note = Description of Artificial Sequence: Synthetic coding sequence
  source 1..345: mol_type = other DNA
atggctggcgagaaggtggagaaaccggatacgaaagaaaaaaagcctgaagctaagaaagtggatgcagggggcaaggtcaagaaaggcaatcttaaggccaagaaaccaaagaagggaaagcctcattgtagccgtaaccccgtgctggtgcggggaatcggcagatatagtagatccgctatgtacagtcgaaaagcaatgtataaaagaaagtacagtgcagctaaatccaaagtggagaaaaagaaaaaagagaaagtcctggctaccgtgactaagcctgtcggcggagataaaaatgggggaacccgcgtggtaaaactgagaaagatggtacgctag

SEQ ID NO: 132865 - DNA, 747 bp, synthetic construct
  misc_feature 1..747: note = Description of Artificial Sequence: Synthetic coding sequence
  source 1..747: mol_type = other DNA
atggagggcgttgaggaaaagaagaaagaggttcccgccgttcccgaaacacttaaaaagaaacgcaggaattttgccgagctcaaaatcaagcgcctgaggaaaaaattcgcgcagaagatgttacgcaaagcgcgtagaaagctgatctacgagaaggccaagcactaccacaaggagtatagacagatgtataggacagaaatccggatggccagaatggctagaaaggctgggaatttctatgtgcccgcggagccgaagctggccttcgttatccggatacggggaattaacggcgtttcgccaaaagtgaggaaagtcctccagctgcttcggctgagacagattttcaacggcacgttcgttaaactcaacaaggcgagtattaatatgctgaggattgttgagccctacatcgcttggggctaccccaacctgaaatcggtcaacgagctgatctacaaacgcggctacgggaaaataaacaaaaaacgaattgcgctaacagacaatgctctgatcgcaaggtcactgggaaagtatggcattatctgcatggaagatttgatacatgagatttacaccgtggggaaaagatttaaggaagcgaataacttcttatggccattcaaactgtcttcccccagagggggtatgaaaaaaaaaaccacccactttgtggaaggcggggatgctggaaacagagaggatcaaatcaacagactgattcgaaggatgaattag

SEQ ID NO: 132866 - DNA, 456 bp, synthetic construct
  misc_feature 1..456: note = Description of Artificial Sequence: Synthetic coding sequence
  source 1..456: mol_type = other DNA
atggccccactgtatcaagcggcaggcaaaggggatgtaccaaccaagaggccgcctgttctaagagctggggttaacaccgtcacaaccctagtggagaataagaaagcccagttggtggtaatagcccacgatgttgaccctatcgagcttgtggttttcttgcccgccttatgcagaaagatgggtgtgccatactgcattatcaaaggcaaagcacgcctgggcagactggtgcacaggaaaacatgtaccacagtggcgttcactcaggtcaatagtgaggataagggggccctggccaagcttgtagaggcaattcggacgaattacaatgacagatatgacgagataaggcggcattggggcgggaatgtattaggacccaagtccgtggcccggattgcgaagctggaaaaggctaaggccaaagagttggccactaaattgggttag

SEQ ID NO: 132867 - DNA, 801 bp, synthetic construct
  misc_feature 1..801: note = Description of Artificial Sequence: Synthetic coding sequence
  source 1..801: mol_type = other DNA
atgcccaaaggaaagaaggctaaaggcaaaaaggttgccccagctccagcagtggtgaaaaagcaggaagccaaaaaggttgtgaatcccctcttcgagaaacgccctaaaaatttcggaatcggacaggacatacaacccaaaagggacctgactcgcttcgttaagtggccccggtacattcgactgcagagacagcgcgcaattttatataaacggctgaaggtgccacctgctataaaccaattcacacaggctctggaccggcagaccgccactcaactactgaaattggctcacaaatacaggccagagacgaaacaggagaagaaacagaggttgctcgcccgcgccgaaaagaaagcggccggtaagggcgacgtgcctactaagcggccacccgtcctgcgggccggcgtgaataccgtgactactctcgttgagaacaagaaagctcagttggtcgttattgcgcatgatgtcgatcccattgagttggtggtcttccttcccgcactttgcagaaaaatgggtgttccttattgtattattaagggcaaggcacggctgggcaggttggtacatcgtaaaacatgcacaacagtggcttttacacaagttaatagcgaggataagggagcgctggccaagttagtggaagccatccggacgaactacaatgaccggtacgacgagatccggcgtcactggggaggcaatgtactggggccgaagagcgtcgcccgtattgccaagctggaaaaagccaaagcaaaggagctggcaaccaagctgggctag

SEQ ID NO: 132868 - DNA, 576 bp, synthetic construct
  misc_feature 1..576: note = Description of Artificial Sequence: Synthetic coding sequence
  source 1..576: mol_type = other DNA
atgcttgtgcggctcaacgtacgctgcagttgtagaggcgtggtgctgggcgggtgtcggaaactgctggcctccctggttcagcccaagggaaaaaaggcaaaaggcaagaaggtcgcacccgccccagcagttgtcaagaagcaagaagcaaaaaaagtcgtcaatcccctgtttgagaagcggcccaaaaatttcggtatcggtcaggatatccagccgaagcgagatctgacacggttcgtcaagtggccccgatacatccgactgcagcggcagcgggctatcctctataagagacttaaggtgccgcctgctatcaatcaattcacacaggccctcgaccgacagaccgctacgcaactgcttaagctggctcacaaatatcgcccagagactaaacaagagaaaaaacaaagacttttagctagggccgagaagaaggcagcaggaaagggcgacgttcccactaaacggcctcctgtgctgagggccggagtaaatacagtaacaaccctggtggagaataagaaagcccaactggtcgtcatagcccacgacgtcgaccctatatag

SEQ ID NO: 132869 - DNA, 774 bp, synthetic construct
  misc_feature 1..774: note = Description of Artificial Sequence: Synthetic coding sequence
  source 1..774: mol_type = other DNA
atgggaagagtcataagaggccaaaggaagggcgctggatctgtttttcgtgcccacgtcaaacaccggaagggggccgcccgtcttcgggctgttgacttcgcagaaaggcatggatacattaaaggtattgtgaaagatatcatacacgatcccggcagaggggcccccctggccaaggttgtcttccgcgatccttataggttcaagaagaggactgaactcttcattgccgcagaaggaattcatacagggcagtttgtctactgtggtaagaaggcccaactgaatattggaaatgtgctccctgtgggaactatgccagaagggaccatagtgtgctgtcttgaagagaagccaggggatcgcggtaagttggcacgggcaagtggtaattacgcgacagtgatctctcataatccagaaaccaagaaaacccgcgttaaactaccaagtggctccaagaaagtgatttcctcagcaaaccgggcggtggtcggggtcgtggctggaggagggcgaatcgacaagccaattttgaaggctggacgcgcctaccataagtacaaggcaaagagaaattgctggccacgggtgaggggggtggccatgaacccagtggaacatccttttggaggggggaaccatcaacacattggcaagccctcaaccatccggagagatgcccccgccggtcggaaagtagggttaattgctgccaggaggaccgggcggttgcgcggcactaagacggtgcaggaaaaggagaactag

SEQ ID NO: 132870 - DNA, 774 bp, synthetic construct
  misc_feature 1..774: note = Description of Artificial Sequence: Synthetic coding sequence
  source 1..774: mol_type = other DNA
atgggcagagtgattcggggacagcgcaagggcgctggctctgtgttcagggcccatgttaagcacaggaaaggggcagcaagactgagagctgttgatttcgctgagagacacggatacatcaaaggcattgtgaaagatattatacacgaccctggccgcggtgctcccctcgcgaaggttgtctttcgagatccatacagatttaagaagagaaccgaactcttcattgctgctgaaggtattcacactggtcagttcgtatattgtggcaaaaaagcgcaattaaacattggaaacgtcctgccggtaggaacaatgcccgaaggcacgatcgtttgctgcctggaggaaaaacccggcgacagaggaaagctcgcacgtgcatcaggcaattacgccacagtcatttcacataaccccgaaaccaagaagacacgggtcaagctgccaagcggttctaaaaaagtgattagctccgcaaaccgcgccgtggtcggggttgttgccggtggcggtaggatcgacaaacctattctgaaggctgggagggcttaccacaagtacaaagcaaagaggaattgttggccccgggttcgcggagtcgccatgaatcccgttgagcatccgtttggtggcgggaaccaccagcacatcggcaagcccagcacaattagacgcgatgcgcctgcaggccgtaaggttggcctgattgccgcacggcgaaccggacgcctacgcggcaccaaaaccgtgcaagagaaggaaaattag

SEQ ID NO: 132871 - DNA, 579 bp, synthetic construct
  misc_feature 1..579: note = Description of Artificial Sequence: Synthetic coding sequence
  source 1..579: mol_type = other DNA
atgaagacaatcttgtctaatcaaaccgtggatatccctgagaacgtggatattacgctgaagggcaggacagtcatcgtcaagggacccagaggaaccctccgccgggactttaatcatattaatgtggaactgtcactgctgggtaaaaagaaaaagagactgagagtggataaatggtggggtaacaggaaagagttggccacagtccggactatatgctcccatgtacaaaatatgatcaaaggcgtgaccttgggattcagatacaaaatgaggtcagtgtacgcccattttcccattaatgtcgtcattcaggaaaacggctctcttgtggaaattcgcaatttcttaggtgaaaaatatattcgacgggttcgtatgagaccaggtgtggcctgttccgtgtcacaggctcagaaagatgagcttatcctcgaaggcaacgacattgaactggtctccaactccgcagcactcattcaacaagctactacagtcaagaacaaggatatacgaaaatttctggacggcatatatgtgtcagagaagggcaccgtgcagcaggccgatgaatag

SEQ ID NO: 132872 - DNA, 444 bp, synthetic construct
  misc_feature 1..444: note = Description of Artificial Sequence: Synthetic coding sequence
  source 1..444: mol_type = other DNA
atgaagactatcctttctaaccaaacagtcgacatcccggagaacgtcgacattaccttgaagggacggactgtcattgtcaaagggccacgcggtacgctgcgacgcgacttcaaccacattaacgtcgagctgtctttactcggcaagaaaaaaaaacgcctacgggttgataagtggtgggggaataggaaggagttggccactgtgagaacaatctgttctcacgtgcagaacatgataaagggggtaaccctgggctttagatataaaatgcgaagtgtgtatgcacacttccctattaatgtggttattcaggagaacggtagcctggttgaaatcagaaattttttaggagagaagtatatcagaagagttcgcatgagacctggtgtggcgtgttttaagttctctggctttgactcagcctcacataactcatag

SEQ ID NO: 132873 - DNA, 579 bp, synthetic construct
  misc_feature 1..579: note = Description of Artificial Sequence: Synthetic coding sequence
  source 1..579: mol_type = other DNA
atgaaaactatactgtccaaccagacagttgacatcccagaaaatgtggatataaccttgaaggggagaaccgtgatcgttaagggtcctcgggggaccctcagacgcgacttcaaccatattaacgtcgagttaagtctgctgggcaaaaagaaaaagcgcctgcgcgtggacaaatggtggggcaaccggaaagagttggccactgttcgcaccatctgcagccacgtccagaatatgatcaagggcgtgactttaggtttccgctacaaaatgcggagcgtctacgcgcactttcccattaacgtggtgatacaggaaaacggatcactggtagagatacgcaatttcctcggcgagaagtatattagacgcgtccgaatgcgccccggcgtggcttgctctgtgagtcaggctcagaaggatgagttgattctggaggggaatgacattgagctggtgtctaatagtgccgccctgatccaacaggcaacaaccgtgaagaataaggatattcggaagttcctcgatggaatttacgtgagcgaaaaggggacggtccagcaggctgacgaatag

SEQ ID NO: 132874 - DNA, 501 bp, synthetic construct
  misc_feature 1..501: note = Description of Artificial Sequence: Synthetic coding sequence
  source 1..501: mol_type = other DNA
atgaagaccatcctatctaatcaaacggtggatattcccgagaacgtggatataacattgaagggacggaccgtcattgtgaagggcccaaggggaactctacgacgtgacttcaaccacatcaacgtggagctgagcctccttggcaagaaaaaaaagaggcttagagtggataagtggtgggggaataggaaggagctcgccacagtgaggaccatttgctcccatgtacagaacatgattaaaggagtcactctgggattcagatacaagatgagatctgtctatgcgcattttccgataaatgtagtgatccaagagaatgggtctctagtcgaaatcagaaactttcttggcgagaagtacatccggagggttagaatgcggcctggcgtggcctgttccgtctcacaggcccaaaaggacgagctgatactggagggcaatgatattgaactggtatccaacagtgccgcattaattcaacaggccacaacttag

SEQ ID NO: 132875 - DNA, 498 bp, synthetic construct
  misc_feature 1..498: note = Description of Artificial Sequence: Synthetic coding sequence
  source 1..498: mol_type = other DNA
atgctcatgccaaaaaaaaatcgcattgccatatatgaactgctgttcaaggagggcgtgatggtagccaaaaaagacgtgcatatgcccaagcacccagagttggctgacaagaatgttccaaacctgcatgtaatgaaggcgatgcagtctctcaagtctagaggttacgtgaaggagcagtttgcctggagacacttctactggtacttaacaaatgagggtattcaatacctccgggattatttgcatctccctccggagattgtgcccgctacactccgtaggagccgaccagaaacaggaagaccgcggccaaaagggctcgagggagagaggcctgcaaggctcacccgcggtgaggcagaccgggacacttatagaaggagtgcagtccctcctggcgccgacaagaaggcagaggcaggagcagggagcgctactgagtttcagtttcgaggcggctttggccgcggcagaggccagcctccccagtag

SEQ ID NO: 132876 - DNA, 477 bp, synthetic construct
  misc_feature 1..477: note = Description of Artificial Sequence: Synthetic coding sequence
  source 1..477: mol_type = other DNA
atggcggacattcagacggaaagagcttatcaaaaacagcccacaatctttcagaacaagaagagggtcctgttgggcgagaccggtaaagaaaagcttccacgatattacaagaatattggcctgggatttaagaccccaaaggaagctattgaaggtacctatattgataaaaaatgcccattcactggaaacgtgagcatcagggggagaatactgtccggcgttgttactaaaatgaagatgcagcgcacaatcgtgatcagacgcgattaccttcactacatccgcaagtacaaccggtttgaaaaacgccataaaaatatgtccgtccacctctccccttgctttagggatgtccagatcggcgacatagtcaccgtcggcgagtgtcggcccctgtccaagaccgtgagatttaacgtgctgaaggtgactaaagccgctggaaccaaaaagcagttccagaaattctag

SEQ ID NO: 132877 - DNA, 423 bp, synthetic construct
  misc_feature 1..423: note = Description of Artificial Sequence: Synthetic coding sequence
  source 1..423: mol_type = other DNA
atgacaagcatgacccagtcccttagggaggtgataaaggcgatgacgaaagctcggaacttcgaacgggttttgggcaaaattactctggtatcagccgcccccggcaaagtgatctgcgaaatgaaagtggaagaagagcacacaaacgccatagggacgctgcacgggggtctgacggccactctggtggacaatatcagtaccatggcccttctctgtactgagcggggagccccaggggtgagtgttgatatgaacatcacctatatgagcccagccaagctgggagaggacatagtcatcacagcgcatgttctgaaacaaggcaaaaccctcgcatttacatcagtagacctgactaataaagccaccggtaagctgatcgcccaaggtagacatactaaacatttgggcaattag

SEQ ID NO: 132878 - DNA, 456 bp, synthetic construct
  misc_feature 1..456: note = Description of Artificial Sequence: Synthetic coding sequence
  source 1..456: mol_type = other DNA
atgggacgaatgcatgcccccggtaagggtctttctcagtctgccctgccttacagacgctccgtgcctacctggcttaaattgacttcggacgacgtcaaggagcagatatacaagctagctaaaaagggactcacacccagccagatcggcgtgatcttacgcgactcccacggagtggctcaggtgagatttgtgaccgggaacaagatactgagaatcctgaagtctaagggcttagctccggacctccccgaagacttgtaccacctcattaagaaagctgtggccgtacggaagcaccttgaacggaatcggaaagacaaggacgctaaattcagactgatactgattgagagccgcattcatcgcctcgcacggtactataagacaaagcgggtgttgccgcctaactggaagtacgaaagcagcacagcttcggccttagtggcctag

SEQ ID NO: 132879 - DNA, 456 bp, synthetic construct
  misc_feature 1..456: note = Description of Artificial Sequence: Synthetic coding sequence
  source 1..456: mol_type = other DNA
atggccccccgcaagggcaaggagaaaaaggaagaacaagtgattagtctgggaccccaagttgcagagggggaaaatgtcttcggcgtctgccatatcttcgcatccttcaacgatacgttcgtgcacgtgacagacctctctgggaaggaaaccatctgtcgcgtcaccggtggtatgaaagtgaaggcagaccgagatgagtcttccccctatgccgccatgctggcggcacaggacgtggcccagaggtgtaaggagctggggatcaccgcattacacattaagctgagagctacagggggaaaccggacgaagacccccggtcccggcgcccagtcagcacttcgagccctcgcccgctctggtatgaagatcgggcgcatcgaggatgtcacacctatcccctctgactcaactcggcgaaagggaggccgccggggcaggcgcctctag

SEQ ID NO: 132880 - DNA, 456 bp, synthetic construct
  misc_feature 1..456: note = Description of Artificial Sequence: Synthetic coding sequence
  source 1..456: mol_type = other DNA
atggcacctaggaaagggaaagagaagaaagaagaacaggtgatatcactgggtcctcaggtagctgagggtgagaacgtgtttggagtatgtcacatctttgcctcctttaacgatactttcgtccacgtcacagatctctctggtaaggagacaatatgtagagtcacgggagggatgaaagtgaaagcggaccgcgatgagagtagtccatacgccgcaatgctcgccgcccaggacgttgctcagcgctgcaaagagttgggaattaccgccctccacatcaagctgcgcgccacaggaggaaataggacgaaaacccccgggccaggcgcacagtccgcattgcgggcactggcccggagcggcatgaaaatagggcggatcgaggatgtaacacctatcccctccgattcaacccggcgaaaaggggggcgccgaggacgccggttgtag

SEQ ID NO: 132881 - DNA, 456 bp, synthetic construct
  misc_feature 1..456: note = Description of Artificial Sequence: Synthetic coding sequence
  source 1..456: mol_type = other DNA
atggcccctcgcaaaggcaaagaaaaaaaggaggagcaggtcatttccttgggcccccaagttgctgagggcgaaaacgttttcggggtctgtcatatcttcgcctccttcaacgacacattcgtccacgttaccgacctttcgggcaaggaaaccatctgccgagttacaggcggtatgaaagtcaaagctgaccgtgacgaatcatccccatacgccgcgatgctggcagcacaggatgtggctcagcgatgcaaagaactgggcataaccgccctgcatattaagttgagggcaaccggaggcaaccggacaaagactccaggccccggagcccagtccgccttacgggccctcgcgagaagcggcatgaaaattggcaggatcgaagacgttactccgattccttctgactctaccagaaggaagggcggaagacgcggtcggcggctgtag

SEQ ID NO: 132882 - DNA, 456 bp, synthetic construct
  misc_feature 1..456: note = Description of Artificial Sequence: Synthetic coding sequence
  source 1..456: mol_type = other DNA
atggccccgaggaaaggcaaggagaagaaggaggagcaggtgatcagccttggccctcaggtggctgaaggtgagaacgtctttggcgtgtgccatatctttgcttcttttaacgataccttcgttcacgtcacagacttatctggcaaagaaaccatctgcagggtaaccggggggatgaaggttaaagccgaccgcgatgagtctagcccttacgcggctatgctcgccgctcaggacgtcgcacagcgttgcaaggaattgggtatcaccgcactccacattaagctaagggctacgggcggcaaccgcaccaaaaccccaggcccaggggctcagagcgccctgcgtgccctggctcggtctggaatgaaaattggacggattgaggacgtcacacccatcccatccgattcaacacgcagaaaaggcggacgccggggaaggcgtttgtag

SEQ ID NO: 132883 - DNA, 6912 bp, synthetic construct
  misc_feature 1..6912: note = Description of Artificial Sequence: Synthetic coding sequence
  source 1..6912: mol_type = other DNA
atggccagctctgtcgctccatatgagcagttggttcggcaggtcgaggctcttaaggctgagaactcccatttaagacaggaactgcgcgataactcaagccatctcagtaaactcgagactgaaaccagcggaatgaaggaggtgcttaagcatctgcagggaaaactggaacaggaggcacgagtgctggtgagctccggacagactgaggtgctggagcaactcaaagccctgcaaatggatatcacgtccctatacaacctcaagtttcaaccccctactctaggtcccgaaccggcagcccgtacccctgaaggtagtccagttcacgggtcgggtccgagtaaagattcttttggcgagctgagccgcgccacaatcagactcctagaagagctggatagagagcgttgtttcctgctgaatgagattgagaaggaagagaaagagaagttgtggtactattcacagctccagggcctcagcaagaggctcgacgagctccctcacgtggagacccaattcagcatgcagatggatctgatcagacagcagctggaatttgaggctcaacacatcaggtccctgatggaagagagatttggaaccagtgacgaaatggttcagcgtgcccagatcagggcttccaggctggagcagatcgacaaggagttattagaagctcaggacagagtgcagcagacagagcctcaagcccttctggctgtaaagagtgtccctgtggacgaagaccccgagaccgaagtgccaacacaccccgaagatgggaccccacagccggggaacagcaaagtggaagttgtgttctggttgctcagtatgttggctacacgagaccaggaagatactgcgcggactcttctcgctatgtcctctagtccagaatcatgcgtggcaatgaggcggtctggctgcctgcctctcctattacaaattttgcacggcaccgaagccgcagccgggggtcgtgcaggcgccccaggagctcccggcgctaaggacgccagaatgcgagcaaacgctgccctccacaatattgtgttctcacagcctgatcaggggttggctcgcaaggagatgcgggtgcttcatgtactcgagcagataagggcatattgtgagacatgttgggattggctccaagcgcgcgatggaggtcccgaaggcggcggagccggcagcgctccaatcccaatcgaaccccagatttgtcaggccacttgtgctgtgatgaagctttcttttgatgaggaatatagaagggccatgaatgaattaggggggctccaggccgtggccgagctgctgcaagtcgattacgagatgcacaaaatgacacgggatccccttaatctggctttgaggaggtatgctggaatgacactgaccaacctgacatttggcgacgtcgcaaacaaggccactctgtgtgctcgacgcggatgcatggaggccatcgtggcacagttggcaagcgactcagaggaactccatcaggtggttagcagtattttacgtaatctgtcctggcgggctgatattaactccaagaaagtgctcagggaagccgggtctgtgacagctctggtgcagtgcgtcctgcgggctaccaaggaatcaacgctcaaatccgtgctgagcgctctctggaatctttcagcacacagcactgagaataaggctgccatttgccaagttgacggcgcactgggttttctggtgagcactcttacctataagtgccagagcaattccttggccataatagagagcggcggcgggatcctccggaacgtgtcaagccttgtggccactcgtgaggattatcggcaggtcctgcgcgatcataactgtctgcaaacactgttgcagcatctgacatcacattcacttacaatcgtctctaatgcttgtggcacgctatggaacctgagcgctcgttcagccagagaccaggaactgttgtgggatctgggcgccgttgggatgctgcgcaatttagttcactctaaacataaaatgatagcaatgggcagcgctgctgctttgagaaacctgttagctcaccgccccgccaaacaccaggctgctgcaaccgctgtgtcccctggttcttgtgttccatccctctacgttcggaaacagcgggccctggaagcggagctggatgctcgccacctggctcaggcattagagcacttggaaaagcaggggcctccagccgccgaagccgcaactaaaaaacccttacctcctctcaggcacctggatggcctggcccaggattacgcaagcgacagtgggtgttttgatgacgatgatgcgccgtcctctttagcggccgccgctgctacaggagaacccgcgagccctgccgcactgagcctctttctcggctctccctttctgcaaggacaagccttagcaaggacccctccaacgcgacgcggcggcaaagaggccgagaaagataccagcggagaggctgctgtagcagcgaaggcaaaggctaaactggccttggccgtggccaggatagaccagctcgtcgaagacatctctgcactccacactagcagcgacgacagcttttcgctgtcttcaggcgatcccgggcaagaggcaccacgggaggggagggcacagtcatgctctccctgcagggggccagagggcgggaggcgagaagccggttcccgcgcccatccattactccggctgaaagccgcccacgccagtctctccaacgactcacttaattcggggagcgcatccgatggctactgccctcgggaacacatgctcccatgccctcttgctgctctggcttccaggcgtgaggatccgcgatgcgggcagccgcgaccatccagactggacttggatctgcctgggtgtcaggccgagccgcccgcccgcgaagcgacctctgccgatgctcgtgtcagaactatcaagctaagtcccacctaccagcacgtccctctgcttgaaggcgccagtcgcgctggtgcggagcctttggctggtcccggcatcagccctggcgcccggaagcaggcatggctaccagccgaccatctctctaaggtgcctgaaaaactcgctgctgctcccctctctgtagccagcaaagccctccaaaaattagccgcccaggaagggccattgtctcttagccgctgctcatctctgtcctcactgagctccgctggcagacccggaccgagtgaggggggggaccttgacgattctgattcttctctcgagggattagaagaagccggacccagtgaggctgaactggactcaacttggcgcgcccctggggctacatccctccccgtagccatcccggcacctagacggaaccgcggaagaggcctgggtgtcgaggacgccaccccatcctcatccagtgagaactatgtccaggagaccccgctggtcctgtcccgctgttctagcgtgtcttccctgggatccttcgaatccccgtctatcgccagtagcattccatccgagccctgctctggacaggggtcagggaccatctcaccatccgaattgccagactcgcctggccaaaccatgccaccatctagatccaagacgcctcccctagctcctgcacctcaaggcccgccagaggccactcaatttagtctccagtgggagtcctacgtgaaacgcttcctggacatcgctgactgccgggaaagatgccgcctcccaagtgaactggacgcagggtccgtacgctttacagttgagaagcctgatgaaaacttctcatgtgcctcaagcctttctgcactcgcactgcatgagcattatgtacagcaggatgtggagctgaggttactgccctccgcctgtcctgagcgcgggggcggcgccggcggcgccggactgcatttcgccggccatcggcgaagggaagaaggcccagcccccaccggctctcgaccgaggggtgctgccgaccaagagctggagctcctgagagagtgtctgggcgctgccgttcctgcccggctgcggaaggtcgccagcgccctggtgcctggccgccgggccctgcccgtccctgtctacatgttggtgcctgctccggcccctgcccaggaggatgacagttgtaccgattcggctgaggggacacctgtgaacttctcttccgctgcctcgctgtccgacgagacgctgcaaggtcctccgagagatcagcccggagggccagcagggcgccaacgacctacagggcgacctacaagtgcccggcaggctatgggacatcggcataaggccggtggggcagggcggtcagccgagcaaagtagaggagcggggaagaatagagccggactggagttgcctctgggcaggccaccaagtgctccggcagataaggatggaagtaaacccggtcgaaccaggggtgacggagccctgcagagcctttgcttgaccacaccaactgaagaagccgtgtactgcttctacggaaacgacagcgacgaagagccaccagcagccgctcctacccctacccatcgacggacaagcgccattccccgcgccttcaccagagaacgccctcaaggtaggaaggaagcccccgccccatctaaggcggcacctgctgcaccacctcccgcacgtactcagccaagtctgatcgcagatgagacgcccccctgttattctttgtcaagctccgcatcgagcttgtctgaacctgagccctctgaaccgcccgccgtgcatcccagaggaagggaaccagcggtaaccaaagacccaggcccaggagggggtagggacagtagtccctctccaagagccgcggaagagctactgcaacgctgtatctctagtgcgctgcctcgcagacgacctccagtgtcaggattaagacggaggaagcctcgtgctacccggctggacgaacgccctgcagagggttcgagggaaaggggagaagaagctgccggcagcgaccgcgcatctgaccttgacagtgttgagtggcgggccattcaggaaggggcaaactccattgtaacctggcttcatcaggctgccgctgccacacgggaggcatcctctgagagcgactctatactgagctttgtctccggattatctgtgggttcaacactgcaaccacctaagcaccgtaaggggaggcaggccgagggggaaatggggtccgcccggaggcccgagaaaaggggcgcagcgagtgtcaagacctctggatccccccgctcccctgcggggccagaaaaacccagaggcactcagaagaccaccccaggagtacccgctgtgctgcgagggcgtaccgtaatttacgttccttcacccgcccccagggcccagcctaagggtacccctggtcctagagccaccccccgcaaggtggcgcccccatgcctggcccaacccgctgcgccggcgaaagtgccctcacctggacagcagagaagcagatctctgcatcgacccgctaagacttccgagctcgccacactcagccagccccctagatcggctaccccacccgcccgcctggcaaagactccctcttcctcgtcaagccagacgtcccccgcgagtcaacctctgccccgaaaaagaccacctgtcacccaagcagctggtgcgttgccaggcccaggagcctctccagtaccaaaaacgccagctcgcactctcttggctaagcagcacaagacacagcggagccctgtgcgcataccatttatgcagcgccctgccaggcgcgggccacccccattggcccgtgccgttccagaaccaggacctcgtggcagagccggcacagaggccggacccggggctagaggcggtagacttggcttggttcgcgtcgccagtgctttaagctctggttctgagagctctgatcgttctgggttcagacggcagctgaccttcatcaaggaaagccctggactgagaaggcgacgctccgaactgtcgagtgcggaatcagctgctagtgcaccccagggcgcttcgccccgccgcgggaggcctgcactgcctgctgtgttcctgtgcagtagccgatgcgaagaattaagagcggcacctaggcagggaccagcacccgcccgtcagagacccccagcggcacgaccgtctcctggtgagcgacctgccagacgcaccacttctgaaagccctagccgcctcccagttagagcgccagccgcccgccccgaaacggttaagcgctatgcttctttgcctcacatctccgttgcaagaaggccagatggcgctgtaccagcagcaccagcttctgctgatgcagctagaaggtcatccgacggcgagccaagacctctccctcgagttgctgcacccggaaccacttggaggagaatacgagacgaagacgttccccacatactcaggagcactctcccagcaacagctttgcccctgcgcggctccacaccagaagatgcccccgccggaccacctcctcgaaagacttccgatgcggtggtccaaaccgaggaggtggcagctcccaaaaccaactcttccactagtccgagcctggagaccagagagcccccaggagcaccagccggcggacagctgtctctcttaggatccgatgtagatgggccgtctctcgctaaggcaccgatttccgcacctttcgtgcatgaaggtctgggcgttgccgttgggggcttcccagctagcagacacggctccccctcaaggagcgccagggtcccaccattcaactacgtgccctcccccatggtggtcgctgccactaccgactctgctgccgagaaagctcctgcaaccgctagcgctactctgttagaatag

SEQ ID NO: 132884 - DNA, 438 bp, synthetic construct
  misc_feature 1..438: note = Description of Artificial Sequence: Synthetic coding sequence
  source 1..438: mol_type = other DNA
atggctgaggtcgagcagaaaaaaaagcgcacgttccggaagtttacatacaggggcgtggacttagatcaattactggatatgagttacgaacaattaatgcagctgtattcggccaggcagaggcggcggcttaatagagggctacgccggaaacaacatagccttctgaaacgcctgcggaaagctaaaaaggaagcccctccaatggagaagccagaggtggtgaaaacccacctcagagatatgatcattttaccagagatggttggtagcatggtgggggtttacaatggaaaaactttcaaccaggtggaaattaagcctgaaatgattggacactatctgggagaattttccattacctacaaaccagtcaagcacgggcgcccaggaattggagccactcactcttcccgatttattcctctcaagtag

SEQ ID NO: 132885 - DNA, 393 bp, synthetic construct
  misc_feature 1..393: note = Description of Artificial Sequence: Synthetic coding sequence
  source 1..393: mol_type = other DNA
atggtgcggatgaatgtcctggctgacgcgctgaagagcatcaataatgccgagaaaaggggcaagaggcaggttctgatccgcccttgctcgaaagtcattgtgagattccttacagtgatgatgaagcatggctacatcggagagttcgaaattatcgatgatcaccgggccggcaaaatcgtcgtaaacttgaccggacgtctcaacaaatgcggcgtgatcagtcctcgctttgatgtgcaactgaaagaccttgagaagtggcaaaataatctcctgccgagtagacaattcggtttcattgtgttgaccactagcgcaggcattatggatcacgaggaggctcgcagaaaacatacgggtgggaaaatcctcggattcttcttctag

SEQ ID NO: 132886 - DNA, 393 bp, synthetic construct
  misc_feature 1..393: note = Description of Artificial Sequence: Synthetic coding sequence
  source 1..393: mol_type = other DNA
atggtgaggatgaacgtgctcgcagacgccttgaaatcaatcaacaatgccgagaagagaggaaaacggcaggtgctcatcaggccttgtagcaaggtaatcgttcgcttcctgacagtcatgatgaagcatggttatattggtgagtttgaaatcattgatgaccacagagcagggaagatcgtggtgaatctgactggccgccttaacaagtgcggtgtgatcagcccccggttcgacgtccagctaaaagatctggagaagtggcaaaacaatctccttcctagtagacagttcggatttattgtgttaacgacatctgcaggaatcatggaccatgaggaagccaggcgtaagcataccggaggcaagatccttggcttcttcttttag

SEQ ID NO: 132887 - DNA, 441 bp, synthetic construct
  misc_feature 1..441: note = Description of Artificial Sequence: Synthetic coding sequence
  source 1..441: mol_type = other DNA
atgccctcaaagggtccattacaaagcgtacaggtttttggacggaagaagacggccactgcggtggcacactgtaagcgcggtaacggcttaatcaaggtgaatggtaggcctctcgagatgatcgagccccgaacccttcagtacaagctactcgagccagtgttgcttctgggcaaggaacggtttgccggcgtggacatcagagtgcgagttaagggcggggggcacgttgcccagatctacgccatcaggcaaagcatcagtaaggccctcgttgcctattatcagaagtacgtcgacgaagctagcaagaaggagattaaagatattctaatccaatacgatcgaacactgctcgtagcggaccccaggagatgcgagtctaaaaaatttgggggccctggtgcccgggcaagatatcagaaatcatacaggtag

SEQ ID NO: 132888 - DNA, 459 bp, synthetic construct
  misc_feature 1..459: note = Description of Artificial Sequence: Synthetic coding sequence
  source 1..459: mol_type = other DNA
atgccgagcaagggtcccctgcagagtgtacaggtgtttgggcggaaaaagacggcgactgccgtagcccactgtaaaagaggcaacgggctgatcaaagtgaacgggcgacctctggagatgatcgagcccaggacactacaatacaaactgcttgaacccgttctgttattaggaaaagaacgatttgccggcgtggatatccgggtgagagttaagggcgggggccatgtggctcaaatttatggcgagagccaggaactgggcgcttggaggcgatggctgtgggagggcggattacactccgctcctgtgcctttcaactgtgtatctttctcacagctcagcgtgtcaccctcacctaagccatggtggccaattacccggaacatgtggatgcgtctgccacgtcgacgatctaagacctcatccagcagtatgactggaccatgctggtag

SEQ ID NO: 132889 - DNA, 408 bp, synthetic construct
  misc_feature 1..408: note = Description of Artificial Sequence: Synthetic coding sequence
  source 1..408: mol_type = other DNA
atggggcgggtccggaccaaaactgtcaagaaagccgccagggtaatcattgagaaatattacacaaggcttggcaatgattttcataccaacaaacgcgtttgcgaggaaatagcaatcattccatcaaaaaagctgcggaataagattgccggttatgtgacacatctgatgaagcgaatccaacgagggcctgtgagaggtattagcattaagctccaagaggaggagagagaaagacgggataactacgtgcctgaagtatcggcactggaccaggagataatcgaggtcgaccccgacacaaaagaaatgcttaagcttctagactttggttcactctcaaatctccaggtgacgcaaccaactgtagggatgaattttaagacaccgaggggtccagtatag

SEQ ID NO: 132890 - DNA, 300 bp, synthetic construct
  misc_feature 1..300: note = Description of Artificial Sequence: Synthetic coding sequence
  source 1..300: mol_type = other DNA
atggatctcatcgggtttggatatgcggcactggtgactttcggctctatcttcggatataagaggagaggaggcgtcccctcactgatagccgggctgtttgtgggctgcctagccggttacggcgcatacagggtctccaatgacaaacgggacgtgaaggtctccctgttcaccgctttttttctcgccactataatgggtgtgcggttcaagaggagcaagaagattatgccggccgggctagttgcaggactaagtctgatgatgatcctgcgtctggtactgctcctgctttag

SEQ ID NO: 132891 - DNA, 459 bp, synthetic construct
  misc_feature 1..459: note = Description of Artificial Sequence: Synthetic coding sequence
  source 1..459: mol_type = other DNA
atgtcactggtgataccagagaagttccaacatatccttcgggtgctcaacacaaacatagacggccgacggaagatagctttcgccattactgcgataaagggagtcgggagacggtatgcacacgttgtgctgagaaaggccgatattgatctgacaaagcgtgctggggagctgaccgaagacgaggtcgagagggtgataacgatcatgcagaacccgcgtcagtataagataccagattggtttctgaatcgccagaaggacgtgaaggatggaaagtattctcaggtcctcgcaaacggcctcgacaacaaacttcgcgaggacttagagcgactaaagaagattcgcgcacacaggggccttcggcatttctggggtctgcgtgtgcgcgggcagcataccaagacaactggacggaggggaaggacagtcggtgtcagcaagaagaaatag

SEQ ID NO: 132892 - DNA, 459 bp, synthetic construct
  misc_feature 1..459: note = Description of Artificial Sequence: Synthetic coding sequence
  source 1..459: mol_type = other DNA
atgtccctggtaattcctgagaagttccaacacatactcagagtgttgaatacaaacatagacggccgaaggaagatcgccttcgccatcacggctattaagggggtgggcagacgatatgcacatgttgtacttcggaaggcagacatcgatctgactaagcgagctggtgaattaaccgaggacgaggtggagagggtcataaccatcatgcagaatccaaggcaatataaaatacctgattggttcctgaacagacagaaggacgtaaaagacggaaaatattctcaggttttggcgaatgggctcgataataagttgcgggaagatctcgagcggctcaagaagattcgcgcccatagagggcttcgccatttctggggcttacgagtgcgggggcagcacactaagaccacagggcgcaggggcagaaccgtcggggttagcaaaaagaagtag

SEQ ID NO: 132893 - DNA, 105 bp, synthetic construct
  misc_feature 1..105: note = Description of Artificial Sequence: Synthetic coding sequence
  source 1..105: mol_type = other DNA
atgtccctggttataccagagaaatttcagcacattctgagggtgctgaacactaacatagacggaagacgtaagatcgcattcgcaattaccgcaatcaaatag

SEQ ID NO: 132894 - DNA, 459 bp, synthetic construct
  misc_feature 1..459: note = Description of Artificial Sequence: Synthetic coding sequence
  source 1..459: mol_type = other DNA
atgtctctggttatccccgagaaatttcaacatatcctgcgcgtgctaaacactaacatcgacggacgccgcaaaatagccttcgcaattaccgctatcaagggggtggggcggaggtatgcgcacgtggttctgaggaaagccgatattgacctaaccaaaagggcaggcgaactgactgaggacgaggtggagcgggtgatcactattatgcagaacccaaggcagtacaaaatccctgattggtttctgaaccgacagaaagatgtgaaagacggcaaatacagtcaagtgttagcgaatggcctcgacaacaagctcagagaggacttggagcgcctgaagaagattagagcccacagaggtctcaggcacttttggggactccgagtaagggggcagcacacaaaaacgacaggcagacgcgggcgtaccgtgggcgtatccaaaaagaaatag

SEQ ID NO: 132895 - DNA, 459 bp, synthetic construct
  misc_feature 1..459: note = Description of Artificial Sequence: Synthetic coding sequence
  source 1..459: mol_type = other DNA
atgagcctcgttatcccggagaaatttcagcatatcctgagagtgctcaatactaatatagacggtcgccggaagattgcgtttgctatcacagccataaaaggggtgggcaggagatacgcccacgtggtgttacgtaaggccgacatcgacctcactaaacgggccggcgaactgaccgaagacgaggtcgagcgcgtgattaccattatgcagaatcctcgacagtacaagatccctgactggttcttgaatcggcagaaagacgtgaaagatggaaagtacagccaagtcctcgccaatggacttgataataaattgcgagaagacctggagaggttgaagaaaatcagagcccaccgaggcctccgccacttttggggattgcgagtgcggggacagcacactaaaacaaccggtcggagagggcgcacagtgggagtgagcaagaaaaagtag

SEQ ID NO: 132896 - DNA, 249 bp, synthetic construct
  misc_feature 1..249: note = Description of Artificial Sequence: Synthetic coding sequence
  source 1..249: mol_type = other DNA
atgcagaacccccggcagtataagatccccgattggtttctgaatagacagaaagatgtgaaggacgggaagtatagccaggtccttgcaaacgggcttgacaataaactcagagaagatctcgagcgactcaagaaaatccgtgctcaccgtggcctgagacacttttgggggctgcgagttcgcggacaacatactaaaactactggcagaaggggcagaacggtgggagtttctaagaagaaatag

SEQ ID NO: 132897 - DNA, 249 bp, synthetic construct
  misc_feature 1..249: note = Description of Artificial Sequence: Synthetic coding sequence
  source 1..249: mol_type = other DNA
atgcagaatcctcgccagtacaagatccccgactggtttcttaataggcaaaaggatgtgaaggatgggaagtacagtcaagtactcgccaatggattggataacaagttgagggaggacctggagcgactgaaaaaaatcagagcccaccgcggcctgcggcatttctggggcctgagggtgagaggtcagcataccaagacgacaggacgcagaggccgcaccgtgggcgtgtctaagaagaaatag

SEQ ID NO: 132898 - DNA, 249 bp, synthetic construct
  misc_feature 1..249: note = Description of Artificial Sequence: Synthetic coding sequence
  source 1..249: mol_type = other DNA
atgcagaaccccaggcagtacaaaattcccgactggtttctgaatcggcaaaaagacgtgaaggatgggaagtactctcaggtgttggcaaatgggctggacaataaactgagagaggacctggaacggttaaagaaaatccgcgcccatcgaggcctgcggcatttctggggccttcgcgtgcgggggcagcataccaaaacaaccgggaggaggggccggaccgtcggcgtaagcaaaaaaaagtag

SEQ ID NO: 132899 - DNA, 249 bp, synthetic construct
  misc_feature 1..249: note = Description of Artificial Sequence: Synthetic coding sequence
  source 1..249: mol_type = other DNA
atgcaaaatcctaggcagtataaaataccggattggtttctgaatcgccagaaagacgtcaaggatggaaaatacagccaagtactcgccaatggcctcgacaacaagctgagagaagatctagaaaggttaaagaaaattcgcgcccacagaggactaagacatttttgggggctgcgagtacgcggccaacacacgaagacgacaggtcgccgcggcaggaccgtaggcgttagtaagaaaaagtag

SEQ ID NO: 132900 - DNA, 249 bp, synthetic construct
  misc_feature 1..249: note = Description of Artificial Sequence: Synthetic coding sequence
  source 1..249: mol_type = other DNA
atgcagaatccaaggcagtacaaaattccggattggttcctgaacagacagaaagacgtcaaggacggaaagtactcccaggtactggcgaatggactcgataataagctgcgggaagacctagaacggttaaaaaagatccgtgcccacaggggcctcagacacttttggggactgagagtcagagggcaacacactaagactacaggcaggcgggggcggacagtgggagtttctaagaagaagtag

SEQ ID NO: 132901 - DNA, 648 bp, synthetic construct
  misc_feature 1..648: note = Description of Artificial Sequence: Synthetic coding sequence
  source 1..648: mol_type = other DNA
atgtactcttttatgggaggaggtctattttgcgcctgggtcgggaccattctgctcgtggttgctatggctacagaccattggatgcagtataggctgtctggatcttttgcccaccagggcctgtggaggtattgtctcgggaataaatgttacctacaaaccgactcgattggtgagcctcctggccaggggcctggccgggcatggggcaagtctcgagccgatctcggcgcccaggggcacctgtacagccgctggcggactctgaggctgaaggagggcaagggggccacacaggcatattggaatgcgacccgcgcatttatgattctctctgcactctgcgccatcagtggcattataatgggcatcatggcatttgcccatcaaccaacattcagccgcataagcaggcccttcagcgccggaattatgtttttctcttccactctgttcgtcgtgctggccctggccatctacacaggagtcacagtctcatttctgggacgccggttcggcgattggcgattctcctggtcctacatcctgggctgggtagcggtgctgatgacctttttcgcaggaattttttatatgtgcgcctatagggttcacgagtgccggcggttgagcactccccggtag

SEQ ID NO: 132902 - DNA, 438 bp, synthetic construct
  misc_feature 1..438: note = Description of Artificial Sequence: Synthetic coding sequence
  source 1..438: mol_type = other DNA
atgcctggggtgacagtgaaggatgtgaatcagcaagagttcgtacgagcacttgcagcttttctgaagaaatcaggcaaactgaaagtccccgaatgggtggacacagtgaagctggcaaaacataaggaactagccccatatgacgagaactggttctatacacgagcagcatccactgccagacacctctacctcaggggcggggcgggggtggggagtatgactaaaatctacggcggaagacagaggaacggggttatgccctcccacttctcccgcggttctaaaagtgtggctagacgggtgttgcaagctttagagggcctcaagatggtggaaaaggaccaggatggcggccgaaagttgaccccacagggccagagagatttggaccgcattgcgggccaggtggcagccgccaacaagaagcactag

SEQ ID NO: 132903 - DNA, 411 bp, synthetic construct
  misc_feature 1..411: note = Description of Artificial Sequence: Synthetic coding sequence
  source 1..411: mol_type = other DNA
atgagcgcggcattactgaggagaggacttgagcttttagccgctagtgaggcccccagggaccctcctggacaggccaagcctagaggtgcccctgtgaagcgcccgcgcaaaaccaaggctattcaggcccagaaattgagaaatagtgctaagggcaaagtccccaagagcgcactggatgagtacagaaaaagagagtgtcgggatcacctaagagtgaatctgaagtttctgacccgtacgaggtctaccgtggccgaaagcgtttctcagcaaatcctgcggcagaacaggggtcgtaaagcctgcgataggccggttgcgaagacaaaaaaaaagaaggccgaaggtaccgtgtttactgaggaagactttcagaagttccaacaggagtactttggatcatag

SEQ ID NO: 132904 - DNA, 882 bp, synthetic construct
  misc_feature 1..882: note = Description of Artificial Sequence: Synthetic coding sequence
  source 1..882: mol_type = other DNA
atggccgatgatgcaggggcagccggagggcccggaggcccaggcgggcctggcatgggaaacaggggtggcttccgcggcggcttcggctcaggtattcgtggacgcggcaggggccgtggccggggccgaggacggggtagaggggctagaggcgggaaagctgaggacaaggagtggatgccagtcacgaaacttgggaggctggtcaaagacatgaaaattaagtcactcgaggaaatttatctattcagtttgcctataaaagagtcggagataattgacttcttcctgggcgctagcctgaaagacgaagtgctgaaaattatgccggtgcagaagcagacgcgtgcgggacagaggacaaggttcaaggcttttgtcgccatcggcgattacaatggacacgtgggactgggtgtgaaatgtagtaaggaagtagcaactgcaatccggggcgcaattatcctggccaagctgagcattgtgcccgtacgtagaggctattggggcaataagatcggcaaaccccataccgtgccctgtaaagtcacaggtcgctgtgggtccgtgttggtgcggctgatccccgccccccgtggtacaggaattgtatcagccccagttcctaaaaaactcctcatgatggccggcatagatgactgttacacatccgccagaggatgcaccgcaacactgggcaactttgccaaggcgactttcgacgccatttctaagacctattcctacctcaccccggatctgtggaaagagaccgtgtttacaaaaagcccttaccaggagttcaccgatcatctggtgaaaacccatactagggtgtctgtgcagcgaacacaggcgcctgcagttgctactacatag

SEQ ID NO: 132905 - DNA, 708 bp, synthetic construct
  misc_feature 1..708: note = Description of Artificial Sequence: Synthetic coding sequence
  source 1..708: mol_type = other DNA
atggccgatgatgctggagcagccggaggccctggcggacccggcggcccaggcatgggtaaccgtgggggtttcagagggggattcgggtcaggaatcaggggcaggggacgcggcagaggccgcggaagaggccgcggacggggcgctaggggaggtaaggcggaggacaaggagtggatgccagtgacaaaacttgggcgtcttgtgaaggatatgaaaataaagtccctcgaggagatctatctgttttcgttgcctatcaaagaatcggagattatagacttcttcctgggcgcctccctcaaggatgaagtcctgaaaattatgccagtgcaaaagcagactagagcagggcagcggacacgctttaaagttaccggaaggtgcggcagcgtgttggtaagactgattcccgccccaaggggcacagggatcgtgagcgccccagtaccaaaaaagctcctcatgatggctgggatagatgattgctacactagcgcaagagggtgtacagcaacgttaggcaattttgctaaagctacctttgacgctatcagtaaaacgtatagctacctcacccctgacctctggaaggagaccgtgtttaccaagagcccttaccaggagttcaccgaccacctggtgaagacccacactcgagtgtcggttcagcggactcaggcacccgcagtggcaactacttag

SEQ ID NO: 132906 - DNA, 537 bp, synthetic construct
  misc_feature 1..537: note = Description of Artificial Sequence: Synthetic coding sequence
  source 1..537: mol_type = other DNA
atggctgatgatgccggagcagcagggggtcccgggggaccaggaggtccgggaatgggcaataggggaggctttcgggggggattcggtagcggcatccgcggccggggaaggggccgcgggagaggccggggaagggggcgaggcgcgcgcggcggcaaggctgaggacaaggaatggatgcccgtgactaaactcggacgtctggtgaaggatatgaagataaagtcactggaagaaatctacctgttctctctgcccatcaaggaaagtgaaattatcgatttttttcttggagcaagcttgaaggatgaggtgctcaaaattatgccagttcaaaaacagacacgcgctgggcagcgtacacgattcaaagtaccagggtgtcccggcggtggctgcgcagggctagctgggaccttatccgctcttcattcttgcacatggttgcatccttgcgactttaggaatggggagagagagaaacgatcgcctcaggacctggggtgggctctgttgtggccacttttcccctag

SEQ ID NO: 132907 - DNA, 588 bp, synthetic construct
  misc_feature 1..588: note = Description of Artificial Sequence: Synthetic coding sequence
  source 1..588: mol_type = other DNA
gttaccaagttggggagactcgtgaaagatatgaaaatcaagtctctagaggaaatatacctcttcagtctgccgatcaaggcatttgtagccataggggactataatgggcacgtcggactgggggttaagtgcagtaaggaggtcgccacggcgataaggggagcaataattctggcgaaactgtctattgtgccagtccggcggggttactggggcaataaaattggaaaacctcatacagtaccttgcaaggtgacagggaggtgtgggtcagtgctggtgagattaatacccgctccaaggggcacagggatcgtttcagcaccggtgccaaagaaactgctgatgatggcaggcattgatgactgttatacttctgcgcggggttgtaccgccaccttgggaaacttcgctaaagccaccttcgatgccatcagcaagacctattcctaccttacccctgatctttggaaggagactgtctttaccaaatcaccttaccaggagtttaccgatcaccttgtgaagactcacactagggtctccgtgcagcggacccaggcccctgcagttgcgaccacctag

SEQ ID NO: 132908 - DNA, 360 bp, synthetic construct
  misc_feature 1..360: note = Description of Artificial Sequence: Synthetic coding sequence
  source 1..360: mol_type = other DNA
atggccttcaaggatactggtaagacgcctgtagagcctgaagtggccattcacagaattcggattaccctcacgagccgaaatgtgaaatcccttgaaaaagtctgcgctgacttgatcaggggagcgaaggagaagaatctgaaagtgaaaggaccagtgcgcatgcccactaagactctgcggatcaccacaaggaaaaccccatgcggggaaggatctaagacttgggatcggttccagatgaggattcacaagaggctcatagatttacactcacccagcgagatagtcaagcagatcacaagcatatctatcgagccgggagtagaggttgaagtgaccatcgctgacgcctag

SEQ ID NO: 132909 - DNA, 429 bp, synthetic construct
  misc_feature 1..429: note = Description of Artificial Sequence: Synthetic coding sequence
  source 1..429: mol_type = other DNA
atggcctttaaggataccggtaagacaccggtggagccagaggtggctatacaccggatacgaatcaccctgaccagtaggaatgtaaagtcgttggagaaggtgtgtgccgacctgatccgcggcgcaaaagagaagaacctgaaagtcaagggacccgtgcgaatgcccacgaagaccctgcggattaccaccaggaagaccccctgcggtgagggaagcaaaacctgggatagatttcaaatgcgtatccataagcggctgatcgacttgcattcaccaagcgaaatagtgaaacagatcacctcaatttctatcgagcctggcgtagagctgatagagtcaacagatgcagagccgatggatactgagggccaacagtatacactgaggtccgtgtttgagtccccagggacctgcccgttttag

SEQ ID NO: 132910 - DNA, 360 bp, synthetic construct
  misc_feature 1..360: note = Description of Artificial Sequence: Synthetic coding sequence
  source 1..360: mol_type = other DNA
atggccttcaaggatacagggaaaacacccgtagagccagaagtcgcaatccaccgtatcaggatcaccctgacatcacgcaacgttaaaagcttagaaaaggtgtgcgccgatctcatcagaggtgcaaaagagaagaacctgaaggtcaaaggacccgtgcgcatgcctacaaagaccctgcgcatcacaactcgcaaaacgccatgtggtgaggggagcaagacctgggatagatttcagatgagaatccacaaaagacttattgaccttcatagcccaagcgagatcgtgaaacaaatcacatctatttctatagagcccggggtagaagtggaggtgacgatcgccgacgcgtag

SEQ ID NO: 132911 - DNA, 252 bp, synthetic construct
  misc_feature 1..252: note = Description of Artificial Sequence: Synthetic coding sequence
  source 1..252: mol_type = other DNA
atgcagaatgatgccggagaattcgtcgacctctatgtgccgcgcaaatgcagcgcatcaaaccggataataggcgctaaagaccatgcaagcattcaaatgaatgttgccgaggtggacaaggtcaccgggcgctttaatgggcagtttaagacctacgccatctgcggcgcaatccgccgaatgggggaatcggatgacagcatattgcggttggccaaggcagatgggatagtctctaaaaatttttag

SEQ ID NO: 132912 - DNA, 294 bp, synthetic construct
  misc_feature 1..294: note = Description of Artificial Sequence: Synthetic coding sequence
  source 1..294: mol_type = other DNA
atgcaaaatgatgccggcgagttcgtggacctatatgttccgcgtaaatgttcagcctctaacaggatcatcggtgccaaagaccacgctagcattcaaatgaacgttgctcgattaacccggtctcaggctggattaatggcatcactcaagttgatgctgagcgcagggccatttgtcgggtgggtgtcacagatgatcccatttagcgattggccccggcgatggcaccgactgaaggaattgttaactggggaaaatcatcgatgcggcattttcgtgatcaataagtag

SEQ ID NO: 132913 - DNA, 252 bp, synthetic construct
  misc_feature 1..252: note = Description of Artificial Sequence: Synthetic coding sequence
  source 1..252: mol_type = other DNA
atgcagaacgacgccggggaattcgtggacctgtacgtaccacggaaatgtagcgcctccaatagaatcattggagcgaaagatcacgctagcatccagatgaacgtggctgaggttgacaaggtcaccgggaggttcaatggccagtttaagacatacgccatttgcggggctattcggcgcatgggcgaaagtgacgactctattttacgtctggccaaggctgatggaatagtttctaagaatttttag

SEQ ID NO: 132914 - DNA, 201 bp, synthetic construct
  misc_feature 1..201: note = Description of Artificial Sequence: Synthetic coding sequence
  source 1..201: mol_type = other DNA
atgcaaaacgacgcgggcgagttcgtggacctgtatgtcccacgcaaatgtagcgccagcaaccggattatcggcgcaaaagaccatgcgtcaatccaaatgaacgtggctgaggtgtcttgggaaccggggcgccgtgagggatgtgatatctgtgcagggaaggccggctgccctattgttgaggagcctctgggatag

SEQ ID NO: 132915 - DNA, 273 bp, synthetic construct
  misc_feature 1..273: note = Description of Artificial Sequence: Synthetic coding sequence
  source 1..273: mol_type = other DNA
atgcagaacgacgcaggcgagtttgttgatctctacgtgccacgtaagtgctcagcatccaatagaattattggggccaaggatcatgcctccatccagatgaatgtcgccgaggttgataaggttactggcaggttcaacggccagtttaagacctatgccatttgcggagccatcaggaggatggtgagcgtctctttggggtttgctcaccacttcgggacttcatggacactaccatgtgcactcgaatgtgttatggttcccgaatag

SEQ ID NO: 132916 - DNA, 246 bp, synthetic construct
  misc_feature 1..246: note = Description of Artificial Sequence: Synthetic coding sequence
  source 1..246: mol_type = other DNA
atgcagaatgacgccggcgaatttgtggacctgtatgtccctagaaagtgctctgcctccaacaggatcatcggagctaaggatcatgcgagtattcaaatgaatgttgcagaggttgataaagtgaccggccggttcaacggccagttcaagacttatgccatctgtggggctatcaggcgaatgggggaaagcgacgacagtatcctgcgcctggccaaagccgatggcatcgtatccaagtag

SEQ ID NO: 132917 - DNA, 432 bp, synthetic construct
  misc_feature 1..432: note = Description of Artificial Sequence: Synthetic coding sequence
  source 1..432: mol_type = other DNA
atgggaaagtgcaggggactacggacagcaaggaagctgcgttctcataggagagaccagaagtggcacgacaaacagtacaaaaaagcccatttgggaactgcactgaaagctaatcccttcggcggagcgtctcatgccaagggcatcgttctggaaaaagtaggtgtggaagccaaacaacccaacagtgctattcgaaagtgcgttagggtccagctgatcaagaacggtaaaaagatcactgcctttgtgcctaacgatggttgcctgaactttatagaagaaaatgacgaagtactcgtcgccggttttggtaggaagggacatgcagtgggtgacatacctggtgtccgattcaaagtggtgaaagtagcaaacgtgagtctgctagctctgtacaaaggaaaaaaggaacggccacgcagttag

SEQ ID NO: 132918 - DNA, 393 bp, synthetic construct
  misc_feature 1..393: note = Description of Artificial Sequence: Synthetic coding sequence
  source 1..393: mol_type = other DNA
atgaacgacacggttactatcagaaccaggaagttcatgactaatagacttttgcagaggaaacagatggtgatcgacgtccttcaccctggcaaagcaaccgtgcctaaaacggaaatcagggagaaacttgcaaagatgtataagactacccctgacgttatttttgtcttcggctttagaacgcactttggcggcggaaagacgaccggattcggcatgatctacgacagtctcgattacgctaagaaaaacgagcccaaacacaggcttgctagacatggtctgtatgagaagaaaaaaacctccaggaagcaaaggaaggaacggaaaaacagaatgaagaaagtccggggcactgcaaaagcgaatgtgggagccggaaagaaatag

SEQ ID NO: 132919 - DNA, 402 bp, synthetic construct
  misc_feature 1..402: note = Description of Artificial Sequence: Synthetic coding sequence
  source 1..402: mol_type = other DNA
atgaatgacactgtgaccataaggaccaggaaattcatgaccaatagactcctgcagcgcaagcagatggtgatcgacgtgttacacccaggaaaggctacagtcccaaaaacggaaatacgcgagaagctggctaaaatgtataaaacaaccccggatgttatcttcgtttttggatttagaacacattttggggggggcaaaaccacagggttcggaatgatttacgactccctggactatgcaaagaagaatgagcctaagcatcgactcgccagacatgggctctacgagaaaaagaagacctcacgtaaacagcgcaaagaacgcaagaataggatgaaaaaagtgcggggaacagccaaggcaaatgtgggcgctgggaagaagcctaaagaatag

SEQ ID NO: 132920 - DNA, 399 bp, synthetic construct
  misc_feature 1..399: note = Description of Artificial Sequence: Synthetic coding sequence
  source 1..399: mol_type = other DNA
atgaatgacaccgttacgattcgcactcgcaagtttatgacaaaccgcctgctgcaaagaaagcaaatggtgatcgatgtgctgcatcccggaaaagccacagtacccaagactgagattcgagaaaaactggccaagatgtataaaaccacccctgatgttattttcgtgttcggcttccgcacacacttcggcggtggtaagacaactgggttcgggatgatttacgatagccttgactatgcaaagaaaaatgaaccaaagcaccggcttgcccgtcatggcctgtacgaaaaaaagaaaacatctagaaagcagagaaaggaacgaaagaacaggatgaagaaagtccgcggcacagctaaagctaacgtgggcgccgggaagaaacaaaaatag

SEQ ID NO: 132921 - DNA, 396 bp, synthetic construct
  misc_feature 1..396: note = Description of Artificial Sequence: Synthetic coding sequence
  source 1..396: mol_type = other DNA
atgaacgatactgtgacgattaggacccgcaaatttatgacaaatcggctcttgcagaggaagcagatggtgattgacgttttgcatccgggaaaagcaaccgtgcccaaaacagagatccgagagaaactggccaaaatgtataaaacaacacccgacgtaattttcgtattcggctttagaacccactttggcggtggaaagaccaccggatttgggatgatctacgactcgctcgactatgcaaaaaagaatgagccaaagcatagactagcacgccatggactgtatgaaaagaagaagacgtccaggaagcagagaaaggaacgcaaaaaccgaatgaagaaagtgaggggaaccgccaaggccaacgtgggcgctggtaagaagcagtag

SEQ ID NO: 132922 - DNA, 870 bp, synthetic construct
  misc_feature 1..870: note = Description of Artificial Sequence: Synthetic coding sequence
  source 1..870: mol_type = other DNA
atgaatgacaccgtaaccattcgtacgaggaagttcatgactaacaggctccttcagaggaagcagatggtgattgacgtgctgcaccctggcaaagcaactgtcccaaagacagagatccgcgagaagctggctaagatgtacaagacaacacctgacgtgatcttcgtttttgggttcaggacccactttggaggcggcaagacgacaggtttcggtatgatctatgattctctcgattacgcaaaaaagaatgaaccgaagcacagattggcacggcacggcctctatgagaaaaagaagacgtcccgaaaacagagaaaggaacggaagaacaggatgaaaaaagttagaggcacagcaaaggcaaatgtgggggccggaaaaaagatgcgcgaactgggcctgggagttcaagctctggggcgtatatctcaggaggagcgctgtacggatgtaaagaattcaaaagcgcgcgagtccagaggggtcgtctggcaagtcgaagtgccaggtccgtggtccgtgtggacctgtggcagactgaggagggggtgcggtaagtacctacaggtcgcagtgacctggaggaaaaccgagaaccgcgagcagtgttgtcaggcctgcctcctggaaagagctctggtgcgaaacggggccttcatgtcaccagcctcacccgcccccgcagggtctcctcatccggtcgatggcgatctggtccttcatctgccagaggcgctgagcgctacactgactctgtccccacacatacaggcgataaataagtccttcggaccattcttcgagatccatcaggaaagttcatgcttttcgcctcccagttgtttaagcgggctggggcactag

SEQ ID NO: 132923 - DNA, 378 bp, synthetic construct
  misc_feature 1..378: note = Description of Artificial Sequence: Synthetic coding sequence
  source 1..378: mol_type = other DNA
atgccacctaaggacgacaagaagaagaaggacgctggtaaaagtgctaaaaaagacaaagacccagtgaacaagagcggaggcaaagccaaaaaaaaaaaatggagtaaaggaaaagtgagagacaagctgaataacctggtactctttgataaagccacctacgacaaactctgcaaggaagttcccaattataagctgatcacacccgccgtggtgagcgagaggctcaagattcgcggttcactggctagggccgccttacaagagctgctgtcaaaggggctgatcaagttggttagcaaacacagggctcaggtgatctatacacggaacacaaagggcggggacgctcccgcagccggcgaggatgcttag

SEQ ID NO: 132924 - DNA, 348 bp, synthetic construct
  misc_feature 1..348: note = Description of Artificial Sequence: Synthetic coding sequence
  source 1..348: mol_type = other DNA
atgacaaagaaacgtagaaataatggtagggcaaagaagggcaggggacacgttcagcctatacggtgtactaactgtgcacgttgtgtacctaaggataaggctattaaaaagtttgtcatccggaatatcgtggaagcagccgccgttcgggatatcagtgaggccagcgtattcgacgcctatgtgttgcctaaactatatgtcaagctacactactgcgtgagctgtgccatccacagtaaagtggtgcgaaatcggagccgagaagcgcgcaaggatcgcaccccacccccgaggtttaggccagcaggggctgcacccagacccccccctaagcccatgtag

SEQ ID NO: 132925 - DNA, 348 bp, synthetic construct
  misc_feature 1..348: note = Description of Artificial Sequence: Synthetic coding sequence
  source 1..348: mol_type = other DNA
atgacaaaaaaacggcggaataatggccgggcgaagaaaggacgtggccacgtgcaaccgatacgatgcacaaactgcgcccgctgcgttcccaaggataaagctatcaagaaattcgtaatcagaaacattgtcgaggctgctgccgttcgtgacatcagtgaagcctctgtgtttgatgcttacgtcctcccaaaactgtatgtcaagctgcattattgcgtgtcttgcgcgatccattccaaggtggtccgaaatcgcagcagagaagcacggaaggacaggacaccaccaccaaggttcagacctgcaggcgctgcacctcgccctcctccgaaacccatgtag

SEQ ID NO: 132926 - DNA, 255 bp, synthetic construct
  misc_feature 1..255: note = Description of Artificial Sequence: Synthetic coding sequence
  source 1..255: mol_type = other DNA
atgcccttagcaaaagatcttctacacccttcacccgaagaagaaaagagaaagcacaaaaaaaagaggttggtgcagtccccaaatagctattttatggatgtgaaatgccccggctgctataagattacaactgtctttagccacgctcagacagtcgtcctctgcgttggatgcagtactgtgctctgtcagccgactgggggcaaggctcgtttaacagaaggatgcagcttcaggcgcaagcagcactag

SEQ ID NO: 132927 - DNA, 201 bp, synthetic construct
  misc_feature 1..201: note = Description of Artificial Sequence: Synthetic coding sequence
  source 1..201: mol_type = other DNA
atgcccctggccaaagacttgctacacccaagtccagaagaggagaaaaggaaacacaaaaagaagcgattggtgcagagcccaaattcgtacttcatggacgtgaaatgcccaggtgaagaaaccgcatgttgttctggagaaagcactggtccacagcaactagagaacgtggtagtccttgccgtgtcttacccctag

SEQ ID NO: 132928 - DNA, 255 bp, synthetic construct
  misc_feature 1..255: note = Description of Artificial Sequence: Synthetic coding sequence
  source 1..255: mol_type = other DNA
atgcccctggcgcgagatttgttgcacccctccctggaagaggaaaaaaagaaacacaaaaaaaaaaggctcgtacagtcacccaatagctatttcatggatgtcaagtgtccaggttgttataaaatcaccaccgttttcagccacgcccaaacagtcgtactctgcgttggttgcagcactgttttgtgtcagcctactggaggaaaagcaaggctgacagaaggatgttcttttcgcagaaagcagcactag

SEQ ID NO: 132929 - DNA, 159 bp, synthetic construct
  misc_feature 1..159: note = Description of Artificial Sequence: Synthetic coding sequence
  source 1..159: mol_type = other DNA
atggacgtcaagtgtccaggctgttacaagattactaccgttttttcacatgcccaaaccgtcgtgttatgtgtgggctgctctactgttctgtgccaaccgaccgggggcaaggcccgactgactgagggatgctcattccgtcgaaagcagcattag

SEQ ID NO: 132930 - DNA, 159 bp, synthetic construct
  misc_feature 1..159: note = Description of Artificial Sequence: Synthetic coding sequence
  source 1..159: mol_type = other DNA
atggacgtaaagtgtccaggatgctacaagataaccacggtgttctcccacgcacaaactgtcgtgctgtgtgtaggatgtagcactgtgctttgtcagccaacgggcggcaaggcccgcctcacggaggggtgttcctttagaaggaagcagcactag

SEQ ID NO: 132931 - DNA, 303 bp, synthetic construct
  misc_feature 1..303: note = Description of Artificial Sequence: Synthetic coding sequence
  source 1..303: mol_type = other DNA
atgtgccagcggtgcggactgaagctgatcgttataatttgcttctttgtgcagctcgcccgtgatctgctccatccaagcctggaggaggagaagaagaaacataaaaaaaagcggctggttcagagccctaacagctactttatggacgtcaaatgccctggctgctacaaaatcaccacagttttttcacatgcccagactgtggtgctgtgcgtcggatgttcaactgtcttgtgccagcctaccggcgggaaagcccgcctcactgaaggttgtagcttcagacgcaagcagcattag

SEQ ID NO: 132932 - DNA, 210 bp, synthetic construct
  misc_feature 1..210: note = Description of Artificial Sequence: Synthetic coding sequence
  source 1..210: mol_type = other DNA
atggatacctcacgggtgcagcccatcaagctggctagagtgaccaaggtactgggccgaacgggtagccagggacagtgtacgcaagtacgcgttgaatttatggatgacacaagtaggtccattattagaaatgtgaaaggcccagtgagggagggcgatgtgctcaccctgctcgaaagtgagagggaagcgagaaggctgcggtag

SEQ ID NO: 132933 - DNA, 366 bp, synthetic construct
  misc_feature 1..366: note = Description of Artificial Sequence: Synthetic coding sequence
  source 1..366: mol_type = other DNA
atggttccattcaatgatctttatagtggaccggatactttctcggaatttatatccgcatcgcatagcgccgttccattcaggggccctccattgctgctgccccccctgcgctggggccctgtcggagcaagggggatccacggaaggcacgaacccatccatcatccacagtgcaaacgcccaagggcccgcgggaggagagcacatccattcggcgtccgggcccgatctcccgaggtggctctaagcctagccgcccgttgggttctggacgtgggcttcgaccaccttgccgatgggaacggactctcacaaagcgccccattcttctgcccaccacacgtgacagaaatgctcctgtag

SEQ ID NO: 132934 - DNA, 210 bp, synthetic construct
  misc_feature 1..210: note = Description of Artificial Sequence: Synthetic coding sequence
  source 1..210: mol_type = other DNA
atggataccagtagagtacaacctatcaaactcgcaagggtgaccaaggtcttgggccgcacaggatcccagggacagtgcacccaggttagagtcgagtttatggacgatacctctcgctcgattatcagaaatgtcaaaggacctgtgcgcgagggcgatgtcctcactcttctcgaaagtgagagagaagctcggcgcctgagatag

SEQ ID NO: 132935 - DNA, 171 bp, synthetic construct
  misc_feature 1..171: note = Description of Artificial Sequence: Synthetic coding sequence
  source 1..171: mol_type = other DNA
atgggacatcaacagctgtactggtcccatccgcgcaagttcgggcaaggaagccgctcatgccgcgtctgctcaaaccgccatggactgattagaaaatacggattgaatatgtgccgacagtgtttccgccagtatgccaaagatattggatttatcaagttggactag

SEQ ID NO: 132936 - DNA, 204 bp, synthetic construct
  misc_feature 1..204: note = Description of Artificial Sequence: Synthetic coding sequence
  source 1..204: mol_type = other DNA
atgggccaccaacagttgtattggtcccacccacggaagtttggccagggctcccgtagttgcagggtctgcagcaacagacacggacttatcagaaagtacggcttaaatatgtgtaggcaatgttttcgccagtatgcaaaggatatcgggttcattaaaaaggacttgtcctgtctcccatggcattgcctgtggcgatag

SEQ ID NO: 132937 - DNA, 780 bp, synthetic construct
  misc_feature 1..780: note = Description of Artificial Sequence: Synthetic coding sequence
  source 1..780: mol_type = other DNA
atggctgttcaaattagcaagaaacgcaaattcgtggccgacggcatctttaaggccgaattgaacgagtttctgacaagagagctcgcagaggatggttactcaggcgtcgaggtgcgggtgaccccaacgaggacagagattatcatccttgcaactcgaacacaaaacgtcttaggtgaaaaagggagaagaatccgggagctgactgccgtagtccaaaaaagatttggatttccagaggggagcgttgaactgaaaatcatggtgatggtgacgggctatccattgttaccactgaagctgtatgccgagaaggtcgccactcgtggcctgtgcgctatcgctcaagctgaaagtttgaggtacaaactgctgggagggctggccgtgcgcagagcttgttacggggtcctgcgctttatcatggaaagtggagctaaaggctgcgaggtggtggttagtgggaagctgagaggccagcgcgctaaatctatgaaatttgtggatgggcttatgattcactctggagacccagttaactactacgttgacacagccgtgcggcacgtactgctgcggcagggggttttgggcatcaaagtgaagatcatgttgccctgggatcccacgggtaaaattggccctaagaagcctttgccggatcacgtgtctattgtggagcccaaggacgagattctgcctaccactcctatctcagagcagaagggcgggaaaccagaacctcctgcaatgcctcaaccagtgcccactgcctag

SEQ ID NO: 132938 - DNA, 732 bp, synthetic construct
  misc_feature 1..732: note = Description of Artificial Sequence: Synthetic coding sequence
  source 1..732: mol_type = other DNA
atggcagtccagatttctaaaaagaggaagttcgttgcagatggcatatttaaggctgaattgaacgaatttttgaccagggaactggctgaggatggatacagcggcgtggaagtccgtgtgacccctacgcgcacagaaatcatcattctcgccacccggactcaaaacgtcctcggggaaaagggccgacgcatcagagagctgactgcagtggtacagaagcggtttggttttcctgagggctccgtcgagctgtatgcagagaaggttgctacgaggggactatgcgcaatcgcacaggcagaatccctgaggtacaaactgctaggggggctggccgttcgccgggcttgctacggtgtgttgagatttattatggagagcggagcaaaaggttgtgaagtcgtggtttcaggcaagcttagaggccagagagcaaagtccatgaaattcgtggacggactaatgatacattcaggagaccccgtgaactactatgttgataccgccgtgcggcacgtgcttttaagacagggggtgttgggcattaaagtcaaaatcatgctcccctgggaccctaccggaaagatcgggcctaaaaagcctttgccggaccacgtgtctatcgtcgaaccaaaagacgagatactgccaactactcctatctcagagcaaaagggcggaaaacctgagccccccgcgatgccacagcccgtccccactgcctag

SEQ ID NO: 132939 - DNA, 732 bp, synthetic construct
  misc_feature 1..732: note = Description of Artificial Sequence: Synthetic coding sequence
  source 1..732: mol_type = other DNA
atggcggtgcagatcagtaagaagcggaaatttgtagccgatgggatcttcaaagccgagctaaatgaattccttacaagggagctagccgaggacggatatagcggcgttgaggtccgggtgacaccgacaaggaccgagatcatcattcttgccacgcggacccagaatgtccttggggagaaaggacgacgcattagagagctcacagccgtggtccaaaaaagattcggcttccccgaaggctctgtggaactctacgcggaaaaagtcgcaactcgtggcctgtgcgctatagcccaagccgaaagcctgcggtataaattactgggcgggttggcagtgagacgggcctgttacggtgtccttcgcttcataatggaaagtggcgccaaaggttgcgaggtcgtcgtgtccggcaagctgagagggcagcgcgcaaagtccatgaaatttgtggacgggctgatgattcattccggggacccagtgaattactatgtggatactgcggtgagacacgtgctcctgaggcagggggtgcttggaattaaagtgaagattatgctgccctgggaccccacagggaagatcggcccaaagaagccattgcctgatcacgtttcaatagtggagcccaaagatgagatcctgcccactactcccatcagcgaacagaagggagggaaacccgagccaccggctatgccccagcctgtgcctactgcgtag

SEQ ID NO: 132940 - DNA, 732 bp, synthetic construct
  misc_feature 1..732: note = Description of Artificial Sequence: Synthetic coding sequence
  source 1..732: mol_type = other DNA
atggccgtgcagatctcgaaaaagagaaaattcgtggcagatgggattttcaaggcagaattgaacgaatttttgacccgggagctggccgaggacggctactccggtgtggaggtccgcgttactcccaccagaacagagatcattatcttagcaacgcgcactcagaacgtgctgggagagaaggggcgccgaatccgcgagctgacagccgttgtccagaagcgctttggtttccccgagggatctgttgagctgtacgccgaaaaagtcgcgacccgcggcctctgtgccattgctcaggcggagagtctgcgatataaactgttaggaggtttggcggtgcgaagagcctgttacggagtgctccgattcatcatggagtctggcgcaaaaggatgcgaggtggtggtttctggaaagttaagaggacaacgtgccaaaagcatgaagttcgttgacggacttatgattcactccggagacccagtgaattattacgttgatactgccgtgcgacacgtgttgttgagacagggcgtgctaggcatcaaggtgaagatcatgctcccttgggatcccacaggcaaaataggccctaaaaaacctctcccagatcatgtatccatcgtggagcctaaagatgaaatcctcccaaccacaccaatctcggagcagaagggtggcaaacccgagccccccgcaatgccccagccagtaccaaccgcctag

SEQ ID NO: 132941 - DNA, 795 bp, synthetic construct
  misc_feature 1..795: note = Description of Artificial Sequence: Synthetic coding sequence
  source 1..795: mol_type = other DNA
atggccgtgggtaagaataaaagattgaccaaaggagggaaaaagggggctaagaaaaaggttgtggatccattttctaaaaaagattggtatgacgtaaaagcgcctgctatgtttaacatccgtaacataggcaaaacgctggtcacaaggacgcaaggaacaaaaatcgcctcagacggactcaaaggcagagtgtttgaggtgtctttggccgacttgcagaatgacgaggtcgcattccgaaaatttaagctgattactgaggatgtgcaggggaaaaactgtttgacgaacttccacggcatggatctcacgagagataaaatgtgctcaatggtcaaaaagtggcagaccatgattgaggctcacgtggatgtcaaaaccactgatgggtatctgcttagactgttctgcgtgggtttcaccaagaagagaaataaccagattcggaagacttcctatgcccaacaccaacaggtccgtcagatcagaaagaagatgatggaaattatgacgagggaggttcagaccaacgacctgaaagaagttgtgaacaagctgattcctgactcaattgggaaggatatagaaaaggcgtgccaaagcatttacccacttcacgacgttttcgtccggaaagtgaagatgctgaagaaacctaaattcgagttagggaaactaatggaattgcatggggagggtagcagcagtgggaaggcaactggagatgagactggcgccaaagtggaaagagcggacgggtacgaaccgcctgtccaggaaagcgtctag

SEQ ID NO: 132942 - DNA, 528 bp, synthetic construct
  misc_feature 1..528: note = Description of Artificial Sequence: Synthetic coding sequence
  source 1..528: mol_type = other DNA
atggcagtggcaaaaaaaaaagtggtcgatcctttcagtaaaaaagactggtacgatgttaaggcccccgcgatgtttaatatcaggaatataggcaagacgctcgtgacgagaactcagggaacaaagattgcctccgatggcttgaaggggcgtgtgttcgaagtgtcactggcagacttgcagaacgacgaggtggcttttcgtaagtttaagctcatcacagaagacgtgcaaggtaagaactgcttgaccaacttccatggaatggatctaactcgggacaaaatgtgttcaatggttaaaaagtggcagacaatgattgaagcgcacgttgacgtcaagactacggatggatatttgctcagactgttctgtgtgggcttcaccaaaaagaggaacaaccagatcaggaagacgagctatgctcagcatcagcaggtccgacagattcgtaagaagatgatggagatcatgactcgcgaggtgcagacaaacgacctcaaggaggtcgtcaacaaactttag

SEQ ID NO: 132943 - DNA, 684 bp, synthetic construct
  misc_feature 1..684: note = Description of Artificial Sequence: Synthetic coding sequence
  source 1..684: mol_type = other DNA
atgtttaacatccggaatatcggaaaaacgctcgtgactaggacccagggaacaaaaatcgcatcagacgggctgaaaggacgtgtattcgaggtttctctggcagacctgcagaatgacgaggtggcctttcgaaagtttaaacttataaccgaagacgtgcaaggaaaaaattgtttgactaactttcacggtatggatctgactagggacaaaatgtgcagtatggtgaagaaatggcaaactatgatcgaggctcatgtagacgtaaaaaccaccgacggctatctgctgcggctgttttgtgtgggttttaccaagaagaggaataatcaaattaggaagacatcctacgctcagcatcaacaggtacgccagatccggaaaaagatgatggaaattatgacaagagaagtccaaacgaatgacctgaaagaagtggtgaataagctcatccctgactcaatcggaaaggatatcgaaaaagcgtgccagtcaatataccctttgcacgatgtttttgtgcggaaagtcaagatgctgaagaaaccgaaattcgagctcggaaaactaatggagctacatggcgaggggagctcctccggcaaggcaacgggtgacgagaccggagctaaggtggagcgggctgatggctacgagcctccagttcaggaaagcgtatag

SEQ ID NO: 132944 - DNA, 438 bp, synthetic construct
  misc_feature 1..438: note = Description of Artificial Sequence: Synthetic coding sequence
  source 1..438: mol_type = other DNA
atgatcgaggcacacgttgatgttaaaaccacagatgggtacttactgaggctattctgcgttgggtttactaaaaagcgcaataaccaaattcgaaagacaagctacgcacagcaccaacaggtgcgacagatcagaaaaaaaatgatggagataatgacccgtgaagttcagactaacgatctgaaggaagtagttaacaaactcattcctgattcaatcggaaaggacatcgagaaggcttgccaaagcatctatccgctccatgatgtgtttgtcaggaaagtgaagatgttgaagaaaccaaaattcgaactggggaagcttatggagctgcatggtgagggctcttcctccgggaaggctacaggcgatgagaccggggcaaaggtagagagagccgatggctatgaaccccccgtccaggaatcggtgtag

SEQ ID NO: 132945 - DNA, 684 bp, synthetic construct
  misc_feature 1..684: note = Description of Artificial Sequence: Synthetic coding sequence
  source 1..684: mol_type = other DNA
atgtttaacataaggaacatcggtaagacactcgtgacgaggacccaggggaccaaaatcgccagcgacgggcttaaggggcgtgtctttgaggtcagtttggcagacctgcagaatgacgaggttgcttttcggaagttcaagctgattaccgaagacgtgcagggcaaaaattgtctgacaaacttccacggcatggacctgacccgggacaagatgtgctcgatggtgaagaagtggcagactatgatcgaagctcacgtcgatgtgaaaaccacggacggctacctgttgcgcttattctgcgtcggtttcacgaaaaaacgaaacaaccaaatccgaaagacatcgtacgcccagcaccagcaagtccgacagatccgaaaaaaaatgatggaaatcatgacaagagaagttcagacgaacgatctgaaggaagtggtgaataagctaataccagactcgattggcaaagacatcgaaaaagcctgtcaatctatatacccgctccacgatgtcttcgtgagaaaggtgaagatgctgaagaagcctaagttcgaattaggtaagttaatggagctccatggggagggctctagttctggaaaggcaacgggggatgaaaccggtgcaaaagtggagagagccgacggatacgagccaccagtacaggagtctgtttag

SEQ ID NO: 132946 - DNA, 627 bp, synthetic construct
  misc_feature 1..627: note = Description of Artificial Sequence: Synthetic coding sequence
  source 1..627: mol_type = other DNA
aagcgcctcacgaaagggggcaagaaaggcgctaagaaaaaagtggtcgacccatttagtaagaaagattggtatgacgttaaagccccggctatgtttaatatcagaaacattggcaaaacactcgtgacccgcacacaaggtacaaagattgcctccgacggcttgaaaggacgtgtgttcgaaacaatgatcgaggcacacgtggacgtgaagactacagatggctatctcctgcggctcttttgcgtcggcttcactaaaaagaggaacaaccagattcggaagacctcttatgcccagcatcagcaagtaagacagatccggaaaaagatgatggaaatcatgactagggaagtccagaccaacgatctcaaagaagtagtgaataaattgattcctgatagcatagggaaggacatcgagaaggcctgtcaatcgatctatcctctgcacgacgtgttcgttagaaaagtgaagatgctgaagaagcctaagtttgagctgggtaagctgatggagctgcatggcgaaggctcgagctcaggtaaggcgactggggatgagacaggcgccaaagtcgagcgcgcagatggttatgagccccccgtccaggaaagtgtctag

SEQ ID NO: 132947 - DNA, 792 bp, synthetic construct
  misc_feature 1..792: note = Description of Artificial Sequence: Synthetic coding sequence
  source 1..792: mol_type = other DNA
atggccaggggccccaagaagcacctcaagagagtggccgcccccaaacattggatgctcgacaagctgaccggcgtgtttgctcccagaccttcaaccgggcctcataagctgagagagtgccttccactgatcattttcctgaggaatcgattgaaatacgcgcttaccggagatgaagtgaagaagatctgcatgcagaggtttataaaaatcgatgggaaggttaggaccgacataacctaccccgcaggctttatggacgtcatcagtattgacaaaacgggcgaaaacttcagactaatatatgacaccaaagggcgatttgctgtccaccggattactccagaggaggctaagtataaattgtgtaaagttagaaaaatctttgttggaacgaagggtatcccccacctggtgactcatgatgctaggacaatccgttatcctgacccgctcatcaaagtcaacgatacaatccaaatagatttggagaccggcaaaatcacagatttcatcaagtttgatactggtaatctttgtatggtgacaggaggtgccaacctgggccggatcggtgtgatcacaaatcgagagaggcacccagggagttttgatgttgtccacgttaaggacgccaacgggaacagctttgcgacccgactcagcaatattttcgtgattgggaaagggaacaagccatggatcagtctgccacggggcaagggtattcgcctgactattgctgaggaacgggataagcggctcgcagcaaaacagtccagtggctag

SEQ ID NO: 132948 - DNA, 369 bp, synthetic construct
  misc_feature 1..369: note = Description of Artificial Sequence: Synthetic coding sequence
  source 1..369: mol_type = other DNA
atggcacgggggcccaagaagcatttgaagagagtggccgctcccaaacactggatgttagataagttaactggcgttttcgcgcctaggccttccacaggtcctcacaaacttcgcgagtgcctgccgttgatcatttttctccgcaacagactgaaatatgctttaaccggcgatgaagtgaagaagatctgcatgcagcgatttatcaagattgacggaaaagtacggacagatattacctaccctgccgggttcatggatgtcatttctatcgataagactggcgaaaactttcgtctgatttacgacacaaaggggaggtttgcggtgcaccgtatcactcctgaggaagcgaaaccctgttag

SEQ ID NO: 132949 - DNA, 792 bp, synthetic construct
  misc_feature 1..792: note = Description of Artificial Sequence: Synthetic coding sequence
  source 1..792: mol_type = other DNA
atggcccgcggacccaagaagcacctcaagcgggtcgccgctcctaaacactggatgttagacaaattgactggagtgttcgcgcccaggccgagtacaggcccccacaaacttagggagtgcttacctctgatcgttttcctgagaaatagattaaagtatgcactcaccggcgatgaggtgaaaaaaatctgcatgcagaggtttatcaagattgacgggaaggtacgcgtcgatgttacctatcccgccggctttatggacgttatcagcattgagaagacaggggagcactttcggctagtgtatgacacaaagggaagatttgccgtgcatcgcatcacagtggaggaggccaagtacaagctgtgtaaagtcaggaagattactgtcggtgtcaagggtattcctcaccttgttacccatgacgcgcgtaccatacgttacccagacccagtgataaaagtgaacgacaccgtgcagattgatcttggtacaggtaagattatcaactttatcaaattcgataccggtaatctgtgcatggtgataggcggcgctaacttgggccgagttggagtgatcactaatcgggaacgtcatcctggtagctttgatgtagttcacgtcaaggacgccaacggaaactcctttgccacaaggctgagcaacatctttgtcatcggtaacggcaacaagccatggatatctctcccgcgtgggaaggggatccgcctcacggtcgccgaggaaagggacaaacgcctcgcaactaagcaatcgtcagggtag

SEQ ID NO: 132950 - DNA, 789 bp, synthetic construct
  misc_feature 1..789: note = Description of Artificial Sequence: Synthetic coding sequence
  source 1..789: mol_type = other DNA
atgctaggcagaccagccaaattcagcaaggcccggggaccaaagaaacatcttaaaagagttgccgcgcctaagcactggatgcttgataagctgaccggagtctttgcaccacgtccttcgactgggcctcacaaactgagagaatgcctgcctctcatcgtgtttctacggaacaggttgaagtatgcactcacaggcgatgaggtcaaaaaaatttgcatgcagaggtttatcaagatagacgggaaagtgcgcgtggatgttacctaccccgcaggattcatggacgtgattagcattgagaagactggagaacattttaggctggtgtatgacactaagggaagatttgctgttcacaggatcaccgtcgaagaagcaaaatacaaactctgcaaggtccgcaaaatcacagttggcgtaaagggtatcccccatctcgtgactcacgatgctaggacaatccgttatccggaccccgtcatcaaggtgaatgataccgtgcagattgatctcgggacgggtaaaatcatcaattttatcaaatttgataccgggaatctttgtatggtgatagggggtgccaacctggggcgggtgggtgttataaccaatcgagagcgccacccgggatctttcgacgtggttcatgtgaaggacgccaacgggaactccttcgcaacgcggctgagtaatatattcgtaatcggcaacggaaacaagccttggatcagtttacctcgcggaaagggaattcgtcttactgtggctgaggagagggattag

SEQ ID NO: 132951 - DNA, 792 bp, synthetic construct
  misc_feature 1..792: note = Description of Artificial Sequence: Synthetic coding sequence
  source 1..792: mol_type = other DNA
atggccagggggccaaagaaacacctaaaacgtgtggctgcccccaaacattggatgctagataaactcaccggtgtgtttgctccaagaccaagcactggtcctcacaagttgcgcgagtgtctgccgctgatagtgttcctcagaaatagactgaagtatgcacttacaggggatgaagtaaaaaagatctgcatgcaacacttcctcaagattgatggaaaggtacgtgtggatattacatatcccgccgggtttatcgacgtgatttcgattgaaaagaccggggaacattttcgcctcgtgtacaataccaagggatgttttgccgtgcacaggattaccgttgaggaagctaagtacaaattatgcaaagtacggaagatcacggtgggaacgaagggcatacctcatctggtcacccatgacgcacgcacaattaggtaccctgaccctctgataaaggtcaacgacaccgtgcagattgacctgggtacaggaaagatcaccagctttataaagtttgatacaggaaacgtgtgcatggttatcgcgggcgcgaacctcggtagggtcggagtgatcaccaatcgggaaaggcatcctggcagctgtgacgtcgtgcacgttaaggacgccaacgggaacagctttgccaccaggatttccaatatcttcgtcattggcaacggcaacaaaccctggatttctctacctcgtggtaaagggatcaggctcactatcgctgaggaaagggataagcgtctggccgccaagcagtcatcaggctag

SEQ ID NO: 132952 - DNA, 615 bp, synthetic construct
  misc_feature 1..615: note = Description of Artificial Sequence: Synthetic coding sequence
  source 1..615: mol_type = other DNA
atgaccgagtgggagaccgccgcgcccgctgtcgctgaaactccagacattaaacttttcggcaaatggagcactgatgacgtccaaattaatgacatttctctacaagattacatcgccgtgaaagagaagtacgcaaagtatcttccccattctgccgggcgctatgcagcaaaacgcttcagaaaggcgcaatgtcctattgtggaaaggctgacaaactctatgatgatgcatggccggaataatggcaagaagctaatgactgtgcgtattgttaagcatgcctttgagatcatccacctcctaaccggtgaaaatcccttgcaggttttggtcaacgccatcattaactcaggccctagagaagattccacgcgtatcgggcgagctggcactgtgagacgccaggccgtcgatgtatctcctctgcggcgcgtgaaccaggccatatggttactctgtaccggagctcgggaggccgccttccgcaacatcaagaccattgcagaatgtttggctgatgaactcatcaacgcggcgaaagggtcctctaattcttatgccatcaagaaaaaggacgagttagagagggtagcaaagagtaatcgctag

SEQ ID NO: 132953 - DNA, 615 bp, synthetic construct
  misc_feature 1..615: note = Description of Artificial Sequence: Synthetic coding sequence
  source 1..615: mol_type = other DNA
atgaccgaatgggaaaccgccgctccagcagtggctgagactccagatattaagctgttcggaaagtggtccacagatgatgtccagatcaacgacatctccctgcaggactacatagcagtgaaagaaaagtacgccaagtatctgccacacagtgccggtcgctacgccgccaagcgcttccggaaagcccagtgccctatcgtagagcgcctaacaaactcaatgatgatgcacggccggaataacggcaaaaaactgatgacagttagaattgtcaaacacgccttcgaaatcattcatctgctcaccggcgagaatcctttgcaggtgttggtgaacgctatcattaatagtggaccacgcgaagacagtactcgaattggaagagctggtactgtgaggaggcaggctgtagatgtctcccccctccgccgggtcaaccaggccatttggcttctgtgtacgggcgctcgggaggccgccttcaggaacatcaagaccatcgccgagtgtttggccgatgagttgatcaacgcggccaagggctctagcaattcatatgcaattaagaagaaggatgaactcgaaagggtggctaaaagtaaccgctag

SEQ ID NO: 132954 - DNA, 657 bp, synthetic construct
  misc_feature 1..657: note = Description of Artificial Sequence: Synthetic coding sequence
  source 1..657: mol_type = other DNA
atggccaccgaagttgctgcagatgctctaggcgaggaatggaaagggtacgtggtccggatcagcggggggaacgacaaacagggattccccatgaagcagggcgtgctgacccatggcagagtgcggctgctgctctcaaaaggacactcatgttacaggcctcgcaggactggggagcgcaaacgcaagtctgtgcggggatgcatcgtcgatgccaatctgtccgtacttaacctggtaattgtcaagaaaggcgaaaaagacatcccaggcctcactgataccacggttccccgcaggctagggccaaagagggcttccaggatcagaaaactgttcaacctctcgaaggaagatgatgtgcggcagtacgtcgtgaggaagccgctcaataaagaagggaagaaacccagaactaaggctccaaagatacaacggttagtcaccccacgggtcctacagcataaaaggaggcggatcgcacttaaaaagcagcggactaagaaaaacaaggaagaagcagcggaatacgcgaaactacttgctaagagaatgaaagaggcgaaggagaaacggcaggagcaaattgctaagcggagacgcctgtcgagtttgagagccagcacctctaagagcgagtcttcacagaagtag

SEQ ID NO: 132955 - DNA, 276 bp, synthetic construct
  misc_feature 1..276: note = Description of Artificial Sequence: Synthetic coding sequence
  source 1..276: mol_type = other DNA
atgaagcttaacatctcctttccagccactggctgccagaagttgatcgaagttgacgatgagagaaagctcagaactttctacgagaagcgtatggccactgaagtggccgctgatgccctgggagaggaatggaaagtgaaagtggacaagctgttgcaggtattcaaatccgagacggtgaatgctatcgggaactggtatctggaatggggttccgattcggggttttggctgcttacatttgggaaattgttgcccaatgccaccctgtag

SEQ ID NO: 132956 - DNA, 657 bp, synthetic construct
  misc_feature 1..657: note = Description of Artificial Sequence: Synthetic coding sequence
  source 1..657: mol_type = other DNA
atggctactgaggtcgctgctgatgccctcggggaggaatggaagggctatgtggtgcgcatcagcggcgggaatgacaaacagggtttccccatgaagcagggagtcctcacacacgggcgcgtgcgtctcctgctgagcaaaggacactcctgctatagacccaggcgaacaggggagcggaagcgcaaaagtgtgcggggatgcatcgttgatgccaatcttagcgtgctaaacctggtgattgtaaagaagggagaaaaagacatccccggtctcacagacactactgtgcccagaagattagggcctaagagagctagcagaatccgcaaactctttaacctgtctaaagaagacgacgtccgacagtacgtggtccgcaagcctctcaataaagaaggcaaaaaacctaggaccaaggctcctaagatccagcggctggtgacccctcgggtgctccaacataagagaagaaggatcgctttgaagaaacagaggaccaagaaaaataaagaggaggccgctgagtacgcgaaattattggctaagaggatgaaggaggctaaggaaaaacgtcaggagcagatcgccaaacgtcggcgtctctctagtctgcgcgcgtctaccagtaagagcgagtcttctcagaagtag

SEQ ID NO: 132957 - DNA, 750 bp, synthetic construct
  misc_feature 1..750: note = Description of Artificial Sequence: Synthetic coding sequence
  source 1..750: mol_type = other DNA
atgaagctgaatatcagctttcctgccaccggctgccaaaaactgattgaagttgacgatgaaagaaagcttcgtaccttttacgaaaagcgaatggccacagaggtcgccgctgatgcactcggcgaggaatggaagggatatgtggttcgcattagtggcggcaacgataagcagggatttccgatgaaacagggggtcctaacacatggtagggttcgacttttgctgtccaaggggcatagttgttacagacctcgtagaactggagaaaggaagagaaaatccgtcaggggctgcatagtggacgccaatctgtccgtgctgaatttagttatagttaaaaagggcgaaaaggatatccccggcctgacagacactaccgtccctcgcagattaggccctaagcgagctagtcgaatcagaaagctcttcaacctgtcaaaggaagacgatgtgaggcagtacgtggtgcgaaagccactcaacaaagaaggcaagaaacccaggaccaaagcccctaagatacagaggctggttaccccccgggtgctgcaacacaagaggagaaggattgctctcaaaaagcagcgtaccaaaaagaataaggaggaggcagccgagtatgccaagctccttgcaaagcgcatgaaggaagctaaagaaaagcgacaggagcagatcgccaaaagaagacgcttatcctcacttcgtgcatccactagcaagtctgaaagttcacagaaatag

SEQ ID NO: 132958 - DNA, 585 bp, synthetic construct
  misc_feature 1..585: note = Description of Artificial Sequence: Synthetic coding sequence
  source 1..585: mol_type = other DNA
atgttttcatcttctgccaagattgtgaagcctaatggtgaaaagcctgatgagttcgagtctgggatttctcaggccctgctggaactggagatgaattccgatttaaaagcccagctgagagaactgaacataactgccgccaaggaaatcgaggtgggaggcgggagaaaggcaataattatctttgtgcctgttccccagttgaaatctttccagaaaatccaggtcagactcgtgcgcgaactagagaagaagtttagtgggaagcacgtggtttttatcgcacagcggcgcatactgcccaaaccaacaaggaagtccaggaccaaaaataaacagaaaaggccccgatcccgaacactgactgctgtgcatgacgccatcctcgaggatctggtatttccatccgaaatcgtgggtaagcggatacgtgtaaagctggatggctctaggttaatcaaggtccacctggataaggcacagcagaacaatgtggaacacaaggtagaaacattcagcggggtgtacaagaaactcaccggcaaggacgtgaactttgagtttcctgaattccaactgtag

SEQ ID NO: 132959 - DNA, 585 bp, synthetic construct
  misc_feature 1..585: note = Description of Artificial Sequence: Synthetic coding sequence
  source 1..585: mol_type = other DNA
atgtttagttcgagcgcaaaaatcgtgaaacccaacggagaaaagcctgacgagtttgagtcaggtatttcccaggctttgctggagctcgagatgaactcggatctcaaagcacagctgagggagcttaacattacagccgccaaagaaattgaggtgggaggagggagaaaggccatcattatatttgtgcccgttccacagctgaaaagctttcagaagatccaggtacgcctcgttcgcgaactcgaaaagaagttttcaggcaaacacgttgtgtttatcgcccagcggcggattctgccaaagcccactcggaagtctagaaccaagaataagcaaaaaaggcctcggagtcggacactcacggccgtacatgacgccatcctggaagacctagtgttccccagtgagatcgttggtaaacgtatcagagttaagttagatggctcacgcctgattaaagtgcacttggacaaggcacaacagaacaatgtggagcacaaggttgagactttttcaggtgtgtataagaaattaaccggaaaagatgttaatttcgaatttccggagttccaactttag

SEQ ID NO: 132960 - DNA, 585 bp, synthetic construct
  misc_feature 1..585: note = Description of Artificial Sequence: Synthetic coding sequence
  source 1..585: mol_type = other DNA
atgttctcctcctctgcaaagatagtaaagcccaatggggaaaagccggatgagtttgaatccggtatatcacaggctctcctggaattagagatgaacagcgatctgaaggcccaattgcgggaattgaacattactgcagccaaggagatcgaagtcgggggcgggcgcaaggccattattatcttcgtgccagtacctcagttgaaatcgttccagaaaattcaggtcagactcgtgagggaactggaaaaaaagttttctggtaaacatgtggtcttcatcgcccagagaaggatcctgccaaagcctaccaggaagagtcgcacaaagaataaacagaaacgccccagatcccgcacactgacagccgttcatgacgccatacttgaagaccttgtctttccatcagagattgtgggcaaacgcattagagtaaagttggacggaagcagactcatcaaggtccacctggataaggctcagcagaacaatgtggaacacaaggtggagaccttttcgggcgtgtataaaaagctaaccgggaaagatgtcaattttgaatttccggaatttcaactctag

SEQ ID NO: 132961 - DNA, 567 bp, synthetic construct
  misc_feature 1..567: note = Description of Artificial Sequence: Synthetic coding sequence
  source 1..567: mol_type = other DNA
atgggcatatctcgcgataactggcataagagaaggaaaacaggcggtaaacgtaagccctaccataagaaaaggaaatatgaattagggaggcccgccgctaatactaaaatcggtcctagacgtattcacacagttcgagtgagaggagggtgcacacggaaaactcggatcatcgatgtggtgtacaacgccagcaacaatgagctggtccgcaccaaaaccctggttaaaaactgtattgtgctgatcgactcaacaccttaccggcagtggtacgaaagccattacgccctacccctgggtcggaaaaagggcgcaaaactgacgcccgaggaagaagaaatcctgaataaaaagcgatccaaaaagatccagaaaaaatatgatgaaagaaagaagaacgcaaaaatttctagcctgctggaagaacagtttcagcaggggaaacttctggcgtgcattgctagcagaccaggccagtgcggtagagccgatgggtacgtactcgagggcaaggaattagaattctacttacgcaagatcaaagctcggaagggtaaatag

SEQ ID NO: 132962 - DNA, 627 bp, synthetic construct
  misc_feature 1..627: note = Description of Artificial Sequence: Synthetic coding sequence
  source 1..627: mol_type = other DNA
atgggaatcagcagggacaattggcacaagcgacgcaaaactgggggcaaacggaagccttatcacaagaagcgtaaatacgagctgggcagacccgccgctaacaccaagattggccctagaagaatacatacagtgagggtccgcggtggaaacaaaaaatacagggccttaagattagatgtcggaaatttcagctggggcagcgaatgctgtactcgtaagactcgaataatcgacgtggtgtataatgcttccaataacgagctcgtcagaaccaagaccctggtcaaaaattgcatcgtgctaattgactccaccccttataggcagtggtacgaatcccactatgctctgccactggggcgcaagaagggcgcgaagctcacccccgaagaggaggaaattctaaataaaaagcgtagcaaaaagattcagaagaaatacgatgagcggaagaaaaatgcaaagatcagctctttgcttgaggagcagtttcagcagggaaaattgttagcctgcatcgcatcacgccccggccagtgtggtagagccgatgggtatgttttggaagggaaggaactggaattctacctacgtaagattaaagccagaaagggaaagtag

SEQ ID NO: 132963 - DNA, 585 bp, synthetic construct
  misc_feature 1..585: note = Description of Artificial Sequence: Synthetic coding sequence
  source 1..585: mol_type = other DNA
atgcctgtggccagatcttgggtctgcaggaagacatacgtcaccccccgtcggccattcgagaaatccaggttagaccaggaactaaaattaatcggagagtatggcctgcgtaataaacgggaggtatggagagtgaaattcacactggctaaaatacgtaaggccgcacgggagctgctcactctggacgagaaggatccacgaagactctttgagggaaatgccctactcagacgtttggtccggatcggagtcctggacgaaggcaagatgaaactggactatatcctcgggctgaaaatcgaggattttctggagcggcgcctgcagacccaggtgttcaaactaggtttggctaagtccatccaccacgccagggtcctgattagacagcgacatattcgagtcagaaagcaggtggtgaacatccctagttttattgtgaggttggattcacaaaagcatatcgacttctctttgcgttctccctatggcggtggccggccaggcagggttaaaagaaagaatgcaaaaaagggccagggcggagcaggggccggcgacgatgaagaggaagactag

SEQ ID NO: 132964 - DNA, 585 bp, synthetic construct
  misc_feature 1..585: note = Description of Artificial Sequence: Synthetic coding sequence
  source 1..585: mol_type = other DNA
atgccggtggctcgttcatgggtgtgccggaaaacctacgtgactccaaggaggccttttgaaaaaagccggctggaccaggagctcaagctgattggagaatatggcctgcggaacaagagagaggtttggcgagtgaaatttactctggcaaaaatccgcaaagcggcccgagagctcctgaccctagacgaaaaggatccaaggcgccttttcgaaggtaatgctcttctccgacgactcgtgaggataggcgtgttagatgagggaaaaatgaaacttgattacatcctcggactgaagattgaggatttcttggagcggagacttcagacccaggtgtttaagctagggctagccaaaagtatacatcacgcaagagttctgatccgacagcggcacattagggtacgtaagcaggtcgtcaacatcccttcgttcattgtccggctagactctcagaagcatatcgacttcagtctgaggtccccatacggaggcgggcgtccaggaagggtgaagcgcaagaatgccaaaaagggccagggtggtgctggagccggcgacgacgaagaggaagactag

SEQ ID NO: 132965 - DNA, 585 bp, synthetic construct
  misc_feature 1..585: note = Description of Artificial Sequence: Synthetic coding sequence
  source 1..585: mol_type = other DNA
atgcctgtggccagatcatgggtatgccgaaaaacctatgtgacacctaggagacctttcgagaaatcacggctcgatcaggagctgaagcttattggggagtatggactgagaaacaaaagagaggtttggcgtgtcaagttcacattagcaaagatccgaaaagctgcgcgcgagctactgaccctggatgagaaagacccacgacgtttgttcgagggaaacgctctcctgagacgacttgttcgcattggagtactggatgaagggaaaatgaaattagactacatactcgggctgaagatagaagattttctcgagagacgcttgcagactcaggtcttcaagttaggattggctaaatcaattcatcacgcccgagtccttatcaggcagcgacacattcgggtccgcaagcaagtggtgaatataccgtctttcatcgtgcggttggatagccaaaagcacatcgacttcagtttgagatccccgtatggcggagggcgacctggtcgggtcaagcgcaaaaacgcaaagaaaggccagggcggcgctggcgctggcgacgacgaagaggaggattag

SEQ ID NO: 132966 - DNA, 420 bp, synthetic construct
  misc_feature 1..420: note = Description of Artificial Sequence: Synthetic coding sequence
  source 1..420: mol_type = other DNA
atgccggtcgcccggtcctgggtgtgtaggaaaacctatgtgacccctcgcaggcctttcgagaaatcccgcctcgatcaggaattgaaactgattggagaatacggcctccggaataaaagagaagtttggcgggttaaattcaccctggcgaaaatcaggaaagccgctcgagagctcctaacattggacgaaaaagatcctcgccggctttttgaagggaacgccctcctgcggagactcgtgcgtattggagttctcgacgagggaaagatgaaactagactacattctcggattgaaaatcgaggattttctcgaacggcgcttacagacacaggtctttaagctcggccttgccaaaagtattcatcacgcccgtgtgctgattcgccagcgacacatcagtccgagacgctag

SEQ ID NO: 132967 - DNA, 420 bp, synthetic construct
  misc_feature 1..420: note = Description of Artificial Sequence: Synthetic coding sequence
  source 1..420: mol_type = other DNA
atgcctgtggcccggtcctgggtctgtcgaaagacatatgtgactccgagaaggccatttgagaaatctcgtctggaccaagagcttaaactcatcggagagtacggattaaggaataaacgcgaagtgtggcgagtcaagtttacattagctaagatccgaaaagccgcgagagaactcttgaccttggacgaaaaggaccctcggcgcctgtttgagggaaatgccctgttgcgtcggttagtgaggatcggggttctcgatgaggggaaaatgaagttagattacatattggggcttaagattgaagatttcctcgaacgtcgcctacagacccaagtctttaagctgggacttgctaagagcattcaccacgcccgcgtgctcatcaggcaacggcatatcagccctcggagatag

SEQ ID NO: 132968 - DNA, 471 bp, synthetic construct
  misc_feature 1..471: note = Description of Artificial Sequence: Synthetic coding sequence
  source 1..471: mol_type = other DNA
atgcccgtcgctcggtcttgggtgtgtcggaagacttatgttacacctagaagacccttcgagaagtctagattggaccaggagctgaaattgatcggagaatacggactgcggaacaagagagaggtctggagagttaagtttactctggctaaaatcagaaaggccgctcgagagctccttacgctggatgagaaggatccacgacgactatttgagggaaatgcactactccgacggctcgtccgtatcggggttctcgatgagggtaagatgaaactcgattatatcttaggtttaaaaattgaagattttctggagagaagactgcaaacacaggtgtttaagctgggactcgccaagagcattcaccacgccagggtcttaatcaggcagcgtcatatacgttaccacctgggctgggccccagagagtagcagcacctgtccatctgatgggtgcccacactag

SEQ ID NO: 132969 - DNA, 420 bp, synthetic construct
  misc_feature 1..420: note = Description of Artificial Sequence: Synthetic coding sequence
  source 1..420: mol_type = other DNA
atgccggtggcccggtcttgggtctgtaggaaaacatacgtgacgccacgtcgtccattcgaaaagtccaggcttgatcaagagcttaaactcatcggtgagtatggcttgagaaataagagggaggtgtggcgggtgaagtttaccttggctaagatccgtaaagccgccagggaactcctcacccttgatgaaaaagatcctaggcgactgttcgaaggcaacgctcttttgagacgtttagtcaggattggtgtgcttgatgaggggaagatgaaactcgactacatcctgggactgaagatcgaggacttcctagaaagaagactgcagactcaggtgtttaaactaggacttgctaaatccatacaccatgccagagtccttataagacagaggcatatcagtcccaggcgatag

SEQ ID NO: 132970 - DNA, 2844 bp, synthetic construct
  misc_feature 1..2844: note = Description of Artificial Sequence: Synthetic coding sequence
  source 1..2844: mol_type = other DNA
atggcgacccgagttcgaaccgctagcatctgggtccccccgctccaggaacgtaactcttcctgggacagaatccgtaaactgcagggacaggagagcattttgggtcagggtacgccaggcctgcagccactgcccggtacccccagacagaagcaaaagagccgaaggatcgaaaaagtgttggagtggcttttcatctcccaggaacaacccaagatcaccaagtcctggggacctctgagcttcatggatgtgttcgtggactttacatgggaagagtggcagctgttggaccccgcacaaaaatgtctgtaccggagcgtaatgcttgagaattattcgaatctggtgagcctaggttatcagcacaccaagccagatatcatctttaaattggagcagggggaggagctgtgcatggtgcaggcacaggtacccaaccagacctgccctaacaccgtttggaaaatcgatgatcttatggattggcatcaggaaaataaagataagctgggtagtacagccaaaagtttcgagtgcacaacttttggtaaattgtgcctcttatcaacaaagtaccttagtcgccagaagccccataagtgtggtacccatgggaagtcgctgaaatatatcgacttcaccagcgactatgcccggaacaaccccaatggctttcaggtacacgggaagagtttcttccacagcaagcatgagcagaccgtcatcggaatcaaatactgtgaatccattgagtccgggaagacagtgaacaaaaagagtcagctgatgtgtcagcagatgtacatgggagagaagccctttggctgttcttgttgtgagaaagccttctcatccaagagctacctgctggttcaccaacagacccacgccgaagaaaaaccttacggatgtaatgagtgtggaaaggatttctccagcaaatcatacctgatagtccaccaacgtattcacacgggggagaaactgcacgagtgctccgaatgcagaaaaacattttctttccacagccagctggtcatccaccaaagaatccacactggcgagaatccttacgaatgttgcgagtgtggcaaagtcttttctaggaaagatcaattagtgtcgcaccaaaaaactcactcgggccaaaaaccatatgtctgtaatgagtgtgggaaggcctttgggctcaagtcccagcttataattcatgaacgcatccacaccggggagaaaccgtatgagtgtaatgaatgccagaaggcattcaacactaaaagcaaccttatggttcaccagcgtacacacaccggggaaaaaccttatgtatgtagtgattgtggcaaggcgttcaccttcaagtcacaactgatagtccaccagggaatccataccggtgttaagccatacggttgtatccagtgtggcaaaggcttcagcctaaaatcgcagttaatcgtgcaccaacgctcccataccggcatgaaaccgtatgtctgcaatgaatgtggcaaagcctttcgcagcaaatcctatctgatcatccataccaggacacacacaggtgagaagcttcatgaatgcaataactgtggcaaggcattctcctttaagagtcagcttatcatacaccagagaatacacacgggcgagaacccctatgagtgccacgagtgcggaaaagcatttagtaggaagtaccagctgatctcccatcaacgcactcacgccggtgagaaaccttacgagtgcacagactgcggaaaagcctttggacttaagagccagctcattattcaccagagaacccacactggagagaaaccattcgagtgttcagaatgccagaaggcatttaacacgaaaagtaatcttattgtgcatcagaggacccataccggcgagaagccctatagctgtaatgagtgtggcaaagcatttacttttaagtcccagctgatcgtccataaaggggtacataccggagttaagccatacggctgctcacaatgtgctaagacattctccctgaagagtcagctgattgtacaccagagatcgcatactggagtcaaaccctacggctgcagcgagtgtggaaaggcgtttcgcagtaagtcatatcttattatccacatgcgtacgcataccggcgagaagcctcatgagtgccgggaatgtggcaaatctttctcctttaatagccaacttattgtgcatcaacgcatccatactggtgagaacccatacgagtgctctgaatgtggaaaagctttcaaccgaaaggaccagcttatcagccaccaaagaacccacgcaggagagaagccttacggatgcagtgaatgtggcaaagcattttctagtaagagctacttaatcatccacatgagaactcattctggggagaaaccttacgaatgcaatgaatgtggtaaggctttcatttggaaaagcttgctgattgtgcacgaacgcactcatgcaggcgtcaacccttataagtgctcgcagtgcgagaagtccttttcagggaagttgaggctgctcgtgcaccaacgcatgcacacaagagagaagccttatgaatgctcagagtgcggaaaagcatttattaggaacagccagttgatcgttcaccagcgcactcactcaggggaaaagccttacggttgcaatgagtgtggcaaaactttcagccagaaatctatcctctcggcccaccagagaacacacaccggggaaaagccatgcaaatgtactgagtgcggaaaagccttttgttggaagagccagctcattatgcatcagcgcacgcacgtggacgataaacattag

SEQ ID NO: 132971 - DNA, 768 bp, synthetic construct
  misc_feature 1..768: note = Description of Artificial Sequence: Synthetic coding sequence
  source 1..768: mol_type = other DNA
atgccccgagaagaccgggccacctggaagagcaattacttcctaaagataattcagctcctggacgactatccaaagtgcttcatcgttggcgcagacaacgtcgggagcaagcagatgcagcagattcggatgtcactgagggggaaggcagtggtccttatgggaaagaataccatgatgcgcaaagcaattcgtgggcaccttgagaataacccagccctggaaaagctgctcccgcacatccgcggaaatgttggcttcgttttcactaaagaggatctgaccgagatacgggacatgctccttgctaataaggtgcccgcagcagctagggctggcgctatcgccccctgcgaggttactgtgcccgcccagaataccggcttaggaccagaaaaaacatcttttttccaggcactcggcattaccacaaagattagccggggaacaatagagatcctgggtgtcaggaacgtggccagtgtgtgcctacagatcgggtacccaaccgtggcgtccgtgccccatagtatcatcaatggttataagcgcgtgcttgctctcagtgtggagaccgactacacattccccctggccgagaaagtgaaagcatttctggccgatccctccgcatttgtggctgccgcccctgtcgcagccgcaaccacggctgctcctgcagccgcagccgcccctgctaaagtggaggctaaggaagaatccgaagagagcgatgaggatatgggttttggtctttttgactag

SEQ ID NO: 132972 - DNA, 954 bp, synthetic construct
  misc_feature 1..954: note = Description of Artificial Sequence: Synthetic coding sequence
  source 1..954: mol_type = other DNA
atgccaagggaggatcgcgctacctggaagagtaactatttcctaaaaatcatccaactgctggacgattatcctaagtgctttatcgtcggagcagataatgtgggctccaaacagatgcaacagatccggatgtcacttaggggtaaagcagtagtcctgatgggtaagaatacaatgatgcgtaaagccatcagaggtcacctagaaaacaatccagcacttgaaaagctgttgcctcacatcagaggaaacgtgggtttcgtgttcactaaagaggacctgactgagatccgggatatgctgctggcaaacaaggtgcctgcggccgcgcgcgctggtgccatcgccccttgcgaggtgacagtaccagcccagaacacaggactggggcctgaaaaaactagtttcttccaggcccttggaattactaccaagatctctagagggaccattgagatacttagcgatgtccagttgatcaagacaggtgataaagtgggggccagtgaggccacgttgctgaatatgctgaacatatctccctttagctttggcctcgtcatccagcaggtgttcgataacggaagtatttacaacccagaggtgctggatatcactgaagagactctccattcccgttttctagaaggcgtccgaaacgtcgctagcgtgtgcttgcagattggttatccaacggtggcctccgttcctcactcaatcatcaatgggtacaagagagtactggctttgagcgttgagacggattatacctttcctttagccgagaaggtcaaggcctttctcgccgacccttctgcttttgtggccgctgcccccgttgctgccgccacaacggcagcccccgcagcagcagctgctccagcgaaagtggaggccaaggaggaaagcgaggagtcggacgaggatatgggcttcggtctcttcgactag

SEQ ID NO: 132973 - DNA, 954 bp, synthetic construct
  misc_feature 1..954: note = Description of Artificial Sequence: Synthetic coding sequence
  source 1..954: mol_type = other DNA
atgccccgcgaggaccgcgcgacctggaagtccaattatttcctcaagatcatccaactgctggatgactacccgaaatgttttatcgtgggggcagacaacgtgggctctaagcagatgcagcagataaggatgtcgctgaggggtaaggccgtcgtgcttatgggcaagaacacgatgatgcgcaaggctatccggggacacttggagaacaatcccgccctggaaaagctgcttccgcacatccgggggaacgtgggctttgtttttactaaagaggacctcaccgagattcgtgatatgctattagcaaacaaggtgccagcagccgctcgcgctggggcaatcgccccatgcgaggtgacagttccagcccagaataccggcttgggccctgaaaagacatctttcttccaggctctcggtattacgaccaagatctcaagggggacaatcgagatcctcagtgatgtccagcttataaaaactggggacaaggtcggggcaagcgaggctactctgttgaacatgctaaatatatcccctttctcgtttggattggttatacaacaggtgttcgataatggatctatttataatccagaagtgctggatattactgaagagaccctacacagcaggtttctcgagggcgtccgaaatgtggcttctgtgtgtctccagatcggttatccgaccgtcgcttctgtgccgcatagtattattaatgggtataaacgagtgttagccttgtcagtggaaacagattataccttcccgctcgcagaaaaggtcaaagctttcctggctgacccaagtgccttcgtggcagctgctcccgtggctgccgcaactactgcagcccctgccgctgcagcagcacccgctaaggtcgaagccaaggaagaaagtgaggagagcgatgaggatatgggctttggactgtttgactag

SEQ ID NO: 132974 - DNA, 345 bp, synthetic construct
  misc_feature 1..345: note = Description of Artificial Sequence: Synthetic coding sequence
  source 1..345: mol_type = other DNA
atggccagcgtgagcgagctggcatgcatctattctgcccttatactgcatgatgacgaagtgaccgttactgaagataaaattaatgcgctgatcaaggctgctggagtaaacgtggagcccttctggcctggattgtttgcgaaggcgctcgctaatgtgaacattgggtccttaatatgcaatgtcggtgccggaggaccagcccctgcagcaggtgccgctcccgccgggggcccagccccaagtactgccgcagccccagcggaagagaagaaagtggaagccaaaaaggaagagagtgaagagtcggacgatgacatggggtttgggctcttcgattag

SEQ ID NO: 132975 - DNA, 270 bp, synthetic construct
  misc_feature 1..270: note = Description of Artificial Sequence: Synthetic coding sequence
  source 1..270: mol_type = other DNA
atggccagtgtaagtgaattggcctgcatctactccgccctgatcctgcatgatgacgaagtgacagtgaccgctctggccaatgtaaatataggcagcctcatctgcaatgttggcgccgggggccccgctcccgccgctggtgctgcccctgccggtgggcctgccccaagtaccgcagctgcacccgcggaggagaaaaaagtcgaggccaagaaagaggagtcagaggagtctgacgatgacatgggattcgggctgttcgattag

SEQ ID NO: 132976 - DNA, 2277 bp, synthetic construct
  misc_feature 1..2277: note = Description of Artificial Sequence: Synthetic coding sequence
  source 1..2277: mol_type = other DNA
atggcacccgccatgcagcccgctgaaattcaatttgctcagagactggcctcatccgagaaggggattcgcgacagggctgtcaagaaactgagacaatatatctccgtgaaaacacagagggaaacaggcggcttttcgcaggaagaactactcaagatctggaaagggctgttttactgtatgtgggtgcaagatgaacccctcctgcaagaggaacttgctaatactatagcacagctggttcatgcagttaataattctgcagcacagcatttgttcattcagaccttctggcaaactatgaacagggaatggaaggggattgacaggctgagactcgacaagtattatatgttaatccgcctggttctccggcagagcttcgaggtgctgaagaggaacggatgggaggaaagtcgaattaaggtgtttcttgatgttctaatgaaggaagtcctgtgtcctgagtctcagtctcctaatggcgtacgattccatttcatcgatatctatctagatgaactgtcaaaagttgggggtaaggaactcctcgccgatcagaacctcaaatttatcgaccctttctgtaaaatagcagctaagactaaagaccatacactcgtccaaaccatcgcgagaggcgtgtttgaggcaatcgtggaccagagccccttcgttccagaggaaacaatggaagagcagaagactaaagttggggacggcgacctatctgccgaagaaattcctgagaacgaggtttctctgcgtcgggctgtgtcaaagaagaaaacggctcttggaaagaatcactcacgcaaggacgggctttcagatgaacgcggcagagatgattgcgggacttttgaggacaccggtccccttttgcaatttgattataaggcggtggcagatagactgctcgagatgacatccaggaagaataccccgcacttcaatagaaaaaggttatctaaactgattaaaaagttccaggacctctcggaggggagctcaatatcgcaactttcctttgcagaggacatttctgccgatgaagacgaccagatcctctcccaggggaagcataaaaaaaaaggcaataagctgctggaaaagacaaatctcgagaaagagaaaggctccagagtgttctgtgtagaggaggaggattccgagtcctcactacagaagcggagacggaagaagaaaaaaaagcatcaccttcagcccgagaatcccggtccaggtggcgcagcaccatccctcgaacaaaatcggggccgcgagcccgaggcaagcggtctcaaagccctgaaggctagggttgcggaaccaggagcagaggcaacttccagcaccggagaagagagcggcagcgaacatccccccgctgttcccatgcataataagcggaaacgccccaggaagaagtccccaagagctcacagggaaatgttggaatcagcagtgttgcccccagaggacatgagtcagtcaggcccttcaggttctcacccccaggggcctcgaggatccccaactgggggggcccagctgctcaagcgcaagaggaaattgggcgtggtccctgtaaacggctctggactctccaccccggcctggccccccctgcagcaagagggcccccctacaggccctgccgagggcgccaactctcacacaaccctgccgcagcgacggcgcctgcagaagaagaaggctggtcctggatctctcgagttgtgcggcctgccttctcaaaaaactgctagcctgaaaaagcgcaaaaaaatgcgcgtgatgagtaaccttgttgaacataatggtgtgttagagtccgaagccgggcagccccaggccttagggtcatctgggacatgttcttccttgaaaaagcagaaactgcgcgcagagagcgactttgttaagttcgataccccattcttacccaaaccactctttttccgacgagccaagagttcaaccgccacccatccaccgggacccgcggtccagttgaacaagacaccatctagctccaaaaaagtcaccttcgggctgaaccgaaacatgacagcggaattcaagaaaacagataagtccatccttgtgtcccccaccggaccttccagggtcgcctttgatccagaacagaagcccctgcacggagttctgaagacgcccacatctagtccggcgagtagccctttggttgccaaaaaaccattgactacaacccctcggcgccgtcccagagctatggacttcttctag

SEQ ID NO: 132977 - DNA, 780 bp, synthetic construct
  misc_feature 1..780: note = Description of Artificial Sequence: Synthetic coding sequence
  source 1..780: mol_type = other DNA
atgcccggcgctaactatcgcgctggggctggggccggagctggagccagacgtcctcgcggtgcccgggaccgcgaggaagacggagggggattggaacccgccgcggtggccagagacttgcttcgggggaccagcaacatgtcctttgaagaattactggagctgcagtcgcaggtgggaaccaagacttacaagcagcttgttgcaggaaatagcccaaagaagcaggcctcccgtccccctatccagaacgcctgcgtggccgataagcatcgccctctggagatgagcgctaagatccgggtaccattcctgcgccaagtagttcccatctcaaagaaggtagcccgcgatccgcgttttgacgatttgtctggcgagtataacccagaagtttttgacaagacatatcagtttctgaatgacattagggccaaggagaaagaattggtgaagaagcagctgaaaaagcacctctcaggagaagagcatgagaaactgcagcagctcctacaacggatggagcagcaggagatggcccagcaggaaagaaaacagcaacaggaactccacctggctttgaagcaggagcgccgtgcccaggcacaacaggggcatagaccctactttcttaaaaagagcgagcaacgccagctcgcactcgccgaaaagttcaaggaattgaaaagaagcaaaaaactggagaatttcttatcacgcaagagaagacgcaatgctggcaaagatcgcaggcatctaccgctgagcaaagagtag

SEQ ID NO: 132978 - DNA, 4233 bp, synthetic construct
  misc_feature 1..4233: note = Description of Artificial Sequence: Synthetic coding sequence
  source 1..4233: mol_type = other DNA
atggacatttacgacacccaaactcttggtgttgtggtgttcggaggattcatggtggtgagcgccattggaatatttctggtgagcacattctcaatgaaagagacctcttatgaggaggcactagccaaccagcgcaaggagatggctaagactcatcaccagaaggtcgaaaagaagaagaaggagaaaaccgtggagaagaagggaaagaccaaaaagaaggaggagaagcccaacggtaaaattcctgatcatgaccccgcacctaacgttaccgttctgttgagggagccagttagggcacctgctgtcgccgtagcacccaccccagtccagcctccaattattgtggctccggtggccacagtcccagcaatgccacaggaaaaactcgcttcaagccctaaggataaaaaaaagaaggagaagaaggtagcaaaagttgaaccagcagtcagttccgtggtgaattcaatccaggtacttactagtaaagccgccatccttgagaccgctccaaaagaagtgcccatggtcgtcgtccccccagtgggcgcaaaggggaacactcccgctactgggaccacgcaggggaagaaggcggaagggactcagaatcagtccaaaaaagccgaaggagctcctaatcaaggcaggaaagcagaggggacaccaaaccagggaaaaaagactgaaggaactccaaatcagggcaagaaggcagaggggacaccaaatcaaggtaaaaaggctgagggcactcccaatcagggaaagaaggctgagggagcccagaatcaaggcaagaaggttgatactacccccaatcagggaaagaaggtggagggcgcccccacacaggggcgcaaggccgagggcgcacagaatcaggctaagaaggtggaaggggcacaaaaccagggcaagaaggcggagggtgcgcaaaatcaaggcaagaaaggggaaggagcccagaatcagggcaagaaagcagaaggggcccagaatcaagggaagaaggccgagggtgctcagaatcagggcaagaaggctgaaggggctcaaaatcagggcaaaaaagccgagggtgcccagaatcagggaaagaaagctgagggagcacagaatcaggggaaaaaaagcgagggagctcaaaatcaggggaaaaaggttgaaggcgcgcagaatcaggggaagaaggccgagggggcccagaaccaggggaagaaagccgagggcgcgcagaaccagggaaaaaaggccgaaggcgcacagaaccagggcaaaaaggccgaaggtgcacaaaatcaaggaaagaaggccgaaggggctcagaatcaggggaaaaaagccgagggagcacagaaccaaggaaaaaaagccgagggcgctcagaatcagggtaagaaagtggagggcgctcagaaccaggggaagaaggccgagggagctcagaatcaggggaagaaggccgagggcgcacaaaaccagggaaaaaaagcagagggtgcgcaaaatcagggacagaaaggtgaaggggctcaaaaccagggcaagaaaaccgagggggctcagggtaagaaggcagagcgttcgcccaatcagggaaagaagggggaaggggccccaatccaggggaaaaaagccgactcagtggccaatcagggcactaaagtggaaggcatcacgaaccagggaaagaaggctgagggctctcccagcgaaggcaagaaagcagagggctcacctaatcaaggcaaaaaggccgatgccgccgcaaaccaaggcaaaaagacagagagcgcaagcgttcaaggtcggaacactgacgtcgcacagtcgcccgaggcccccaaacaggaggcacccgctaagaaaaaatcaggatcaaaaaaaaaaggggagcccggccccccagatgctgatggccccctgtatctcccgtacaaaactcttgtgagcactgtgggcagcatggtatttaatgagggtgaagctcaaagactgatagaaattttgtccgaaaaggccggcatcatccaagatacctggcataaggctacacaaaagggagatcctgtggctatcttgaagcgccagctcgaagaaaaagaaaaactgctggccacagaacaggaggacgccgcagtcgccaaaagcaagctccgagaactcaacaaggaaatggcggcggaaaaggccaaagcagccgcaggagaagccaaggtgaaaaagcagctggttgccagagaacaggagatcactgccgtgcaggctcgtatgcaggcatcttatcgggagcacgtcaaagaggtgcagcagctgcagggcaagattagaaccctgcaggaacaattagaaaatggtcccaatacccagctggcccgcctccagcaggagaactccatcctccgcgatgccctcaatcaggccacaagccaggtggagagtaagcagaatgctgagctggcaaaattacgccaggaactgagtaaggtgagcaaggagctggtggagaaatctgaagccgtgaggcaggacgaacagcaaaggaaggccctggaggctaaggcagcagctttcgagaagcaggtcctgcagctacaggcgtctcacagggaaagcgaggaagccttacagaagagactggatgaggtgtcccgagaactgtgtcacacgcaaagcagccatgcttcattgcgggcagacgcagaaaaagcccaggaacagcagcaacagatggccgaactgcacagcaaacttcagagctccgaagcggaagtacggagtaaatgtgaagagctgtccggtcttcacggtcagctccaggaggcacgggctgagaattcacagcttaccgagagaatccggtcaattgaggccttactggaggctggccaggccagagacgcccaggatgtgcaggccagtcaggccgaagccgaccagcaacaaactcggctcaaagagctggaatctcaggtgagtgggctcgaaaaagaagccattgaacttcgtgaagccgtcgagcagcagaaggttaagaacaatgatctgcgcgaaaagaactggaaggccatggaggccctggccaccgcggagcaagcctgcaaggaaaaactgctgtccctgacccaagcaaaagaggaaagtgagaaacagctgtgcctgatcgaagcgcagactatggaggctctgcttgctttgttgccagagctgagtgtgctggctcagcagaattacacggagtggcttcaggatctcaaggaaaaaggtccgactcttctgaagcatccccctgcccctgcagagccttccagcgaccttgcctccaagttgcgagaagccgaggagactcaatcaactctccaggcggagtgcgaccagtacagaagcattctagccgagacggagggtatgctcagagacctgcagaagtcagtcgaggaggaagagcaggtgtggcgggctaaagtgggtgcagcagaagaagagctgcagaaatctcgggtgaccgttaagcatctcgaggagatcgtcgagaaattaaagggggagcttgagagcagcgaccaagtccgagagcatactagccacctcgaagcagagctggagaagcacatggccgccgcctccgccgagtgccagaactatgccaaagaagtggccggcctaagacaacttctcctagagagtcagtcacagctggatgccgcgaagagtgaggctcaaaaacaatccgacgagctggcactcgtcagacagcagctgtcagaaatgaaaagccatgtcgaagacggggatatcgcaggagcgccggccagcagtccggaggctcctccagcagagcaggaccccgtgcagctcaagacccagctggagtggaccgaggcgatcctcgaggatgagcagacacaacggcagaagttgactgctgaatttgaagaagcacagacgagcgcctgcagattgcaggaagagctcgaaaaattaagaacggccggacccctcgaatcatcagagacggaggaagcatcccagttgaaggaacggctggagaaagaaaagaaacttactagtgacctcggccgagccgctactaggctacaggaacttctgaaaaccacacaagagcaattggccagagaaaaagacactgtgaagaagctccaggaacagttggagaaggccgaggatggaagttcttctaaggaggggactagcgtgtag

SEQ ID NO: 132979 - DNA, 2934 bp, synthetic construct
  misc_feature 1..2934: note = Description of Artificial Sequence: Synthetic coding sequence
  source 1..2934: mol_type = other DNA
atggatatttacgacacacagaccctgggcgtcgtggtgttcggcggatttatggtcgtaagtgcaatcggcattttcctggtctccaccttcagtatgaaagaaacaagctatgaagaggcccttgcaaaccaaagaaaggagatggccaagacgcaccatcagaaagtggagaaaaagaagaaggagaagaccgtggaaaaaaaaggcaagactaagaagaaggaagagaaaccaaatggcaagataccggatcatgaccccgccccgaacgtcactgttctgctgcgcgagcccgtgagagcacctgcagtcgctgttgcccccactcctgtgcagccacctatcatcgtggcgcccgtggctaccgtccccgccatgccccaggagaagctggcgagtagccccaaggataagaagaagaaagagaaaaaagtcgccaaggtggaaccagcggtgtcatcggtggttaattccattcaggtgctcacgtccaaggccgcgattctggagacagcccccaaggagggtagaaataccgacgtggcccagtcccccgaagctcccaaacaggaagccccggctaagaagaaatcaggcagtaagaagaagggcccacctgacgccgacggccccctgtacctaccatataaaactctcgtgtcaacggtgggtagtatggtgtttaacgaaggcgaagcacagcgccttatcgagatcctgagtgagaaagccggtatcatccaggacacttggcataaggccacacagaaaggagatccagtcgccatccttaaacggcaacttgaggagaaagagaaacttctggctactgagcaggaggatgcagcagtggcaaaaagtaagctacgggagttgaataaggaaatggccgccgaaaaagcaaaggccgccgccggagaggccaaagtgaagaagcagctcgtggcgagggagcaggagattaccgctgtgcaagcacgcatgcaggcctcctatcgggagcatgttaaagaggtgcaacaattacagggaaagattcggacccttcaggaacagctagagaacggccccaatacccaactggcaaggcttcagcaggaaaatagcatcctccgtgacgccctgaaccaagccacaagccaggtcgagagtaaacaaaatgctgagttagccaaactacgccaggaactgtctaaagtctcaaaggaattggtcgagaagtcagaggcggtgcggcaggatgaacagcagcgaaaagcactcgaagctaaagcagcagcttttgagaagcaggttcttcagttgcaggcatcccaccgcgaaagtgaggaggctttgcaaaagaggctggatgaggtctcgcgtgaactctgccatacacagtcctcccacgcatctctcagagccgacgccgagaaagcccaggagcaacagcagcagatggcagagctgcatagtaaactgcagtcaagcgaggcggaggtccggtctaagtgtgaggagctgtccgggctacatggtcagttgcaggaagcccgcgccgaaaactctcagctgaccgagaggataagaagtatcgaagctctgctggaagcaggacaggcgcgggacgcacaggacgtgcaggcgtctcaagcggaggcggatcagcaacaaacccgcctgaaagaattagagtcccaagtgagcggactggaaaaggaggcgatcgaacttagggaggcagtagaacagcaaaaagtcaaaaacaatgacctaagggagaagaattggaaggcaatggaggcactcgccaccgccgaacaggcgtgtaaagaaaagctgctgtctctgacccaggcaaaagaagagagcgagaagcagctgtgcctaatcgaggcccaaacgatggaagctcttctcgcactcctgcctgagctgtctgtgcttgctcagcaaaactacacagaatggctccaggatctcaaagagaagggaccaaccctgcttaagcatcctcccgcacctgccgagccaagctctgatttagcctcaaagttgagagaagcggaagagacccaaagcactctgcaggccgagtgcgatcaatataggagtatcctagctgagaccgaggggatgctgagagatctccaaaagagcgtcgaagaggaggagcaggtctggcgggccaaggtaggtgcagccgaagaagagttgcagaaatcaagggttacggtaaagcacctcgaggagatcgtggaaaagctgaagggagaactggagtcctcggaccaggtcagggagcatacttctcatctggaggccgagctggagaagcatatggccgccgcttcagctgaatgccagaattatgccaaggaggtggcaggtctgaggcagctactgctcgaaagccagtcacaactggatgcagcgaaatccgaagcgcagaaacagagtgatgaattggcgctggtcaggcagcagctgtccgagatgaagagtcacgttgaggacggcgatatcgcaggcgcccctgcttcatctcccgaggctccacccgcagagcaggatcccgttcagttaaaaacccagttggaatggacagaggcgatcttggaggatgaacagacccaacgtcagaagctaaccgcagaattcgaagaagcccaaacaagtgcatgccggcttcaggaggagctggagaaattgaggaccgccggcccgttagagtctagcgaaactgaagaagccagtcagctgaaggaaagactcgagaaagagaaaaaattgacttccgacctcggccgcgcggcgactcgcctgcaggagctgctaaagacaacacaagagcagctcgctcgagagaaggacacagtgaaaaaactgcaggaacagttggagaaagccgaggacgggtcttcgagtaaggaggggaccagcgtttag

SEQ ID NO: 132980 - DNA, 2934 bp, synthetic construct
  misc_feature 1..2934: note = Description of Artificial Sequence: Synthetic coding sequence
  source 1..2934: mol_type = other DNA
atggacatttacgatacccaaacactcggggtggtggtattcgggggcttcatggtagtgtccgccatcggtattttcctggtgtcaacgttctctatgaaggaaacttcatacgaagaagccctggccaatcagcggaaggagatggctaaaacccaccaccagaaggtcgagaagaaaaaaaaggaaaagaccgtcgaaaaaaagggtaagaccaaaaaaaaagaggagaagcctaacggcaagatacctgaccacgacccagcccccaacgtgaccgtgctactgcgggagccagtaagggcgccagctgttgccgtggcccctacgcccgtgcagccacctataatcgttgcccccgtggccacagtgcccgccatgccccaagagaagttggcctcctcccccaaggacaagaaaaaaaaagagaaaaaggtggcaaaggttgagcctgccgtgtcaagcgtggttaacagtattcaagtgctcaccagcaaggccgctatccttgagacagctcctaaggaaggaagaaacaccgacgtggcccagagtcctgaggctcccaagcaggaggcacccgctaagaagaagagcggctccaagaaaaaaggaccaccagacgcagatggacccctgtacttgccatacaaaaccctcgtgagcaccgtggggtccatggtgttcaatgagggtgaagctcagcgtctgatcgagatcctgtctgagaaggcgggtatcatccaggatacctggcacaaggccacgcagaagggcgatcccgtagcgatcttgaagaggcagctcgaggagaaagagaagttgctggcgacagaacaggaggatgcagccgttgctaagagtaagttgcgcgaactcaacaaggaaatggcagccgaaaaggctaaagctgccgcaggagaggcaaaggttaaaaaacagctggttgctagggaacaggaaatcaccgcggtgcaggccaggatgcaagcgagttatagagagcatgtgaaggaagtgcaacaacttcaagggaagatccgcactctgcaggaacagctggagaatggtcccaacacccagctggcaaggctccagcaggaaaattccattctacgggatgcgctcaatcaagccacatcccaggtggaatccaagcagaatgccgagctagccaaattaagacaggaactttcaaaggtgtctaaggagcttgtggaaaaatcagaagctgtcaggcaggatgaacaacagcgtaaggctcttgaggctaaggcggccgcgtttgagaagcaggtgctgcagctgcaagcttcacatagagaaagcgaggaggccttgcagaaaaggctggacgaggtctccagagagctgtgtcacactcagagctctcacgcatctctgcgtgcagacgccgagaaagcacaggagcagcagcagcagatggctgagctccatagcaaactacagtccagcgaggcagaagtgcggagtaaatgtgaagaattaagcggacttcatggacagctgcaggaagcgagggccgagaactcgcagcttacagagaggattaggagtatcgaggctcttctggaggctgggcaggcccgtgacgcacaagacgtccaggcctcccaggctgaggctgaccagcaacaaacacgtctaaaagagctggagtcacaagtgtcaggactagaaaaggaagccatcgaactgagagaggcagtcgagcagcagaaagtgaaaaataatgacctcagagagaagaattggaaggctatggaggcccttgccactgccgaacaagcctgtaaagaaaaactgctgtctctcacccaggccaaagaggaatctgagaaacagctgtgcctgatagaagcccagacaatggaggccctcctcgccctgttgcccgaattgtccgtgctggcccagcaaaactatacggaatggttacaggatctgaaagaaaaagggcccaccttgctcaagcatccacccgctccagctgagcctagtagcgatcttgcaagcaaactgcgcgaagccgaggaaacccagtcaactctgcaggccgaatgcgaccagtacaggtcgatcctggctgaaaccgagggcatgcttcgggaccttcagaagtccgtggaggaagaggaacaagtctggcgtgccaaggttggggccgccgaagaggagcttcagaagtccagggtcacggtgaagcatctggaggagatagtagagaaactgaaaggtgagttggagagtagcgaccaggtccgcgagcacacgtcacatctggaggccgagctggaaaaacatatggcagcagcctctgcggaatgtcagaactatgccaaggaagtcgccggcctccgccagttgctgctggagagtcagtcccaactggatgcagctaagtcagaggcacagaaacaatccgatgaactggccttggtaaggcagcagctgtctgagatgaaatcccatgtggaggatggagacatcgcaggggctccggcttcctcgccagaggctccaccagctgagcaggaccccgttcagctcaaaactcagcttgagtggacggaggccatactcgaagacgaacaaactcaaaggcagaagctaacagccgagttcgaggaggcccagacctccgcttgcagactccaggaggagctggaaaaactaagaacagccgggccactggagtcatccgagaccgaagaggcttcacagctaaaggaaagactggagaaggaaaagaagctgacttcagacctgggcagggcggcaacccgcttacaggagctgttaaagacaacccaggaacagctggccagagagaaagacacagttaagaaactgcaagaacagctcgagaaggcagaggacggcagtagctccaaggaagggacgagtgtgtag

SEQ ID NO: 132981 - DNA, 4233 bp, synthetic construct
  misc_feature 1..4233: note = Description of Artificial Sequence: Synthetic coding sequence
  source 1..4233: mol_type = other DNA
atggacatctacgatacccagacactcggagtggtcgtgtttgggggattcatggtggtctcagcaattgggatattcctcgtgagtacgttctctatgaaggagacgtcttacgaggaggctcttgcaaatcagcggaaggagatggctaagacccatcaccaaaaagttgagaaaaaaaaaaaggagaagactgttgaaaaaaaggggaagacaaagaaaaaggaggaaaagccgaacggaaaaatccccgaccacgacccagcccctaatgtgacagttctgctgagagagcccgtgcgggcacccgcagtggccgttgcgccgaccccggtacagcccccgatcatagtggcgcctgtagctactgtgccagccatgcctcaggagaagctggctagttcacccaaagacaaaaagaaaaaggagaaaaaagtcgcaaaagttgaacctgctgtctcgtctgtggtgaactcaatccaggtcctgacaagtaaagctgccattctggaaaccgcccctaaagaagtacctatggtggtggtgcctccagttggggccaagggaaacacacctgctaccggtacaactcaaggcaagaaagcagagggaacacagaaccagtcaaagaaggccgaaggcgcacctaaccaaggccgcaaagcagagggtactcccaaccaaggcaaaaagacggaaggcacacctaaccagggcaagaaagccgagggaacacctaatcagggaaagaaggccgaagggacccccaatcagggcaagaaggctgagggcgctcagaatcagggcaaaaaggtcgatacaacgccaaaccagggcaagaaagtcgagggcgcacctacccaagggcgaaaagcagaaggagctcagaatcaagccaagaaagttgaaggggcgcagaatcaaggcaagaaagctgaaggcgcacaaaatcagggcaaaaaaggagagggcgcacaaaaccaaggtaagaaggctgagggtgcccagaaccagggcaaaaaagccgaaggggctcaaaatcaggggaaaaaggccgaaggggcccagaatcaaggcaagaaagcagagggtgctcagaaccagggcaagaaggctgagggagcccagaatcagggtaagaagtcggagggcgcccaaaatcagggcaaaaaggtagagggagcgcagaaccagggaaagaaagctgaaggcgcccagaaccagggaaaaaaggccgagggagctcagaatcagggaaaaaaggcagaaggtgctcagaaccaggggaagaaggcagaaggcgcacaaaaccaaggcaagaaggccgagggagcgcagaatcagggcaagaaggcggagggtgctcagaaccaggggaagaaagctgaaggcgcacagaaccaggggaagaaagtggaaggtgcgcaaaatcaaggcaaaaaggcagaaggtgcccagaaccaaggcaagaaagcagagggggcccagaatcagggaaagaaggccgaaggtgcgcaaaaccaaggacagaaaggcgagggggcacaaaatcaaggaaagaagactgaaggtgctcaagggaagaaggcggagcgcagccctaatcagggcaagaagggcgaaggagccccgattcaaggtaaaaaggccgatagcgtcgcgaatcagggcactaaggtcgaggggataactaaccagggcaaaaaggctgagggctcaccatctgaaggcaagaaagcggagggaagtcccaaccaggggaaaaaagccgatgcggcagccaatcagggaaagaagacggaaagcgcatcagtccagggacggaataccgatgtagcacagagcccagaagcaccaaaacaggaggcccccgcgaagaagaagtctggctcgaaaaaaaagggagagcccggccccccagatgctgatgggccactgtatctgccctataagacactagtgagtactgtcggaagtatggtattcaacgaaggagaggcgcaacgcctgatcgagattctctccgaaaaggcagggataatccaagatacatggcataaggccacccagaagggggatcctgtggccatcttaaagagacagctcgaggagaaggaaaagctcctggcgaccgagcaggaggacgcagctgtggctaagtctaaactcagagaactgaacaaagagatggctgctgaaaaggccaaggccgcagctggagaggcaaaggtgaaaaagcagcttgttgcacgggagcaagaaattaccgccgtgcaagcaaggatgcaggcatcatatagggaacatgtgaaggaagtgcagcagttgcagggtaaaatccggactttgcaggagcaactcgaaaacggacctaacacgcaacttgctcgactgcagcaggagaactcaatactaagggatgcactgaaccaagctacatcccaggttgagtcaaagcaaaatgctgaactcgccaaattgagacaagaactgtcaaaggtgtccaaggagctggttgagaaatccgaggctgtccggcaggacgaacagcaacgtaaagctctggaagccaaagctgcagcctttgagaagcaagtgcttcagctccaagcttcccatcgcgagtcagaggaagctctccaaaaacgtctggacgaggtaagccgggagctttgccacacacagtcgtctcatgcctctcttcgggcagacgctgagaaagctcaggagcagcaacagcaaatggccgaactgcattcaaaattgcagagtagcgaggcagaggtcaggtctaagtgtgaggagctgtctggacttcacggccagctccaggaggcaagagcggaaaactcacagctgactgaacggatacggtctattgaggctttgctggaagctgggcaagcgcgggacgcccaggacgtgcaggccagccaggcagaggccgatcagcaacagacacggctcaaggagcttgagagtcaggtctcaggactggaaaaggaggcgatcgagctccgagaagcagtggaacaacagaaggtcaaaaataacgatcttcgagagaagaattggaaggccatggaagccctcgcgacggctgagcaggcctgtaaggagaaacttctgagcctaacccaagccaaggaggaatctgagaaacagttgtgcctgatcgaggcgcagaccatggaggccttactggcactccttccagaactctctgtgcttgcacaacaaaattataccgagtggcttcaggacctgaaagagaaaggacctaccttgttgaagcacccaccggcacccgctgagcccagttctgatctcgccagcaaactgcgggaggctgaggagactcagtctactctgcaggccgaatgtgaccagtaccggagtattctcgccgagaccgaaggcatgctcagggaccttcagaagagtgtcgaggaagaagagcaggtgtggcgggcgaaggtcggagccgctgaggaagagttgcagaagtcccgtgtgacagtgaaacacttagaagagatcgtcgagaaattgaagggcgagttggaatcgtctgaccaggtgcgggagcacacctcacatctcgaagccgagctggaaaaacacatggctgcagctagcgccgagtgtcaaaactatgctaaagaggttgccgggttgcgccagctgctgctagagagtcaatctcagctggatgccgcaaagtccgaggcacaaaagcagagcgatgaactggcgcttgtgaggcagcagctgtcagagatgaagtcccacgtggaggacggcgacatagccggagctcccgcatcttcccctgaggccccacccgccgagcaggatcctgtgcagcttaagacgcagttggagtggaccgaggcgattctcgaagacgagcagacgcaacgacagaaactgactgccgagtttgaagaggctcagacaagcgcgtgccggcttcaggaggaactcgagaagcttcgaaccgctggccccctggaaagctccgaaacggaggaagcttctcagctgaaggagcgactggagaaagaaaaaaaactcacctctgatctgggaagagccgctacgaggctccaggagctgttaaagactacccaggagcagttggcccgagagaaggatactgtgaaaaagctgcaagaacagctggaaaaggctgaggatggttcgtcgtccaaggagggcactagcgtgtag

SEQ ID NO: 132982 - DNA, 903 bp, synthetic construct
  misc_feature 1..903: note = Description of Artificial Sequence: Synthetic coding sequence
  source 1..903: mol_type = other DNA
atggacatctacgatacccagaccctgggtgtggtagtttttggcggcttcatggttgtgtcagccatcggtatcttcctggtgtctacgtttagcatgaaggagacttcttacgaggaagctctagccaatcaaaggaaggagatggctaagacccaccaccagaaggttgagaaaaaaaaaaaggaaaaaaccgtagagaaaaagggcaaaactaaaaagaaggaagagaagccaaacgggaaaattcctgatcacgaccccgcccctaacgttactgtcttgctccgagaaccggtgagggcccccgcagtggcggtggcccccacccccgtgcaacctcccatcatcgtggcccctgtggctacagtgccagctatgccacaggagaagctagcctcctcacctaaagacaagaaaaagaaagagaaaaaagtagccaaggtcgaaccagccgttagcagtgttgtgaatagcatccaggtgcttacgtctaaggcagcaattctcgagaccgcgccaaaggaggtacccatggtagtcgtgccccctgtgggtgccaagggaaatacacccgccaccgggactactcaaggaaaaaaagctgaaggcacacagaaccagtccaaaaaggccgagggagctcccaatcaggggcgcaaagccgaaggaactccgaaccagggtaaaaagacagagggaacacctaatcagggaaaaaaagccgaggggactccaaaccaaggaaagaaggccgagggcactccaaaccagggaaaaaaagccgagggcgcccagaaccaaggcaagaaggtcgacacgaccccaaatcaagggaagaaggtggagggcgcccccacacagggaaggaaggcagaaggagcccagaaccaagccaaatag

SEQ ID NO: 132983 - DNA, 2256 bp, synthetic construct
  misc_feature 1..2256: note = Description of Artificial Sequence: Synthetic coding sequence
  source 1..2256: mol_type = other DNA
atggtctttaacgaaggcgaagcccagagactgatagagatactgagcgagaaggccggaattattcaggatacatggcataaagccacccagaagggggaccctgtggcaattctgaagaggcagctcgaggagaaggagaaactcctcgctacagagcaagaggatgctgccgtcgcaaaatcaaagctgagggagctgaacaaggagatggcagccgaaaaggccaaggccgccgctggtgaggcaaaagtcaaaaaacagctggttgcacgcgagcaggagattactgctgtccaggctagaatgcaggcttcttacagggaacacgtgaaagaggttcagcagcttcagggtaaaattcggacactacaagaacagcttgaaaatggccctaacacacagttggcgcgcctgcagcaggaaaattctattctgagggatgccctcaaccaggctacaagccaagtcgaatccaaacaaaatgccgaactcgctaagctgcgtcaggagcttagcaaagtgagtaaagaactggtagagaagtccgaggcagttcgacaagacgagcagcagcgcaaggccctggaggcaaaggcggctgcgtttgagaaacaggtcctgcagctccaggcatctcatcgtgaatccgaagaagcattgcaaaaacggctcgatgaggtgtcacgagaactgtgccacacccagtccagtcacgcatctctgagagccgacgccgagaaagctcaggagcagcagcagcaaatggcggaactgcacagcaaactccagtcgagcgaggcagaggtacgctccaagtgcgaggagctctctggtttgcacggacaactgcaggaggctcgggctgaaaacagccagctaactgagagaatccggtccattgaggctcttttggaggccggccaggcccgtgacgctcaggatgtacaggcgtctcaggcagaggccgaccagcagcaaactaggcttaaagaactggagagtcaagtgtcagggctcgagaaggaagccatcgaactcagagaggccgtggaacagcagaaggtgaagaataacgacctgcgcgagaaaaactggaaggccatggaggctttagctactgcagaacaggcctgtaaggagaagttgctctctctgacccaagccaaggaggaatcagaaaagcagttatgcttgatcgaggcccagacaatggaagcactcctggcactcttgcctgagttatctgtcctggcacagcagaattatacggagtggttgcaagatttgaaggaaaaggggccaactctcctgaaacatccacccgccccagctgagccatcttccgatctcgcctctaagcttagggaagccgaagagactcagagcaccctgcaggcagaatgcgatcaatatcgctccatcctggccgagaccgaaggcatgttgcgggatctccagaagtcagtggaggaggaggagcaggtgtggcgagcaaaagtgggcgccgccgaggaggagcttcagaaatctcgtgttacagtcaagcatctggaggaaattgtcgaaaaattgaagggggagctggaatcttcagatcaggtcagggagcacacttcacacctggaggcggagctggagaagcatatggctgccgcgagtgccgagtgccaaaattatgcgaaggaggtggccggtctcagacaactcctactcgagtctcagtctcaactggatgccgctaaatctgaggctcagaagcagagtgatgaactggctcttgtccggcagcagctttccgagatgaaatcccacgtggaagacggcgacatcgcaggagccccagcgagctcccccgaagcaccccctgctgagcaggatcctgtccagctgaaaacccagctggagtggactgaggccatcctggaagacgagcaaacccaacgccaaaaactaacggctgaattcgaggaggcccagactagcgcttgccggctgcaggaggagcttgagaagcttcgaaccgccggcccgctcgaatcaagtgaaaccgaagaggcctcacagctcaaggaacgccttgagaaagaaaaaaaactaacctcggacctcggaagggctgcaaccagactccaggagctcctgaaaactacacaggagcaattggccagggagaaggataccgtgaaaaaattgcaggagcagctggagaaagccgaagatggatcttcaagcaaggaggggacatcagtgtag

SEQ ID NO: 132984 - DNA, 663 bp, synthetic construct
  misc_feature 1..663: note = Description of Artificial Sequence: Synthetic coding sequence
  source 1..663: mol_type = other DNA
atggcttccgggtgtaagatcggccccagcatccttaactcggacctggcaaatctcggcgcagagtgcctcagaatgctcgacagtggcgcagactatctccacctggacgtgatggacggctatatgcacatgatggtttcaaaacccgagcagtgggtgaaacccatggcagtggcaggggcgaatcaatacacctttcatctggaagctaccgagaaccccggcgctctgattaaagatatcagagaaaatggaatgaaaagttgctctgtcacgcaagctgaggtccagtggcactcccagggccccctacaggtcggattagcaattaagccaggcacctccgtggaatacttagcaccgtgggcaaatcaaatcgatatggcgttggtcatgactgtagagcctggcttcggagggcaaaaattcatggaagacatgatgcccaaagtgcattggttaaggacccaattccctagcctggacatcgaggtagatgggggcgtggggcccgataccgtgcacaagtgtgctgaagctggcgctaacatgattgtatcagggtccgcgattatgaggtccgaggatccaagatccgtcatcaacctgctgaggaatgtctgctccgaggccgctcaaaaacgttcactggatcggtag

SEQ ID NO: 132985 - DNA, 687 bp, synthetic construct
  misc_feature 1..687: note = Description of Artificial Sequence: Synthetic coding sequence
  source 1..687: mol_type = other DNA
atggccagtggctgcaaaataggaccctccatcttgaattcagatctggctaatctgggggccgaatgtctgagaatgctggattcaggggcggactacttgcacctggacgttatggatgggcattttgtgcccaatataacatttggtcacccagtggtcgagtcattgcgtaagcagctgggccaggaccctttttttgatatgcacatgatggtatccaaacccgagcagtgggtcaagccaatggctgtggctggcgctaatcagtacacttttcatcttgaggccaccgaaaaccctggcgcgctgattaaagacatccgagagaacggtatgaaggtgggccttgcgatcaagcccggcacctcagttgagtatctcgccccgtgggctaatcagatcgacatggctctggtgatgaccgtggagccgggctttgggggtcaaaagtttatggaggacatgatgcctaaagtgcactggctccgcacccagtttccaagtctggatatagaggttgatggaggcgtgggcccagacactgtgcacaaatgcgcagaagccggcgccaacatgattgtgtcaggatctgccatcatgcgctcagaagatccgcgctccgtcatcaacctgttacgcaacgtgtgttctgaagccgcgcagaagcgctctctggacagatag

SEQ ID NO: 132986 - DNA, 537 bp, synthetic construct
  misc_feature 1..537: note = Description of Artificial Sequence: Synthetic coding sequence
  source 1..537: mol_type = other DNA
atgcacatgatggtttctaaaccggagcagtgggtgaagccaatggccgtggctggggcaaatcaatacacttttcatctcgaggcgacggagaatcctggagccctgatcaaagacattcgagagaacggcatgaaatcttgtagtgtcacccaggcggaagtccaatggcactcacaggggcccctccaggttggattggctatcaagcctggcacctcagtggagtatttggctccctgggccaaccagatcgatatggctctggtgatgactgtggaacccggtttcggcgggcaaaagttcatggaggacatgatgccaaaagttcactggttgaggacccagttcccttctctagatatcgaggtagatgggggtgttgggcctgacacagttcacaaatgcgcggaagccggagcaaatatgattgttagtggttctgctattatgagaagcgaggacccccgttcggttatcaacctcctcagaaacgtctgcagcgaggctgcccaaaagaggtcactggaccgctag

SEQ ID NO: 132987 - DNA, 537 bp, synthetic construct
  misc_feature 1..537: note = Description of Artificial Sequence: Synthetic coding sequence
  source 1..537: mol_type = other DNA
atgcacatgatggtatcaaaacctgagcaatgggtcaagccaatggcagtggctggggctaatcagtacaccttccacttggaagcgactgagaatccaggtgcacttattaaagatataagggagaacggcatgaaatcttgtagcgttacacaggctgaggtccagtggcactcccaaggaccacttcaagttgggctcgcaatcaagcccggaacatccgttgagtatttggcgccgtgggccaatcaaatagatatggccctggtcatgacagtcgagccagggtttggcgggcagaaattcatggaggacatgatgccaaaggtacactggctgaggacccagtttccgagtttggacatcgaagtagacggaggcgtgggacccgacactgttcacaagtgcgccgaggctggcgccaacatgatcgtttccggctccgcaatcatgaggagcgaggatccccgaagtgtgataaacttgctccgcaacgtctgtagcgaggcagcacagaagagatctctggatcgatag

SEQ ID NO: 132988 - DNA, 285 bp, synthetic construct
  misc_feature 1..285: note = Description of Artificial Sequence: Synthetic coding sequence
  source 1..285: mol_type = other DNA
atgcacatgatggtttccaaacctgaacaatgggtcaaaccaatggcagtcgccggtgctaatcagtatacgtttcacctggaggccaccgaaaacccgggcgccttgatcaaggacatacgcgaaaacggaatgaagagttgctctgtgacgcaagctgaggtgcaatggcacagccagggtccgctccaggtgggattggcaataaagcctggcacctcagtggaatacctggctccatgggctaaccagatcgatatggcactggtcatgacagtggagtag

SEQ ID NO: 132989 - DNA, 537 bp, synthetic construct
  misc_feature 1..537: note = Description of Artificial Sequence: Synthetic coding sequence
  source 1..537: mol_type = other DNA
atgcatatgatggtttccaaaccggagcagtgggtaaagccaatggctgtggccggtgctaaccagtacacatttcatctggaagcgaccgaaaatcctggagcactaataaaagatataagggaaaacggaatgaaaagttgcagcgtgactcaggcggaggtccagtggcacagtcagggcccacttcaggtgggcctggcgataaagccgggaacatccgttgaatatcttgcgccctgggcaaaccagattgatatggctctagtaatgaccgttgagcccgggtttgggggacaaaagtttatggaggacatgatgccaaaagtccattggctacggactcaatttcccagtctggacatcgaggtggatggtggggtggggcccgacactgtacataaatgtgcagaggccggtgcaaacatgattgtatccggaagtgctatcatgaggtccgaagatccgaggtccgttattaacctgctgcggaacgtatgtagcgaagctgcccagaagcggtctctggacaggtag

SEQ ID NO: 132990 - DNA, 600 bp, synthetic construct
  misc_feature 1..600: note = Description of Artificial Sequence: Synthetic coding sequence
  source 1..600: mol_type = other DNA
atggcttctggatgcaaaattggaccgtctatactcaacagtgacttggctaatctaggagccgagtgccttcgaatgcttgattcaggcgccgactatcttcatctcgatgtgatggacggccactttgtgcccaacatcactttcggacacccagtggttgaatccctgaggaagcaactgggccaagatccatttttcgatatgcatatgatggtgagtaaaccggagcagtgggtgaagccgatggccgtggccggagccaaccagtacaccttccatctggaagcaactgagaacccaggggctctcataaaagatattagggaaaacgggatgaaggtgggactggcaatcaaacctgggacctcagtagaatatctggccccctgggcaaatcagatcgatatggcgctcgtaatgaccgtggagccaggctttgggggacaaaaattcatggaggatatgatgcctaaggcaggcgcaaatatgattgtgagcggtagcgccatcatgaggtctgaagatcccaggtcagttataaatctactgaggaatgtctgctcagaggccgcccagaaacgatctttggaccgttag

SEQ ID NO: 132991 - DNA, 3159 bp, synthetic construct
  misc_feature 1..3159: note = Description of Artificial Sequence: Synthetic coding sequence
  source 1..3159: mol_type = other DNA
atgcgagaggccgcagaacggagacaacagctgcagttggagcacgaccaagccctggccgtgctctctgccaagcagcaggaaatcgacttactacagaagtcaaaagtccgcgagctagaggaaaaatgtcgcactcagtctgagcagttcaacctgttgtcccgtgacttggagaagttccgccagcatgctggcaaaatcgatttgctgggcggctcagccgttgctccactcgatatcagcacagccccaagcaagccatttccccagttcatgaatggtctggctaccagtctgggaaaaggacaggagtccgcaataggcggaagcagcgctatcggtgaatacattcggccactccctcaaccaggagacagaccagaacccttatcagccaagccaaccttcttgagccgctctggtagtgctcgctgtcggtcggagtccgacatggagaatgaacgcaatagtaacacatctaagcagagatattcgggaaaggtacacctttgcgtagcccgttattcttataatcccttcgacggccccaacgagaatcctgaagccgagctccctttgaccgccggtaaatacctgtatgtgtatggtgatatggacgaagatgggttctacgagggagaactgctggatggacaacggggcctcgtcccctcaaactttgtggattttgtacaggataacgaatctcgactagcttccacactgggtaacgaacaagatcaaaattttataaaccacagtgggattgggcttgagggtgaacatatattagacctgcacagtccaacgcacatcgatgcaggtattactgataattccgcaggcactttagacgtgaacatcgatgatattggcgaagacatagttccataccctcgtaagatcacactaatcaagcagctggcgaagagcgtcattgttggctgggagccaccggctgtccccccaggctgggggactgtgtcctcttataatgtgctggtcgataaggaaacgcgtatgaacctaacactcggatctcgaacgaaagccttgatcgagaaattgaacatggctgcgtgcacgtatcgtattagcgtacagtgtgttacctcaagggggtcgtcggacgaactgcagtgtacacttctcgtgggcaaggacgtcgtggtcgccccatcccacctcagagtggataacatcacccagatctccgcccaactcagctggctccctacgaattcaaactatagccatgttatttttctaaatgaggaggagttcgatatcgtgaaggccgccaggtacaaatatcagttttttaatctgcgacccaacatggcgtacaaggtgaaggtgctggctaagcctcaccagatgccctggcagctgcccctagagcaacgtgagaagaaggaggcgtttgtcgaattcagtacgctaccagccggtcctcccgctcctcctcaggatgtgacagttcaggccggagttactccggctacaataagagtttcatggcgccctcccgtgctaactccaacgggattgagcaatggcgccaatgtgactggctatggagtctatgcaaaagggcagagggtggcggaagtcatctttcccactgctgactccaccgcagtggaactagttcggcttcgcagcctggaggcaaagggtgttacagtgagaaccctgtctgctcagggcgaatctgtcgatagcgcagtggccgctgtgcctcctgagctactggtcccacccacacctcacccacggcccgccccacaaagtaaacccctggcctcttctggggtacccgaaacaaaggatgagcacctgggcccccatgctcgtatggatgaagcctgggagcagtcccgcgcccccggccctgtgcacggacacatgcttgaaccccccgtagggcctggaagaagatccccttcgcctagccgcatcctgcctcaaccacagggaactccagtgtccactacagtagccaaggcaatggcaagggaggccgcccagcgagtcgccgagagcagccggcttgaaaagaggagcgtgtttctggaacgctcaagcgctgggcagtacgccgcttcagacgaggaggacgcatacgatagtcccgactttaaaaggagaggtgcctcagtcgatgatttcttgaaaggaagtgagttgggaaaacagccgcactgctgtcacggggacgaatatcacactgagtctagtaggggcagcgatctatctgatatcatggaggaggatgaggaggaactgtattccgaaatgcagttggaggacggaggacggaggcggcccagcggaacaagccataatgccttgaaaattctgggcaacccagcctccgcaggacgagtcgaccacatgggacgacgctttcccaggggaagcgctggtccacagagatccaggccagtgacagtgccctcgatcgacgattacggccgggatcggctaagcccggatttttacgaggagtccgagacggaccccggcgccgaagagctcccagcccgtattttcgtcgccttattcgattatgaccccctaaccatgagtcccaacccagatgcggctgaggaagagctgccttttaaagagggacagatcataaaagtatatggagataaagacgcagacggcttttatagaggggaaacatgcgctaggctcggcctgatcccttgcaacatggtgtcggaaattcaagctgacgacgaggaaatgatggatcagctgctgagacaaggcttcctgccccttaatacgcccgttgagaagatcgagagaagtcgaagaagcggaagaagacattctgtatctacacgccggatggtggcactctacgactatgatccgcgggagtccagtccgaacgtcgacgtagaggcagagctaacgttttgcacaggagacattatcacggttttcggagaaattgacgaagatgggttctactacggcgagctgaacggccagaaagggcttgttccgagtaatttcctcgaagaggtccccgacgacgtagaggtttacttgtctgacgctccttctcactattcacaggacaccccaatgcggtcaaaagccaagagaaaaaaatccgtccacttcactccgtag

SEQ ID NO: 132992 - DNA, 1938 bp, synthetic construct
  misc_feature 1..1938: note = Description of Artificial Sequence: Synthetic coding sequence
  source 1..1938: mol_type = other DNA
atgaacgggttagcaaccagtcttgggaagggccaagagagcgcaattggggggtcatctgccatcggagagtacattcggcctctgccccagcccggggacaggcccgagccccttagcgccaagccaacctttttgagcaggtcgggatcggcaagatgcaggtcagagtctgacatggaaaacgaaagaaacagcaacacatcgaaacagcgctactctggcaaagtgcatttgtgtgttgccagatactcctacaatcctttcgacggccccaatgagaatccagaagcagagcttccccttaccgcgggtaagtacttgtatgtatatggtgacatggacgaggatggcttctacgagggagaactgctggatggccagcggggtctggtgccttctaattttgtggacttcgtgcaggataacgaaagcagactagcctctactttaggaaatgagcaggaccaaaatttcattaatcattcaggtatcggtctggaaggggagcatattttggacctgcacagcccaacacacatcgacgctggaatcaccgataactccgctggtaccctcgacgtcaacatcgatgatatcggagaggatatcgtaccctacccccgcaagattactttgatcaagcaattagccaaaagtgtcattgttggctgggagccccctgccgtgcccccgggttggggaacagtaagttcctacaacgtcctcgtggacaaggagacccgaatgaatctcaccctgggaagtcgcacaaaggcactgatcgaaaaactgaatatggcagcctgtacctatcgcatctcagtgcagtgtgtaacaagccggggcagtagtgacgagttacagtgcacactgcttgtaggcaaggacgtcgtggtggccccaagccatttacgggtagataatataacccagatttctgcccagttaagttggctgcccactaattcaaactattctcacgtaatctttctgaatgaagaagagttcgacatcgttaaggccgctaggtataagtaccagtttttcaatctacgccctaacatggcctataaagtgaaggtgctcgcgaagccccaccagatgccttggcagctccccctcgaacagagggagaaaaaggaagcctttgtggaattttcaacactccctgcgggaccaccagctccgccgcaagatgtaactgtgcaggccggagtgactccagccacaattagggtaagctggaggcctcccgttctgactccaaccggtctctcaaacggtgcgaacgtgacgggttacggagtgtatgcgaagggccagcgcgtggcagaggtgatcttcccaacagcagactcaactgctgtcgagctggtgcgcctgcgatcattagaggcaaagggagtgaccgtgagaaccttatccgctcagggtgagtctgtggactccgcagttgcggctgtgcctcctgagcttttggtcccacccacgcctcaccctcgtcccgcgccccagtccaaaccactcgcttccagcggagtgcccgaaactaaggatgaacacctggggccacatgctagaatggacgaagcttgggagcaaagccgagctcctggcccggtccatggccacatgctggagcctccggtgggacctggccgccggtccccgtccccctcccggatcctgccccaaccacagggcacaccagtgtcgacaactgtggccaaggcgatggccagagaagccgctcagcgcgtggctgaaagcagtcgtctagagaagcgttctgtgtttttagagagatcctcagccggccagtacgcagcttcggacgaagaagacgcttatgatagccctgattttaagagacggggcgcttccgttgatgatttcctgaaaggttccgagcttggaaagcagatggcctcttag

SEQ ID NO: 132993 - DNA, 1938 bp, synthetic construct
  misc_feature 1..1938: note = Description of Artificial Sequence: Synthetic coding sequence
  source 1..1938: mol_type = other DNA
atgaatggattagcaacatcactgggtaaaggccaggaaagcgcaatcggggggagttcagccataggagaatacattcgcccactacctcagcctggagaccgaccagagcctctcagcgctaaacctacattcctatcaagatccgggagcgcacggtgccgctccgagtccgacatggaaaacgagcggaactccaacacctcaaaacagcggtacagcgggaaagtgcatttgtgcgtggcccgctatagctacaatcccttcgacggccctaacgagaaccctgaagccgaactgccactgactgccggaaagtacctgtacgtgtacggggatatggatgaggatgggttctacgagggagaacttctcgacggacagagaggacttgttcccagtaatttcgtggacttcgttcaggacaacgagagccgcctcgcctcgacgttgggcaacgaacaggatcagaatttcatcaaccatagcgggattggactcgagggagagcatattctcgatctgcattcacccacacacattgacgccgggatcacagacaactctgccggcacattagacgtcaatatagacgatatcggggaagacatcgtgccatatccgaggaaaattactcttataaaacaactggccaagtcagtgatcgtggggtgggagccacctgccgttccacctggatggggtactgtgagctcgtacaacgttctggtagacaaagagacacgaatgaaccttactctgggtagcaggaccaaagccctaattgaaaagcttaacatggcagcttgtacctacagaatctcggtccagtgcgtgaccagtagaggttcaagcgatgaactgcaatgcaccttactcgtgggcaaagatgttgtcgttgccccatcccacctgcgggtagataatatcacccagatctctgcccagctatcctggttgcctacaaattctaattattctcatgtcatcttcttaaacgaggaagagttcgacatcgtgaaagctgcacgctacaaatatcagttttttaacctcaggcctaacatggcttacaaagtgaaggttttggctaaaccacatcaaatgccatggcagttgcccctggagcagcgggaaaaaaaagaggcttttgtggagttctctactttgccagctggtccacccgcccctcctcaggacgtcaccgttcaggcgggggttacacccgccaccatacgagtctcctggagacctcctgttctgacccccaccggcctgagcaacggcgccaacgtgaccggctatggcgtgtacgccaaaggccagcgtgtggcagaggttatctttccaactgcagatagtacagccgttgagcttgtgaggctgagaagcttggaagccaagggcgtgactgtgcggaccctttctgctcagggcgaatccgtcgacagcgcagtcgctgccgtgcctcctgaactcctggtcccacccacccctcatccaaggcccgccccccagtcaaaacccctggcgtcctccggcgtgcctgagacaaaggacgaacacttgggacctcacgcacgcatggacgaagcctgggagcagtcgagagcgccggggccagtgcacgggcacatgttggagcccccagtggggccaggccgccggtctcccagtccaagcagaatcctgccccagccccaggggactcctgtgtccacaactgtggccaaggcaatggcccgagaagccgcccagcgggttgcagagtcttcgcgtctggagaagagaagcgtattcctcgaaaggtcgtccgccgggcagtacgcagcaagcgacgaagaggacgcgtatgacagtcctgacttcaaaagacggggcgccagtgtggacgactttctaaaaggttcagaattgggaaagcagatggtgagctag

SEQ ID NO: 132994 - DNA, 4638 bp, synthetic construct
  misc_feature 1..4638: note = Description of Artificial Sequence: Synthetic coding sequence
  source 1..4638: mol_type = other DNA
atgcagcgagagagggaagccgagattcgccaactccttagatggaaggaagccgagcagcgccagttgcagcagctcctgcatcgggaacgagatggcgtggtccgccaggctcgcgagctgcagcggcaacttgccgaggaactcgtgaaccgtggacactgctcccggcccggcgcttcagaagtttcggccgcacagtgcagatgtaggttacaagaggtcctcgcgcagctgcggtggcagaccgacggggagcaggccgcccgcatccgctacctgcaagcagctctcgaagtcgagcgacaactcttcctgaaatacatacttgctcattttcgtggccatcccgcactcagtgggtcgcctgaccctcaagcagtccactccttagaagagccattgccccagacttcttctggaagttgtcacgctcctaagccggcttgccagctggggagcctcgactccctgagtgcagaggttggtgttaggtcaagatctctcggcttggtgtccagcgcctgctcatcttcaccagacggcttgctaagcacacatgcttcctcccttgactgcttcgcaccagcatgttcacgaagcctggacagtactcgcagcttgccaaaagctagcaaaagcgaagagagacccagcagtcccgatacgtctactcctggctcacggcggctatctcccccaccatctcctttgccccctccgccgccgccttcagcccaccgtaagctcagcaaccctcgggggggagaggggtccgagtcccaaccctgtgaagtgttaacaccaagtccccccggactgggccatcacgagctcatcaagctgaactggctgctggccaaagctctgtgggttcttgcccgccgctgttacacgttacaggcagaaaataaacagctccgccgagccggatgtccttatcaggcagatgagaaagtaaagagactgaaagtaaagagggctgagctcacaggactcgccaggcggctggccgatcgagcccgaaagctgcaggagacgaacctccgagcagtgagtgctccaatccccggtgaaagctgtgcgggcttggaactctgtcaggtgttcgcaagacagcgcgctagagatctgagcgagcaagcgtccgcccctctcgccaaggataagcagatcgaggagttaagacaggaatgtcacctgctgcaagctcgcgtggccagtggcccctgctctgaccttcacacaggccgaggtggaccctgcacccagtggcttaatgtgagagacctcgaccgcttgcagcgcgagtcccaaagggaagtgctgaggcttcaacgacaactgatgctgcagcaaggcaacgggggtgcctggcccgaggcgggggggcagtctgctacctgtgaggaagtgcgccgccaaatgctggctctggaaagagagctggaccagaggcggcgcgaatgtcaagaactgggcgcccaagccgctcccgctagaagaagaggggaagaggctgaaactcagctgcaagcggctctactcaaaaacgcttggctggccgaggagaacggcaggcttcaggccaaaaccgactgggtacggaaggtcgaggcggagaactctgaggtcagggggcacttgggacgagcgtgccaggagagagatgccagtggactgatagcggagcagcttctgcagcaagcagcgagaggacaggataggcagcagcagcttcagagggatccgcagaaggcattgtgtgacctacaccccagctggaaggagattcaagcgctgcagtgccggccagggcacccgcctgagcagccctgggaaacttcccagatgccggaatctcaggtgaaaggaagcagaagacccaaatttcacgcccgaccagaagattacgctgtgtcccagccaaaccgtgatatccaggaaaagagggaggcctcactcgaagagtccccagttgccttgggcgagtctgcttctgtgccccaggtgagtgagaccgtgcccgcgagtcagccgctgtccaagaaaacttctagtcagtccaactcctctagcgagggatcaatgtgggccaccgttccttcaagcccaaccttagatagagacacagccagtgaagtggacgacttggagcctgactctgtaagcctggccctggaaatgggcgggagcgcagccccggctgcaccaaagctcaaaatctttatggctcagtataattacaacccattcgaaggacccaacgaccaccctgagggcgaattacccctgactgccggagattacatctacatttttggcgatatggatgaagatgggttttacgagggagaactcgaggacggtagacggggcctggtgccttccaatttcgtggagcagatacccgacagttatatccctggttgtttgcctgccaaatctcctgacctcgggccctcacagctccccgctggccaggacgaagcccttgaggaagactccctcctgagcgggaaagctcagggagtcgttgaccgcgggttatgtcagatggtacgtgttgggtcaaaaacagaggtggcaactgagatcttggacacaaagactgaagcatgccaattgggactgctgcagtccatggggaagcaaggtctgtcaaggcctctgttgggcaccaaaggcgttcttagaatggcccctatgcagctacacctccagaacgtcacagccacctcagccaacattacttgggtgtactccagtcaccggcacccacatgttgtgtatctcgacgaccgggagcatgcacttacgccagcgggtgtgtcctgctacacattccagggtctttgtcctgggacccattaccgtgcccgggtagaagtccggctccccagagatcttctccaagtgtattggggtacaatgagcagtaccgtgacatttgatacgttgcttgccggaccgccgtatccccccttggatgtcttggtggagaggcatgcttctcccggtgtattagtggtttcatggctaccggtaactatcgactctgcaggatcctctaatggagtgcaggtgaccggctacgcggtgtatgccgacgggcttaaagtctgcgaggttgcagatgccaccgctggttccaccttgctagagttctcccaactacaggtgcctctcacttggcagaaagtgtctgtcagaaccatgtcactgtgcggcgaatctctcgattccgtcccagcacagattcccgaggatttcttcatgtgtcatagatggcctgaaaccccacctttctcttatacttgtggagatccctccacttacagggttacctttcctgtgtgtcctcaaaagttaagtctggcgcccccgtccgccaaagctagcccacacaatcctggcagttgcggcgaacctcaagccaagttcctggaggccttcttcgaagagccccctaggagacagtcacctgtgtccaatctagggtcagagggggagtgtcccagtagcggtgccgggagtcaggcgcaagagttggcggaggcctgggaaggatgcagaaaagacctcctgtttcagaagagcccacagaaccatcggccacctagcgtatccgaccaaccaggagaaaaagaaaactgctctcagcatatgggcacaagcaagtccccagctccggggttcattcacctacgcacagaatgcgggccccgcaaggaaccatgccaggaaaaagctgctttggaacgtgtactcaggcagaagcaggatgctcagggcttcacgccaccccagctgggcgcctctcagcagtacgctagcgattttcacaatgtgctgaaagaggagcaagaggcactgtgtctcgacctgtggggaactgaaaggcgggaggagaggagagaacccgaaccccattcccggcagggacaggctctaggggttaaacgggggtgccaactccacgagccgtcttctgctctgtgccccgccccttccgccaaggtcattaagatgcccagaggcggcccacagcaactgggaacaggcgctaatactccagcccgagtctttgtggccttaagcgattataatcctctcgtgatgtctgctaacctgaaggcagcggaagaggagctggtgttccagaaacgacagctgttgcgtgtatggggctctcaggatacacacgacttttacctgtcagagtgcaatagacaggtgggaaacatacccgggcgactggtggcagaaatggaggttggaaccgaacagactgataggcggtggaggtctcctgcccagggcaatctacccagcgtagcacacctggaagactttcaaggcctgactattccccagggctccagcctggtgttgcaaggaaactcaaagcggttgccattatggacgcctaaaattatgatcgctgccttggactatgatcctggggacgggcaaatgggaggacaggggaaaggaaggctggcccttcgggcaggcgatgtggtgatggtctatgggcctatggatgaccaggggttctattacggggaactgggcggtcacagaggcctggtcccagcccacctgttagatcatatgtcactgcacggccactag

SEQ ID NO: 132995 - DNA, 4920 bp, synthetic construct
  misc_feature 1..4920: note = Description of Artificial Sequence: Synthetic coding sequence
  source 1..4920: mol_type = other DNA
atggctaaagatagcccaagccccttgggagcttcacccaagaaaccagggtgttcctctcccgccgctgccgtgcttgaaaaccagcgaagagaactcgagaagctccgagccgagctcgaggccgagagggctggatggcgcgccgaacggagacgattcgctgccagggaaagacagctaagggaagaggccgagagagaaaggaggcagcttgccgaccgcctcagaagcaagtgggaggcccagcgaagccgggagctgagacagttacaggaggaaatgcagcgggaacgcgaggcagagatccgtcagcttctgcgatggaaggaagcagagcagcgccagctccaacagctgctgcatcgggaaagggacggggtagtgcgccaggcaagggagttacagcgtcagttggccgaggagttggttaaccgcggacactgctcaaggccaggggccagcgaggtgtccgccgcgcaatgccggtgcaggcttcaggaggtcctggctcagctgcgttggcagacagatggcgaacaggccgctcgcattaggtatctgcaggctgctttggaagtggagcgccagttgttcctgaagtatatcctggctcactttcggggccatcccgccctcagtgggagtcccgacccccaggccgtgcattccttagaagagcccctcccacaaacttcttcagggagctgtcacgcccctaaacccgcctgccagctcgggagcctggacagcctctccgcagaggtgggcgtgcgttctcggtctctagggcttgtatcttctgcgtgcagttcctctcctgacggcctgctttctacacatgcctcttctctcgactgtttcgccccggcttgctccagatctcttgactcaacacgctccctgccaaaagcgtctaaatccgaggaaagacctagcagccctgacacatccacacctgggagccggagactgtcgccaccgccgtcgcccctgccgcccccgcctccaccctccgcccatcgtaagttatccaatcccaggggtggagagggctcggagtctcagccgtgtgaagtgctgaccccctcaccccctggactgggacaccatgagcttataaaactcaactggcttctggcaaaagccctgtgggtgcttgctaggaggtgttacacactgcaggccgagaacaagcagctgcgtagagccggctgtccataccaggcagatgagaaggtgaaacggttaaaggtgaaacgcgcagaactgactggtcttgcccggcgcctggctgaccgagccagaaaactgcaggagacaaatcttcgggccgtttcggcccccattcctggtgagagctgtgcagggctggaactgtgccaggttttcgccaggcagagagctagggaccttagcgaacaggcaagcgcccctctcgccaaggacaagcagatcgaagagttgagacaggagtgtcatttactgcaagcacgtgtcgcatccggtccctgtagcgatttacacacaggccgtgggggcccttgtacgcagtggctcaacgtgagagacttggaccgattacagagggaaagccagcgggaggtgctgcggctccagcggcaactgatgctgcagcaaggtaacggaggggcttggcctgaggcggggggccaaagcgcaacttgtgaagaagttagaagacagatgctcgcactcgagagggagctggaccagaggcggcgcgagtgccaagaactgggggcccaggcagcaccagcccgcagacgcggcgaagaggcagagacccaactccaagctgcgcttcttaagaacgcttggctggccgaagaaaatggcagactccaagcaaaaaccgactgggtccggaaagtagaggctgagaattccgaggtccgaggccacttgggccgggcatgccaagagcgcgacgcttccgggttgatcgccgagcagcttttgcagcaggcagctcggggccaagatcggcaacagcagctccagcgggaccctcagaaggctctgtgtgacctacatcccagttggaaggagatccaggcattgcagtgccgccctggacacccacccgaacaaccttgggagacgagccagatgccggagtcccaggttaagggctccagaaggccaaaatttcacgcccgtcctgaggactacgccgtaagccagcccaatcgggatattcaggagaagagggaggcaagcctcgaggagtctcctgtggcactgggtgagtctgccagcgtgcctcaggtgtctgaaacagtcccagctagccagcccttgagtaaaaagactagctcacagtccaatagctcttccgagggtagtatgtgggcaaccgttccaagtagccccactctggacagggacacagcctccgaagttgacgacctggagccagatagcgtgtctcttgccctggaaatgggtgggtccgccgctcctgcagcgccaaagctgaagattttcatggctcagtacaattacaatccgtttgaggggcccaacgaccacccagaaggtgaactcccactgacagcgggcgactacatctacatctttggagatatggacgaagacgggttttatgagggagagctggaagacggaaggcggggcttagtgcctagtaatttcgtggagcaaatcccggactcatacatacctgggtgtctccctgccaaatctcccgatctgggcccttcacagctacctgcgggacaagacgaggccttggaagaggacagcctgctgtccggaaaagctcagggcgtggtcgaccggggcttgtgccagatggtccgcgtgggtagcaagacggaagtcgccaccgagatcttggacaccaagactgaagcctgtcagttgggtctgttacagtctatgggtaagcaaggtttgagccggcccctgctggggaccaagggcgtgctccggatggcacccatgcaacttcacttgcagaatgtgacagcaacatccgctaatatcacctgggtatactcttcccacaggcacccacacgtggtgtacctggatgatcgggagcatgcacttactcccgcaggagtctcatgttacaccttccaggggctctgtccaggtacgcattatcgggctagagttgaagtgcgactgcccagagatctgctgcaagtctattggggcacaatgagttctaccgtgaccttcgacactttattagctggccccccttacccccctctggatgttctggtcgaacgacacgccagccccggagtgctggtcgtgagctggctacctgtgacaattgatagtgcgggttcgagcaacggcgttcaggtcacaggctacgcggtgtatgccgacggcctgaaagtctgtgaagtggccgacgctaccgctggcagcacactgctcgaatttagtcaattgcaggtccccctgacgtggcagaaagtgtccgtccgcacaatgtccctctgcggcgaaagcctggactccgtgcccgcgcagatccctgaagacttctttatgtgtcatcgctggcctgaaaccccaccattctcatatacttgtggagacccctcgacttaccgcgtcaccttccctgtatgcccccagaaactgtctctggctcctccatctgccaaggcaagtcctcataacccgggctcatgcggcgaacctcaggctaagtttctggaagctttcttcgaggagcctcctcggcgccagtcccctgtttctaacctgggttccgaaggagagtgcccaagtagtggcgccggctcccaagcccaggagctggctgaggcgtgggaaggatgcaggaaagacctgttgtttcagaagagtccccaaaaccaccgccctcctagcgtcagtgatcagccaggagaaaaggagaactgcagccagcacatggggacgagtaagagtccagcccccggatttatacacctgagaacagagtgtgggccaagaaaggagccctgtcaggaaaaagcagctctagaaagagtcctccggcagaaacaggatgcacaagggtttaccccacctcagctcggggcgagccagcaatacgcaagtgactttcacaatgtccttaaggaagagcaggaggccctgtgtctcgatctgtgggggaccgagcgcagggaggagcgcagggaaccagagccccacagtagacagggccaggcccttggcgttaagcggggatgtcagttacacgaaccctcgtccgcactctgccccgctccaagcgctaaagtcatcaaaatgccaaggggaggacctcagcagctcggtactggggcgaacacccccgctcgtgtgttcgttgctttaagtgactacaatccattggtcatgtccgctaacctgaaagccgcggaagaagagcttgtctttcaaaagcggcaacttttgcgggtgtggggctcccaggacacccacgatttttacctctccgagtgcaatagacaggttgggaacattcccggtcggcttgtagctgagatggaggtgggcaccgaacagactgataggcgttggcgcagtccagcccagggtaacctgccctcggtcgcacatctggaggacttccaggggctaaccatcccgcagggctcttccctggttctgcagggaaactccaagcgcctcccactctggactcccaaaataatgattgccgcattggattatgatcctggcgacgggcagatgggggggcagggcaaaggcagactggcacttagggccggggacgtcgtaatggtctacggacctatggatgatcagggcttttattacggggagcttggaggacaccggggactggtgcctgcccacctcttggatcacatgagtctgcatggtcactag

SEQ ID NO: 132996 - DNA, 4638 bp, synthetic construct
  misc_feature 1..4638: note = Description of Artificial Sequence: Synthetic coding sequence
  source 1..4638: mol_type = other DNA
atgcagcgtgaacgcgaagctgaaatacggcagctgctgaggtggaaagaggcagagcagcgccaattacaacaacttttacacagagagcgtgatggggtggtaagacaggccagagaactccaacgccagctcgccgaggagctagtgaacaggggccactgctctcgacccggcgcttccgaggtgtcagccgcacagtgtcgctgcagattacaagaggtgctggcgcagttgcggtggcagaccgacggggagcaggcagcccggatccgctatctgcaggccgctctcgaagttgagcggcagttattcctgaaatacatcctcgcccactttagaggccatcctgccctgagcgggtctccagatcctcaggccgtgcactccctggaggagcccttacctcagacatcatccggatcttgccacgctccgaagccggcctgccagttggggtcgcttgattctctgtcggctgaagtaggtgtgcggtcccgtagcctcggcctggtgagtagcgcatgctctagttctcccgatggtctcctgtctacccatgcctcttctctcgattgctttgcccccgcctgcagccggagcctagattctacgcgctcgcttccaaaggctagtaagtccgaagaaagacctagcagtccggacaccagtacaccagggtcaagaagactctccccaccccctagtcccctgcccccaccaccccctcccagtgcccaccgcaaattgagcaatccgaggggaggtgaggggtctgagagccaaccttgtgaagtgctgactccaagccctcccgggctcggccaccatgaactgataaagcttaattggcttttggcaaaggctctgtgggttcttgcacgtcgttgttataccctgcaggaggaaaataaacagctccgtcgcgccggatgtccctaccaagcagacgaaaaagtcaagcgccttaaggtgaaacgggcagagttgaccggattggctagaagactagccgatagagcacgggagctgcaagaaacaaacttacgagcagtgagtgcacccatccctggcgaatcttgtgcagggcttgaactgtgtcaggtgttcgctcgacaaagggctagggatctgtcagaacaagccagtgcccctctcgccaaagataagcagattgaagagttgcgccaggagtgtcacctcttgcaggcacgcgtggcctcaggcccatgctccgatctgcacaccggccgcggtgggccgtgtacacagtggcttaacgttagggacctggaccgtctgcagcgcgaatcccaaagagaagtgttgaggcttcaacgccagctgatgctacagcagggcaatggcggtgcatggccagaagccggggggcagtccgctacatgcgaggaggtgcgcaggcagatgcttgctttagaacgggagttggatcagaggagacgagagtgccaggagttaggaactcaagccgcacctgcacgcaggcggggagaggaagccgaaacacagctccaggcagctttgctaaaaaatgcatggctcgcagaggaaaatggtcgccttcaggcaaaaaccgactgggtcagaaaggtggaagctgaaaatagcgaagtccggggccatctggggagggcatgtcaggaaagagatgccagcggacttatcgcagaacagctgctccagcaggctgcccgcggtcaggacaggcaacagcaactgcagagggatccacaaaaagccctatgtgatttgcacccctcatggaaggaaattcaagccctccaatgccgacccggccatccacccgaacagccttgggagactagtcagatgcccgaatcacaggtgaaggggtctcgtagaccgaaattccatgctcggcccgaggactacgctgtgagtcaaccaaatagagacatccaggaaaagcgtgaagccagtctggaagaaagtccagtagctctgggcgaatccgcttccgtgccacaagtttctgagaccgttcccgccagccagccattgtcaaagaaaacttcttctcagtctaactcgtctagtgaggggtccatgtgggcaacagtgcctagtagtcccacgctggatagggacacagcttcagaggtcgatgatctcgagccagatagtgtctctctggcactggagatgggaggctcagccgcacctgctgcaccgaaactgaagatttttatggctcagtataactacaacccgtttgaggggccaaacgatcaccctgaaggggaactgcccctaaccgctggtgattacatttacatctttggagacatggacgaggatggcttttatgagggtgaactggatgacggccggagaggattggtgccttcaaacttcgtcgaacagattcctgactcatacattcccgggtgcttacctgccaagtccccagacctgggcccgtcgcagttaccggctggccaggatgaggctctggaggaggatagcttgcttagcggcaaagcacaaggcatggtggacaggggactgtgccagatggtacgagtcggttcaaagacagaagtagcgacagagattcttgatacaaagacggaagcatgtcagctcgggctcctgcagtcaatgggcaagcagggcctctcgagacccctgctgggtaccaaaggagttttgcgcatggcgcccatgcagcttcacctccagaatgtgactgctacttccgccaatataacctgggtctactcgagccaccgtcatccacacgtggtgtatcttgatgatcgcgaacacgcactgacccccgcaggagtgagctgttatacgtttcagggcctgtgccccggcacacattacagggtccgggtcgaagttcgcctgccctgggacctgctacaggtctactgggggaccatgagctctacggtcaccttcgacactctcttagctggcccaccttaccctccattggaagtgcttgtagaaaggcacgcctccccgggcgtcctcgtagtaagctggttacctgtgacgattgactcggcaggatcatcaaacggtgtccaggtgaccggctacgccgtgtatgctgacggtctgaaagtatgtgaggtggccgacgctaccgccggaagcactgtcctcgaattttcacagttacaggtgcccttgacctggcagaaggtaagtgtcaggactatgtcattatgcggagagtcccttgattctgtccccgcccagatccctgaagattttttcatgtgccaccgttggcctgagacgcccccttttagctacacttgcggagacccatctacatacagggtcaccttcccggtgtgcccacagaaactgtctctggcaccaccgtctgccaaagcatccccacacaaccccgggtcatgcggcgagccgcaggctaaattccttgaggctttcttcgaggagcccccgcgaagacagagcccagtgtccaatctcgggagcgaaggggaatgtccctcgtctggtgcggggagccaggcccaggaactggccgaagcgtgggagggatgtagaaaggacctactgttccagaaatctcctcagaatcaccggcctccaagcgtaagcgatcagcctggggaaaaagagaattgttaccaacacatgggcactagcaagagtccggcccccggctttattcatctcagaaccgaatgcggacccaggaaagaaccttgccaggagaaagccgccttggagcgagtgttgcgccaaaaacaagatgcccaggggttcaccccaccccaactcggtgctagtcaacaatacgctagtgacttccacaacgttctgaaggaggagcaagaggctctttgtttggacttaagaggaacagagcgccgtgaggaaaggcgggagcctgagcctcatagccggcagggacaggccctcggtgtgaagcgcgggtgccagctgcacgagccctcttccgccctctgcccagcgccatctgctaaggtcattaagatgccccgtggcggtccgcaacagctgggcaccggggccaatactcccgcccgcgtgtttgtggcgttaagcgactacaatccgctggtcatgagcgccaacctcaaggccgccgaggaggagttagtttttcagaaaagacagctcttacgcgtttggggcagtcaagacacacacgatttttatctgtcagagtgtaacagacaggttggcaacatacccgggagactagtagccgaaatggaagttggcaccgagcaaacagaccgacgctggaggagcccagctcaaggtcaccttccttccgtggcacatctcgaagatttccaaggtcttacaatccctcagggctccagcctggtgcttcaaggcaactctaaaaggctgcccctgtggacacccaaaattatgatcgccgccctggattatgatccaggggacggccagatgggtggacagggcaaaggccgcctcgccttgagggccggtgatgtcgtgatggtctacggtcctatggatgatcagggcttttattacggagagctgggggggcacagaggcctggtgcccgctcatcttctggatcacatgtctctacatggccactag

SEQ ID NO: 132997 - DNA, 4920 bp, synthetic construct
  misc_feature 1..4920: note = Description of Artificial Sequence: Synthetic coding sequence
  source 1..4920: mol_type = other DNA
atggccaaagattcaccctcccccctcggtgcctctcccaagaagcccggttgctcaagccccgccgcggccgtgcttgagaaccagaggcgagagcttgagaagctgcgcgcagagttagaggctgagagagctggatggagagctgaaaggcgcagattcgccgccagggaaaggcagctccgagaggaggccgaacgcgagcgcagacagcttgcggacagacttaggtccaagtgggaggcccagaggtccagagagttgagacaactgcaggaggaaatgcagcgagaacgggaagcagagatccgccaattgctgcgatggaaagaggcggaacaaagacagctgcagcagttgctgcatcgcgaaagggatggagtggttcgacaggcccgtgaactgcagcgccaattggctgaggaattagtgaaccgcggccactgtagcaggcccggcgcctccgaggtcagcgcagcacagtgtcgatgcagacttcaggaggtgctagcacagctgcgctggcaaacagacggagagcaggctgcaaggataagatacctccaggccgctcttgaagtggaacggcagcttttcctgaagtatatcctggcccatttcagaggccatccagctttatctggtagcccagatccacaggcggtccattcccttgaggaacctcttccacagacaagcagtgggtcctgccacgctccaaagcccgcttgccaactgggctcactggactccctgtccgccgaggtaggcgtaaggagccgcagtctcggcctcgtgagcagcgcttgctcctcttcacctgatggcttgctcagtacccacgcttcctcacttgactgtttcgcaccagcctgcagccgcagtctggacagtaccaggtcacttcccaaagcctccaagagcgaggagagacccagctcccccgatacttcgacacccgggagccgaagactaagccctccaccctccccactgcctccaccccccccgcccagcgcacatcgcaagctatccaacccacgcgggggggaggggtctgaaagccaaccatgcgaagttcttacacccagcccaccgggcctaggacatcatgaactgatcaagctcaactggctactggcaaaagccctgtgggtccttgctcgccgatgctacacactgcaggaggaaaataagcagctcagacgtgccggatgcccatatcaagccgacgaaaaggtgaaaagactgaaggtgaagagggccgagctaaccgggttggcgcgacggctggctgacagggcaagagagctgcaggagaccaacctgagagctgtaagtgcaccaattccaggggagagttgcgccggcttagaactatgccaggttttcgccagacagcgcgccagggacctgtccgaacaggcaagcgctcccctggcaaaggataagcagattgaggaactcagacaggaatgccacctcctgcaggccagagtcgcctcaggtccttgtagtgaccttcacactggccggggcggaccctgcacacagtggctcaatgtgcgggacctcgataggctacagcgcgaatctcagagagaggtgctgagactgcagcgacagctaatgctccagcagggcaacggtggcgcgtggccagaggccggagggcaaagtgccacttgcgaggaagtgcggagacagatgctagccctggaacgcgagctcgaccagagaaggcgggaatgtcaagagctggggacccaagcagcccccgctaggcgccgaggggaagaggccgaaacacagttgcaagccgctctgctgaagaatgcatggctggctgaggaaaacggtcgcctgcaggctaaaacggactgggtccgtaaggtggaggcagagaattccgaggtccggggccatctgggcagggcgtgccaggagagagacgcctccggactgattgcagagcaattgttacagcaggccgcgagaggacaagacagacagcagcagctgcagagggatccgcagaaagctctctgcgatttacatcccagctggaaagagattcaagctctgcagtgcagaccagggcaccctccagaacagccatgggagacaagtcagatgcccgaatcccaggtgaagggctcccgacgccccaaattccacgcacgccctgaggattacgccgtgtcacagccaaacagggacatccaggaaaagagggaagcttcactcgaggaatcgccagtcgcgcttggggagtcagccagcgtacctcaagtctccgagaccgtgcctgcttcacaacccctgtccaaaaaaacttcctctcagagtaactcttcttctgaaggctctatgtgggcaacagtaccgagttcaccaacgctggaccgcgacaccgcatctgaggtcgacgacctggagccagacagtgtttcactcgctttggagatgggcggaagtgccgcccccgctgcgcctaaattgaagattttcatggcccagtataactacaacccattcgaaggcccgaatgaccatcccgagggcgagctgccgctgactgccggggactacatatacattttcggagatatggatgaggatgggttctacgagggcgagctggacgacggccggcgtggactggttccttctaatttcgtcgaacagatccctgactcatacatccctggctgtctgcccgccaaatcccccgacctcggcccctcacagttgcctgccggacaagacgaggcgctggaggaggactctttgctttctgggaaagcacaggggatggtggaccgaggtctctgtcagatggtgcgtgtcggaagcaaaacggaggttgccaccgaaatactggatacaaagaccgaggcttgtcagctaggcctacttcagtcgatgggaaaacaggggttgagccgcccattgcttggtactaagggagttctacgcatggcccccatgcagctgcacctgcagaatgtcaccgctacatccgcaaacatcacctgggtgtattcatcccaccggcaccctcacgtcgtgtatttagatgatcgagaacatgccctgacacccgcaggcgttagctgctatacattccaaggtctgtgtccagggacacattatcgcgtccgggtggaagttcgactgccttgggacctgctccaggtatattggggaacaatgagctccactgtgacatttgacacacttctcgcagggcccccctatccacctctggaagtcctcgtggaaagacacgcaagtcccggtgtgttggttgtatcctggctcccggtgaccatcgactccgctggcagcagcaatggagtgcaggttacaggctatgcggtgtatgccgacggcctgaaagtttgtgaggtcgcagacgcaacagcgggctccaccgtccttgagttcagccaattgcaggtgcctctcacatggcagaaagtatccgtgcgtaccatgagcctttgcggggagtcattggactccgtcccagcccagattcccgaggacttcttcatgtgccacagatggcccgaaacaccccccttcagctatacatgcggcgatcctagtacatatcgggttacttttcccgtatgtcctcaaaaattatctctagcacccccctctgccaaggcctccccacacaaccccgggtcctgcggggagcctcaggcaaagttcctcgaagctttctttgaggaaccgcctcgcaggcagtctccagtctctaatctgggaagcgagggagagtgcccatcatccggagctggctcccaggcgcaggaactggcggaggcttgggaaggctgccgcaaagacctcctttttcagaagagcccccagaaccatcggcctcctagcgtatctgaccagcctggagagaaggagaactgctatcagcatatgggcacatcaaagtcacctgcaccaggcttcatacacctgcgcacagagtgtggccccagaaaggagccttgccaggaaaaggccgccctcgagcgcgtattacgacaaaagcaggatgcccagggattcactccgccccaactgggtgccagtcagcagtacgcatccgattttcacaatgtgctcaaggaggagcaggaagccctgtgcctggacctgcgtggtactgaaaggagggaggaaagaagggaaccagagccccactctaggcagggacaagctctgggcgtcaaaaggggatgccagctgcatgaaccctcttcggctctatgcccggcgccttctgctaaggtgatcaaaatgccgcgcggaggaccccaacaacttggtacgggggcaaatacacccgcaagggtcttcgttgctctcagtgactataatcctctggtgatgtctgcaaatctgaaagccgcagaagaggagctggtttttcagaaacgccagctgctgcgcgtgtggggatcccaagacactcacgatttttacctcagtgaatgcaataggcaggtcgggaacattccaggccgactcgtcgctgaaatggaggtcggcacagaacagactgatcgtcgatggagatcacctgcccaaggacacttgcccagcgttgcccacctggaagacttccaagggctgactattcctcaggggtcaagcctggttcttcagggcaattcaaagagactacccctctggaccccaaagattatgatagcagctcttgattacgacccgggcgatggtcagatgggtgggcagggaaagggaagattagctctgcgggcgggggatgtcgtgatggtttacggacccatggatgatcaaggattttattacggcgagctgggcggacaccggggcctggtccccgcacacctcttagaccacatgtccctgcatgggcattag

SEQ ID NO: 132998 - DNA, 4638 bp, synthetic construct
  misc_feature 1..4638: note = Description of Artificial Sequence: Synthetic coding sequence
  source 1..4638: mol_type = other DNA
atgcagcgcgagagggaagcagagattcgccagctccttaggtggaaggaggcagaacaacgacagttgcagcaattgctgcatagagaaagagatggagtggtccggcaggcacgcgagctgcagcgccaactggcagaagaacttgtcaacagggggcactgtagcagacccggtgcctccgaagtttcagccgctcagtgtagatgtagactgcaggaagtactggcccagctgaggtggcaaacagacggggagcaggctgcgagaattaggtatcttcaggccgccctggaggtggagaggcagttgtttctaaagtacatcttagctcacttccgcggccatccagccctgtccgggtcgccagatccccaggccgtgcactcactggaggaaccattgcctcagacaagcagcgggagttgccatgcgcctaagcctgcctgtcagctcggtagcctagatagtctgagcgccgaagtgggcgtacgaagccggtcgctggggcttgtgagcagcgcttgcagttcatcaccagacggattgctttccacgcacgcctccagcctggactgttttgctcctgcctgcagccggagtctggattcaacccgctccctgccaaaggcttccaaatccgaagaaagaccctcctccccagacacatctacaccaggctcaagacgcctctcccctcctccttcccccctgccacctcccccaccacctagcgcacatcggaagctgagcaacccacgtggaggagagggctccgagagccaaccgtgtgaagtcctgacacccagcccaccaggtctggggcaccacgaattgataaagcttaactggctgctggcgaaagccttatgggtgctggctagaaggtgctataccctccaggaagaaaacaaacagctccgccgagccggctgcccgtatcaggctgacgaaaaggtgaagagactcaaagtgaaaagggccgaactaactggccttgcgaggagactggccgaccgagcccgcgagttacaagagacaaatctgagggcagtaagtgctcctatccctggagagtcatgtgcagggctggagttatgccaggtgtttgcccggcagcgagcaagagacctgtcagagcaggcatccgcccccctggctaaagataaacagatcgaggagctcagacaagaatgtcatctgcttcaggccagggtggcgtcagggccctgctctgatctccacacagggcgcggaggtccttgtactcagtggttgaacgtgagagatctcgaccgcctgcagcgtgaatcacaaagagaagtgctccggctgcagagacagctcatgctgcaacagggtaacggaggtgcttggcctgaagctggcgggcagtcagccacatgcgaggaggtccggagacagatgttggccctggaacgggaactggaccagcggcgtcgggagtgtcaagagctgggcacccaggctgccccagcacgaaggaggggagaagaggccgaaacacagctacaggcggccttgctcaaaaatgcttggctagccgaagagaacggtaggctccaagcaaaaaccgactgggtccgaaaggtggaggccgagaactctgaagttagggggcacctgggccgcgcatgtcaagaaagggacgcctctgggctgatagctgagcaactcttgcagcaagcagcaagaggccaggacagacaacagcagctgcagagggatcctcagaaggcgctttgcgacctgcaccctagttggaaagaaattcaggcactacagtgtcgacccggtcatcctcccgaacagccctgggagacgagtcagatgccagagtctcaagtgaaaggcagccggcggccaaaatttcacgctcgaccggaagattacgctgtttcccagcctaaccgggatattcaagaaaagagagaggcttcactcgaagagagtccggtggctttgggcgagagcgcctcggtcccccaagttagcgagactgtgcccgccagtcaaccactgtccaagaagacgtcttctcagtcaaacagctcctccgaggggtccatgtgggcgacagtcccctcctctcctacgctagaccgcgacaccgcgagcgaggtcgacgaccttgagccggatagtgtgagccttgcactggaaatggggggttcggccgcaccagccgccccaaagttgaagatttttatggcccagtataattataatccatttgaggggcctaatgaccacccagagggagagctgcctttgactgcgggtgactatatatatatattcggtgacatggacgaggacggcttctacgaaggcgaactggatgacggcaggcgcggattggtgccgtccaatttcgttgagcaaatcccagacagttacatacccggatgtctgcccgcaaagtcaccagacctcggcccctctcagttgcccgccggacaggacgaagccctggaagaggactccctcctttccggtaaagctcaggggatggtggataggggcctgtgtcagatggtccgcgtggggtccaagacagaagtggctaccgagatcctggacaccaagaccgaggcatgtcaactcgggctcttgcagtctatgggcaagcagggactgagtagaccactccttggtactaaaggcgtgctgcgaatggcacctatgcagctccaccttcaaaatgtcacggctacatccgctaatattacatgggtctacagctcccacagacacccccatgtcgtgtacctcgatgatagagagcatgccctgaccccggcgggcgtttcctgttatacttttcaaggcctgtgtcctggaactcattaccgtgtccgggtcgaagtgcgattgccatgggatctgttgcaggtctattgggggaccatgtcctctactgtgactttcgacactctcctggcggggcctccgtatccacccttggatgtgctggtagagagacacgcgtcaccaggtgtcctagtggtgtcatggctaccagttaccatagactccgcagggtccagtaatggcgtgcaggtgaccggatacgcagtctatgcggacggcctcaaggtgtgcgaagtggccgacgctaccgccgggagcactgtcttagaattctctcagcttcaggtgcccctgacctggcagaaggttagtgttcgaacaatgtctctttgcggggagtcactggattccgtgccagcacagattcccgaggatttcttcatgtgtcatcgctggcccgagaccccgccgttcagttacacgtgcggagatccctccacatatcgcgtgaccttccctgtgtgtccccagaaactgagcctcgctccacccagcgccaaggccagtccacacaatcctgggtcttgtggtgagccgcaggcaaagttcctggaagctttctttgaagaaccaccacggcggcagagcccagtgtcaaacctggggtctgaaggggaatgccccagtagcggagcaggcagccaggcccaagagttggccgaggcctgggaaggctgccgtaaagacctcctgtttcagaaaagtcctcagaaccatcgccccccctctgtgtccgatcaacctggcgagaaagaaaattgttatcagcatatgggaacttctaagtcccctgcccctggtttcatccatctcaggaccgaatgcggacctcggaaagagccatgtcaggaaaaggctgcacttgaaagggtattgcgccagaagcaggatgctcaggggttcactcctccacaactgggcgcttctcagcagtatgctagcgatttccacaacgtactgaaagaggaacaagaagccctctgccttgatttaaggggtacagaacggagggaggaacgacgcgagccagaaccacatagccgccagggccaagccctgggagttaaacgagggtgtcagctgcatgaacctagcagcgccctgtgccccgccccatccgcaaaggttatcaaaatgcctcgcggaggaccacagcagctgggtaccggcgccaacactcccgctagggttttcgtggccctgagcgattacaatccccttgtcatgtcagctaaccttaaagcagcagaagaagagttagtttttcaaaagagacagttacttcgcgtgtggggaagccaagatacccacgacttctatctgtctgagtgtaatagacaggtgggaaacattcctgggaggttggtcgccgagatggaggtggggacggaacaaacagaccggaggtggcgcagtccggcacagggacaccttccgtccgtggcccacttggaagactttcaggggctgattattccccagggaagcagcctcgtgcttcagggaaacagcaagcgcttaccattgtggaccccgaaaattatgatcgccgccctggattacgacccaggggacggccagatgggggggcagggaaagggccggctcgctctgagggcaggtgacgtggtgatggtctacgggcccatggacgaccaggggttctattatggagagctcggaggtcaccgcggcctggtcccagcccacctgctggatcacatgagtcttcatggacactag

SEQ ID NO: 132999 - DNA, 4920 bp, synthetic construct
  misc_feature 1..4920: note = Description of Artificial Sequence: Synthetic coding sequence
  source 1..4920: mol_type = other DNA
atggctaaagactcgccatctcctctgggggcttcccctaagaaacctggttgttccagccccgcagctgccgtcctggagaatcagcggcgggagctggagaagctgagagcagagctcgaagccgaacgggccggctggcgcgcagaacgccgtcggttcgccgctcgcgagaggcagctgagagaggaggcagagagagagagacggcagctcgcagaccgcctgaggagcaaatgggaagcacagagaagcagagaactcaggcagctccaggaggaaatgcaacgcgagagagaagcagagatacggcagttactccgttggaaggaagctgaacagcgtcagctccagcagctcctgcacagagaaagagacggcgtagttagacaggcgcgagagctccagagacagttggcagaagagttagtcaaccgagggcattgctctagacccggagcttccgaggtgtcagcagcccagtgtaggtgcaggctgcaggaggtccttgcacagctgcgctggcagactgatggtgagcaagccgcacgcattcgctatcttcaggctgccctggaggtagaaaggcagttgtttcttaagtatattctcgcccacttccggggccaccccgccctaagcggatcaccagatccccaggcagtgcacagtctcgaggagccactaccccaaacttcctcagggagctgccacgcaccaaagccggcatgtcagctgggctctcttgattccctgtctgctgaggttggagtgcgcagccgttctctgggcctggtaagctcagcttgctcttctagtcctgatgggctgctctctacccacgcttccagcctggactgctttgcgcctgcttgttctcgatcgctggatagtacccggagtctccctaaggcctccaaatctgaagaaaggcccagcagcccggacacctctaccccaggttccaggcgcctgagtcctcccccatctcccctgcccccacccccacccccttctgcccacagaaaattgtctaatccaaggggtggagagggatcagagtctcagccatgtgaggtgttaactccaagccctccagggctcggccatcacgagctaattaaacttaattggctcctggctaaagccctttgggtgctggctcgtagatgctacacattgcaagaagagaacaagcagctgcggagggctgggtgtccttaccaagccgatgagaaggtgaaacgcctgaaagtgaagagggctgaactgacagggctcgctaggcgcttggctgaccgggcgcgtgagctgcaagagaccaacctgagggctgtgagcgctcccatccctggcgagagctgcgccgggttggaattatgccaggtgttcgcccgccaaagagcaagggacttgtccgagcaggcgtctgccccactggccaaagataagcagatcgaagaactccgccaagagtgccatttgctccaagcgagggtcgctagtggcccttgtagtgacctccacaccggccgaggaggcccatgtactcagtggcttaatgtaagagatttagatagactgcagagggagtcacagcgggaggtactgcgccttcaacggcagctgatgctgcagcagggcaacgggggggcctggccagaggcgggagggcagagtgcaacttgcgaggaggtccggcggcagatgttggcactggagcgggaactggaccagcggcgtagggagtgtcaagagctgggtacccaggccgcacccgcccgccggcgcggggaggaggctgagactcagctacaggcagctctgctgaagaacgcttggctcgcggaggagaatgggagattgcaggccaagacggactgggtgcgcaaggttgaggccgaaaattccgaggtgagaggccatctagggcgagcttgtcaggagagggacgcctctggacttatagctgaacagctcctgcagcaggcggccagagggcaggatcgccaacagcaactgcagagagaccctcaaaaagctctgtgtgatcttcacccatcttggaaggagatccaggccttgcagtgtagaccaggccacccgcccgagcagccatgggaaacttctcagatgcctgagtcccaagtgaaaggaagccgccgtccaaagttccacgcgaggccagaggattacgccgtgtctcagcccaatagggacattcaggaaaaaagagaggcttctctcgaagagtctccagtcgccttaggggagtccgcttccgtgccccaagtcagcgagactgtccccgcctctcagccactgtctaagaaaacatcttcccagagcaacagctcatctgagggctctatgtgggccacagtaccttcttcgcccactctcgatcgagatacagcctccgaagttgacgacctggagcccgacagcgtcagcctggctttggagatgggaggtagcgctgcacctgctgcccccaaactgaagatcttcatggctcagtataactataatccctttgagggtccaaacgaccacccagaaggggagctgcctctgactgctggagactacatctatattttcggagatatggatgaggacggcttctacgaaggcgaattggatgacggaaggagaggcctggttccaagtaatttcgtggaacagattcccgatagctacatcccgggttgtttgccggctaaaagcccagacctggggcccagccaactcccagccggacaggatgaagccttagaagaagactccctcctgtctgggaaagcccagggcatggttgatcgcggactgtgccagatggtacgagtgggctctaaaacggaagttgctactgagatcctggacactaagacagaggcctgccaattaggactcctccagtccatgggcaagcagggcctcagccgcccgctgctgggcacaaagggcgttttaagaatggccccaatgcaattgcacctacagaacgtgacggctacctccgctaacatcacttgggtgtactcatcacaccggcaccctcatgttgtgtacttggatgaccgcgaacacgccctgacccccgctggcgtctcatgctatacatttcaggggctttgtcctggaacacactatcgggtgcgtgtcgaagtgcggctgccctgggatctgctgcaggtctactgggggaccatgagtagcaccgtgacttttgacaccctgctcgctggccctccttacccgccactcgatgttctggtcgagcgccatgctagccctggggtactagtggttagctggctgcctgtgaccatagattcggcggggtcctctaatggagttcaggtcaccggctacgccgtttatgctgatggcctcaaagtgtgcgaagtggcagacgccactgctggttccaccgttctagagttctcacaattgcaagtcccattaacctggcagaaggtttccgttaggaccatgtctctatgtggagagagcctagactccgtgccagctcaaatcccggaggatttttttatgtgccataggtggccagagacaccacccttttcctacacatgcggagatccttccacctaccgggtaacctttccagtctgcccccaaaaattgagtctggcacccccaagcgcaaaagcatccccacataaccccgggtcctgcggggaaccccaggcaaagttcctagaagccttcttcgaggagcctcccagacgtcaaagccctgtcagcaatttgggcagcgagggcgaatgtccttccagtggagctggaagtcaggcccaggagttggcagaggcgtgggagggctgccgaaaggatctgctgttccagaagtctccacagaatcacagacctccttctgtgagcgatcagcctggcgagaaggagaactgctatcagcacatggggacatcaaagtcacctgcccctggcttcattcacctgcgcactgaatgcgggccacgtaaggaaccttgtcaggaaaaagctgccctcgagagagtcttgagacaaaagcaggacgcgcagggtttcactccccctcagcttggggcttcccagcagtatgcttcagactttcacaacgttctgaaagaagagcaggaagcactgtgcctggatttgcggggaacggagaggagggaagagagacgggaaccagaaccacactcccgccagggccaggcactcggggtcaagcgaggctgccagctgcacgaaccgagtagcgcgctctgcccggcgccaagcgccaaggtcattaaaatgccaaggggcgggccacaacaacttggtaccggagctaatacaccggcccgcgtcttcgttgctctatccgattacaaccccctggtcatgagcgccaaccttaaggcggcagaggaagagctggttttccaaaaaaggcagcttcttcgcgtttggggaagtcaagatacacacgatttctatttgagcgagtgcaaccgccaggtggggaacatcccagggcgcttggttgccgagatggaggtcggtaccgaacagacagacagacggtggcggtccccagcccaaggccacctccccagtgtggcacatttggaagattttcagggactgattatccctcaaggtagcagtctggtcctccaggggaattcaaagaggcttcctctctggacacccaaaataatgatagcagccctggattatgatccgggagacggacagatgggcggccaagggaaaggccgtctcgccctgcgcgcgggagacgtagtgatggtgtacgggccgatggacgaccaggggttttactatggcgagctgggaggccatagaggactggtgccagcccatctgctggatcatatgtctcttcacggacactag

SEQ ID NO: 133000 - DNA, 3402 bp, synthetic construct
  misc_feature 1..3402: note = Description of Artificial Sequence: Synthetic coding sequence
  source 1..3402: mol_type = other DNA
atgcctgtgcaggccccacaatggactgattttctaagctgtcccatctgcacgcaaacatttgacgagaccattagaaagccgatatctctaggctgtgggcacaccgtctgtaagatgtgtctcaacaagttgcatcgcaaggcttgtccgtttgatcagaccaccataaacacagacatcgaattgctacctgtgaacagtgccctcttgcagctcgttggagcgcaggtccctgagcagcagcccatcaccctgtgcagtggagtggaagatactaagcactatgaggaggcaaagaaatgtgttgaagagcttgcgctgtacttgaaaccgctttctagtgccagaggtgtgggtctcaattctacgacccagtctgtcctgtcaagacccatgcagcggaagctggtgaccttggtccattgtcagttagttgaggaagagggccgaatccgtgctatgcgagcagctaggagtctgggggagcggaccgtgacggagctgatcttgcaacatcagaatcctcaacaactgtccagcaacctgtgggcagcagttcgggcaaggggttgccagtttttagggccagctatgcaggaagaagcactaaaactcgtgttactggccctggaagatggcagcgctttgagccggaaggtgctggtgcttttcgtagttcagagactcgagcctcgttttcctcaggctagcaagacgtcaatcgggcatgttgtgcagctgctctatcgggcgagttgttttaaagtcacaaagcgcgacgaagattcttctctgatgcagctcaaggaggaattcagaacatacgaggccctccgccgggagcacgatagccaaattgtgcagattgctatggaggcggggcttcggattgcacccgaccagtggtcgtcccttctctatggcgaccagtctcacaagtctcacatgcagagcatcatagataagctgcagacccctgctagctttgcccagagcgtccaagagttgacaattgccctgcagagaacaggcgacccagccaatcttaaccgccttcgcccccatttagagctcttagctaacatcgacccctccccggacgcaccaccccccacctgggaacagctggagaacggactcgtggcagtgcgaacagttgtccacggtttagtggactacatacaaaatcatagtaaaaagggagcagatcagcagcagccacctcagcactcaaaatacaaaacctacatgtgccgggacatgaaacagcggggtggttgtccaagaggcgcttcctgcacattcgcacacagtcaggaagaacttgagaaatttagaaagatgaacaaaaggctcgtaccgaggaggcccctgagtgccagcctcggacagctgaatgaggtgggccttccctcggccgccatactacctgacgagggcgctgtagatttgccatcacggaaaccgcccgctctgcctaatggaatcgtgtccaccggaaatacagtgactcagctgatacccaggggaacggaccccagctacgactcgagcctgaaaccaggtaaaattgaccatttaagcagcagcgctcccggatcaccccctgaccttctggaaagcgttcctaaatctatctccgccctgcccgtgaatcctcattcaatacccccacggggacctgccgatttaccacctatgccggtcaccaagccattacagatggtgccaagagggtctcagctgtaccctgcacagcagaccgatgtttattatcaagacccacgtggagccgcccctcctttcgaacccgcaccctaccagcagggcatgtattataccccccctcctcaatgcgtctccagattcgtcaggccgccgccgtcagcgcccgaacccgcccctccctacctggatcactaccccccctacctgcaggagagagtagtcaatagtcagtacggcacccagccccagcagtatccccctatctatccttcccattacgatggccgccgggtgtaccctgctcccagctacactcgtgaagagatcttccgggaatcgccaatccctatcgagatcccaccggccgctgtccccagttacgttccggaatcaagagagagatatcagcagatcgaatcgtattatcctgttgctccccacccgacacaaatacgccctagctacctacgcgaacctccatattcgagactgcctccccctccacaaccacatcccagtctggatgagttgcatcgtaggcgcaaagagatcatggcccagctggaagaaagaaaggtaatcagccctccccccttcgccccgtctccaaccctgcctcccacgtttcatcccgaagaattcctagatgaggacttgaaggttgctggaaagtacaagggaaatgattattcccagtactcgccctggtcctgcgacactattggatcctacattggcaccaaagatgctaaaccaaaagatgtagtggccgctggctccgttgagatgatgaacgttgagtcaaagggcatgagagaccagcggctagacctgcaaagacgggccgccgagacgtcagatgacgatctcatcccattcggagatcgcccgacagtgtcgcgcttcggggccatctcccggacatcgaaaacaatctatcaaggagcaggaccaatgcaggccatggcaccccagggtgctcccactaaaagcattaatatatccgactactctccttacggcacacacggcggctggggggcttccccctattctcctcaccagaacatcccatcacagggacacttctccgaacgtgagcgcattagtatgagcgaagtggcctcccacggcaagccgcttccatccgcggaacgcgagcagctgcggctagagctgcagcagctgaaccaccagattagccagcaaactcagctgcgcggactcgaagccgttagtaatcggttggttttgcagcgggaggctaacacattagcagggcaatcacagccgccaccacccccaccgccaaaatggccaggcatgatttcatccgagcagctgtccttggaactccatcaggtggaaagagaaatcggtaagcgtactcgggaactatctatggagaaccaatgctctttagacatgaagagcaagctgaacacttctaaacaagccgaaaacggacagcctgaaccgcaaaacaaggttcctgccgaggacctgaccttaaccttctccgacgtaccaaatgggtccgccttaacacaggagaatatatctctcttaagcaacaaaacttcgtcgctgaatctgagcgaggatccagaaggtggaggggataacaacgattcccagcggtccggtgtgacaccatcgtccgcaccctag

SEQ ID NO: 133001 - DNA, 3378 bp, synthetic construct
  misc_feature 1..3378: note = Description of Artificial Sequence: Synthetic coding sequence
  source 1..3378: mol_type = other DNA
atgccagtgcaggcaccccagtggaccgactttctctcctgtcccatctgcactcagacctttgacgagacaattcgcaagcccatcagtctgggttgtggccataccgtgtgtaaaatgtgcctgaataagctgcacaggaaggcttgcccgttcgatcaaactactattaatacagacatcgaattgctcccagtaaattcggctctgttgcagctggtcggtgctcaggtgcccgagcaacagccgataacactctgttccggagtcgaagataccaagcattacgaggaggctaagaagtgtgtggaggagctcgcactctatctgaagcccctgtcttccgcgcgcggggtgggtcttaacagcactacacagagcgtgctgtcccgacctatgcagcggaagctggttacactggttcattgccaactcgtggaagaagagggccgaattagagctatgcgcgccgcccggtccctgggcgaacggacggtgaccgaacttattttgcagcatcagaatccacagcaactgtcttcaaatttgtgggccgccgtgcgcgcccgcgggtgccagttccttggacccgccatgcaagaggaggctttgaaactcgtgcttcttgcccttgaggatggtagcgccctctctagaaaagtattggtgctgttcgtggtgcagcgactggagcctcggttcccacaggcgtccaagacctctatcggccacgttgtgcaattgctttatagagctagttgtttcaaagtcacaaaacgggacgaagattcatccctaatgcagctaaaggaggagtttagaacctacgaagcactccgcagggagcatgattcgcagatcgttcaaatagcaatggaggctggattgcgaatcgcccccgaccagtggtcttcacttttgtacggtgaccaatctcataagtctcacatgcagtccattattgacaaattgcagacaccagccagctttgcacagtccgtgcaagagctgactatagctctgcagcgcacaggcgaccccgcaaacctgaataggcttcgacctcatctagaactcttggccaatatcgaccccagccctgacgcgcctccccctacatgggagcagctcgagaatggcctagtggctgtccgaacggtcgtgcatgggctggtggattacatacagaatcactcaaagaaaggcgcggaccaacagcagccccctcagcatagtaagtataagacatatatgtgtagggatatgaagcaacgtggcggctgtcctcgcggtgcgagctgtacatttgcacattcacaagaagagcttgagaagttcaggaagatgaacaagaggttggtccctaggcgacctttgtccgcctcactgggtcagctaaatgaagtaggtctgcctagcgcagccattcttcctgacgagggggctgttgatctccccagcaggaaacctcctgccctccccaacggcatcgtgtctacaggcaataccgtgactcaactcattcctagaggtacggatccctcctatgactcatccctgaagcctggcaaaatcgatcacttgtcttcatccgccccgggcagcccaccggatctcttagaatcggttcccaagagtatcagtgctctaccagtgaacccgcacagcattccacctcggggccctgccgatctgccccctatgcctgtaaccaaaccgctgcagatggtgcccaggggcagccagttatatccagcgcaacagactgacgtgtattaccaagatcccagaggggccgccccacctttcgagcctgcgccataccagcaggggatgtattacaccccacccccgcaatgtgtgtctcgcttcgtcaggcccccgccctcagccccggagccagcgccaccgtatctggaccattaccccccctatttacaggaaagggtggtaaactctcaatatgggactcagccgcaacaataccccccaatctacccgtcccactacgatggacgacgggtttatccagctcccagttacaccagggaagagatcttcagagaatcaccaatccctattgaaattccacccgcggccgtgccttcttatgtgccggagtcaagggagagataccagcaaatcgagtcttactaccctgtcgccccccatcctacgcaaatcagaccttcgtatctgagagagcccccatacagcaggctcccgccaccaccccagcctcacccctccctggacgagctacaccgccggcgcaaggagatcatggcccagctcgaggagcgaaaggtgatttcaccacccccattcgccccctctccaactctacctccaaccttccatcccgaggagttcctggatgaggacctcaaagtggctggcaagtacaaagggaacgactattcacagtacagcccttggtcttgtgatactattggttcctatatcggcactaaggacgctaaaccaaaggacgtagttgcagctggatctgttgagatgatgaacgtggagtctaaaggtatgagggatcagcggctggatctgcagcggcgggcagccgagacttccgatgatgacctgattcctttcggggatcgacccactgttagcaggtttggggctatttctcgtaccagcaaaacaatctaccagggtgcaggaccaatgcaggcaatggctccacagggcgccccaacgaagagcattaacatctcagactacagcccctatggtacacacgggggctggggggctagcccctattcaccccaccagaacatcccatctcagggacacttctcggagcgggaacggatctcaatgtccgaggttgcatcacatgggaaaccacttcccagtgccgagagagagcaactgaggctcgagcttcaacaattgaatcatcagatatcccagcaaacacagctgcgaggcctcgagagggaagccaacacgctcgccggacaaagtcagccccctccccctcccccccccaaatggccgggcatgatttcatctgaacaactgtcactcgaactccaccaagtcgaacgagagatcggcaaacgaacgagagaactcagcatggaaaaccagtgctccctggatatgaagtcaaagttgaatactagcaaacaagctgagaacggtcagcctgaaccccagaacaaggttccagccgaagacctgacactgacattttctagcgacgtccccaacggatcagccctgacccaagagaatatctctctgttgagtaataagacctctagcttgaatctctcagaagatcccgagggaggcggggataacaacgactcccagcggagcggtgtcactccctccagcgccccgtag

SEQ ID NO: 133002 - DNA, 3402 bp, synthetic construct
  misc_feature 1..3402: note = Description of Artificial Sequence: Synthetic coding sequence
  source 1..3402: mol_type = other DNA
atgcctgtacaggcccctcagtggaccgatttcttatcatgccctatttgtacccagactttcgacgagaccataagaaagcctatttctctggggtgtggtcacaccgtgtgtaaaatgtgtttgaataagctgcacaggaaggcctgcccgttcgaccagacaacaattaacacggacatcgagctgctgccagtcaactctgcattactgcagctggtgggggcccaagttcccgagcagcagcccattactctttgcagtggcgtggaggacacaaaacattacgaagaagcaaaaaaatgcgttgaggaactggcactatatctgaaacccctgtctagtgcaaggggcgttggtttgaactccaccacccagagcgtgctttcacgcccaatgcagcggaagctggtgactttagtgcactgtcaattagtagaggaagaggggcggatcagggctatgcgggctgccagatccctgggcgagcgtacagtgactgaactcatcctccagcatcaaaacccgcagcagctgagctcgaacctgtgggccgccgtgagggcacgtggatgccagttcttaggccccgcaatgcaggaggaagccctgaagctcgtcttactggctctcgaggatggaagtgccctgagcagaaaagtgttggtgctgtttgtcgtccaaagacttgaacccaggttcccccaagcttcaaagacttccatcgggcacgtggttcagcttctttaccgcgcttcttgctttaaagtcaccaagcgcgacgaggactcgtcgctcatgcagctgaaggaagaattcagaacctatgaagcacttcgccgggagcatgactcccaaatcgtgcagattgccatggaggctgggctccgtattgcacctgaccagtggagttcgttgttatatggtgatcagagccacaagtctcatatgcaatcaataattgacaagttgcagactccagcgagctttgcccagtctgtacaggaattaacgatagcgcttcaacggactggagatccagccaatttaaataggctcagaccccatctggaactcctggccaatatagatccttcacctgacgcacctcccccaacatgggagcagctcgagaacggcttggttgccgtacgaactgttgtgcacggcctggtcgactatattcagaaccattcaaagaaaggagctgaccaacaacagcctccacagcactcgaagtacaaaacatacatgtgtagagatatgaagcagcgcgggggctgtcctcggggtgccagctgcacctttgcacatagccaggaagagctagagaagtttaggaagatgaataaacgacttgtgccgaggaggcctctctccgcgagtttgggtcagctgaacgaggtgggactgccctcagccgctatattacccgacgagggcgccgttgacctgccgtcacggaagccgcccgcattacctaacggcatcgtgtccactggcaatactgttactcaattaataccccgcgggacagatccatcatacgactcttccttgaagcccggtaaaatagaccatttgagcagctccgccccagggagtccccctgacctgctggaatcagtacccaagtctatatccgccctgcccgtaaacccccacagtatcccacctcggggacccgccgatctgccccccatgccggtaactaaacccctgcagatggtgccccgcggaagccaactgtatcctgcccaacagaccgatgtttattatcaggatccacggggcgctgctcccccatttgagcctgctccttaccaacagggaatgtattacaccccaccgccccagtgtgtcagtcggttcgttaggccccctccctctgctcccgagccagcacctccatacttggaccactaccctccctatctgcaggagagggtcgtgaactctcagtacggcactcagccgcagcagtatcccccaatatatccaagtcactatgacggccgccgagtgtaccccgccccaagctataccagggaggaaatatttcgcgagagcccaataccgattgaaatacccccagcggcggttccctcctacgtgcccgagagcagagaacggtaccagcagattgaatcttactatccagtagctccacaccctacacagattcgccctagctacttgagggagcctccatatagcagactgcctcctccaccccagccacatccaagcttggatgaactccataggcggaggaaagaaattatggcgcaattagaggagaggaaagttataagccccccacctttcgctccgtctccaaccctccctccgaccttccatccagaagagtttctggatgaggatctaaaggttgccggtaaatataagggcaacgactatagccagtattccccatggagctgcgacaccatcggctcttacattggaaccaaggatgccaagcccaaggatgtggttgccgcggggtctgtcgagatgatgaatgtcgaatcaaagggcatgagggatcagcggctggatctacaaagaagggctgccgagacaagcgatgatgacctcatccccttcggcgatcggccaaccgtgagtcgctttggcgctatatcccggaccagcaaaacgatctaccaaggggcgggacccatgcaagcaatggccccacagggggcacccaccaagagtattaacattagtgactacagcccttacggtactcacggcggttggggggcttcaccatactccccacaccagaacatccccagtcagggtcacttttctgaaagagaaagaatttccatgtcggaagtcgcttcccatggcaaaccgcttccctctgcagaacgcgagcaacttcgccttgagcttcaacaattaaaccaccagatatctcagcaaacccagctgcgcggtctagaggcggtgtcaaaccgcttagtgttgcagagagaggccaacacactcgcggggcagagccaaccccctccacctccacctccaaaatggccaggcatgatttcctctgaacagctgagtcttgagctccatcaggtggaacgtgagattgggaagcgtaccagagaactctcaatggagaaccagtgttcccttgacatgaagagcaagctcaatacttctaagcaggccgagaatgggcagccagagcctcaaaacaaggtgcccgctgaggatctcactcttacattctcagacgtaccgaacgggtctgcccttacccaggagaacatctcactcctgagcaacaaaacgagcagcctaaacctgagtgaggaccccgaaggaggcggagataataacgattctcagaggagtggtgtgacgccgagctctgccccctag

SEQ ID NO: 133003 - DNA, 984 bp, synthetic construct
  misc_feature 1..984: note = Description of Artificial Sequence: Synthetic coding sequence
  source 1..984: mol_type = other DNA
atgtgggccacctgctgtaattggttctgccttgatgggcaaccggaggaagtcccccccccccagggcgccagaatgcaagcttattctaatcccggatattccagtttcccatcacccacggggctagagccaagctgcaaatcatgtggtgcccattttgcaaataccgcgcgtaagcaaacttgcctagactgcaaaaaaaacttctgtatgacgtgctcgtcccaagtggggaatggaccaaggctgtgcttactgtgccagcgctttcgagccaccgcatttcaaagagaggaattgatgaagatgaaggttaaggatcttagagactacctctctctacatgacattagcactgaaatgtgccgggagaaagaagagctggtgcttcttgtcctcgggcagcagcctgtgatctcacaagaagacagaacgcgcgcttcaaccctgtccccagactttcctgaacagcaggcctttctcacacaaccccactccagtatggtgccacccacatcacctaatctgccaagcagctctgcccaggcgacgtctgttccccctgctcaagtccaggaaaaccagcagtctattgattctgaggactcatttgtgcccggacgacgcgcctcactgagcgatctgaccgatcttgaggatatcgagggacttaccgtgcgtcagctcaaggagattctcgcgcggaacttcgttaattacaaaggatgctgcgaaaaatgggagctcatggagagggttacaaggctgtataaggatcaaaaaggcctgcaacatctgggaggtgctgtcccatcaggactagaggagaatctgtgcaagatttgcatggacagcccaattgactgcgtgttgctggaatgcggacacatggtaacttgcaccaaatgcggtaaacggatgaatgagtgtccaatttgtcgccagtatgtcattcgggccgtgcacgtctttcggtcctag

SEQ ID NO: 133004 - DNA, 1092 bp, synthetic construct
  misc_feature 1..1092: note = Description of Artificial Sequence: Synthetic coding sequence
  source 1..1092: mol_type = other DNA
atgtgggcgacttgttgtaactggttttgtctcgacggccaaccagaagaggtgccgccgccccagggagctcgcatgcaagcctattctaacccaggctactcttcttttccgtcgcccacagggctcgaaccgtcctgtaagagctgcggagcgcattttgctaacaccgctaggaaacaaacatgtctggattgtaagaagaacttttgcatgacctgctcttcccaggtgggtaatggccctcgattgtgcctcctgtgtcagcggttcagggcaactgccttccagcgggaggagcttatgaaaatgaaagttaaggatcttcgggattacctctccttgcacgatatcagcaccgaaatgtgcagagagaaggaagagctggtgctgctagtcttgggccagcagcccgttatttcacaggaggatagaacgcgagccagtacactgtcgccggatttcccagaacagcaggcatttttaactcagccacacagctctatggtgccacctacatccccaaacttacctagctcctccgcacaggcaacctctgttccccccgctcaggtgcaggagaatcaacaggctaatggacacgtaagtcaggatcaggaggaaccagtttatttggagtccgttgcacgagtgccggccgaggacgagacccaaagtatcgattcagaggacagcttcgttcccggacgtcgggctagtcttagcgacctcaccgatctcgaagacatagaaggcctgaccgtcaggcagcttaaggagattctcgccaggaactttgtgaattacaagggctgttgcgagaagtgggagctgatggaaagggtcacaaggctgtataaggatcagaaaggtctgcagcatttggtgtcaggggcagaggaccagaatgggggggcagtaccttcaggcctcgaggagaatctgtgtaagatctgtatggatagccctattgattgcgtgctgctcgaatgcggccatatggtgacttgcacgaaatgcggtaaacgtatgaatgaatgcccaatatgtagacagtacgtaattcgggccgtccacgtgtttcgttcctag

SEQ ID NO: 133005 - DNA, 1068 bp, synthetic construct
  misc_feature 1..1068: note = Description of Artificial Sequence: Synthetic coding sequence
  source 1..1068: mol_type = other DNA
atgtgggcaacgtgttgtaactggttctgtctcgacggccagcctgaggaagtgccgccaccacagggagcaagaatgcaggcctactcgaaccccggctacagtagcttcccttcccccacagggttagagccttcgtgtaagagctgtggcgctcacttcgccaacacagcaaggaaacagacctgcctagactgcaaaaagaacttttgcatgacatgtagcagtcaggtaggcaatgggccccggctctgcctgctttgccagaggttcagagcgacagcgttccagcgtgaggaactcatgaagatgaaagtgaaggatctgagggattacttatccctccacgatatctccacagagatgtgccgcgaaaaagaggaacttgtcttgcttgttttgggccaacagcccgttatctctcaggaagatcgcacccgagcatcaactctcagccccgattttccggaacaacaagcttttctgactcagccccatagtagcatggtgccccccactagcccaaacctcccttcctctagtgctcaggccacttccgtgccccctgctcaggtgcaagagaaccagcaggctaacggccatgtatcccaggatcaagaggaacctgtgtaccttgaatcggtcgctcgagtccctgctgaggatgaaactcagtccattgacagtgaagattctttcgtgccgggaaggcgcgcatccctgtcagacctcaccgatttggaggacatcgaaggacttactgttcggcagttgaaggaaattctggcgaggaatttcgtaaactacaaaggctgctgtgaaaagtgggagctgatggagagggttactagactgtacaaggaccagaagggcttgcagcatttagggggagctgtgcccagcggcctcgaggaaaatctctgtaaaatttgcatggacagtcctatagactgcgtccttctagaatgtggacacatggtcacctgtactaagtgcggtaagagaatgaacgagtgccccatttgccgccagtacgtgattcgagcagtccacgtgttccgctcttag

SEQ ID NO: 133006 - DNA, 1092 bp, synthetic construct
  misc_feature 1..1092: note = Description of Artificial Sequence: Synthetic coding sequence
  source 1..1092: mol_type = other DNA
atgtgggctacgtgttgcaactggttctgcttggacggccagccagaggaagttcctccacctcagggggcgcggatgcaggcttactcgaaccccggatactcgtcgtttccatctcctactggcctggagccaagctgcaagtcgtgcggggcacattttgcaaataccgccagaaagcagacatgcctagattgcaaaaaaaacttctgcatgacatgtagcagtcaggttggaaatggcccccggctgtgcctactttgtcaaaggtttcgagccacagcttttcagagggaggagctgatgaagatgaaggtgaaggatttgagggactatctgagtctgcacgatatttcaacagagatgtgccgcgaaaaagaggaactagtcctgctggtgctcggtcagcagcccgtgatcagtcaggaggatcgtacgcgagcttctacactatcccctgatttcccagaacagcaggctttcctcacccagcctcatagtagtatggtcccaccgacatcccctaacctcccttcgtccagtgcccaggctacaagcgtgcctccagcccaggtgcaagaaaaccagcaggccaacggtcacgtgtcccaggatcaagaggaacctgtctacctcgaaagcgtggccagagtccccgcagaggatgagacacagtccattgacagtgaagattcattcgtgcctggcagaagagctagcctcagtgacctgactgatctagaagacatcgagggtttgactgtgcggcaactaaaggagatattagctcgtaactttgttaactataaaggctgttgtgagaagtgggaattaatggagagggtgacaaggctatacaaggatcagaaaggattgcagcacctggtgtccggcgccgaagaccagaacgggggtgctgttcctagcggactggaagaaaacctgtgcaagatatgtatggacagtcccatcgattgcgtcctacttgaatgcggccatatggttacttgtactaagtgtggaaagcgtatgaatgaatgtcctatctgtcgacagtacgtgatcagggctgtacatgttttccgttcttag

SEQ ID NO: 133007 - DNA, 816 bp, synthetic construct
  misc_feature 1..816: note = Description of Artificial Sequence: Synthetic coding sequence
  source 1..816: mol_type = other DNA
atgtgggcgacatgttgcaattggttttgcctggacggccagcctgaggaagtccccccaccacagggggccaggatgcaggcctattcaaaccccggttattcctcattccctagccctaccggcttagagccctcttgtaagtcatgcggcgctcacttcgccaacacggctcggaaacagacctgtctggactgtaagaagaacttttgtatgacatgttcttcccaggtggggaacggaccaagactgtgcctgctctgtcagcggttcagggccacagcatttcaacgagaggaattgatgaagatgaaggtgaaggacctgagggattatctgagcctccatgacatcagcacagagatgtgccgagaaaaggaggaactggtgttattggtgctgggccagcagcccgtaatatctcaagaggatcgaacccgggccagtacattaagcccggacttccccgaacagcaggccttcctcacacagccccattcctctatggtgcccccaacgtcccccaacctgcctagctcatctgcacaggccacatccgttccccccgcccaggtccaggagaatcagcaggcaaatggccacgtctcccaggatcaggaggaacccgtctatcttgaaagcgttgcgagggtgcctgccgaagatgagacacaatcaattgactccgaagactccttcgtacctgggaggagagcatctctttctgaccttaccgacctcgaggatatcgagggactgaccgtgcgacagctgaaggagatcctggccagaaacttcgtcaattacaaggggtag

SEQ ID NO: 133008 - DNA, 402 bp, synthetic construct
  misc_feature 1..402: note = Description of Artificial Sequence: Synthetic coding sequence
  source 1..402: mol_type = other DNA
atgtgggctacctgctgtaactggttctgcctcgatgggcagcccgaggaagttccaccaccccagggggctcgcatgcaggcgtattctaatcctggctacagtagtttcccatcccccacagggttggaacccagttgtaaatcatgcggcgcacattttgcaaacaccgcacggaagcaaacctgcctcgattgtaagaagaatttctgcatgacttgctctagccaggtggggaatggtcctcggctctgtctgctgtgccagaggttcagagcaaccgccttccagagagaggagttgatgaaaatgaaggttaaggatctcagggattacctgagccttcatgatatcagtaccgagatgtgtcgcgagaaggaggagctggtgttactggtgtag

SEQ ID NO: 133009 - DNA, 570 bp, synthetic construct
  misc_feature 1..570: note = Description of Artificial Sequence: Synthetic coding sequence
  source 1..570: mol_type = other DNA
atgtgggctacctgttgtaattggttctgcctcgatggccagcccgaggaggtgcccccaccccaaggagcaagaatgcaagcctactctaacccaggctattcttccttccccagccctactggactagagccctcgtgcaagtcctgcggggcgcattttgctaacacggctaggaaacagacatgcttggattgtaagaaaaatttctgcatgacgtgctcttcacaagtggggaacggccctcggctgtgtctgctttgccagcgctttagagctacagctttccagagggaggagctcatgaagatgaaagtgaaagatctgcgtgattacctaagcctgcacgatatcagtacagaaatgtgtcgggagaaagaagagcttgtgctgctggtcctagggcagcagccggtcatcagtcaagaggaccgaacccgggccagtacactgtcacccgatttccccgaacagcaggcgttccttacccagccccatagtagcatggtgcctccaaccagccctaaccttccttccagcagtgcacaagctaccagcgtgcccccgtag

SEQ ID NO: 133010 - DNA, 138 bp, synthetic construct
  misc_feature 1..138: note = Description of Artificial Sequence: Synthetic coding sequence
  source 1..138: mol_type = other DNA
atgtgggcaacatgttgtaactggttctgcttggatggccaacctgaggaggtccctcctccccagggagctagaatgcaagcatatagcaaccccggctactctagcttcccaagtccaaccggactcgagccttag

SEQ ID NO: 133011 - DNA, 2124 bp, synthetic construct
  misc_feature 1..2124: note = Description of Artificial Sequence: Synthetic coding sequence
  source 1..2124: mol_type = other DNA
atgagtggctccagacaggcagggtccgggagcgctggaacgtcaccaggcagcagcgcagcctctagtgtgacaagcgcatcctccagcttaagctctagtccttccccaccatctgtggctgtaagcgccgcagctttagtctccggaggggtagctcaagctgccggtagtggagggctcggcggccccgtgcgcccagtattagtggctccggccgtgtccggatccggagggggtgctgttagtacagggctaagtaggcattcttgcgcggccagacccagcgctggagtcggggggtcttcaagttccttgggatcaggcagtcgcaagcgtcctctcctggctcccttatgtaacgggttaatcaactcgtacgaagacaagtcgaatgactttgtgtgcccgatttgtttcgatatgattgaggaagcctatatgacaaaatgtggtcacagcttttgttacaagtgtatccaccagtcattggaagataataatagatgccctaagtgtaattatgtggttgacaacatcgaccacctgtatcccaattttctcgtaaacgagttgattctgaaacagaagcagcgcttcgaggagaaaaggtttaaactcgatcactctaatggccaccgctggcagatattccaggactggttagggacagaccaggacaacttggacctggctaacgtcaatctaatgctggaactgctggtgcaaaaaaagaaacagttggaagccgagtcacacgccgcccaattgcaaattctaatggaatttctcaaagtggcacgaaggaataaacgggaggagatgtccgggctatatagccctgtgtcggaggacagtacagtcccgcagttcgaggcaccctccccctcacactcttctatcattgactctactgaatattctcaaccccccggtttcagcggaagctcacagaccaagaaacagccctggtataactccactctggcttcccgtcgaaaacggctgacagcccacttcgaggaccttgagcagtgctatttcagtacccgcatgtcgcgtattagtgacgactcacgaactgcatcacaattagacgaattccaggaatgcctatccaaattcaccagatacaactcagtccgacctcttgctaccctctcctatgcgagcgatctgtataatggcagtagcatcgtatcctctatcgagtttgaccgcgattgcgattacttcgcaattgcgggggtgaccaaaaagattaaggtgtatgagtacgacacagtcatccaggacgccgttgacatccactaccctgagaacgaaatgacttgcaatagcaaaataagttgcatttcttggtctagttatcataagaacctccttgcgtccagcgattacgaggggacagtcattctgtgggacggctttacgggacagagatctaaggtttatcaagaacacgagaaacgatgttggtcggtggactttaatctcatggatcctaagctcctcgcgagtggctccgatgacgccaaggtcaagctgtggtccaccaaccttgacaattcagtcgcttcaatcgaagccaaagccaatgtgtgctgcgtgaaattctctccatccagtcggtaccacttagcctttggttgtgccgatcattgtgtccactattatgatctgagaaataccaaacaaccgatcatggtttttaagggtcacagaaaggcagtctcatatgctaaattcgtgagcggagaggaaatcgtcagcgccagcactgacagccagttgaagctgtggaacgtgggcaagccgtattgcttgaggtctttcaaaggccatataaatgaaaaaaattttgtcggactagcttcaaatggtgattatatcgcatgtggaagcgagaacaattctctctatctgtattacaaagggctctcgaaaacacttctgacctttaagttcgacaccgtcaaatccgtcctggacaaagatcgcaaagaagatgacaccaacgagtttgttagcgccgtctgttggcgagctctccccgacggggaatctaacgtcctcatagcggcgaactcacagggaactattaaagttttagaacttgtctag

SEQ ID NO: 133012 - DNA, 1521 bp, synthetic construct
  misc_feature 1..1521: note = Description of Artificial Sequence: Synthetic coding sequence
  source 1..1521: mol_type = other DNA
atggagttcctgaaggtcgccaggcggaataaacgcgaacagctggaacagattcagaaggagctcagtgtcctggaggaggacatcaagcgggttgaagagatgagtggcctatattctcctgtgtctgaggactcgaccgtcccccagtttgaggctccttccccctctcattccagcataatcgattcaacggagtactcacagcctcctggtttctccgggtcttcacaagccggcgtgcagtggcggtacttaggatccttacagccccccccccccagatataagcgatttagctgtctcaccctcccgagtagctgggattacaggcggttgcccccccacttaactaagaagcaaccatggtacaacagcacccttgccagtagacgcaaaagactgaccgcccatttcgaggacttggagcagtgctacttctcgactaggatgagccgcatctcagacgatagtaggacagccagtcagctagatgagtttcaggaatgcttgagcaaatttacccgttacaatagcgttagacctctggccaccctgtcctacgcatcggacctttataacggctcctcaatagtgagctccatcgagtttgaccgtgattgtgattattttgccattgcaggggtgactaaaaaaatcaaggtttacgagtatgatactgtgatacaggacgcggtggacatccactaccccgaaaacgagatgacgtgcaacagtaagataagctgcatctcttggtcctcataccataagaatcttctggcgtcctccgactacgagggaaccgtgattctatgggacgggttcactggacagcgtagtaaagtttaccaagaacacgaaaagagatgttggtccgtcgattttaatctgatggatccaaagcttctggcctctggctcggatgatgccaaagtcaaactatggtcaaccaacctcgataatagtgtggcttccatagaggcaaaagccaacgtctgctgcgtgaagttttcgcctagtagcaggtaccacttggcctttggatgtgccgatcattgtgtacactattacgatctgcggaataccaagcagccaataatggtgtttaaaggacaccgcaaagcagtaagttacgcaaaattcgttagtggcgaagagatcgtttcagcttctaccgatagccagttaaagctgtggaatgttggcaagccgtattgcctgcggtcgttcaagggtcatattaatgagaaaaacttcgtgggacttgctagtaacggggattatattgcctgtgggtcggaaaacaactccttgtacttgtattacaaagggctctcaaagaccctacttacattcaagttcgacacagtgaagagcgtgttggataaggataggaaggaggacgataccaatgaatttgtgagcgccgtttgttggcgggcactccccgacggggagagcaacgtgctgatcgccgcaaactcgcaaggcaccattaaggttttggctctcctttag

SEQ ID NO: 133013 - DNA, 2196 bp, synthetic construct
  misc_feature 1..2196: note = Description of Artificial Sequence: Synthetic coding sequence
  source 1..2196: mol_type = other DNA
atgagcgggtccagacaagcaggctccggaagcgcagggactagcccaggctcctccgccgctagctccgtcacaagtgcctcctccagcttaagcagctctccttctccgccttctgttgcagtatcggctgctgcattggtgtccggtggcgtggctcaggccgccggttccggcgggctgggcggccctgtaagacccgttcttgtggcccctgccgtatccgggtcaggcggaggggcggtctctaccgggctgtcaaggcatagctgcgccgcccgcccttcagccggcgtgggcgggtcttcatcatcgctcggctctggctctagaaagaggccattgctcgctcccctgtgtaatgggctgataaacagttatgaggataagagtaacgatttcgtttgcccgatttgttttgacatgatcgaggaagcctatatgacgaagtgcggccactcattttgctacaagtgcatccatcagagtttggaggacaacaataggtgtcctaagtgcaattatgtggttgacaacatcgaccatctgtacccaaacttcctggtcaatgagcttattttaaaacagaagcagcgctttgaggaaaaacgcttcaaactggatcacagtgtgagttctaccaacggccatagatggcagatattccaggactggctgggaaccgaccaagacaacctggacttagcaaacgtcaacctgatgctggaactgctcgtacaaaagaagaagcagctggaggctgagtcacatgctgcgcaactccaaatcctcatggagttcttgaaggttgctcgacgaaacaagagggagcaattggaacaaatccagaaagaactatcagtgctggaagaagacattaagagagtcgaggagatgtcaggcttatactcaccggtttccgaggattctacggtgccacagttcgaggccccaagcccatcacacagctctatcatcgatagcaccgaatattcgcagcctcctggctttagcggctctagtcagactaagaagcaaccatggtacaatagtacactggcctcccgtcggaaaagactaacagcgcattttgaagaccttgagcagtgctacttcagcacccgcatgtctaggattagcgacgacagtagaaccgcctctcagctggacgagttccaggagtgcctgtccaaattcacgagatacaatagcgtgaggcctctggccactttgagctacgcaagcgatctgtacaacggctctagcattgtctcatcaatagagttcgacagagattgtgactacttcgccattgcaggggtgacgaagaaaattaaggtgtacgagtatgatacggtgattcaggatgcggtggacattcactaccccgagaatgagatgacctgcaattcaaagatctcctgtatatcgtggtcgagctaccacaagaacttgctggcgtcttcagattatgagggaacggtgatcctttgggacggattcactggacagagatctaaggtgtaccaggaacacgagaaacggtgctggagcgtggactttaacctcatggatccaaagcttctggccagcgggagcgacgacgccaaagtcaagctatggagcacgaatctggataattccgtcgcctctatcgaggccaaggcgaacgtttgttgtgtaaagttctcaccttcttctcggtaccatctggcgttcggttgtgctgatcattgcgtgcactattacgatttacgaaatactaagcaaccaatcatggtgttcaaggggcaccggaaggccgtgtcctatgccaaatttgtctccggtgaagagatcgtgtcagcctccacggacagccagttgaaactatggaatgtcggcaaaccctactgcttgcgcagcttcaagggtcatataaatgagaaaaacttcgtgggactggccagtaatggggattacatcgcttgcggtagcgagaataattccttatacctgtattacaaaggcctgagtaagaccctgctgacattcaagttcgacactgttaaatcagtgctcgataaagacaggaaagaggacgacaccaatgaattcgttagcgcagtctgctggcgcgccctgccggatggtgagtcgaacgtgttaattgcggcgaattcacagggaactatcaaggtgctggagctggtgtag

SEQ ID NO: 133014 - DNA, 774 bp, synthetic construct
  misc_feature 1..774: note = Description of Artificial Sequence: Synthetic coding sequence
  source 1..774: mol_type = other DNA
atgagcggtagtcgtcaggccggcagcggtagtgctgggacatctcctggtagctctgcagcaagcagcgtgacttcagcgtcatctagcttgtcaagcagcccatcccctccttctgtggctgtgagcgcagccgccctagtgtctggcggcgtggcccaggccgccggttcaggaggattgggcggtcctgtgagaccagtcctggtggcgcccgcggtatcggggtccggagggggagccgtgagtacaggattaagtagacattcatgcgctgccagaccctctgcgggggttggcggtagcagcagttccttgggctctgggtcccgaaagcgacctttactggcccctttgtgcaatgggctgatcaactcctatgaagataaaagtaacgacttcgtgtgtcctatttgcttcgatatgattgaagaggcatatatgacaaaatgcggccacagtttttgctacaagtgcattcaccaatcattggaggacaataaccgctgtccgaagtgtaattacgttgttgataatatagaccacttgtacccaaattttttagtgaatgaattgatcctgaagcaaaaacagaggttcgaggaaaaacggtttaagcttgaccactcagtcagcagcacgaatggccacaggtggcaaattttccaagattggctcggtactgaccaggataacctggacctggcaaatgtaaacctgatgctggagctgttggttcaaaagaacaagaagaagaagaagaaaaagaaatag

SEQ ID NO: 133015 - DNA, 2325 bp, synthetic construct
  misc_feature 1..2325: note = Description of Artificial Sequence: Synthetic coding sequence
  source 1..2325: mol_type = other DNA
atggctcacgaagccatggaatacgacgtgcaggtgcagttaaatcatgccgagcagcagcccgccccagcagggatggcatctagccagggaggaccagctctactgcagcctgtgcccgcggatgtggtgagttcacaaggcgtacctagcatcctccagcccgctcctgctgaggtcatttcctctcaagcgacccctccacttcttcagcccgctccccagctttcggtggatctaactgaggtcgaagtgcttggtgaggacaccgtagagaatatcaatccacggacctccgaacagcacagacagggctccgatggaaatcacacaatacctgcctcaagtctgcacagcatgacgaactttatttcaggactgcagaggctgcacggcatgttggaattcctgcgcccttcttcatctaaccatagcgtcggccctatgcggaccaggcggagggtcagcgcctcccggcgcgcccgggctggggggtctcagcggaccgacagcgcccggctgagggccccactggacgcctacttccaagtgagcaggacacaacccgacctacctgccactacttacgattccgagacaaggaacccagtgtccgaggagctacaggtttctagtagttctgattctgatagtgatagttctgccgagtatggaggtgtagttgaccaagctgaagaatcaggggcggtgattttagaagagcagcttgccggggtttccgcagaacaagaggttacctgcatagacggagggaagacattaccaaaacagcccagtcctcagaaaagcgagccgctcctccctagcgccagtatggatgaagaggaaggcgatacttgcacaatatgtctcgagcagtggactaacgcaggggaccacaggctcagtgccctccggtgcggacacttgtttgggtataggtgcatctccacatggctgaaaggccaggtgcgcaagtgtcctcaatgtaacaagaaggctaggcacagcgacatcgtggtgctgtacgcgagaacactgcgcgctctggataccagtgagcaggaacggatgaaaagctctcttctgaaggagcagatgctcagaaaacaggcagaactcgaatccgcccagtgccgacttcagttgcaggtgcttactgacaagtgcacaaggctgcagcgtcgggttcaagacctgcagaagctcacctcacaccaatctcagaacttgcagcagccaagaggtagtcaggcctgggtgctctcctgcagtccgtctagtcagggacagcataaacataagtaccattttcaaaagaccttcactgtttcccaagccggtaactgcagaatcatggcttactgtgatgccctcagctgcctggtcatatcacagccttccccccaagccagctttctgcccgggttcggtgtgaaaatgctgagtactgccaatatgaagtcttcccagtacattccaatgcacgggaagcagatcagggggctagctttctcaagctatctgcggggacttctcctgtctgcatccctagacaacacaatcaagctgacttctctggaaactaatacggtggtccagacatacaatgctggccggccagtatggtcttgttgttggtgtctggatgaggcaaattatatttacgccggtttggccaacggaagcatactggtttacgacgtcagaaatacatcttcccacgttcaggagctcgtggcccaaaaagcccgctgtcctcttgtgagccttagctatatgccacgcgctgcaagcgccgctttcccatatggtggtgtcctggccgggacgctggaggacgcatccttctgggaacaaaaaatggatttttcgcattggccacacgtgctccccctggagcccggcggatgtatcgatttccaaaccgagaattcttctagacattgcttggttacgtacagaccagataagaatcacactactattcgtagtgtcttgatggagatgtcttatcgcctggacgatacgggaaatccaatatgtagttgtcagcctgtccataccttttttggggggcccacgtgtaagctcctcactaagaatgctattttccagtccccagagaacgatgggaacattttggtttgcacaggcgacgaggccgctaatagcgccctgttatgggacgctgcttctggaagcctcctccaagacttgcagaccgaccagcctgtcctggacatatgccccttcgaggttaatcggaactcttatctggcaactttgaccgagaaaatggtacatatttacaaatgggagtag

SEQ ID NO: 133016 - DNA, 792 bp, synthetic construct
  misc_feature 1..792: note = Description of Artificial Sequence: Synthetic coding sequence
  source 1..792: mol_type = other DNA
atggcccatgaggccatggaatatgatgtgcaggtgcagctcaatcacgccgagcagcagccagcaccagctggcatggctagctctcaagggggtccagcactcttgcagcctgtgccagcagacgtagtttcgagtcaaggcgtaccaagcatcctccagccggctcccgccgaggtgattagctcacaggctacaccccctctccttcaaccggcaccccaactgagcgtggatctgactgaggtggaggttctcggggaggacaccgttgagaacattaatccccgcacctcagagcagcataggcagggatcagatggaaatcacacaattccagcctctagtttacactctatgcccctagaacccggaggctgcatcgacttccagaccgagaactcgtctagacactgtcttgtaacctatcgccccgacaagaaccacacaactattcggagcgtgttgatggagatgagctaccggttggacgacaccgggaatccgatttgcagctgtcagcctgttcatacttttttcggcggacccacatgtaaactccttactaaaaacgctatctttcagtctccggaaaacgacggcaatatccttgtctgcactggtgacgaggcagctaattcggccttgctgtgggacgcagcctccgggtctctgctccaggatctgcagacagaccaacctgtgctggatatctgccctttcgaagtgaaccgcaattcttacttagccactctcaccgagaaaatggtccacatatacaagtgggaatag

SEQ ID NO: 133017 - DNA, 2058 bp, synthetic construct
  misc_feature 1..2058: note = Description of Artificial Sequence: Synthetic coding sequence
  source 1..2058: mol_type = other DNA
atgaatcagtccagatctcgctccgacggcggcagcgaggaaacactgccccaagaccacaatcatcacgagaatgaaagacgttggcagcaggagagactgcatcgggaggaagcttactatcaattcataaacgagttgaatgatgaggattatcgattgatgagggatcacaacctccttggcacccccggggagatcaccagtgaggaactccagcagagattagatggcgtcaaggaacaattggcctcccagcctgatctgagggacgggactaattatcgtgattccgaggtcccccgcgagagcagccacgaggactccttgttggagtggctgaatactttccggcggactggcaacgccactagaagcgggcagaacggaaaccagacatggcgagccgtttctcgtacaaacccaaataacggggaattcagattcagtcttgagattcacgtcaatcatgaaaacagagggtttgaaatacatggagaagactacacagatattcccttgtcggactccaatagagatcacacagccaaccgtcagcagaggtcaacaagccctgttgcacgcaggacccgctctcaaacgtctgtaaacttcaatggctcttcatcaaacatcccgcggacccgtctagcaagcagaggacagaaccctgctgaggggtcttttagtaccttgggaaggctacggaacgggataggcggggccgctggcatccccagggccaatgcgagcaggactaatttctcatcccacacaaaccagtccggcggtagtgagctgcgccagagagagggtcagagattcggcgctgcccatgtgtgggagaatggtgctcggtcaaatgtaacagtgcgtaacacgaatcaaaggctggaaccaattcggctccggagtacaagtaatagccgcagtcgttcccctattcagcggcaaagtggtaccgtatatcataattctcaaagggaatccagaccagtacagcagacaacacgccgatcagttcggcggcgcggcaggacacgcgtttttcttgagcaggaccgagagcgggagagaagggggaccgcttatacgccattttctaacagtaggcttgtgtcaaggatcaccgtggaggaaggcgaagagagcagtcgaagctcgaccgcagttagacgacacccaacaatcactcttgacctgcaggtccgccggattcgcccaggggaaaacagagaccgagacagtatcgcgaacaggaccagatctcgtgtaggactggccgagaataccgtcacaattgagagcaactcaggagggttcaggagaactatttctcgactcgaacgcagcgggattaggacgtacgtgtccaccatcacagttccattacgacgcattagcgagaacgagctggtagagccttcatcggtggcgcttcgttcaatcttacgccagatcatgaccggctttggggaactctcgtctctgatggaggccgattccgaatccgagctccagagaaacgggcagcatctgcctgacatgcattcggaactgtccaacttgggcacggacaacaaccggtctcagcaccgcgaaggttcaagtcaggatcgccaggctcagggagacagcacagagatgcacggagaaaacgagactacacagccccacactagaaacagcgattctaggggggggcggcagctcagaaaccctaataatctagttgaaacagggacactgcccatactgaggttagcgcatttctttttgcttaacgaaagtgatgacgatgatcggattaggggcctcactaaagaacagattgacaacctgtcaacacgtcattatgagcacaattccatagactctgagctcggcaagatctgtagcgtttgtatctcggactatgtgactgggaacaaattaaggcagctgccatgtatgcacgagttccatattcactgtattgaccgttggctatccgaaaactgcacttgccctatctgccggcagccagttttggggagcaatatagcgaacaatggatag

SEQ ID NO: 133018 - DNA, 2058 bp, synthetic construct
  misc_feature 1..2058: note = Description of Artificial Sequence: Synthetic coding sequence
  source 1..2058: mol_type = other DNA
atgaaccaatcgcggtcccgcagcgacggtggcagtgaagaaacactgccccaggatcacaaccaccacgagaatgagcgacgctggcagcaggagagactccatcgagaggaggcatattaccaatttatcaacgagttaaacgacgaagactataggttaatgagagaccataatctgctaggaactcctggcgaaataacgtccgaagaattgcagcaaaggttagatggcgtcaaagagcaattggcaagtcaacccgatttgagggacggtaccaactatcgcgactccgaagtgcctcgagagagttctcatgaagactccctgctcgagtggctaaatactttccggcgaaccgggaatgccacaagatctgggcagaatggcaaccagacttggagagctgtttctcgcactaatccgaacaatggtgaattcaggttttcactcgaaattcacgtgaaccatgagaatagggggttcgaaatccatggggaagactatacagacatcccactttctgattctaaccgcgaccacaccgccaaccgacagcagcggtcgacatccccagtggcaagaaggactcgatctcaaaccagcgtgaacttcaacggctcctccagtaacatcccacggacaaggctggcgtcccgggggcaaaacccagccgaagggagcttttccacactcggccgactgcgcaatggaatcggcggcgctgcaggaatacctagagcgaatgcctcacggacaaatttcagctcgcatacgaaccagtccggaggctcagagctcagacaacgggagggacaacggtttggggccgcacacgtctgggagaatggggcaaggtcgaacgtgaccgtccgcaataccaaccaacgcttagaacccatccggctccgctccacgtcaaatagcaggtcccgatctcccatccagaggcagtctggaacagtctaccacaattcccagcgcgaatccaggccggtccagcagactaccaggcgcagcgtacggaggaggggccgaacacgggtttttttggagcaggatcgggaacgagaaaggaggggcaccgcatacactcccttctcaaactctaggcttgtgagccgtatcaccgtggaggagggggaggaaagtagcaggagtagcacagccgtcagaagacatccgacaataacgttggacttgcaggtgaggcgcattcgcccaggcgagaatcgtgatagggacagtatagcgaatcgaaccagatcacgtgtgggacttgccgagaacacggtaactatagagtctaattccggcggttttcgccggaccattagtcggttagagcggtctgggatccgaacctacgtctccacaatcactgtgccgctgcgtaggatctccgagaacgagttagtcgagccatcctcagtggcgctgagatccattctgaggcagatcatgacgggtttcggcgaactgagctctcttatggaagctgattcagaaagtgagctgcaacggaacggacaacatctccctgacatgcactccgagctgtctaatctgggaacggacaataatcgatcccaacatcgggaggggtcctcacaagatcgacaggcccagggggactccaccgagatgcatggtgaaaacgagactactcagccccatacgagaaactcagacagccggggaggaagacaactacggaatcctaataacttggtcgagaccggaacactgcctatcctgaggttagcgcatttttttttactgaatgagagcgacgatgatgatcgcatccgcggactgacaaaagaacagatcgacaatctgtctacacgccattatgagcataattcaatagactctgagctggggaaaatctgcagcgtctgcatttctgactacgtgactggaaacaagctgcggcagttaccttgtatgcatgaatttcacatccactgtatagataggtggctgagcgaaaactgtacctgccctatctgccgacaaccagtccttggttccaacatcgcgaataacggttag

SEQ ID NO: 133019 - DNA, 2058 bp, synthetic construct
  misc_feature 1..2058: note = Description of Artificial Sequence: Synthetic coding sequence
  source 1..2058: mol_type = other DNA
atgaaccaatcccgctccaggtctgatggaggatccgaggagaccctccctcaggaccacaaccatcacgagaacgagcggaggtggcagcaagagcgcctgcacagagaagaggcttactaccagttcattaacgaattgaacgacgaagactatcgacttatgagagaccataacctgttgggcacccctggcgagatcacatccgaagagcttcaacagagactcgacggagtaaaagagcaactcgcgagtcagcccgacctgagggacggcaccaattatcgcgacagtgaagttcccagggaatccagccacgaagactctttgctcgagtggctcaacacgtttagaaggaccgggaacgccacaagaagtgggcagaatggaaaccagacgtggcgggcagtgtccagaactaatccaaacaatggcgagtttaggttttccttagaaatccacgtgaaccatgagaaccgggggttcgaaatccatggggaagattatacggatattccactgagcgattcaaatcgtgatcacacagccaacagacaacagagatccacctccccagtggccagacggacaagaagtcaaactagcgtcaactttaacggaagctcctctaacattcccaggacccgcctcgcaagtcgcgggcaaaatcccgctgagggatctttcagcacattgggcagactaagaaatggcatagggggcgctgccggaatcccccgggccaacgcctctcggacaaacttcagtagccacaccaatcagtccggagggtccgagcttcgccagcgcgagggacagagatttggagcagctcacgtctgggagaacggcgcccggagcaacgtcactgttcgcaatacaaatcagcgactggagcccattcgcctacgaagtacttcaaatagcaggtcacggtccccgattcagaggcagtctggcacagtgtaccacaactcacaacgcgaatcaaggcctgtgcagcagacaaccaggcggagtgtgcggaggcggggacgcactcgggtctttctggagcaagaccgggaacgggagcgaagggggactgcttataccccattcagcaatagtcgtttggtctctcggatcaccgtcgaggagggcgaggaatcctcccgctcatcaactgccgtcaggaggcatcccaccattacccttgaccttcaagttcggcggatcagacccggggagaatcgcgaccgggattcaatcgcgaaccgtacccgttctcgagtgggcctggcagaaaatactgtgacaatagagagtaactcaggcggttttcgacgaacaattagccgtttagagcgatctggaatcagaacatatgtttcgactattaccgtgcctttgcggcgtatcagcgaaaacgaactggttgaaccttcctccgtggcattacggtctatactacggcagatcatgactgggttcggtgaactcagttctctaatggaagccgactccgaatccgagcttcagcgaaatggtcagcaccttcctgatatgcattccgaactgtcgaatctcggcactgacaataatcggtcacagcatcgcgagggcagttcccaagaccgccaggctcagggcgactctacagagatgcatggagaaaacgagacgactcagccacacactcggaattccgactctcgcggtgggcggcagctcaggaacccaaataatcttgtggagaccggcactttgccgattctgagactggctcatttttttttgctgaacgagtcagatgatgacgacagaatccggggcctgacgaaggagcagatagataacctgagtacacggcactatgagcataatagcatcgatagcgaactcggcaaaatctgttctgtgtgcataagcgattacgtcaccggaaataaacttagacagcttccctgcatgcacgagttccatattcattgtatcgatcggtggctgtctgagaactgcacttgtccaatatgcagacagccggtgctgggaagcaatatcgccaacaacggttag

SEQ ID NO: 133020 - DNA, 990 bp, synthetic construct
  misc_feature 1..990: note = Description of Artificial Sequence: Synthetic coding sequence
  source 1..990: mol_type = other DNA
atgcaacttgaggtcgacaagatgggaactaagctaggcgagttgttggttagccggattaccgtcgaagagggagaagaaagctccaggtctagcacagcagtgagacgccaccctactatcacgctggatttgcaggtgcggaggatcagacccggagaaaatcgggacagagactcaattgctaaccggactagatcacgggtgggattagctgaaaatactgtcactatcgaatcgaattctgggggtttcaggagaaccatttcacggctggaacgttcaggtataaggacatatgtgtctactatcactgtcccgctccggagaatctctgaaaatgagctcgtcgagccctcttctgttgccctgagaagcatcctgcgacagataatgaccgggtttggcgagctttcgagccttatggaggccgactctgagagcgaactgcaaagaaatggccaacacctgcccgacatgcattccgagctgtcaaacctggggaccgacaataaccgctctcagcaccgggaagggagtagtcaagaccgacaggctcagggagactctaccgaaatgcacggggaaaatgagactacacaaccccacaccagaaactccgactcaaggggcggaaggcagttgcggaatcctaataacctggttgaaactggaaccctcccaattctcagactggcacattttttcctgctcaacgagtcagacgatgatgaccgaatccgcggtctcaccaaagagcagattgacaacctctccacccgtcactatgaacacaacagtatagattctgagttggggaaaatatgctccgtctgcatttcagactacgtgactggcaacaagctgcgtcagctgccttgtatgcatgagttccatatacactgtatcgatcgctggctcagtgagaactgtacctgccccatatgtagacagccagtcctgggcagcaatatcgccaataatggatag

SEQ ID NO: 133021 - DNA, 1221 bp, synthetic construct
  misc_feature 1..1221: note = Description of Artificial Sequence: Synthetic coding sequence
  source 1..1221: mol_type = other DNA
atgaccaccccagccaacgctcagaatgcgtccaagacctgggagctcagtctctatgagctccaccgaacacctcaagaggctattatggacggcaccgaaattgctgtctcccctcggtccttacactctgaactcatgtgtccaatctgtttggatatgctgaagaatactatgacaaccaaagaatgcttacaccggttctgcagcgactgtattgtgacagcccttcggagcggaaataaggaatgccccacatgccggaagaagttagtcagcaaacggagtttaaggcctgatcctaatttcgatgcgctgatttctaagatttatccaagtcgagaggagtatgaggcccaccaggatagggtactcatacgactcagtagactccacaaccagcaggctctctcgagcagcatcgaggaaggactccgaatgcaggcgatgcacagagctcagagggtgagaagaccgattccagggtctgatcaaacaaccactatgtcgggaggcgaaggcgaacctggggagggcgaaggggatggcgaggacgtatcttccgatagtgcacctgactctgcgcctggacctgcgcccaaacgaccccggggaggaggagccggaggaagttctgtgggcactgggggcggcggtaccggaggagtgggcggcggagctggttcggaagactcgggcgaccgaggaggcaccctgggtggcgggaccctgggaccccccagcccacctggagctccctctccgccagaacctggtggggaaatagagctcgtttttcgcccacaccccttactcgtggagaagggagagtactgccagactaggtatgtaaagaccacaggtaacgcaacggtggatcacttatccaagtacttggccctaaggattgccctggagaggagacagcagcaagaggccggtgagccggggggcccgggagggggagctagcgacactggagggcccgacggttgtggaggggagggaggaggagcgggaggcggggatggccctgaggagccggccctgccttcgcttgagggggttagcgaaaaacaatacacaatttacattgcccccgggggaggtgcctttaccacactgaacgggtccttaaccctggaacttgtgaatgaaaaattttggaaggtgtccaggcccctggaactatgctacgccccaaccaaggacccaaaatag

SEQ ID NO: 133022 - DNA, 1221 bp, synthetic construct
  misc_feature 1..1221: note = Description of Artificial Sequence: Synthetic coding sequence
  source 1..1221: mol_type = other DNA
atgacgactcctgctaatgcccagaacgcctcaaagacttgggagctctcactatatgaactacatcggacacctcaggaggccattatggacggcaccgaaatcgctgtaagccccagaagcctgcactctgagctcatgtgcccgatctgcctggatatgctgaagaacaccatgaccactaaggaatgtctccataggttctgtagcgattgtattgttactgccctcagatccggaaacaaagaatgtcctacctgcagaaaaaaactggtcagcaagagatctttgcgtccagatcctaatttcgatgctctgatctcaaaaatatatcccagcagggaagagtacgaagcgcaccaagatagggtgctgattcgcttatcaaggctgcacaatcagcaggccctgtcatcctcgatcgaggagggcctgaggatgcaagcaatgcaccgcgcgcagagggtaagaagacccattccagggtctgaccagactacaactatgtcgggcggagaaggggaaccgggggagggggagggggacggggaggacgtgtcttctgatagcgcccctgactccgcccctggaccagccccaaaaaggcctagaggagggggcgccggggggagctccgtcgggaccgggggcggtgggacgggcggagtgggggggggtgctggatccgaagatagcggcgacagggggggaaccctggggggcggcactctcgggcccccaagcccacccggcgccccctcacccccagagcctggaggcgaaattgaactggtgttcagaccgcatccccttctcgtggagaaaggtgaatactgccaaacgaggtacgtcaagactacaggcaacgctactgtggaccacttgtctaaatatttagccctgcgcattgcccttgagaggcgacagcagcaggaggcaggggagcccggaggtcccggaggcggcgcatcggacaccggaggtcctgacggctgtggcggcgaagggggaggcgccgggggcggggacggacccgaagagccggccctgccttccttagagggggtcagtgagaagcagtataccatctacattgccccaggggggggggcatttacaacccttaatggcagcctgaccctcgaactcgttaatgagaagttttggaaggtcagtcggcctctggaactgtgctatgctccgaccaaagaccctaaatag

SEQ ID NO: 133023 - DNA, 1221 bp, synthetic construct
  misc_feature 1..1221: note = Description of Artificial Sequence: Synthetic coding sequence
  source 1..1221: mol_type = other DNA
atgaccactcctgccaatgcccagaatgctagtaagacctgggaactgagcttgtacgagctgcatcgaacaccacaggaggccatcatggatgggacagaaattgcggtgtcgccccggagccttcattccgagctgatgtgccctatatgtctagacatgctaaaaaacaccatgacgaccaaggaatgccttcatcgcttttgttctgactgcatagttacagcacttcgatccggcaacaaagagtgtcctacctgccgcaagaaacttgtgtctaagcggtcgctaagacccgatccgaactttgacgctctgatttcaaagatctaccctagtagagaggagtatgaggcacatcaagatcgggtgctgatccgtctcagtcggttacacaaccagcaagccctctcctcaagcatcgaggagggattgagaatgcaagctatgcacagagcccagcgagtgcgccggccgatacccggctctgaccagactactacgatgtctggtggcgaaggggagccaggggaaggggaaggggacggagaggacgtgtccagtgattccgcccctgattcagcacctggtcctgcacccaagagaccccgagggggaggcgccggcggaagctctgtggggaccgggggtggcggaacagggggcgtgggcggcggcgcagggtccgaggatagcggagaccgtggaggtacccttggtggcggaaccttaggccctccatctccacccggagccccttcccctcctgagccagggggtgagattgagctggtgtttagaccacatccgctgctggtggaaaaaggggagtattgtcagaccagatatgtcaagacaacgggaaacgcgaccgtcgatcacctgtcaaaatacctggcattaaggatagccctggaacgtcggcagcagcaagaggccggtgagccagggggccccggcgggggcgccagtgataccgggggtcccgatggatgcgggggagaggggggtggtgccggcggcggggatgggcccgaagaacccgcactgcctagtctagaaggcgttagcgaaaagcagtacacaatttacatcgctccgggaggtggggcctttactactcttaatgggtcacttaccttggaactggtaaatgaaaaattttggaaagtttcccgaccactagaactgtgctatgctcccaccaaggatcctaagtag

SEQ ID NO: 133024 - DNA, 1221 bp, synthetic construct
  misc_feature 1..1221: note = Description of Artificial Sequence: Synthetic coding sequence
  source 1..1221: mol_type = other DNA
atgactactcccgcgaacgcgcagaatgcctccaagacctgggagctttccctgtacgagttgcatcggacaccacaggaggccatcatggatgggactgaaattgccgtctcccccagatccctccacagcgagctaatgtgtcctatctgcctcgatatgctgaagaatacaatgacaaccaaggaatgtctgcatagattctgcagtgattgcatcgtgactgcactgcgttccggtaacaaggagtgtccaacatgtcggaaaaagctggtgagcaagcgatcattgagacccgatccaaattttgatgctctgatcagtaaaatatacccaagcagagaggagtacgaagcgcatcaagacagggtcttgatccgtctgtctcgcctgcacaaccagcaagctctctctagtagtattgaggagggattgcgaatgcaggcgatgcatagggcccagagagttcggcgccctattccgggcagtgaccagaccactactatgagtggtggagagggagagcctggagagggtgaaggcgatggcgaggacgtttcaagcgacagcgctcctgatagtgcccctggccctgctcccaagaggcccagaggaggcggcgcaggaggcagctctgtaggcactggtggtggagggacgggtggcgtagggggtggtgccggctcagaggattccggagacagaggtggtactctcggcggtggcactttgggcccgcccagccccccgggtgccccttctcctcctgagccggggggcgagatcgaattagttttccgtccgcacccgttgcttgtggaaaaaggcgagtactgtcaaacccgatatgtgaagacaacaggaaacgccacagtggaccacctgagcaagtatttggctttgaggatagcattggaacgccgccagcagcaggaggccggcgagcccggcggccccggtggtggtgcatccgataccggtggtccggatggctgcgggggcgagggagggggggcagggggaggtgatgggcctgaagagcccgcccttccatcgctcgagggcgtgtctgagaagcagtacacaatatatatcgcacctggggggggtgcttttacgaccctgaatggcagtctcacactcgagcttgtcaatgagaaattctggaaggtaagtcggcccctggagctgtgttatgcaccaacgaaagatcccaagtag

SEQ ID NO: 133025 - DNA, 1221 bp, synthetic construct
  misc_feature 1..1221: note = Description of Artificial Sequence: Synthetic coding sequence
  source 1..1221: mol_type = other DNA
atgaccactcctgccaatgctcagaatgcaagcaagacctgggagctgagtttatacgagttgcaccggacaccacaagaagccattatggacgggacagagatcgccgtatcaccgagaagcctacacagcgagctgatgtgccctatctgcctagatatgcttaagaacaccatgacgacaaaggagtgtctgcatagattttgctctgattgtattgtcacggcgctgagaagtgggaacaaggaatgccccacgtgccgcaaaaagcttgtgtctaaacgcagcttgaggcccgatccgaactttgacgcccttattagtaaaatctatcccagccgcgaagagtacgaggcccaccaagatcgggtgcttatcaggttaagtagactgcataatcagcaggccttaagttcctccattgaggaaggccttaggatgcaggccatgcacagggctcagagggtgaggcggccgatacctggctccgatcaaacaactactatgtcggggggggaaggcgaacctggtgaaggtgaaggggatggggaggatgtttcctcagactccgccccagactctgcgcccggaccagccccgaaacgacctagaggcgggggcgccggcggatcaagtgtcggcactggagggggagggacggggggggttggcgggggggcgggctcggaggactccggcgaccgcgggggaacgcttggagggggtacgctaggccccccttctcccccgggcgccccctcaccacctgagcccgggggtgagatcgagttggtgttcaggccccaccccctcctagtggaaaagggcgagtattgccaaacacgatacgtgaagaccacaggaaacgccactgtggatcacctgagcaagtacttggcactgcgcattgctttagagcggaggcaacagcaggaagcgggagaacccggaggtccaggaggtggcgcttcagacactgggggacccgatgggtgtggcggtgaaggcggtggggctggaggcggcgatggccctgaagaaccggcactcccttcattggagggggtcagtgaaaagcaatacacgatctacattgcaccaggagggggggccttcactacgctgaacggaagccttacccttgagttagtcaatgagaagttttggaaagtgagccgacccctcgagctctgctacgcgcccactaaggatcctaagtag

SEQ ID NO: 133026 - DNA, 1221 bp, synthetic construct
  misc_feature 1..1221: note = Description of Artificial Sequence: Synthetic coding sequence
  source 1..1221: mol_type = other DNA
atgacaacaccagcaaatgcccaaaacgctagcaagacatgggagcttagcctgtatgagctgcacaggacaccccaagaggccataatggatggaactgaaatcgctgtgagcccaagatcgttacactcagaactcatgtgccccatttgcctagatatgctaaagaacactatgacaacgaaggagtgcttgcacagattttgctctgattgtatcgtaacggcgcttagatccgggaataaggagtgccccacctgtcggaaaaaactcgtgtcaaaacgatcactgcggcctgatcctaattttgacgctctgattagtaagatatatcctagcagggaggagtacgaggcacatcaggatcgggttttgataagactcagtaggttacataaccagcaggctctcagctcctctatcgaagaaggcttgaggatgcaggcaatgcaccgcgcacagcgggtcaggcgccctatccccggcagcgatcagaccactactatgagcggcggcgagggtgagccaggcgagggagagggggatggcgaagatgtcagcagcgattctgcgcccgactccgcccccggacctgcccctaagcggcctcgaggcggaggtgctggaggctctagcgtaggcacaggaggaggcggtactggaggcgttgggggaggagcaggcagcgaagatagtggcgatagggggggcactctgggcggtggtacactcggtcctcctagtcctcctggtgcaccaagtcctcccgaacctggaggggagattgaactcgtttttagaccccatccccttttggtagaaaagggcgagtattgccagaccaggtatgtgaagacaaccggaaatgccacggtcgatcacttgagcaaatatctggcacttcgcatcgcactagagcgtaggcaacagcaggaagccggcgaaccagggggccctggcgggggggcaagtgacacaggaggccccgatgggtgtgggggcgaaggcggcggggcaggtgggggtgacgggcccgaagaacctgccctcccctcattagaaggggtgtctgagaaacaatatacaatctacattgcaccaggaggaggggctttcacaaccctgaatggctccctgaccctcgagcttgtgaacgagaagttttggaaggtttcgagaccacttgaattgtgctacgcccccaccaaagatcctaaatag

SEQ ID NO: 133027 - DNA, 465 bp, synthetic construct
  misc_feature 1..465: note = Description of Artificial Sequence: Synthetic coding sequence
  source 1..465: mol_type = other DNA
atgggaaactgccttaagagtcctacatcagacgacatttctttgctgcacgagtcacagagcgatagggcctcgttcggagagggaacagagccagaccaagagcccccacccccatatcaggaacaagttcccgttccagtgtatcaccccactccctcacaaactaggttggcgacccagctcactgaggaggagcagattaggattgcacagaggatcgggttgattcagcacctaccaaagggagtttacgatccaggcagggatgggtcagagaagaaaatccgcgagtgtgtcatctgcatgatggattttgtttacggcgacccaatcaggttcctcccatgtatgcatatctatcacctggattgtattgacgactggctcatgagaagctttacctgtccgagctgtatggagccggtggatgctgccctgctctcatcgtacgagaccaattag

SEQ ID NO: 133028 - DNA, 1896 bp, synthetic construct
  misc_feature 1..1896: note = Description of Artificial Sequence: Synthetic coding sequence
  source 1..1896: mol_type = other DNA
atgccccgccctgctctgagcgtcacctccttctgccataggttaggcaagagagaaaggaagcaaagtttcatgggcaattcaggaaattcttggagccacaccccttttcccaaactcgaactggggctcggcccgcagccaatggctcccagggagctgccaacttgttctatatgtctggagaggttgagagaccctatttctctagattgcggtcatgacttctgcatacgatgtttctccacacaccgtcttcctggatgcgaacctccctgttgtccagaatgcaggaagatctgtaaacagaaacggggcctgcggagtctcggagagaagatgaaacttctgccgcagagacccttgccgcctgcactccaagaaacttgcccagttagagcagaacccctcttgctcgtacgaatcaatgcttccggcgggctcatcctgcgcatgggagccatcaaccggtgtttaaagcaccccctcgcaagagatacaccagtctgtttgctggcagtgcttggagaacagcacagtggtaagagcttcctcctcaatcatcttttgcaggggctgccaggcctcgagagcggcgagggtggacggccccggggaggcgaggcttcactccagggatgcaggtggggtgcaaatggcctggctaggggaatttggatgtggtcccacccgttccttctgggcaaagaaggcaagaaggtcgccgtctttctagtggatactggcgacgccatgtcaccagagctgtcgcgagaaactagaattaaactttgcgcacttaccacgatgctgagcagctatcagattctctcgacgagccaggaacttaaagatacagacctggactacttagaaatgtttgttcatgtggcggaagtgatgggcaagcactatggaatggtcccaattcagcacttggatctgctagtgagagactcttctcaccctaataaagcaggtcaaggccatgtgggaaatattttccaacgccttagcggtcggtaccccaaggtacaggaattattgcaaggcaaaagggccagatgttgtctgctcccggctcccggcagaaggcgcatgaatcaaggacatgcaagtccgggcgacaccgatgatgacttcaggcatctgctaggtgcatacgtgtcagatgtgctgtccgccgcccctcaacacgctaagagcagatgtcaaggatattggaacgaaggcagagccgtggccaggggcgatcggcgactgttgacaggccagcagctagcacaagaaattaaaaatttaagcggctggatgggacggaccggcccgggatttacttcaccggatgagatggcagcacaacttcacgacctcagaaaggtggaagccgcaaaacgggaatttgaagagtacgttcgccagcaggacgtcgctaccaagagaattttctccgccctgcgtgttctccccgacaccatgagaaacctgttaagtactcagaaagatgcaatactcgctcggcacggggtcgccttactgtgtaaaggacgcgaccagaccctggaagccttagaagcagagctgcaggccacggctaaagcatttatggattcatataccatgcggttctgcggacacttggctgctgtgggcggggcagtgggcgctggattaatggggttggcaggcggggtggtgggtgccggtatggccgccgccgctctggcagccgaggccggcatggtcgcagcgggggccgcggttggcgccactggtgcagccgtcgtgggtggcggggttggggccgggctggccgctaccgtggggtgtatggaaaaagaagaagatgagaggctcctcgagggcgatcgcgagcctctgctgcaggaagaatag

SEQ ID NO: 133029 - DNA, 687 bp, synthetic construct
  misc_feature 1..687: note = Description of Artificial Sequence: Synthetic coding sequence
  source 1..687: mol_type = other DNA
atggccgcccagcagagggactgcggcggcgcggcccaactggctggccccgccgccgaggccgaccctctcggccgtttcacatgcccagtgtgcctggaggtttacgagaaacccgttcaggtgccctgtgggcacgtattttgcagtgcgtgtctccaggagtgtctaaaacctaagaaacctgtttgtggcgtgtgcagaagtgccctggcccctggcgtgagagccgttgaactagaaaggcagattgaaagtacagagacaagctgtcatggttgcagaaagaacttttttttgtctaagattcggagtcacgtggcgacgtgctctaaatatcagaactatataatggagggagtaaaagcaaccatcaaggacgcgtcattgcagcctcgcaatgtgccaaaccgttatacattcccttgcccctactgccctgagaagaatttcgatcaggaagggttagtggaacattgcaaacttttccactccaccgataccaaaagtgtggtttgtcctatttgcgctagcatgccctggggcgaccccaattaccggtctgcaaatttccgggaacatatccaacggagacacaggttctcctatgacacattcgtcgactacgacgtggacgaggaggatatgatgaatcaagtcttgcagcgctccattatcgatcaatag

SEQ ID NO: 133030 - DNA, 576 bp, synthetic construct
  misc_feature 1..576: note = Description of Artificial Sequence: Synthetic coding sequence
  source 1..576: mol_type = other DNA
atggccgcacagcagcgcgactgcggaggtgccgcacagctcgcgggaccggccgctgaggccgaccctctgggccggttcacctgtcccgtgtgcctggaagtttatgagaaaccagtgcaagtcccgtgtggacatgtcttctgctctgcctgtttgcaggaatgcctgaagcctaaaaagccagtgtgcggtgtgtgtcgctctgcattagccccgggagtccgagccgtggagcttgagcgccagatagaatccacagagaccagctgccacgggtgtaggaagaatttctttctgtcaaagattaggtcccacgtggccacctgtagcaagtaccagaactatataatggaaggggttaaggcaaccatcaaagatgcatccctccagcccagaaacgtccctaaccgctacaccttcccctgcccatattgcccagagaagaacttcgaccaggaaggactcgtggaacattgcaaacttttccattcaactgacacgaagagcgtgacctccgagcagagcccttgccttctctctgtttcctgctatcgggcgtctattacctactag

SEQ ID NO: 133031 - DNA, 1287 bp, synthetic construct
  misc_feature 1..1287: note = Description of Artificial Sequence: Synthetic coding sequence
  source 1..1287: mol_type = other DNA
atggggcccccacccggcgctggcgtctcttgccgaggtggatgtggatttagccggctcctggcctggtgttttttgctggcgttgtcccctcaagccccaggctcacgtggtgcggaggccgtatggacagcctacctgaatgtgagttggagggtcccgcacacaggcgtcaacagaacggtgtgggagctgtccgaggagggagtgtacgggcaagattcccccctggagcccgtggccggcgttttagtcccaccagatggtcccggcgccctgaacgcatgtaaccctcataccaacttcacagtccccaccgtctggggtagtacagttcaggtaagttggctggccttaattcagagggggggcggctgtacgtttgcggacaaaatccatttggcatatgagcgaggagcctccggcgccgtcatatttaatttccctggcacacggaacgaagtaattcctatgagtcacccgggggcggtggatatcgtggctatcatgattggtaaccttaaggggactaagatcctgcagtctatacaacgtggcattcaggtgacgatggtgattgaggtcgggaagaaacacgggccttgggtgaatcattactcaattttcttcgtcagtgtttccttcttcataattactgccgctaccgttggatattttatcttctactccgcccggcggcttagaaacgctagggcccagtcgagaaagcagcggcagctgaaagcagatgctaagaaggccattggtagactccagttacggaccctgaagcagggcgacaaggagataggtcccgatggtgattcctgtgccgtgtgcatagaactgtacaaacccaacgacctggtaaggatcttgacatgcaaccatatttttcataagacatgtgtagatccttggctcctggagcacaggacctgccccatgtgtaaatgcgacatcctcaaggctcttggcatcgaagtggacgtggaggacggtagcgtttcactccaggtgcctgtgtccaacgagattagtaacagcgcctcttcgcacgaggaagataatcgcagtgaaacagcttcatcgggttacgcgtctgtccaaggcacggacgaacccccactggaagaacacgtgcaatcaacaaacgaatcccttcagctggtgaaccacgaggcaaattccgttgctgtagacgtaattccacatgtcgataatccgacttttgaagaggacgaaacacccaaccaggaaaccgccgtacgggaaatcaaatcgtag

SEQ ID NO: 133032 - DNA, 1209 bp, synthetic construct
  misc_feature 1..1209: note = Description of Artificial Sequence: Synthetic coding sequence
  source 1..1209: mol_type = other DNA
atgaaccaggagaatcggtcctcctttttctggcttctggtgatctttacttttctgctgaagatcaccgcaagttttagcatgtccgcttacgtgacggtgacctactacaatgagacctctaattacactgctatcgagacttgcgagtgtggcgtttacggactcgcctcgccagtggccaatgcgatgggcgttgtgggtatccctaagaacaataactaccaagcatgcgaccataataccgaattttctaatactaaaaagccgtggatcgcacttatagaacgcggtaattgtacatttagtgaaaagatccagactgctggacgtcggaacgcggacgcggtggttatctataacgcccctgagaccggtaatcagactatccaaatggcaaatttcggtgccgtggacattgtggccatcatgatcggcaacctgaagggcaccaagatcctgcagtcaatccagcgcgggatacaggtaacaatggtgatcgaagtcggaaagaagcatgggccctgggtgaatcattattcaatcttcttcgtgagtgtgtccttcttcatcattacagccgccacagttggttactttatattctattcagcaaggagactccgcaacgctagggcacagagccgcaagcaacgccaactcaaggcagacgccaaaaaggcaattggacggctgcagcttaggacactgaagcagggggacaaggaaattggtcctgacggtgactcttgcgctgtttgtatagagctgtacaagccgaacgacctagtgaggatcttaacatgtaaccatatttttcacaaaacctgtgtggatccttggctgctcgagcacaggacctgtcccatgtgcaaatgcgacattctcaaggctctgggcattgaggtggacgtagaggacggcagcgtgagtcttcaggtgcctgtttcaaatgaaatctccaattctgcttctagtcacgaagaagataataggagcgaaaccgcgtccagtggttatgcttccgttcaggggacagatgaacctcctttggaggaacatgttcagtccactaacgagtcgctgcagctggtgaatcatgaggcaaattcagtagccgtagacgttattccacacgttgacaaccctacatttgaggaagacgaaacaccaaatcaggagactgccgttagggaaataaagagttag

SEQ ID NO: 133033 - DNA, 750 bp, synthetic construct
  misc_feature 1..750: note = Description of Artificial Sequence: Synthetic coding sequence
  source 1..750: mol_type = other DNA
atgagcgcatatgtgacggtcacgtactacaatgaaacgtccaattataccgctatcgaaacctgcgaatgcggcgtctatggcctcgccagccccgtcgccaacgccatgggagttgttggtattcccaagaataacaattaccaagcttgcgatcataacacggaatttagcaatacaaagaagccttggatcgcactgatagaacgaggcaactgcacttttagtgagaaaattcaaacagctggtcggcgtaatgcagacgcagttgtcatatacaacgcccctgaaaccggcaatcagaccatccagatggccaactttggcgcagtggacatcgttgccattatgatcggtaatctaaaaggtacgaagattctgcagtcaattcagcgcggtatccaggtgactatggtcatcgaggtgggcaaaaagcacgggccctgggtcaaccattactcaattttttttgttagtgtgagcttcttcatcattacagcggctaccgtggggtatttcatcttctatagcgcgcgacggttgcggaatgccagagcccagagccgcaaacaacggcagctgaaagcagatgctaaaaaagccatcggcaggcttcaactccgcaccctgaaacagggcgataaggagatcggacccgacggggacagttgtgctgtttgtatcgaactctataaacctaacgatctggtgaggatactcacctgtaaccatatcttccacaagacatag

SEQ ID NO: 133034 - DNA, 633 bp, synthetic construct
  misc_feature 1..633: note = Description of Artificial Sequence: Synthetic coding sequence
  source 1..633: mol_type = other DNA
atggctgggctgggcctgggctcagctgtcccggtatggcttgcagaagatgatctcggttgcataatctgtcaagggctgctggactggccagcaacgttaccctgtggacatagcttctgtagacactgcttggaggcactgtggggtgcgcgcgatgcccggagatgggcctgtcccacttgcagacaaggcgctgcccagcagccccacctgcgtaaaaacaccctgctgcaagacctagctgataagtacaggagggccgctcgggaaattcaagccgggagcgaccccgctcattgtccgtgtccaggctccagtagcttgagcagcgccgcagcccgcccccgaaggcgcccagagctccagcgtgttgctgtagagaagtcaatcaccgaagtcgcccaggagctcactgagttagttgagcatttggttgatatcgtgagaagcctccagaatcagcgacctttatctgaaagcggacctgacaacgaactcagcatcctaggtaaagagaattcatggaagcccaggctgccaccccatgcccactgcttaacccgggccaccttacactcaggggagcttctcggactgctaagtggaccctccatccagccactgacttag

SEQ ID NO: 133035 - DNA, 1299 bp, synthetic construct
  misc_feature 1..1299: note = Description of Artificial Sequence: Synthetic coding sequence
  source 1..1299: mol_type = other DNA
atggccggcctgggcttgggatcagccgtacctgtctggcttgccgaagacgatcttggatgtattatctgtcaaggactgctggattggccagcgacgctgccatgcggtcattctttttgcagacactgccttgaggctctctggggggcgagagatgcacggcggtgggcctgccctacctgccggcagggcgcagctcaacaaccgcatcttaggaaaaacacactgctacaggacttggcagacaagtacagaagggcagctcgggagattcaggcagggtcagatcctgcgcattgcccatgccccgggtcctcctctctctcgtctgcggccgctcgccctcgaaggcgccccgaactgcaaagagtcgcagttgagaagtccattacggaagtggctcaggagctgacagagctggtggagcacttggtcgatattgttaggtccctgcagaaccaacggcccctttctgagtccggccctgacaatgagctgtccatcttgggtaaagcattctccagtggtgtggatttgagcatggccagtccgaagctcgtgacctccgatactgccgcaggcaaaatacgtgacattctgcacgacttagaagagattcaagaaaagcttcaagagagtgtgacctggaaagaagctcccgaggcacagatgcagggtgaactactggaggctccttcctcgagctcctgcccactgcccgatcagagccaccccgctttgaggagagcaagccgctttgctcagtgggcaattcaccccaccttcaacctcaagtccttgtcatgctctttggaagtgtccaaagattccagaacagtcactgtctcacaccggcctcagccctaccgctggtcatgcgagaggttctcgacctcacaggtgctatgctctcaggctttgagcagcggaaagcattattgggaagtcgacacaagaaattgctcccactgggccgtgggtgttgcctcttgggagatgtccagagatcaggtgcttggccgcaccatggatagctgttgcgttgagtggaaaggtacctctcagctatcagcatggcatatggtcaaggagaccgtactcggctctgatcggcctggggtcgtgggcatttggcttaacctggaggaaggcaagttggcattctacagcgtcgacaaccaggagaaactcctctacgagtgcactataagcgcctcttccccgctgtatcctgcattttggctctatgggctgcaccccgggaattacctgataataaagcaagtgaaggtgtag

SEQ ID NO: 133036 - DNA, 255 bp, synthetic construct
  misc_feature 1..255: note = Description of Artificial Sequence: Synthetic coding sequence
  source 1..255: mol_type = other DNA
tagaaagaagccccagaggcccagatgcagggaagcttgctcccgagactggaatgttctggtacaatcacggcggcaagcatctcccaggcgcaggagaattcttggaagccccggctgccaccccacgcccactgtctgactcgagctaccctgcattcaggggaattactgggtttgctcagcgtgcccccccgcggtgaattaatcgcaaaagctaaacaggtcgagactttggatcctagagccctttag

SEQ ID NO: 133037 - DNA, 291 bp, synthetic construct
  misc_feature 1..291: note = Description of Artificial Sequence: Synthetic coding sequence
  source 1..291: mol_type = other DNA
gctcagcagcctcatttgcggaagaacaccctgctgcaggacctggcagacaaatatcgtcgagcggcccgcgaaatacaggccggaagcgaccctgcccattgcccctgccctggcagctccagcctatcgagcgctgccgctagaccgcgtagaaggccagagctgcagcgggagaacagttggaagccccggctgcctcctcacgctcattgtctcacgagagcaacactgcattctggggagttattgggtctcttatccggcccatctatccagcccctgacctag

SEQ ID NO: 133038 - DNA, 861 bp, synthetic construct
  misc_feature 1..861: note = Description of Artificial Sequence: Synthetic coding sequence
  source 1..861: mol_type = other DNA
atggctgggcttggactgggcagtgccgtgccagtctggcttgcagaggacgatctcggctgtatcatatgtcagggcttactggactggcctgcgacgttaccatgcggccactctttttgtagacactgtctggaggcattgtggggcgcaagggacgctagacggtgggcctgtcccacatgtaggcagggcgcagcacagcagccacacttgagaaagaacacactgctgcaagacttagccgataaatatagaagagccgcaagagagatccaagcaggaagcgacccagcccactgcccttgccccggatcctcaagcctttcaagcgccgcagcccgcccccgccggcgtcccgagctgcaaagggtcgctgtggagaaaagcatcacagaggtcgctcaagaactcaccgaactggttgaacacctagtcgacattgtgagaagtcttcagaaccagcgacccctgtctgagagcgggcctgataacgaattgtccatcctcggcaaggccttctctagtggagtagacctctccatggccagtccaaagctggtgacctcggacacagcggctggaaagattcgcgacatcttgcatgacttggaggaaatacaggaaaagcttcaggaatcagtcacttggaaggaggcccccgaagctcaaatgcagggttctctgttaccccggctggagtgtagtggaaccatcacggctgcaagtattagccaggcacaggagaactcttggaagccaagactgccccctcacgcacactgcctgacaagagccacattgcattcaggagaattgttaggactgctgagcggaccttccatccagccgctcacttag

SEQ ID NO: 133039 - DNA, 756 bp, synthetic construct
  misc_feature 1..756: note = Description of Artificial Sequence: Synthetic coding sequence
  source 1..756: mol_type = other DNA
atggcctcgcctaaactggtgaccagcgacaccgccgcaggaaagataagagacatcttgcacgacttagaggagatccaggagaagctgcaagaaagtgttacttggaaggaggccccagaagcccagatgcaaggagaattgttagaggccccaagctcatccagctgcccccttccggaccagagtcaccctgccttgagacgggcttccaggttcgctcaatgggccattcatccaacttttaatctgaaatccttgagttgctcactggaggtttctaaggactcacgcaccgttactgtaagtcatagaccacagccgtatcggtggtcctgcgagaggttctccacatcccaagtactatgttctcaggccctcagttcgggaaaacactactgggaggtggacacacgcaactgctctcactgggctgttggggttgccagttgggaaatgtccagagaccaggtcctgggtaggactatggactcttgttgcgtggaatggaaaggcactagtcagttgtcagcatggcatatggtgaaagaaacggtgctagggagtgataggcctggcgttgtgggaatttggctcaacctcgaagagggtaagctcgccttctactccgtggacaaccaggagaagctgctgtacgaatgtaccatttcggcatcatccccgctctaccccgcattttggttatacggtttgcaccctggtaattatctgatcatcaagcaggtcaaagtatag

SEQ ID NO: 133040 - DNA, 1995 bp, synthetic construct
  misc_feature 1..1995: note = Description of Artificial Sequence: Synthetic coding sequence
  source 1..1995: mol_type = other DNA
atggcggctgtgggacccccccagcagcaggttagaatggcccaccaacaggtgtgggctgctctggaagtcgcgctgagggtgccgtgtctatacattattgatgctatattcaacagctacccagacagcagccaaagcagattctgtattgtgctacagatctttctccgcctgtttggagtgttcgccagttccatagttttgattctcagccagaggagcctcttcaagttttacacatatagctccgccttcctcctcgctgccacttcagtcttagttaactattacgccagcctgcacattgatttctacggagcctataatacatcagcctttggcatagagttgctcccgaggaaaggaccttcactttggatggctctcatcgtgttacagcttacctttggcatcggatatgtcaccctcctgcaaatccactctatatactcacaacttatcatcctggacctgttggtccccgtgattggtttaattacagaactccccttacatatacgggagacccttctttttacttcttcccttattctcacactgaacacagtgtttgtgctagctgtcaaactcaaatggttctactattcgacgcggtacgtatatctgttggtgcggcacatgtatcgaatctatgggctccagctgctcatggaggatacatggaagcgcatcaggttccccgatatactgagagttttctggttgacacgggtaacagctcaggctaccgtcctcatgtacattctacgaatggctaatgagaccgattccttcttcatttcttgggacgatttctgggacctcatttgcaatttgatcatttcaggctgcgactcaacactgacagtgcttggcatgagcgctgtcatcagtagcgtggcgcattatctcggcctgggcatcctggcttttattgggtccactgaggaagatgaccgccggctcgggtttgtggcacccgtcctttttttcatcctcgcacttcaaacagggctgtctggcctgagaccagaagagaggctgatccgcctatcaagaaatatgtgcctgctgttgaccgcagtattacatttcattcatgggatgactgatccagtgcttatgagtctttccgctagccacgtatcaagctttcgcaggcacttccctgtgctgttcgtgagcgcctgtctctttatcctgccagtgttactgtcatacgtcctctggcaccactacgccttgaacacctggctgttcgctgtcactgccttctgtgtggagctgtgccttaaagtgatcgtaagtctcacagtgtataccctcttcatgattgacgggtactacaatgtgttatgggaaaagctcgacgactatgtttattatgtccggagcacgggaagtataatcgaattcattttcggggttgttatgtttggcaacggcgcctacaccatgatgtttgagtcagggtctaagattcgcgcattcatgatgtgtcttcatgcctactttaacatatacttgcaagctaagaatgggtggaaaacttttatgaaccggaggacggccgtgaaaaaaataaacagcctcccggagataaaaggctccaggctgcaagagatcaacgacgtgtgcgctatatgttatcatgaattcactacatcagctcgaataacaccgtgcaatcactattttcacgcactctgcttgagaaaatggttgtatatacaagatacctgcccaatgtgtcaccagaaggtgtacatcgaagatgacatcaaagataactcaaatgtatcaaacaataatggctttattcccccaaacgaaaccccagaggaggcagttcgtgaggcggccgctgagagcgatagggaactgaacgaagatgattccactgattgcgatgacgacgtacagcgtgaacggaacggggtgatacagcacaccggcgccgccgccgaggagttcaatgacgacaccgattag

SEQ ID NO: 133041 - DNA, 1425 bp, synthetic construct
  misc_feature 1..1425: note = Description of Artificial Sequence: Synthetic coding sequence
  source 1..1425: mol_type = other DNA
atgtcatctgaagatagggaagcacaagaggatgaactgctcgcactggcctccatctatgatggggacgagtttagaaaggccgagagcgtgcagggaggcgagacacgcatttacttggatctcccccagaattttaaaatctttgtgtctggtaactccaatgaatgtctccagaactccggtttcgaatacacgatttgctttctccctcccttggtcctgaattttgagttgcctcccgattacccttcaagctccccaccaagcttcacccttagtggaaaatggcttagccctacgcagctgagcgctctgtgtaagcatctagataatctgtgggaggagcatcgcggtagtgtggtcctgtttgcgtggatgcagttcctcaaggaggagacactagcgtatctcaacatcgtatcacccttcgagttaaagattggctctcagaagaaggtacagcgcagaactgcccaggcatccccaaatacagagttagacttcggaggcgcagccggatccgacgttgaccaggaagagatagtcgacgagcgggcagtccaggacgtggaaagcctgtccaatttgatccaagagattctcgacttcgaccaggcccagcagatcaaatgctttaactccaagttgttcctgtgtagcatttgtttctgtgaaaagcttgggagtgaatgcatgtactttttggagtgccgacacgtctactgcaaggcatgcctaaaggactattttgaaatccagatcagagatggacaggtgcaatgtctgaattgccccgagcctaaatgtcccagcgtagcgacaccaggccaagtgaaggaacttgttgaagccgaactgttcgccagatatgacaggcttttgctccagagtagtttggacctgatggcagacgtggtctattgtcctcggccatgctgtcaactccccgtcatgcaggaaccaggatgtaccatgggaatttgttccagttgcaacttcgccttttgtactctgtgccggcttacctatcatggagtgtcaccctgcaaagtaaccgcggagaaattgatggacctacggaacgagtacctgcaggctgacgaagccaacaagcgcctgcttgaccagcgctatggcaagagagttattcagaaagccctggaggagatggagtctaaagaatggctcgagaagaattcaaaaagttgtccatgctgcgggacccctattgagaagctggatggctgtaataagatgacttgtaccggctgtatgcagtatttctgctggatatgcatgggcagtctctctagagcaaacccgtacaagcacttcaacgatccgggcagcccctgtttcaaccggctattctacgctgtagatgttgacgacgacatttgggaagacgaagtggaagactag

SEQ ID NO: 133042 - DNA, 1425 bp, synthetic construct
  misc_feature 1..1425: note = Description of Artificial Sequence: Synthetic coding sequence
  source 1..1425: mol_type = other DNA
atgtcatctgaggatcgcgaggcacaggaagacgagctcttggccctcgcctcaatttacgatggtgatgagttccggaaggccgaatctgtacagggaggggaaacccgcatttacttggacctgccccagaatttcaaaattttcgtgagcggaaattcaaatgaatgcttacagaactccggatttgagtacacaatctgtttcttacccccgttggtgctgaacttcgaactcccacccgattacccctcctcaagtcccccaagcttcactctgagtgggaaatggttgtctcccactcagctatccgcgctatgtaaacatctggataatctgtgggaggagcaccggggatcagtcgtcctttttgcttggatgcaattcctgaaagaagaaacactggcatatctgaacatcgtctcaccttttgaactgaagattggtagccagaagaaggtccagagacggactgcccaggcctctccgaacactgagctcgacttcggcggggccgcaggtagcgatgtggatcaggaagagattgtggacgaaagggccgtccaggacgtagaatcattgtcaaacctgatccaggaaattttagattttgaccaggcccagcaaataaaatgcttcaatagtaaacttttcctgtgcagtatctgtttttgcgaaaaactcggttccgagtgtatgtacttccttgagtgtcggcacgtgtattgcaaagcttgcttaaaagactatttcgaaatccagattagagacgggcaggtacaatgcctgaactgccccgaacctaaatgtccatcagtggccacacctggccaggtaaaggaattggtagaagccgagctttttgcccgttacgacagactcctgcttcagtcctccctcgatctgatggctgacgtggtctactgtcctaggccctgttgccagctccctgtgatgcaggaacccggatgtacaatgggaatatgcagtagctgtaactttgctttctgcactttatgtcgcctgacatatcacggtgtgtcaccctgtaaagtgacggccgagaaattgatggacctgagaaacgagtacctacaggcagacgaggctaataagcgtctgctcgatcaacggtatgggaagcgcgtgattcagaaagcgctggaagaaatggaatctaaagaatggctggaaaagaactctaagtcttgcccatgctgtgggacacccattgagaaactggacggctgcaacaaaatgacatgtacagggtgcatgcagtacttctgctggatctgcatgggctcactgagtagagccaacccctacaaacacttcaacgaccctggttcaccatgctttaacaggctgttttacgccgtagatgtggatgatgatatatgggaggatgaagtggaagactag

SEQ ID NO: 133043 - DNA, 1047 bp, synthetic construct
  misc_feature 1..1047: note = Description of Artificial Sequence: Synthetic coding sequence
  source 1..1047: mol_type = other DNA
atgcaattcctcaaggaggaaactctcgcctacctgaacatcgtgagtcctttcgagttgaagatcggaagccagaaaaaagtccagcgtcgaaccgcacaggccagtcctaataccgaactggacttcggaggggcagccgggtctgatgtggaccaggaagaaatagtcgacgaacgagcagtacaggatgtggaatccttgtcaaacctgatccaggaaattctggatttcgatcaggcccaacaaatcaagtgttttaactcaaaactctttctctgcagcatttgtttctgcgaaaaactcggaagtgagtgcatgtactttcttgaatgccggcatgtctactgcaaggcttgtcttaaggactattttgagattcaaatccgcgacggacaggtacagtgcctgaactgccccgagcccaagtgtccaagcgttgccacccctggccaggtcaaagaactcgtggaggcagagcttttcgcccgctacgataggttgctgcttcaatcaagcctggaccttatggctgacgtggtgtactgcccgcgcccttgttgccagttgcccgtgatgcaagaaccagggtgcacaatgggcatctgtagttcatgtaactttgccttttgtactctctgtaggctgacgtaccacggtgtgtccccctgcaaagtgactgcagagaagttaatggacctccgcaatgagtaccttcaagccgatgaggctaataagcgtctgttagatcagcgatacggaaagagagtaatccagaaggccttggaagagatggaatctaaagaatggctggagaagaattcaaagtcctgcccatgctgtgggacacccattgagaaactcgacggctgcaataaaatgacatgtactggatgcatgcaatacttctgctggatctgcatggggtctctatcccgggccaatccctacaaacatttcaacgatccaggttccccttgctttaatagactcttctatgcggtcgatgtggacgacgacatttgggaggacgaagtggaggattag

SEQ ID NO: 133044 - DNA, 897 bp, synthetic construct
  misc_feature 1..897: note = Description of Artificial Sequence: Synthetic coding sequence
  source 1..897: mol_type = other DNA
atgagctcagaggatagagaggctcaggaggacgagctcctcgcattggcctctatatatgacggtgatgaattccggaaagccgaatccgtacagggaggcgagacaagaatctacctggacctacctcagaacttcaagattttcgttagcggaaatagtaacgaatgtttacagaattcggggtttgaatacactatttgcttcttgcctccgctggtgctgaacttcgaactaccaccagactatcccagtagctcacctccatccttcaccttgtcgggcaaatggttgtcgccgacacaggttaaagagctggttgaggccgaactttttgctcgctacgataggctgttgctgcagagctctttggacctaatggccgatgtcgtatattgtccgaggccatgttgccaactgcctgtgatgcaggagcccggatgcactatgggaatctgtagctcctgcaactttgccttctgcaccttatgtcgcctcacctaccatggcgtctcaccatgcaaagtgaccgcggaaaagcttatggaccttcggaacgaatatctgcaggccgacgaagccaataaacgactgttagatcagcggtatggcaagcgcgtaatccaaaaagctttggaagagatggagtctaaagagtggcttgagaaaaattcaaagtcttgcccgtgttgcggcacgccgattgagaagctcgacggctgcaacaagatgacctgcactggctgcatgcagtacttctgctggatctgtatgggcagcctttctcgtgcaaacccctataagcatttcaatgaccctggttccccttgcttcaacaggctgttttatgctgtggacgtggacgatgacatatgggaagatgaggtagaggattag

SEQ ID NO: 133045 - DNA, 1425 bp, synthetic construct
  misc_feature 1..1425: note = Description of Artificial Sequence: Synthetic coding sequence
  source 1..1425: mol_type = other DNA
atgtcatctgaggaccgagaggcacaagaggatgaactgcttgcgttggcatctatctacgacggagacgagttcaggaaggcagaatccgtccaaggcggtgagacacgcatttacttggacctgccacagaatttcaagatcttcgtcagtggcaattctaacgaatgtctgcaaaacagtgggttcgaatacacaatttgttttctaccacctttggtcttaaactttgagttgccaccagactatccttcaagctctccaccctcctttaccctgagcggcaaatggctttctcctactcagttgtcagcactgtgcaagcatctggataatctgtgggaggagcatcgtggctccgtcgtgcttttcgcctggatgcagttcttaaaggaagagacactcgcatacctgaatatagtgtctccgtttgagctgaaaatcggctctcagaaaaaggtacagcggaggacggctcaagcctcccccaataccgagctggatttcgggggagcagctggaagcgacgtggaccaagaggagatcgtcgacgaacgagcagttcaggatgtcgaaagtctgagtaaccttattcaggagatcctggattttgatcaggcccaacagatcaaatgtttcaactctaaactctttctttgttcgatatgcttctgcgaaaaattggggagcgagtgtatgtatttcctcgagtgccgccatgtgtattgcaaggcttgcctcaaagattactttgaaatccaaatccgagacggccaggttcagtgtttgaattgccctgaaccgaagtgcccaagcgtggccacaccaggtcaggtgaaagaactggtagaagccgagctgttcgccagatacgacaggttgttattgcaatcgagcctcgatctcatggcagacgtagtatattgcccacgtccatgttgccagctcccagtaatgcaagaacctgggtgcacaatggggatttgttcttcttgcaacttcgccttttgtacactgtgcagactcacttaccacggagtgtctccttgtaaggtgactgcagaaaagctgatggatttaagaaatgagtaccttcaggctgacgaagccaacaaacgcctgctggaccagcgctacggaaaacgcgtcatccagaaggccttggaggagatggaatccaaggagtggctcgagaagaattccaaatcctgtccgtgttgcggaacccccattgaaaagctcgatggatgcaataagatgacctgtaccgggtgcatgcaatacttttgttggatctgcatggggtctttgtctagggccaacccttacaagcatttcaacgatcctgggtcaccgtgttttaatcgactcttctatgccgtggatgtcgacgatgatatctgggaggacgaggtggaggactag

SEQ ID NO: 133046 - DNA, 1425 bp, synthetic construct
  misc_feature 1..1425: note = Description of Artificial Sequence: Synthetic coding sequence
  source 1..1425: mol_type = other DNA
atgtcttcagaagatcgcgaggcccaggaggatgagctgctggcactcgctagcatatatgatggggacgagtttagaaaggcggagtctgtccagggcggggaaacacggatttatctggatctcccccagaattttaagatcttcgtgtccggcaatagtaacgaatgtctgcagaacagcggcttcgaatatacgatatgcttcctgccccccctggtgctgaatttcgaattgcccccagattaccccagtagttcgccgccgagctttacgctttcggggaagtggctgtcccctacgcagctgtcagcactctgtaagcacctcgataatctttgggaggagcaccgcggttccgttgtgctgttcgcttggatgcagttcctcaaggaggagactttggcatatctgaacatcgtctccccgtttgagctgaagataggctcacaaaagaaggtgcagcggcgcacggcccaggccagtccgaatacagaactcgacttcgggggggccgccggaagcgatgtagatcaggaagagatcgtggacgaaagagcggtccaagatgtggaatccctatctaatctgattcaggaaatcttggatttcgaccaggcccaacaaatcaaatgcttcaacagcaagcttttcctatgctcgatatgtttttgcgaaaaactcgggtcagaatgcatgtactttttggagtgcaggcatgtgtattgcaaagcttgtctgaaggactattttgagatacagattagggatggacaggtccagtgcttgaattgcccagaaccaaagtgcccatccgttgctactcctggtcaggtaaaagagctggtggaggcggagttgtttgcccgctatgacaggctgctgcttcagtcttcgctcgaccttatggcggacgtggtgtactgtcctcgcccctgctgtcagctgccagtgatgcaggaacctgggtgcaccatgggaatctgttcctcctgtaattttgcattctgcaccctctgccgccttacttatcacggggtttcgccatgtaaggtcacagcagagaaactgatggatctcagaaacgaatacctgcaggccgacgaagctaacaaaagactgctggatcagcgttatggcaaacgggtcattcagaaagcattggaggaaatggaaagcaaagaatggctggaaaagaatagcaagtcttgtccctgttgcgggacccctattgagaagctggatgggtgcaacaagatgacctgtacaggctgcatgcaatacttttgttggatttgtatggggtctctctctcgtgcaaatccgtataaacattttaacgatcctgggtccccatgttttaaccggcttttctacgccgtcgatgtggacgatgatatctgggaagatgaagtcgaagactag

SEQ ID NO: 133047 - DNA, 48 bp, synthetic construct
  misc_feature 1..48: note = Description of Artificial Sequence: Synthetic coding sequence
  source 1..48: mol_type = other DNA
atgagtagcgaggaccgtgaggcacaggaggacgaactgctggcctag

SEQ ID NO: 133048 - DNA, 399 bp, synthetic construct
  misc_feature 1..399: note = Description of Artificial Sequence: Synthetic coding sequence
  source 1..399: mol_type = other DNA
atgagtagcgaggaccgggaggctcaagaagatgaacttctcgccctcgcatccatttacgatggcgacgagttccgaaaagccgaaagtgtgcaggggggcgagactaggatttacttagatctgccccaaaatttcaaaatcttcgtgagtggtaattcaaatgagtgcctccagaacagcggatttgaatataccatctgctttctgcctccgctggtgctgaattttgaattgcctccggactatccgtcatcaagtcctccaagctttacgctgagcgggaaatggctttctcccactcaactgagcgccctctgcaagcatttggacaatctttgggaggaacatcgcgggagcgtcgtactcttcgcctggatgcagttcctcaaggagtag

SEQ ID NO: 133049 - DNA, 516 bp, synthetic construct
  misc_feature 1..516: note = Description of Artificial Sequence: Synthetic coding sequence
  source 1..516: mol_type = other DNA
atgtcttcagaggaccgggaagctcaggaagacgagttactggctcttgcttccatttatgacggggacgaatttagaaaagctgaatcggtgcaagggggggaaactaggatatatctggatcttccgcagaatttcaagatctttgtgagtgggaactctaatgagtgcttgcagaatagtgggtttgaatacactatctgttttttgccccccctggtgctgaatttcgaactccctccagattaccctagtagctcaccaccctccttcaccctgtccggcaagtggctttccccaactcagctttccgccctgtgcaagcatctggataacttgtgggaggaacaccggggttctgttgttctctttgcatggatgcaatttctgaaggaggaaactctcgcatatctcaatatcgtgagtccctttgaactgaaaatcggatcccaaaagaaagtgcagcggagaactgcccaagccagtcctaacacagagctggattttgggggttag

SEQ ID NO: 133050 - DNA, 558 bp, synthetic construct
  misc_feature 1..558: note = Description of Artificial Sequence: Synthetic coding sequence
  source 1..558: mol_type = other DNA
atgagtagcgaggaccgcgaggctcaggaggatgagctcctggccctggcatccatatacgatggcgacgagttccgaaaggctgaaagcgtacagggtggagaaaccagaatctacttagatctacctcagaacttcaagatctttgtgagtggaaacagtaatgagtgtttgcagaacagtggctttgagtataccatatgcttcctgccacccctagtgctgaacttcgagctgccgcctgattaccctagcagcagtcccccctcttttacattgtctgggaaatggctgtctcccactcagctctcagccctgtgtaagcatctggataatctctgggaagaacaccgcggaagcgtggtcctgttcgcatggatgcagtttttgaaagaggaaaccttggcttacctcaacattgtttctcccttcgagctcaaaatcggcagtcaaaagaaagtccagagacgcaccgcacaggctagtcctaacactgaactggactttggtggcgccgcaggctcggatgtcgatcaagaagagatagtggatgagtag

SEQ ID NO: 133051 - DNA, 186 bp, synthetic construct
  misc_feature 1..186: note = Description of Artificial Sequence: Synthetic coding sequence
  source 1..186: mol_type = other DNA
atgtcaagcgaagacagagaagcacaggaagatgagttgctggccctggcatctatttacgacggggacgaatttcggaaagccgagagcgtccagggcggagagacacgcatctatctggaccttccacagaattttaagattttcgtctccggtaactcgaatgagtgcttacagaatagttag

SEQ ID NO: 133052 - DNA, 837 bp, synthetic construct
  misc_feature 1..837: note = Description of Artificial Sequence: Synthetic coding sequence
  source 1..837: mol_type = other DNA
atgagctctgaggatagggaggctcaggaagacgagctgctggctttggccagtatctacgacggggacgaattccggaaagctgaatcagtgcagggaggcgagacccgcatttatctggatttgcctcagaactttaagatttttgtgtcagggaatagtaacgagtgcttgcaaaacagcggcttcgaatacaccatctgcttcttaccaccactggtactgaacttcgagctgccacccgactacccatcgtcttctccaccttctttcaccttgtcagggaagtggctgagccccacgcagctatccgccctgtgcaagcatctggacaatctgtgggaggaacacagaggaagcgtggtgctctttgcatggatgcagttcctcaaagaggagactcttgcctacctcaacatagtgagcccatttgagctgaaaatcggatcccagaagaaagtgcaacggcgtactgcccaggccagccctaataccgaactggactttggcggagctgcaggaagcgacgtcgatcaagaggagattgtggacgagcgtgccgtgcaggacgtagagtctctgagcaacctgatccaagagatactcgactttgatcaggcccagcagatcaagtgtttcaactcgaaactgtttctttgctccatttgtttctgtgagaagctgggctctgaatgcatgtatttccttgagtgtagacacgtttattgtaaggcctgtttaaaagattactttgagatccagatcagggacggtcaggtgcaatgtttaaactgcccggaaccaaagtgcccaagcgttgccacaccgggccagtag

SEQ ID NO: 133053 - DNA, 300 bp, synthetic construct
  misc_feature 1..300: note = Description of Artificial Sequence: Synthetic coding sequence
  source 1..300: mol_type = other DNA
atgagctcagaagacagggaggcccaggaggatgagttattagcattagccagcatctatgacggggacgagttcaggaaggcagagtcagttcagggtggggagacaaggatatatctggatctaccccaaaacttcaaaatttttgtatccgggaactccaacgagtgccttcaaaactcaggattcgaatatacgatttgctttctgccccccctcgtcctgaattttgagcttcccccagactacccaagtagctctcctccctcatttacattgtccgggaaatggctgagctag

SEQ ID NO: 133054 - DNA, 516 bp, synthetic construct
  misc_feature 1..516: note = Description of Artificial Sequence: Synthetic coding sequence
  source 1..516: mol_type = other DNA
atgtccagcgaggaccgtgaggcccaggaggatgaactgctggccctggcatcgatttacgacggggacgagtttagaaaagctgagtcagtgcaaggtggggaaacaaggatctacctcgatcttcctcaaaattttaagatctttgtgagcgagaagttgatggacctcagaaacgagtatctgcaggctgacgaggctaataagaggcttctcgaccagcgatacggcaagcgtgtgattcagaaggcattggaagagatggaatctaaggagtggctagagaagaattctaagtcctgcccttgttgcggcactccaatcgagaaacttgatggttgtaataagatgacatgtactggctgcatgcaatatttttgctggatatgtatgggatcactcagccgagctaacccatacaagcacttcaatgatccagggagcccgtgcttcaaccgcctgttttatgctgtcgacgtagacgacgatatttgggaggacgaggtggaggattag

SEQ ID NO: 133055 - DNA, 1077 bp, synthetic construct
  misc_feature 1..1077: note = Description of Artificial Sequence: Synthetic coding sequence
  source 1..1077: mol_type = other DNA
atggccgggtgcggggagatcgaccactcgattaatatgttgccaactaacaggaaggccaatgaatcctgctccaatactgcaccaagtctgacagttcctgagtgtgcgatctgtctgcagacatgcgtgcacccagttagtttaccctgcaagcacgtcttctgttacctgtgcgttaagggggcgagctggctgggcaaaaggtgtgccctttgccggcaggagattcccgaagatttcttagataagcccactctgctcagcccggaggaactgaaggcagcatccagggggaatggcgaatatgcctggtattatgaagggaggaacggctggtggcagtacgacgaacgcacaagccgggaattggaagacgcttttagtaagggcaagaaaaacaccgagatgctgatcgcagggtttctctatgtagctgacctggagaatatggtgcagtaccgccgaaatgagcatgggcgaaggagaaagattaagagggatatcatagacattcccaaaaaaggagtagccggcctgcgactggattgcgacgcgaacacagtgaacttggcccgcgaaagcagcgcggatggtgcagattcagtcagcgcccaatccggggccagcgtacagcctcttgtaagcagcgtgagacccttgactagcgtagacggacagctgacatctccggccactccatcacccgacgcgtccacctcgcttgaagattcattcgctcacctgcagttatccggcgacaatacggccgagaggtcccaccgtggggaaggcgaagaggatcatgaatcgccaagctcgggaagggttccagccccggatactagtatcgaagaaacagagtcggatgcgagctctgactctgaagacgtttctgcagtggtggcccagcactctcttacccagcaacggctgctggtgtcaaatgccaatcagactgtgcctgatcgaagcgaccggtcaggcacagacaggagtgtagcgggcgggggcactgtgtctgtgtctgttagatcgcgacgccccgacggacagtgtacagttacagaagtttag

SEQ ID NO: 133056 - DNA, 1077 bp, synthetic construct
  misc_feature 1..1077: note = Description of Artificial Sequence: Synthetic coding sequence
  source 1..1077: mol_type = other DNA
atggctgggtgcggggagattgatcactccatcaacatgctaccaactaatcgcaaggcaaatgagagttgttccaatacggctccttccctgaccgtgcctgagtgcgccatctgtctacaaacctgtgtgcacccagtgtccctgccttgtaaacatgtgttctgctatctgtgcgtcaaaggggcttcatggttgggtaagcgctgcgccctttgcaggcaggagattcccgaagactttctggataagcctactctgctatctcctgaagaactcaaagcagccagtaggggcaacggggaatacgcgtggtattatgagggaaggaacgggtggtggcaatatgatgaaaggactagccgggaactggaggatgccttcagcaaaggcaagaagaataccgagatgctcatagcaggattcctgtacgtggcagatctagagaacatggtgcagtatcgcaggaatgagcacggacgccgaaggaaaataaagcgcgatataatagacattccgaaaaaaggagtggcaggtctccggcttgactgtgacgccaacactgtcaatttagcccgagagtccagtgccgacggcgccgacagtgtcagtgcgcagagtggggctagcgttcagccacttgtttcatccgtgcggccgttgactagcgtggatggccagctcacttcacccgccacgccctctccggatgcctctaccagcctcgaagattctttcgcccacctgcagctcagtggggacaacaccgcagaacggtcacatcggggagagggcgaagaagatcacgagagcccctcaagcggtcgcgtacctgcccccgatacaagcatagaagaaaccgaatcggatgcttcatccgacagtgaagatgtttccgcagtagtggcacaacactcccttacgcagcagcggctcctggtgtctaacgcaaaccagacagtgcccgaccggtcagatcggagtgggaccgacagatcggtggctggcggcgggaccgtgtccgtgtcggtacgatcccgacgtcccgatggacagtgtaccgtgactgaggtgtag

SEQ ID NO: 133057 - DNA, 1080 bp, synthetic construct
  misc_feature 1..1080: note = Description of Artificial Sequence: Synthetic coding sequence
  source 1..1080: mol_type = other DNA
atgatggccggttgtggcgagattgatcattcaatcaacatgctgcctacaaataggaaagctaacgaatcctgttccaatacggctccttcgctgactgtgcccgagtgcgccatctgcctgcagacttgcgttcaccctgtcagtctaccgtgcaagcatgtcttctgctacctctgcgttaagggggcttcgtggctcggtaagcggtgtgccctgtgtaggcaggagattcccgaggacttcctggataaaccgacattgctgtcgcccgaggagttgaaggctgcatccaggggcaacggggagtatgcctggtactatgaagggcggaatggctggtggcagtatgacgagcgcacaagcagagaactcgaggacgccttcagtaaaggcaaaaaaaacaccgagatgctcatagctggtttcctgtacgttgccgatctggagaacatggtgcagtatagacggaacgaacatggccggcgcagaaaaatcaaaagggatattatcgacattcctaagaaaggcgtcgcaggtctgcggctcgactgcgacgctaacaccgttaacttagcccgtgagtcctccgccgatggagccgactccgtatctgcgcagagcggagccagcgtccagccactcgtttcctctgtgaggccactgacatcagtcgacgggcaactgacaagtcccgccaccccgtccccagatgcttccacgagcctggaggattcctttgcccatctccaattaagcggcgacaatactgccgaaagatctcacagaggggagggagaggaagatcatgaatcccctagttctgggcgcgttcccgcccccgatacctcaattgaggagaccgagtctgatgcctccagcgattccgaagatgtatctgctgtggtggctcagcattctcttacccagcagagattgcttgtttcaaacgcgaatcagactgtacctgatagatcagacaggagtggcaccgaccgaagcgtggctggaggcggcaccgtaagtgttagcgtgcgttcaaggaggccagacggacagtgtactgtcacagaagtctag

SEQ ID NO: 133058 - DNA, 1716 bp, synthetic construct
  misc_feature 1..1716: note = Description of Artificial Sequence: Synthetic coding sequence
  source 1..1716: mol_type = other DNA
atggccctgcccaaggacgccattccctcactttctgagtgccagtgtgggatctgtatggaaatcctggtggagcctgtgaccttaccctgtaatcatacactctgcaaaccatgctttcaaagcactgtcgaaaaggcaagcctgtgctgcccgttctgccgtagaagagtaagctcctggacacggtaccacacaaggcggaactcgttagtgaacgtagagctctggactattatacagaagcattacccacgggaatgtaagctaagagcgtctggacaggagagcgaagaggttgccgatgactaccagcccgtccgcctgctgagcaagccgggcgagctgcggcgggaatacgaggaggaaatttctaaagtggcagcagaaaggcgggcctccgaggaagaagagaacaaagcctccgaggagtatatccaaagattactggccgaggaggaggaggaagaaaaacgtcaggctgagaagagacgccgggccatggaggaacaactcaaaagtgacgaggaactcgcccgaaaactgagcattgacattaacaacttttgtgagggatctatctctgcctctccactcaacagtcggaagagtgaccccgtgacaccaaaatccgagaagaagagtaagaataaacagagaaacaccggggatatccaaaagtacctgacccccaaatcacagtttggttccgctagccattcagaggctgtgcaggaggtgcggaaggatagcgtgtctaaagatatagacagcagcgacaggaaaagccctacgggacaggacacagaaatcgaagatatgcccactttgagtccccagatcagcctcggcgtcggggagcagggcgcagattcctccattgagtctccaatgccctggctctgcgcgtgcggagcggaatggtaccacgaaggaaacgtcaagacccgaccatctaaccatggtaaagaattgtgtgtattgagccatgaacgcccgaaaacccgggttccatacagcaaagagactgccgtaatgccctgcggaaggaccgagagcgggtgtgcccccacttcaggagtgacccagaccaatggcaataataccggcgagacagagaatgaggagtcttgtctgctcatttctaaagaaatctccaagcgaaagaatcaggagagctcttttgaagctgtcaaggatccatgcttttctgcaaagcgacggaaggtgtcacctgaatcttcccccgaccaggaggaaacagaaatcaacttcactcagaagttgatcgatctggaacacctgctttttgagaggcacaagcaggaagaacaggaccggctgctcgccctgcagctacagaaagaagttgataaggagcaaatggtccccaacagacagaagggatcccccgatgagtaccacctccgggccacatctagtcctccagacaaggtcctgaatggacagaggaagaacccaaaggacgggaatttcaaacggcagacccatacaaagcatcccactccggaaaggggatcccgagataagaatcgtcaagtgtctctgaagatgcagctgaagcaatcagtgaatcgccgcaagatgcctaattcgactcgggatcattgtaaggtgtccaagtccgcccactccctccaaccttccatatcccagaaatccgtttttcagatgtttcaacgctgcaccaagtag

SEQ ID NO: 133059 - DNA, 1716 bp, synthetic construct
  misc_feature 1..1716: note = Description of Artificial Sequence: Synthetic coding sequence
  source 1..1716: mol_type = other DNA
atggccctcccaaaggacgccattccatcactgtctgagtgtcagtgcgggatttgcatggagattctggttgaacccgtgacactcccatgcaaccatacactgtgtaagccttgcttccagagtaccgtggaaaaggcgagtctttgttgtccgttctgtcgcaggagggtttctagctggacacgctatcacactagaaggaattctcttgtcaacgtggagctgtggacaatcattcagaagcactatcctagagaatgcaagctccgagcgagtgggcaggagagcgaggaagttgctgacgactaccaacctgtaaggctcctgagtaagccaggagagctgcggcgggagtatgaggaggagatctcgaaagtggctgcagagagacgagcatccgaagaggaagagaataaagcatctgaagagtatatacaacgcctgttagctgaggaagaggaagaagaaaaaaggcaggccgaaaaaaggcgcagagccatggaagaacagttaaagagcgacgaagaacttgcacggaaactcagcattgacataaataatttttgcgaggggtctatctccgcatcccccctgaactcccggaaaagtgacccggtgacccctaaatcagaaaaaaaaagtaaaaacaagcaaagaaacacaggagatattcagaagtatctgacgcctaagagccaatttgggtccgcttcacactccgaggctgtgcaggaggtcaggaaggattctgtgtcgaaagatatagattccagtgataggaagagccctacaggccaggatacggaaattgaggacatgcccaccctgtctcctcaaatcagtctgggcgtgggagaacagggggccgactcttctatagaatctcccatgccctggttgtgtgcctgcggcgcagagtggtaccacgaagggaacgtgaagaccagaccctccaatcacggcaaagagctctgcgtgctttctcacgagagacctaaaactcgagttccctacagtaaagaaactgcagttatgccctgcggtcgcaccgagtcaggctgcgcaccaacttcaggggtgacccagaccaatggaaacaacaccggagagactgagaacgaagagtcatgtttattaatctcaaaagagatctctaagcggaagaatcaggaatccagcttcgaagccgtgaaggacccgtgttttagcgctaagaggaggaaggtttctcctgagagcagtcccgatcaggaagaaaccgagatcaacttcacccagaagcttattgacctggagcatcttctgttcgagagacacaaacaggaggaacaggaccgtctgttagctcttcagctccaaaaggaggtggacaaggaacaaatggtgcccaataggcaaaagggatctcccgacgaataccacttgcgagctactagttcccctcctgataaagtgcttaacggacagcggaaaaatcctaaagatggcaattttaaaagacagacccacacaaagcatccaactccagagcggggatcgagggacaagaaccgtcaggtcagcctgaagatgcaacttaaacagtcagtcaacaggcggaaaatgccaaacagtaccagggaccactgcaaggtgagcaagagtgcccattcactgcagccttcaatctcacagaagagcgtatttcagatgtttcaacggtgtaccaaatag

SEQ ID NO: 133060 - DNA, 4872 bp, synthetic construct
  misc_feature 1..4872: note = Description of Artificial Sequence: Synthetic coding sequence
  source 1..4872: mol_type = other DNA
atggccgccgaagcgtcaaaaactgggcctagcagaagctcctatcagaggatggggcggaagagtcagccatggggggccgctgagatccagtgcacgcgctgtggcaggcgcgtgagcagatctagtgggcatcattgtgagcttcaatgcgggcatgctttttgcgaattgtgcctgctgatgacggaagagtgtacaaccatcatctgtcccgactgcgaagtggccacagccgtcaacacacgccagcgatactaccctatggctggatacatcaaagaggatagcatcatggagaaattacagccaaagacgatcaagaactgttcccaggattttaaaaagacagccgatcaacttaccacgggccttgagcgatctgcctccactgacaagacactactgaactcaagcgcagtgatgctggacaccaatactgcagaagaaatagacgaagccctgaacaccgcacatcacagctttgagcagctgtccatcgctggcaaggccctagagcatatgcaaaagcagacgattgaagaacgcgagcgagtgatcgaggtggtggaaaagcagtttgaccaactccttgcatttttcgattcaaggaagaaaaacctttgcgaagagttcgctagaaccaccgatgactatctaagcaatctgataaaagcaaaatcctacattgaggagaagaaaaacaacctcaacgccgcaatgaacattgcccgggcattacaactgtcaccaagccttcggacatattgtgacctcaatcagatcattaggacgctgcaattaaccagtgactctgagttagcccaggtgagttccccccagctgcgtaaccccccccggctgagtgtgaattgttctgaaattatttgtatgtttaataatatgggcaaaatcgagttccgggatagcacaaaatgctacccgcaggagaatgagatccggcagaacgttcagaagaaatacaataataagaaggagctctcgtgttacgatacctatccgcctctcgagaaaaagaaagtggatatgtctgtgcttacctcggaagctcctcctccacccctgcaaccggagactaatgatgtacatcttgaagccaaaaattttcagccccagaaggacgttgcaaccgcttcccctaaaacaattgccgtcctgccacaaatgggatcatctccagacgtgattatcgaagaaatcatcgaagacaacgttgagtctagcgccgaactggtctttgtgtctcacgtgatagatccatgccatttctatattagaaaatacagccagattaaggatgcaaaggtgttggagaaaaaggttaacgagttctgtaataggtcttcacatctggatccatccgacattttagagctgggagcgcggatttttgtgtcatccataaaaaatggcatgtggtgccggggcacaattactgaacttatcccaattgaaggacggaatacccgcaaaccctgctctccaacccgactattcgtgcacgaggtagccttgattcagatatttatggtcgacttcggcaattccgaagtactgatcgtgaccggtgtggttgatacacatgtcaggccagaacattccgccaaacagcacatagctttaaacgacctgtgtttagtgctacgaaagagtgaaccctatacagaaggactccttaaagacattcagcccctggcacaaccttgctctcttaaggacatcgtcccgcagaattccaatgagggttgggaggaagaggctaaagtggaatttctcaagatggtaaacaataaggcagtctctatgaaggtcttccgggaggaggacggagtcctgattgttgatctgcagaaaccccccccaaacaaaatttcatctgacatgcctgtttcgttacgggacgccttagtgttcatggagttagccaaatttaaatctcaatcactgagaagccattttgagaagaacaccacacttcactatcacccacctatcctgcctaaagaaatgacggatgtgtcagtcacagtatgtcacattaattcaccgggggatttttatctgcagctcatagaaggactggatatcctcttcctgctgaaaaccatcgaagagttctataaatccgaggatggcgaaaatttagaaatcctttgtcccgtgcaggatcaggcctgcgtagctaagttcgaggacggtatatggtacagagctaaggtcattggactccccggccaccaggaggtggaggtgaaatatgtggattttggcaacaccgccaagataactattaaggatgtacggaaaatcaaagacgagttcctaaatgctcccgagaaagcaataaagtgcaaactggcctacatcgagccttacaaacgtacaatgcagtggagtaaggaggccaaggagaaatttgaagaaaaagcccaagataagttcatgacgtgttccgtgatcaagatcctggaggataacgttctccttgtggagctgtttgacagtcttggggcgcccgagatgactaccacaagcatcaacgaccaactcgtgaaagaaggattagcgtcttacgagatcggctatattctcaaagacaacagccagaagcatatcgaagtgtgggacccttcccctgaagaaatcatatcaaatgaggtgcacaacttgaacccagtgtccgctaagtcactccctaacgaaaattttcagagcctttacaacaaggaactgccagtgcacatctgcaacgtgataagtcccgagaagatttatgtgcagtggcttctgacagaaaacctcctcaattccctggaggagaaaatgatcgccgcctacgaaaattccaagtgggaacccgttaagtgggaaaacgacatgcactgcgccgtcaagattcaggacaaaaaccagtggcgtcgagggcaaataatcaggatggttacagatactctggtggaggtgctgctgtacgacgtgggtgtggagctggtagtgaatgttgactgccttcgcaagttggaagagaaccttaagaccatgggacggttatcattagagtgctcactcgtggacatccggcctgccggtggttctgataagtggacggcaactgcctgcgattgcctctcactgtacctcacaggggcagtggcaacaataatattacaggttgactcagaagagaacaacacaacttggcccctgccagtgaagatattttgccgtgacgagaaaggggagagagtagacgtaagtaaatacctgatcaaaaaagggctagctctgcgagagcgccggatcaataacctcgacaattcccatagtctctctgagaagagcttagaagtgcctctggaacaggaagactccgtagtaacaaattgcataaagactaacttcgatcccgataagaagactgccgatatcatctctgagcaaaaggtcagcgagttccaggagaaaatcttggagccccggacaacccgcggctataagccaccagctattccaaacatgaatgtgtttgaagccactgtaagctgcgtgggggacgatggtactatctttgttgtcccaaagctgtcagaatttgagttgatcaagatgactaacgaaatccagtcaaacctgaaatgtctaggattgctggagccctacttctggaagaaaggtgaggcctgtgctgtgcggggatctgacacactgtggtaccgagggaaggtgatggaggtggtcggaggcgcagtacgcgtgcagtatctggatcatggctttacagagaaaatcccccaatgccacctgtaccccattttgttgtaccccgacatccctcaattttgcattccatgccaactacacaacacaaccccagtggggaacgtgtggcagcccgatgccatcgaggtgttgcaacaactgctgtccaagagacaggtggacattcacatcatggaattgccaaagaatccatgggaaaagttaagtatacacttgtattttgatggaatgagtttatcatactttatggcctattataagtattgtacaagtgagcataccgaagagatgctgaaagagaaacctcggtcagaccacgacaaaaagtacgaggaagaacagtgggagatccgctttgaggaattgttaagtgcagagacagacacgcctctgctccctccatacctcagtagctctttgccttcccctggagagctctacgcagtgcaagtaaagcatgtcgtttcccccaatgaagtctacatctgtttagattcgatcgaaacatccaaccagagcaatcaacattccgacaccgatgacagtggggtctcaggtgagtctgagagcgagagcttagacgaagctctccaaagggtaaacaagaaagtggaggcccttcccccccttactgacttccggacagagatgccttgtttagccgaatatgatgacggtctgtggtatagagcaaagattgtagccattaaggaattcaacccactttccattttagtgcagttcgtggactatggctctaccgcaaagctcactctgaataggctatgccagattccgtcacacttaatgcggtacccagccagagcgattaaggttctgctggccgggtttaaacctccattgcgcgatctcggagaaacacggataccatactgtcctaagtggagcatggaggccctgtgggccatgattgattgtctgcagggaaagcagctttatgcagtctcgatggctcccgctccagaacagatagtgacgctgtacgatgacgagcaacacccagtgcacatgccgttagtggagatgggcctggccgacaaagacgagtag

SEQ ID NO: 133061 - DNA, 1350 bp, synthetic construct
  misc_feature 1..1350: note = Description of Artificial Sequence: Synthetic coding sequence
  source 1..1350: mol_type = other DNA
atggcggctgaagcttcgaagacagggccctcccgcagttcatatcaaagaatgggacgcaaatctcaaccatggggggcagccgagattcagtgtactcgatgtgggcgaagggtctctagatccagcggacatcattgtgagctgcaatgtggacacgccttctgcgaactttgccttttaatgaccgaggaatgtaccacaattatctgccctgactgcgaggtggccacggccgttaataccaggcagcgctactatcccatggcaggctatatcaaggaggatagcatcatggaaaagctgcagcccaaaacaattaaaaactgctctcaggactttaaaaaaaccgctgaccagctgactaccgggctagagcgctcagcctccacagacaaaaccctccttaattccagcgctgtgatgctcgacactaacacggcagaggagattgatgaggccctgaatactgcacaccatagctttgaacagttatccatcgctggaaaggctcttgaacacatgcaaaagcagaccattgaggagagagagagagtgatagaagtggtggagaaacagtttgatcagctgctcgcattcttcgactcccggaaaaagaacttatgcgaggagtttgccaggactactgacgactaccttagcaacttgattaaggctaaatcttacatagaggagaagaaaaataacttgaacgccgccatgaacatcgctagggccctgcaacttagtccttccctgcggacctattgcgatcttaaccaaatcatcagaacactacaactcactagcgattccgagctcgcacaggtgagctcaccgcagctgcggaacccgccacgattgtctgtcaactgttctgaaataatctgtatgttcaataatatgggtaaaattgagtttagagacagtaccaagtgctacccacaggaaaatgagatcaggcaaaacgtgcagaaaaagtacaataataagaaagaactgagttgctatgacacctatcctccacttgagaaaaaaaaagtggacatgtcagtgttgacaagcgaggcacctcctccaccgctgcaaccagagacaaatgacgtccacctcgaggccaaaaatttccaaccccagaaggacgttgcaacagcgtccccgaaaactatagctgtgttgccccagatgggctcaagcccggatgtaattattgaagaaattatagaagataatgtcgaaacatgcggcaccgacgatctgggtgagactcctagatacccaaaaaagcctttgcagaagaattcatccgtgccattcggttcaaaggccgataccgtgacaactgtgtag

SEQ ID NO: 133062 - DNA, 4746 bp, synthetic construct
  misc_feature 1..4746: note = Description of Artificial Sequence: Synthetic coding sequence
  source 1..4746: mol_type = other DNA
atggccgccgaagcctctaagaccggcccctcaaggtcatcataccaaaggatgggacgaaagtctcagccgtggggcgccgctgagatccaatgcacccgatgcgggcgccgggtttctcgatcttcaggacaccactgtgaacttcaatgcggacacgcattctgtgaactgtgcctacttatgaccgaggagtgcactactatcatctgccctgactgcgaggtggcaacagcagtcaataccagacagcgttactaccctatggctggctatataaaagaggattctattatggaaaagctgcagccgaagacgatcaaaaattgcagtcaggacttcaagaaaactgccgaccagctgaccaccggcctggagagatcagctagcaccgataagaccctccttaactcatccgcagtgatgctagacacaaataccgccgaggagatcgacgaggctctgaacacagcccatcactcttttgagcagctgtctatagcaggtaaggcgctggagcacatgcaaaaacaaaccattgaggaacgggaacgcgtgatcgaggtagttgagaaacaatttgaccaactgctggccttctttgactcacgaaaaaagaacctctgcgaagagtttgcccggactaccgatgattatctctcaaacctgatcaaggctaagtcttacattgaggaaaaaaaaaataatcttaacgctgcgatgaatatagcaagagccttgcagctgtcaccttcgctgagaacctactgcgacttaaatcagattatccgcaccctgcagcttacatcggacagcgagttagcgcaggtgtcttcgcctcagctgagaaaccccccgcgcctgtctgtcaattgctccgagataatatgcatgtttaataatatgggaaaaatcgaattccgggacagcactaaatgttacccacaggagaatgaaataagacagaatgttcagaaaaaatataataacaagaaagaattgagctgctatgatacgtatccaccccttgaaaaaaagaaggtcgatatgagcgtacttacctcggaggctcctccaccgcctcttcaacctgaaactaatgacgtccatctggaggctaaaaacttccagccccaaaaggatgtagcaacagcttccccgaaaacaattgccgttttacctcagatgggatcctctcccgacgttattattgaggaaattatcgaggataacgtggagagtagcgctgagcttgtattcgtcagccatgtcatcgatccgtgtcacttttatatccgaaagtactcacaaattaaagacgctaaagtgttggaaaagaaagtcaacgagttctgcaatcgcagttcacaccttgaccctagcgacattctggaactcggcgccaggatattcgtgagttctattaaaaacggaatgtggtgccgcggcacaataactgagttgattcccatagaagggcggaacacccggaagccttgtagcccaaccaggctgttcgtgcatgaggtggccctcatacaaattttcatggtggattttgggaactctgaggtgcttatagtcacaggggtggttgatacccacgtgcgccccgaacattctgccaagcaacacattgccttgaacgacctttgtctggtgctgcgaaagtcagaaccttacacagaaggactactcaaagatattcagccattagcgcaaccctgtagcctgaaagacatagtgccccaaaattccaatgagggatgggaggaagaagcaaaggttgagttccttaagatggtcaataacaaggctgtgagcatgaaagtgttcagagaggaggatggtgtactcatagtggacctgcagaaaccgcctcccaataagatttctagtgatatgcccgtttcactacgggatgctttagtgttcatggagcttgcaaaattcaagtctcaatcacttcggagccattttgagaagaacaccacactgcactaccatccaccaatcttgcctaaagagatgactgatgtcagcgtcactgtttgccacatcaactcacccggggatttttacctgcagctaattgagggactcgacatcctttttcttctcaaaacgattgaagaattctacaaatccgaagacggtgagaacttggaaattctgtgtcccgtgcaagaccaggcatgcgttgctaagttcgaagacggcatatggtatcgtgccaaggtgataggacttcccgggcatcaagaagtagaggtgaagtatgtagactttgggaatactgctaagatcactatcaaggatgtgagaaagataaaagatgagttcttgaacgcccccgaaaaggccatcaagtgtaagctggcttacattgaaccttacaagaggacgatgcagtggagtaaagaggcaaaagaaaagttcgaagaaaaggcacaggacaaattcatgacctgtagcgtcattaagattctggaggacaacgtgctgctggtggaactgttcgactctctgggtgcccccgagatgaccaccacatcaataaatgaccagcttgtgaaagaggggctcgcttcctatgaaattggctacatattgaaggataactcccagaaacacatagaggtgtgggacccttctccagaagagatcatcagtaatgaggtgcacaacctaaatcctgtttccgccaaaagtcttcctaatgagaacttccagtccctgtataacaaggaactcccggtccacatctgcaacgtgatcagtcccgagaagatctatgtgcagtggctcctgacagagaatctcttgaattcactggaggagaagatgatagctgcttacgagaatagcaaatgggagcccgtgaagtgggaaaatgatatgcactgcgccgttaagatccaggataaaaatcagtggcgtagaggacagatcatcaggatggtcactgacacactggtggaagttttgctatacgacgtcggcgtcgaactggtggtaaacgtggactgtctgcgcaagcttgaggagaaccttaaaactatgggtcgcttgtccctggagtgtagcctggtggatatcaggccagcagggggctccgacaagtggacagctacagcatgtgactgcctcagcctgtacctgaccggagctgtagccacaatcatcttgcaggtcgattccgaagagaacaacacaacatggccccttccagtgaagattttctgccgagacgagaagggcgagagagtcgatgtctccaagtacctcataaaaaaaggtttggctcttagagaaagacgaatcaacaatttagacaatagccatagtctctctgaaaaaagcctcgaggttcctctggaacaggaggactccgtcgttacaaattgtatcaaaaccaattttgacccagacaagaaaactgctgacattatttctgagcagaaggtttcagaattccaggagaagattctcgagccacgaacaacccgtgggtataaaccaccagcaatacctaacatgaacgtatttgaggccaccgtgtcttgtgtgggcgatgatggtaccatctttgtcgttcctaaacttagtgaattcgagcttatcaaaatgacaaatgaaattcagtcaaacctgaagtgcctgggcttgctcgagccctatttttggaaaaaaggcgaagcatgcgccgtcagagggtctgacacattatggtacagaggtaaggtcatggaggtggtgggtggcgctgtgcgtgtccagtatcttgatcatgggttcaccgagaagattccccagtgtcatctgtatcctattctcttatatccagacatacctcagttctgcatcccctgccaactccacaatacaacccccgtgggcaacgtgtggcagcccgatgcaatagaagtcctccagcagctcctctctaagcgtcaggtggacatccacatcatgaaaccaaggagcgaccatgataagaaatacgaggaggaacagtgggaaataaggttcgaagagttactgtcagccgagacggatactccattgctccctccctacctgtcaagctctcttccttcacccggggaactctatgccgttcaggtgaaacatgtggtgagtcctaatgaagtatacatctgcctcgacagcattgaaacttctaatcaatcgaaccagcacagtgataccgacgactctggcgtgagcggggaatctgagtcagaatcactcgacgaagcactccagcgggttaataagaaggtggaggccttgcccccgctgactgacttcaggacagagatgccctgtctcgcagagtacgatgatggcctttggtaccgcgccaaaatcgttgctattaaggagttcaaccctctatctattctcgtacaattcgtggattatggttctaccgccaagctcaccctcaaccgcctctgccagattccctctcacctgatgcgctatccggctagggcaattaaagtgttgctggccggcttcaaaccccccctccgagatctgggcgagaccaggatcccctactgtccaaagtggtccatggaggcgctgtgggccatgatcgattgcctgcaaggaaagcagctctacgcagtctccatggcaccggcgcccgagcagattgtgacactgtacgatgatgagcagcatccagttcacatgccgctggtcgagatgggacttgccgacaaggacgaatag

SEQ ID NO: 133063 - DNA, 3207 bp, synthetic construct
  misc_feature 1..3207: note = Description of Artificial Sequence: Synthetic coding sequence
  source 1..3207: mol_type = other DNA
atgttggatacgaacactgctgaagaaattgatgaagccctcaatacagcacaccacagcttcgaacagctgtcaattgcaggtaaagcccttgagcacatgcagaaacagactattgaagagcgggagcgggtaatcgaggttgtcgaaaaacaattcgaccaactgttggccttttttgactcaagaaaaaaaaacctttgtgaagaatttgcccgcactacagatgattacctctctaaccttattaaggctaagtcctatattgaagagaagaagaataatctcaacgctgcaatgaatatagctcgggcattgcagctgagtccatcgctgcggacgtattgcgacctgaatcaaatcattcgcactctgcaactgacaagtgacagcgaacttgctcaggtcagctcacctcagctgaggaacccaccgcgcctgagcgtgaattgtagcgagattatttgcatgttcaacaacatgggcaaaattgagttcagagactccactaaatgctatccccaagagaacgagattcgccagaatgttcagaagaagtacaacaataagaaagagctgtcctgctatgacacttaccctccactggagaagaagaaagtggatatgagcgttctgaccagtgaggcccctccccctcccttgcagcctgagaccaacgatgtccacctagaggcaaaaaattttcaacctcagaaggacgttgctacagcctccccgaagaccatcgctgtcctgccccagatgggttccagccccgacgtgatcatcgaggagattattgaagataacgtggagtcttccgcagagctggtatttgtcagccatgtgatcgatccatgtcacttttacatcagaaagtattcccagattaaggacgccaaggtgttagagaaaaaggtcaacgagttctgtaaccggtcaagccacctggatcccagcgatattttggaactgggcgccagaatcttcgtcagctccatcaagaatggtatgtggtgtagaggcactattactgaactgattccaatcgagggaaggaacactcggaagccatgctctccaactcggttattcgtgcacgaggtggcactgatccagatcttcatggtcgacttcggaaactctgaggtcttaatcgtcacgggagtcgtggatacgcatgtccgaccagagcactccgctaagcagcacattgcccttaacgacttgtgcctggtcctccgtaaatccgagccatataccgaaggcctgctcaaggatatacagccgctagcacagccatgttcactgaaggacatagtcccccaaaattctaatgaagggtgggaggaggaggccaaggttgaattcctcaaaatggtgaacaataaggccgttagtatgaaagtgtttcgggaggaagacggagtgctcattgtcgacctccagaagccaccacccaacaagatttcgtccgatatgccagtcagtctcagagatgccctggtgttcatggaactggctaagttcaaatcacagtcccttaggtcacatttcgagaaaaacaccaccctgcactatcatccgccaatcctccccaaggaaatgacagacgtgtcggtcacagtatgccacattaatagccccggcgatttttacctgcagctgatagaaggactggacatcctgttcctcttaaaaacaattgaggaattctacaaatctgaggacggcgagaacctcgagattctctgccccgtgcaggatcaggcatgtgtcgccaaatttgaagacggcatctggtatcgagccaaagttatcggactgccaggacaccaggaagttgaggttaagtacgtggacttcgggaacaccgcaaagataactattaaagatgtgcgaaagataaaggatgagttcttgaatgcccccgagaaggccataaagtgcaagctggcgtatattgagccttataagagaaccatgcagtggtcgaaggaagctaaagaaaagttcgaggagaaagcgcaggataagtttatgacatgctccgtgatcaaaatcctggaggacaatgtgttgctggtggagttattcgactcactgggggcgccggagatgacaaccacatcaattaacgaccaacttgtgaaggagggcctagcctcctatgaaattggctacatcctcaaggacaactcccaaaagcacatcgaagtttgggatccgtctcctgaggaaatcatatctaacgaggtgcacaacctgaatccggtctcagccaaatctttaccaaacgagaacttccagtcactctataacaaggagctccccgtgcatatctgtaacgtcatcagcccagagaaaatctacgttcaatggctgctgactgagaatctgttgaattcgctggaagagaagatgattgctgcttatgaaaacagtaagtgggaaccagtcaaatgggagaatgacatgcactgtgccgtcaaaatacaggacaaaaaccagtggcgaaggggtcagattatccgaatggtgacggacaccctggttgaagtcctgttatacgacgtcggcgtggagctcgtcgtcaatgtcgattgcctgcggaaattagaagaaaacctaaaaactatgggccgactgtcgctggaatgttccctggtggacatcagaccagccggcgggtccgacaaatggacagccaccgcgtgtgactgtctttctttgtacctgaccggcgccgtggcaacgataatattgcaggtcgactcggaggaaaacaacactacctggcccctgcctgtgaagatattctgtagggatgagaaaggggaaagggttgatgtttccaagtacctcattaagaaaggtctcgcgttaagagagcggcgaatcaacaacctggacaacagccactccctttccgaaaagagcctagaggtccccttagagcaggaggattccgttgtgaccaactgcatcaaaacgaatttcgaccccgacaaaaagacggctgatattatctccgaacagaaggtgtcagaatttcaggagaaaatcctcgagcccagaaccaccagagggtacaagcctcctgccatacccaacatgaatgtttttgaagccaccgtgtcatgcgtgggcgacgatggaaccatcttcgtggtgcctaaactgagcgaatttgaactcataaaatag

SEQ ID NO: 133064 - DNA, 462 bp, synthetic construct
  misc_feature 1..462: note = Description of Artificial Sequence: Synthetic coding sequence
  source 1..462: mol_type = other DNA
atggcatcgtactttgatgagcacgattgtgagccaagtgatccagagcaggagaccaggacaaacatgttgttagaattggctcgttctctgttcaataggatggactttgaggatctcggactggttgtggattgggaccaccatctgccccctccagctgccaagacggtggtggaaaatctacctagaaccgtgataaggggaagccaagccgagttgaaatgtcccgtgtgcctgctggaattcgaagaggaagaaactgccattgagatgccctgtcaccacctttttcattcaagttgcatactcccatggctatccaagaccaattcttgccccttatgtcgctatgagcttccaaccgatgacgatacttacgaggaacacagaagagataaagcaagaaagcaacagcaacagcacaggctcgaaaatctccatggtgcgatgtacacctag

SEQ ID NO: 133065 - DNA, 684 bp, synthetic construct
  misc_feature 1..684: note = Description of Artificial Sequence: Synthetic coding sequence
  source 1..684: mol_type = other DNA
atggcctgcacaaaaacattacagcagagccagccaatatctgctggcgccactaccactaccactgctgtggccccagctggcggccactctggctccacggaatgcgacctcgagtgccttgtatgcagagaaccctactcgtgtcctagactcccaaagctcttggcctgtcaacacgccttctgtgcaatatgcctgaagcttcttctctgtgtgcaggacaacacttggtctataacatgtccactgtgtcgcaaggtgaccgccgtgccaggcggcttgatttgttcgctgagggatcatgaagccgtagtgggccagttagcacaaccctgcaccgaagtcagcctgtgcccccaggggctggtggatccagccgatttggctgcgggtcacccaagtctggtgggtgaggacgggcaggatgaggtgagcgcaaatcatgtggcagcccgcagactggctgctcatttgcttctcttggctctgttaattatactcataggacctttcatttacccaggagtcctgcggtgggtactaacattcatcattgccctggcccttctcatgagcaccttgttctgctgcctgccctcaacaagagggtcatgttggccatcttctaggacccttttctgtcgagaacaaaaacattcccacatcagcagcatagcttag

SEQ ID NO: 133066 - DNA, 795 bp, synthetic construct
  misc_feature 1..795: note = Description of Artificial Sequence: Synthetic coding sequence
  source 1..795: mol_type = other DNA
atgtcacaggcagtacagaccaacggaactcagcccctgtctaaaacttgggagctaagtctatatgagcttcagcgtacaccacaggaggccatcaccgacggactggagatagtggtgtcacccagaagcctccatagcgagctgatgtgtcccatttgcttagacatgctcaagaatacaatgactacgaaggagtgtttgcacaggttctgcgccgactgcatcatcaccgctcttcggagtggccttcaaaggggaaagaagcaacagatcgaaaacggttctggcgcggaggacaatggcgattcttctcattgctcaaatgcctcaactcattctaaccaggaggccgggccatctaataagaggactaaaacatccgacgacagcgggcttgagctggataataataatgccgccatggcaattgatccagtgatggacggcgccagcgaaatcgagctcgtgttcagaccccatcccacacttatggagaaggatgactccgctcaaacaagatacattaaaacatcgggtaatgcgaccgtggatcacttgtccaagtacttggcagtgcggctcgcgttggaagagctgaggagtaagggtgagagtaaccagatgaacctcgataccgcctcagagaagcagtataccatttacatcgccacggcgagcggacaatttacagtcctgaacggaagcttctctcttgaactggtaagcgaaaagtattggaaggtgaataagcctatggaactgtactacgcccctactaaggagcataagtag

SEQ ID NO: 133067 - DNA, 1011 bp, synthetic construct
  misc_feature 1..1011: note = Description of Artificial Sequence: Synthetic coding sequence
  source 1..1011: mol_type = other DNA
atgagtcaggctgtccagacaaacggtactcagccgctcagtaagacttgggagcttagcctgtacgagcttcagagaacaccacaagaggcgattaccgatggtctggagatcgtcgtaagtccgagaagtctgcatagcgagctgatgtgcccaatttgcttagacatgctgaagaacaccatgaccaccaaggagtgtctccacagattttgcgcggactgcatcattacagccttgagaagcggaaacaaagagtgtcccacgtgtaggaagaagttggtgagtaagcggagtctgagaccggatccaaacttcgacgcgctcatttctaagatttatccctcacgggacgagtatgaagcacaccaggagagagtactcgccaggataaataaacataacaaccagcaggccctgtcccacagcatcgaagagggtctaaagattcaagccatgaatagattacaacgcggaaagaaacagcagatcgagaacgggtcaggagcggaagataacggtgatagctcgcattgctctaacgcgagcacgcactcaaaccaggaggcaggccctagcaacaaaagaaccaagacttcagacgatagtgggctcgagctcgacaacaataacgccgcaatggctatcgaccctgtgatggatggagcctccgaaattgagctcgttttcaggccccaccccacgctgatggagaaggatgactccgctcaaacccggtatatcaaaacgtcaggcaatgcgaccgtggatcatctctccaagtatcttgctgtacggctggccttggaggaattgcgcagcaagggggagagcaatcagatgaaccttgacaccgcctcagagaaacaatatactatctacatcgctacggcctcgggccagttcactgtgctcaatgggtctttttcgcttgaattggtttcagagaagtattggaaggtgaataagcctatggagttatactatgcgcctactaaggaacacaaatag

SEQ ID NO: 133068 - DNA, 741 bp, synthetic construct
  misc_feature 1..741: note = Description of Artificial Sequence: Synthetic coding sequence
  source 1..741: mol_type = other DNA
atgagccaggccgtccagacaaacgggactcaacccctcagcaaaacttgggaactctccttatacgagctccagcgaaccccacaggaagccattactgacgggctcgagatcgtagtgtcccctaggtctctgcactcggagttaatgtgccccatctgcctggatatgctgaagaataccatgactactaaggagtgcctccaccggttttgcgccgactgtattatcacagctttacgcagcggaaacaaggagtgtccaacctgccggaagaagctggtgtccaagcgctcactgcgaccagacccaaacttcgatgctctcatttccaaaatatatccatctcgagacgaatacgaggctcaccaagaacgagtcctggccagaataaacaaacacaacaaccagcaagcactctcacacagcattgaagaaggattgaagatccaggccatgaaccggcttcaacggggaaagaaacaacaaatcgagaatgggtctggggccgaagacaatggcgattcaagccactgctcaaatgctagcacccatagtaatcaggaagcagggcctagcaataaacggaccaaaacctctgacgactctgggctggagcttgataataataatgccgccatggctatcgaccctgttatggatggcgccagcgagattgagctagtttttagacctcatccaaccctgatggagaaagacgattctgctcaaacacgatag

SEQ ID NO: 133069 - DNA, 822 bp, synthetic construct
  misc_feature 1..822: note = Description of Artificial Sequence: Synthetic coding sequence
  source 1..822: mol_type = other DNA
atggccaactgggtattctgtaatcgctgcttccagcccccgcataggactagttgcttctccctcaccaattgtggtcatgtgtattgcgacgcctgcctcgggaaagggaagaagaatgaatgtctcatatgcaaggccccttgtagaaccgtcctactgtcgaaacacactgatgcagatatacaggcattctttatgagtattgatagtttgtgtaagaaatacagccgagagacaagccagtacctgagactctcacgggggtgctgtcgcctcaaactgtgcccagcaaccagtagcaaggaagtgccgaggggttcaacccatgggtctcaggctgccgctagagaccctcaggagcactgggtgtctacaacccgtgccccgcgtccgggctgcagaagatcgcagtctcagcctgaagctcagggcaacacaattcaagacgcaccacacccacttactctgctgcacccatcccgcacacttattcatacgaaatccccttgggggcagaagctcttggagttcattaaacacgtctgttatcatcgccaccagagccacagaccctgcgcccctgggtggttttgccaggtgttgcagaggccgggcgccgtgagcggcgagaagacacagcagacaaggccggcaccccctgcaacatgcctgctttgcctatcttgtctgtccggctttcggcacggaccctggcgaagccaggcactcccatccgatttggttgcccctctgtttgttagctacacagtggaggtgagcataacaaacgccgggtggagttttcccgcggccgtctag

SEQ ID NO: 133070 - DNA, 699 bp, synthetic construct
  misc_feature 1..699: note = Description of Artificial Sequence: Synthetic coding sequence
  source 1..699: mol_type = other DNA
atggccaactgggtgttctgtaacagatgttttcagccaccgcaccggacgtcctgctttagtttaaccaactgtggacacgtctactgcgacgcctgtctgggaaagggcaaaaaaaacgagtgtctcatctgcaaggctccttgccgtacagtactgctctcgaaacacaccgatgccgacatccaggccttcttcatgtcaattgactccttatgtaaaaaatactcccgcgagacgtctcagatcctggaattccaggaaaagcatcggaagagactgcttgcattctaccgtgagaaaatttctagacttgaggagagcttgagaaaatccgtattacagatagagcaactgcagagtatgaggagtagccagcagacagccttcagtacaatcaaatcttcagtgtcaacaaagccacacgggtgtctgctgcctccacacagttccgcccccgacaggctcgaaagtatggaagtagacttgtctccttcaccaattagaaagagcgagatcgcggcgggtcccgccaggataagcatgatatcaccaccccaggatggcaggatggctccctgtgctaggcgagtgtgccattttcaaaggtttactatgtttcttcatcgccggctgagttcactggcagcccctccttccgtccaattttggaaggcgagagggactcatcagctctag

SEQ ID NO: 133071 - DNA, 894 bp, synthetic construct
  misc_feature 1..894: note = Description of Artificial Sequence: Synthetic coding sequence
  source 1..894: mol_type = other DNA
atggcgaattgggtgttttgtaacagatgtttccagccaccacacagaacgagctgtttctctctgaccaattgtggccatgtgtattgtgacgcctgtctagggaagggcaagaagaacgaatgcctcatctgcaaggccccatgccggaccgtgctcttgtctaagcataccgacgccgatatccaagcattctttatgtctattgatagcctgtgtaagaaatattctcgggagacttcccagattctggagttccaggagaagcaccggaagaggcttctagcattctacagggagaagatctctaggcttgaggagagcttacgtaaatccgtcctacagatcgagcagctgcagagcatgaggagctctcagcagaccgcctttagcaccattaagagctctgtttccacaaagcctcacggctgtctcctgcctcctcactccagtgctccagaccgactggagtcgatggaggtggacctgtcgccctcacctatccgtaaaagtgagatagctgccggccctgcacggatctccatgatctcacccccacaagacgggcgcatgggaccacacctcacagcttctttctgttttattccatggctgacattgtcgaagccgcccgtcccaggtgagtgtgtgatcagtcgggggagtccatgcttctgcatcgacgtttgccctcattggctgctgctgctggccttctcgagcggccgccacggtgaactgacaaactcaaaaactctgccgatttacgccgaggttcagcgagcggtgctgttcccgtttcagcaggccgaagggacgttggatacctttaggacgcccgcagtaagcgtggtgttcccactatgccaatttgaacgaaaaaagagcttctag

SEQ ID NO: 133072 - DNA, 3192 bp, synthetic construct
  misc_feature 1..3192: note = Description of Artificial Sequence: Synthetic coding sequence
  source 1..3192: mol_type = other DNA
atggagtgcccttcctgtcagcacgtttctaaggaagaaactccaaagttttgcagccagtgcggtgagaggcttccacccgctgcgcctatcgccgattcagagaataataactccaccatggcatccgcttcagaaggtgagatggaatgcggccaagaattaaaggaggagggcgggccctgcctgttccccggcagtgatagttggcaggagaacccggaagagccctgctcgaaggcatcttggaccgttcaggagagcaagaagaaaaaacgcaagaagaaaaaaaaaggaaataaatccgcttcaagcgagctcgcctcactgcccctgagcccagcgtctccttgtcacctgacgctactcagcaatccttggccacaggacaccgccctgccacattcccaggctcagcagagcggccctaccggccagccatctcagcccccggggaccgcgactacaccactggaaggtgacgggctgtccgcccctacagaggtcggcgattcgccattgcaggcccaagctctgggggaagccggggtagccacgggctccgaggctcaatcctcgccacagtttcaggaccatactgaaggggaggaccaggatgcatccattccaagcgggggcagaggcctttcccaggagggaaccgggccgcctacctccgctggtgaggggcatagcagaactgaggatgccgcccaggaactgctcctaccagagagcaaaggagggtcatcagaacctggcacggaacttcagaccaccgaacagcaggcaggcgctagcgcctcaatggctgttgacgcagttgctgaaccagcgaatgctgtcaagggcgctggcaaggaaatgaaagagaagacgcagagaatgaaacagcctcccgcaactaccccaccgtttaaaactcactgtcaggaagcggagactaagaccaaggatgagatggcagccgccgaagaaaaagttgggaaaaatgaacagggggaaccagaggacctgaagaagccagagggcaagaacaggtccgcggctgcagtgaagaatgagaaagagcagaagaaccaggaggctgatgtgcaagaggttaaggcctcgaccctttcaccaggggggggcgtgacagtattcttccatgctattatctctctgcatttcccttttaaccccgacctgcacaaggtctttattcgaggtggggaagagtttggtgaatccaagtgggatagcaacatttgtgaattgcactacacacgtgaccttggccatgatcgcgtgctggtcgaaggcatcgtgtgcatcagcaagaagcacttagataaatacatcccatacaaatacgttatatataatggcgaaagctttgaatatgaattcatttataaacatcagcagaaaaagggggagtacgtgaaccgttgtctgttcataaaatcctcacttttggggtccggggactggcatcagtattatgatatagtgtatatgaaaccccacggacgtcttcagaaggtgatgaatcacataacagacgggccccgaaaagacctggtgaaaggaaaacaaatcgccgccgctttgatgctagatagcacattcagcattttgcagacatgggacaccatcaatctgaatagcttttttacgcagttcgagcaattttgcttcgtactccagcagccaatgatttacgaaggtcaggcacaactgtggaccgatctccaatatcgcgaaaaagaggtaaagcgctacctatggcagcatctgaaaaagcacgtcgtccctctgcccgacggtaagtcaaccgattttctccctgtggactgtcctgtaagatccaaacttaaaactggactcatcgtcctctttgtcgtggaaaagatcgagctcctgctggagggcagtctggattggctgtgtcacctgttaactagtgatgcttctagtcctgacgagtttcaccgagacctgtcgcacattcttgggattcctcagagctggaggctctacttagtgaacctgtgtcagcgctgtatggatacgagaacttatacctggctgggcgctttgcccgtattgcactgctgtatggagctggcgccacggcacaaagatgcttggagacagcctgaagacacgtgggccgccctggagggactgtccttttcaccatttagagaacagatgcttgacactagttccctgcttcagttcatgcgggaaaaacagcacttactgagcattgacgagcctctgttccggtcctggttctccttactccccttaagtcatctcgttatgtacatggagaactttatcgagcaccttggtcggtttcccgcccacattctggattgcctgtccgggatctattatcggctgcccggtctcgaacaagtccttaacacccaggacgtccaggacgtgcaaaatgtgcagaatattttagaaatgttgctgcggctattggacacctaccgcgacaagatccccgaggaggcattgtcgcctagctatctgaccgtatgtctgaaactccacgaggcaatttgcagcagcaccaagctcttgaagttttacgaactgcctgccctttccgccgaaattgtgtgtaggatgatccggctgctcagtctggtggacagcgcagggcagcgggacgagaccggcaacaatagtgtgcaaaccgttttccaagggacgctcgccgctaccaagagatggctacgagaagtcttcaccaaaaacatgctgacctcatccggagcctcattcacttacgtgaaggagattgaggtgtggaggaggttagtcgagattcagtttccagcagaacacggttggaaagagagtctcctgggagatatggaatggcgcctgaccaaggaagagccattgtcacagattacggcatactgcaactcctgctgggacacaaagggacttgaggactcagtggccaaaacatttgaaaaatgcattatcgaggcagtgtctagcgcgtgccaggttaataatctctctagctgggagaccgactcagggagtcagctctgctccgccatgacacagctgcgggcaatgaagcacccgttggggctatcttcgtccgccaactcggaaatcggaaaatgggccccttcttctttggccaaaggcaatggcgccgaaatctag

SEQ ID NO: 133073 - DNA, 9843 bp, synthetic construct
  misc_feature 1..9843: note = Description of Artificial Sequence: Synthetic coding sequence
  source 1..9843: mol_type = other DNA
atggtgtgtgacggcgattgggaacactgttatctgcctagcgctttttcacagcacaaagttttcgtgactccacaggcacccctggaggccatacaggcttatctagctggtcattaccgagtacccaaacagaccctgagtgctgctgcagtgtttaatgataggctgtgtgtgggaatcgtggcgtccgaaagagcaggcgtggggaagtctctttatgttaagcgcctgcacgacaaaatgaagatgcagctcaatgtgaagaatgtacccctcaagaccatcaggttaatagatccgcaagttgatgaaagcagagtgttgggcgcactgctgccttttctcgacgctcagtaccagaaggtcccagttctcttccacctggacgtgacgtcatcagtccagacgggaatctgggtatttctgtttaagctgctaattttacagtatttaatggatattaatggtaaaatgtggctgcgaaacccatgccacctctacatcgtcgaaatcctcgagcgtcggacctcggttccatcacggtcgtcttctgcccttcggaccagagtgccacagttcagctttctcgacattttccctaaggttacctgcaggccgccaaaggaagtaatagatatggagctgtccgcgctacggagcgacacagaacccgggatggatctgtgggagttttgcagtgaaaccttccagcgtccttaccagtatctccgaagatttaaccaaaatcaggacctggataccttccagtaccaagaaggatcggtcgaaggcacacccgaggagtgtctccagcactttctcttccactgtggcgtgatcaacccttcttggtccgagcttaggaatttcgcacggtttctgaactatcagctccgcgattgtgaagcgagcctgttctgtaacccctcattcatcggggacaccctgaggggttttaaaaaattcgtcgtaacattcatgatttttatggcaagagattttgccaccccgtcattgcacaccagtgatcagagtcccggcaagcatatggtcactatggacggggttagggaggaagatttagcccctttctctctgaggaaaagatgggagagtgaaccacacccgtatgtgttctttaacgacgaccataccacaatgacattcatcggcttccatctccagcctaacatcaatggctcagtagacgccatctcacacctcacagggaaggtgatcaagagggacgtaatgacaagagacttgtaccagggcctgcttctgcaacgcgtcccctttaatgtcgatttcgataaattacctaggcataagaagctggagcgcttgtgccttaccctggggattcctcaggctactgacccagacaaaacctatgaactgactaccgataacatgctcaaaatcctagccattgagatgcgctttcgttgtggtataccagtgattataatgggcgagacaggatgtggcaaaacaagacttattaaatttctctctgacctgagacgtggtggcaccaatgctgacacgattaagctggtcaaggttcatggtggtacgacagctgacatgatctactcacgggtgcgcgaagccgagaacgtggctttcgccaacaaagaccaacaccagctcgacactatccttttttttgacgaggccaacaccaccgaagctatctcttgtatcaaggaggtcctttgcgatcacatggtcgatggccagcccttagccgaggacagcggcctccatatcatagcagcttgcaacccgtacaggaaacattccgaagagatgatttgccgactagaaagtgctgggttaggataccgcgtgtcaatggaggaaaccgcagaccggcttgggagtataccgctgcgccagctcgtctatagggttcacgctctgccaccctccctgatccctctagtatgggattttggccagttgtcggatgtggccgaaaaactgtatatccagcagattgttcaacgcctggtagagtcaattagcctggatgagaatggaacacgcgtcataactgaggtgctttgcgcctcccaaggcttcatgagaaagacagaggatgagtgttcattcgtgtccctcagagacgtcgaaagatgcgtaaaggtgtttaggtggttccacgagcactccgctatgctactcgctcagctgaatgcctttctgagcaagagtagtgtgagcaagaatcatactgagcgggaccctgttctgtggtcactgatgctggctatcggggtctgctaccacgcttcactggagaaaaaagatagttacagaaaagcgattgcccgattttttccgaagccttatgacgacagtagactgctcctcgacgaaattacaagggctcaggatctgttccttgatggagtgcccttgcgcaaaaccatcgccaagaatctcgccttaaaggagaatgtgtttatgatggtggtgtgtattgagttgaagatccccctgttccttgtaggaaaacccggttccagtaaatccctggcaaaaactatcgtggccgacgctatgcagggtccggccgcctactccgatctcttccgctctttaaaacaagtgcaccttgtaagtttccagtgttcgccccatagtacgcctcaagggattataagcacatttaggcagtgcgcgcggtttcaacaggggaaggatctgcagcagtatgtttcagtggttgtgctagatgaagtgggtctggctgaggactctccgaagatgcccctgaagacactgcacccactgttagaggatggctgtatagaagatgaccctgcccctcacaaaaaagtaggcttcgtgggaattagcaactgggccttggaccccgccaaaatgaatagggggatcttcgtgagccgtggttccccaaacgagacagaactgattgagagtgccaaaggaatctgcagcagcgacattttggtgcaggatagggtgcagggatactttgcaagttttgccaaggcctacgaaaccgtctgtaagaggcaggataaggaattttttggccttagggactattactcattaattaaaatggtatttgcggccgccaaggcttctaatcgaaagccgagccctcaggatatagcccaggcagtcctgagaaactttagtggaaaagatgacattcaggccctggacatttttttggctaatctcccagaggctaagtgctctgaggaagtttcacctatgcagcttatcaagcaaaacatttttggaccctcccagaaagtgccgggaggcgaacaggaggatgccgaatctcgttatttgttggtgctgaccaagaattacgtggcactccagatactccagcagaccttcttcgagggagaccagcagccagaaataatcttcggcagcggatttccaaaagaccaagaatacacccaactgtgcaggaacattaatcgagtcaaaatttgcatggaaaccggaaagatggtactgctgctgaatctccagaatttgtacgaatctctgtatgatgccctgaaccagtactacgtgcatctcggaggccagaagtacgtggatttgggcctcggaacccaccgcgtgaagtgccgggtccacccaaatttcaggctgatcgtgattgaagagaaggatgtagtgtacaaacacttccccatcccactgataaacagattagagaagcattacctcgacatcaatacagtgctggaaaagtggcagaaaagcatcgtggaggaactttgcgcatgggtggagaaattcattaacgtcaaggcccaccatttccagaagcgccacaaatacagcccatctgacgtgtttataggctatcattccgatgcatgcgctagtgtggtcctccaggtaatagaacgccagggtcctcgcgccctcactgaagaactgcatcagaaagtgagcgaggaggctaagtcaattttgctcaactgcgcgacccccgacgccgtcgtgagactctctgcgtatagcctcggaggatttgccgcagaatggctttcacaagaatactttcatcggcaaagacataactctttcgccgattttcttcaggcgcacctccacaccgcagacctagaacggcacgctatattcaccgagatcaccaccttcagtagattgctcaccagccacgattgcgagatcctggagtctgaggtcaccgggcgcgcacctaaacccaccctgctgtggctgcagcaattcgatacggagtactccttcctaaaggaagtgcggaattgcttaaccaatacggcgaaatgcaaaattttaatctttcaaacagactttgaggatggaatacggtccgcgcaactcatagcttccgccaagtacagcgtaatcaacgaaatcaataagattcgcgaaaacgaggataggatttttgtgtattttattactaaactcagccgcgtgggaagaggtactgcctacgtcggatttcacggaggtctgtggcagtccgtgcatatcgacgatttacgcaggagtacactgatggttagcgatgtcacaaggctccagcatgttacgatttcacagcttttcgctccgggtgatctcccagagctgggcttagaacatcgggctgaagacgggcatgaagaagcaatggaaactgaagcaagcacatccggggaggtggccgaggtggccgaagaagccatggagaccgagtcatctgagaaagtggggaaagaaacatccgagcttgggggctcagacgtttccatccttgatacaacccgactgctgagatcatgtgtgcagtcggctgtggggatgttacgcgaccagaatgagtcttgtacacgtaatatgagacgcgtagttctcctcctggggctgctaaatgaggatgacgcctgccatgcctcttttctgagggtgtccaaaatgcgactgtccgtattcctcaagaagcaagaggagagccagttccaccctctggagtggctcgccagagaggcttgtaatcaagatgcgcttcaggaggccggtaccttccgacataccctatggaagcgagtccagggagcggtcacccctctccttgcttccatgatcagtttcattgatcgggatgggaatctggagctcctgactaggcccgacacccctccctgggcgcgggacctttggatgtttatatttagcgatactatgttgctaaatattcccttggttatgaacaacgaacggcacaaaggagagatggcatacattgtagttcagaaccatatgaacctgtcagaaaatgcatctaataatgtcccctttagctggaagataaaagattacctagaggagctctgggtgcaggcccagtacatcacggacgcagaaggcctccctaagaagtttgtcgatatattccagcaaacccccctgggcaggtttctagcccagctgcatggagagcctcaacaggagctcctccagtgctatctgaaggacttcatcttgctcacaatgcgggtcagtaccgaagaggagctgaagtttctccagatggcactctggtcttgtactagaaagctgaaggccgcctcagaggccccagaagaagaggtgtctttaccttgggtgcatctcgcctaccaaaggtttcgttccaggttgcagaatttcagccgaatcctgacaatatacccccaggttttacacagcttgatggaagcccggtggaatcacgagctggccggctgcgaaatgacactggatgcatttgccgcaatggcatgtacagaaatgctcaccaggaatacattaaaaccttctccgcaagcatggctgcagctggtgaagaacttgtctatgcctctagagcttatctgttcggacgagcacatgcaggggtctggttccctggcccaggccgtgatccgcgaggtgcgtgctcagtggagccggatcttctcaaccgccctgttcgtcgaacacgtactgctgggaacagaatctcgcgtcccagagctccagggccttgtgaccgagcacgtgttcctcctggataagtgtttgagggaaaatagtgatgtgaagacacacggaccctttgaggccgttatgcggaccctttgtgagtgtaaggagactgcatctaagacactcagtcgatttgggatccagccgtgttcaatctgcttgggcgatgcaaaggatccagtgtgccttccctgtgaccatgtacactgcctgaggtgtctgcgcgcctggttcgccagcgagcagatgatctgcccttactgcttaacggccctgccggacgagtttagtccagctgtgtcgcaagcccatagagaagcgattgaaaagcatgccaggttccgccagatgtgtaattctttcttcgtggacctggtctcgactatttgttttaaggataacgcgccccctgaaaaagaagtaatcgaaagcctactgtcgctcttgtttgttcagaaaggaaggctaagggatgctgcccaacggcactgtgagcataccaaatcactgtctccatttaacgacgttgtggacaaaaccccggtgatacgttcagtgattctgaaattgctcttgaagtacagctttcacgatgtcaaggactacatccaggagtatttgactttgctcaaaaagaaagcctttatcaccgaggataagacagaactgtacatgctgtttatcaactgcctggaggatagcatcctggaaaaaacatccgcctactcccgcaacgacgagttgaatcatctggaagaggagggcagattcttgaaagcctattcacccgcttcccgcggccgcgagcctgctaatgaagcctccgtagagtacctgcaggaagtggcacggatcaggctctgtctcgaccgagccgccgactttctgagcgaacccgaaggcggtccagaaatggctaaggagaaacaatgctatctccagcaagtgaagcagttctgtatacgcgtggaaaatgactggcatcgagtttaccttgtaaggaaattgtctagccaaagagggatggagttcgtgcaaggtttgtcaaaacccggtaggcctcatcagtgggtgttccccaaggatgtggttaagcagcaaggtttaagacaggaccaccccggccaaatggatagatacttggtgtatggagatgagtacaaggcactgcgcgacgctgtggcgaaagctgttctggaatgcaaacctctgggaatcaaaacagcactgaaagcctgtaaaacccctcagagccagcagagcgcgtatttcctactcacactgtttagagaggtcgcgatcctgtataggtctcataatgcttccctccaccccacaccagaacaatgcgaggccgtgtcaaaattcatcggagaatgtaagattctctctccccccgacatttccaggttcgccacctcccttgtggataacagcgtgccactcctaagagctgggcccagtgactccaacctcgatggcacagttaccgaaatggccatccatgccgccgccgtgctgctgtgtggccagaatgaattgctggagccgctgaaaaatctggcattcagccccgccactatggcacacgcattcctccccacaatgcccgaagacttacttgcacaggctcgccgctggaaggggttagagagagttcattggtatacgtgtccaaacggtcatccatgtagcgtcggggaatgcggtaggccgatggagcaatctatctgtatagattgccacgcccctattggtggaatcgaccacaagccacgcgacggatttcatctagtcaaagataaggccgatcggacccagacaggacacgttttgggcaaccctcaacgaagggatgtggtgacatgcgatagggggctgccacccgtcgtattcctgctgatacggctgctaacccatctcgcgcttcttctgggtgcctcccagagctcacaggccctcattaatattattaaaccaccagttcgggaccctaagggatttctgcagcagcacattctgaaggatctagagcagctggctaaaatgctagggcacagtgccgatgagaccataggcgtcgtgcatctcgtcctgagacgcttactccaggagcaacaccagctctcctctagaagattgctaaacttcgacactgagctaagcacaaaggagatgaggaataattgggagaaagaaatcgctgccgtaatcagccctgagctggaacatctggataaaacacttcccaccatgaacaatctcatttctcaggataagcgtattagctctaacccggtggcaaaaattatttacggagaccctgtgaccttcctcccccatctgcccagaaagtccgtagtgcattgttctaagatctggtcttgtagaaagaggattacagtcgaatatctgcagcacatcgtcgagcagaaaaatggcaaggaacgcgtgccaattctctggcattttctccaaaaagaagcggaacttaggctggtgaaattccttcctgagatcctggctcttcaacgcgacctcgtgaaacaattccagaacgtgcagcaggtcgagtacagtagcatccgcggcttcttgtctaaacactcatctgacggtctgaggcagcttctgcataacaggatcaccgtctttctctccacctggaacaagctccggagaagcttggagaccaacggtgaaattaacctaccaaaggactactgtagcacagacctcgacctggataccgaatttgaaattctcctgccgaggaggcgcgggttggggctgtgcgctacagcgctggtcagctatctgattagactgcacaacgaaatagtgtatgcagtcgaaaagctgtccaaagaaaataattcatactcagtcgatgcggctgaagttacagagctgcatgtaatctcatatgaagtggaacgagatcttacgcccctcatactgtcgaattgtcagtatcaggtggaggaaggaagagaaacggtgcaggagtttgatctcgagaaaattcagaggcagatcgtttcaagatttttgcaagggaagccacgcttatccctcaagggaattcccaccctggtctaccgacatgattggaattatgaacacctctttatggacattaaaaataaaatggctcaggattcattgcccagctccgtcatctccgcaatttccgggcaattgcagtcatacagcgatgcttgcgaagtgctctcagtggtcgaagtaactctcggattcctgtcgaccgctggtggggacccgaatatgcaattgaatgtgtacacgcaggatattctccagatgggcgaccaaacaatacatgttttaaaagccctcaacaggtgtcagctcaagcacacaattgccctgtggcagttcctgtcagcccataagtcggagcagctgcttcgactgcataaggaaccattcggcgagatctctagtaggtacaaggccgacctgtcaccagaaaacgccaaactgctcagcaccttcctaaatcagactggcctggatgccttcttgctggaattacatgaaatgatcatactgaagttgaagaatcctcagacacagaccgaagagcgattccggccccagtggtcactcagggacaccttagttagttacatgcaaactaaggaatccgaaatcctgcctgaaatggctagtcagttcccggaagagatcttgctcgcgagctgcgtgtctgtttggaagacagcagctgtcctcaagtggaatcgggagatgcgatag

SEQ ID NO: 133074 - DNA, 4653 bp, synthetic construct
  misc_feature 1..4653: note = Description of Artificial Sequence: Synthetic coding sequence
  source 1..4653: mol_type = other DNA
atggagtgtccgagctgccagcacgtgagtaaagaagaaacaccaaagttttgttcacagtgcggtgaacgattgcctcctgcagcacccattgccgacagtgaaaacaacaatagtaccatggctagtgctagtgagggggaaatggaatgtggccaagagttaaaggaagaaggtggtccctgcctcttcccagggtccgactcttggcaagaaaatcccgaagagccttgtagcaaagcctcatggactgttcaagaatcaaagaaaaaaaagcgaaaaaagaaaaaaaagggaaacaaaagcgcgagttccgaacttgcctcccttccactttcacctgccagtccctgccacctgaccctgctcagtaatccatggccacaggatacagcacttcctcacagccaagctcagcaaagtgggcctacagggcagccctcccagcctccgggcacggcaaccacgccgctcgagggcgacggacttagcgcacccacagaagtgggagatagcccacttcaggcccaagcccttggcgaagccggagttgcgacagggtccgaggcacagtcctctccgcagttccaggatcacaccgagggggaagaccaggatgcaagcatcccatccgggggtaggggtttaagccaggagggcaccggacccccgacctcagccggagaaggtcactccaggaccgaagacgctgcccaggagctcctcctcccagagtctaaggggggatctagtgagccggggaccgaactgcagacaactgaacagcaggcgggcgctagcgcctcaatggcggtggacgcggtcgccgagccagcgaatgcggtgaaaggcgccgggaaagagatgaaggagaaaactcagcgcatgaagcagccacctgcaacaaccccgcctttcaagacacattgccaggaagccgaaacaaagacaaaggacgagatggccgcggcggaggagaaggtggggaagaatgaacagggtgagccagaagatctgaaaaagcccgaggggaaaaatagatcggctgccgcagtgaagaacgaaaaggagcagaagaatcaggaagctgacgtccaggaggtgaaggcctctaccctgagtccagggggaggagtcaccgtctttttccacgccataatttcattgcactttccattcaatccagatctacataaggtttttatacggggtggagaagaattcggagagtctaagtgggactcaaatatctgcgagctccattataccagggatctgggtcacgaccgggtgctggtggaggggatcgtgtgcatctccaagaagcacctggataaatacatcccttataagtacgtcatctacaacggggaatctttcgagtacgaattcatttacaagcatcagcagaaaaaaggcgagtacgtgaataggtgcttgttcattaaatcttccctactgggaagcggggactggcatcagtactatgacatagtctacatgaagccacatggacgactgcagaaagtaatgaaccatattacagatgggcctcggaaggacctcgtaaagggaaagcagatcgccgctgctttaatgttggatagtacgtttagcattctgcagacttgggatacaatcaatctaaatagcttcttcactcagtttgaacagttctgcttcgtgctccaacagccaatgatttatgaggggcaggctcagctgtggacggatctccagtacagagaaaaggaggtgaaaagatatctttggcagcatttaaaaaagcatgtggtgccacttcctgacgggaagtccactgacttcttgcctgtcgattgtccagtccggtccaagctgaagaccggcctgatcgtgttattcgtggtggagaagatcgaactcttgttggaggggtctctcgactggttgtgtcacctgctgacttcagatgcctcttctcccgatgaattccatcgtgacctgtcgcacatcctgggaatcccacagagctggcgactgtatcttgtcaacctatgccagcggtgcatggacaccaggacgtacacatggctgggcgcactccccgtcctgcattgctgcatggaattagcccccaggcataaagacgcctggcggcagccagaggacacttgggccgcgctcgaaggtctatcctttagtccctttcgtgagcagatgctagacacatcatcactgctacagttcatgagagaaaaacagcatctgctgtctatcgacgaacctctgtttcgctcttggtttagcctgctgcctctttcacacctggttatgtacatggaaaacttcattgagcatctcggcagatttccggcccacattctggattgcttgtcgggcatatattatagactccccggcctggagcaggtcctgaacactcaagacgttcaggatgttcagaacgtgcagaatattctcgagatgctgctgaggctgttggacacctatagagacaagataccggaagaagccctcagtcccagctacctgacagtgtgtttaaaactgcatgaagccatttgcagcagcaccaagctcctgaagttttatgagctgcctgccctcagcgccgagatcgtgtgtcgaatgatccgactgctctcccttgtggatagtgcaggacaacgcgacgagactgggaacaactcagtgcagactgtgttccagggtacgctggccgcaactaagaggtggcttagagaagttttcacgaaaaatatgctgaccagcagcggagcctcttttacttacgtaaaggagatcgaggtgtggagacggttagtcgagatacagtttcccgcagagcatgggtggaaggagtcacttctcggcgatatggaatggaggcttactaaggaagagcccctctctcagatcaccgcctattgcaacagttgctgggacaccaaaggattggaagattctgtggcaaagacttttgaaaagtgtatcatcgaagccgtttcatccgcttgtcagtctcaaacttccatcctgcaaggcttttcgtacagtgaccttaggaagttcggcattgtgcttagcgccgtcattacaaagtcttggcctaggacagccgacaactttaatgacatccttaagcacctccttaccctggcagatgtgaagcatgtcttccggctgtgcggtaccgatgagaaaattttggcgaatgtgactgaggatgcaaaacggctcatcgccgtcgccgattccgtgttgacaaaggtggtgggagatcttttaagtggaacgatcttggtaggccagcttgagcttataatcaagcacaagaatcagttcctggatatctggcagttgcgggaaaagagtctgagcccccaagacgagcaatgcgccgttgaggaggccctcgactggcggcgagaggagctgcttctgttaaagaaagaaaagcgatgtgtggattctctgcttaagatgtgtggcaacgttaaacacctcatacaggtagacttcggggtgctggccgtgcgccatagccaggacctatcaagcaagcgactaaatgacacggtgacagttaggctttccacttcctcaaacagccaacgcgcaactcattaccacctgtcgtcacaagtgcaggaaatggcaggtaagattgacctgttgcgggattcacatatcttccagctgttctggcgcgaagctgctgagccgctgtccgagccaaaggaggatcaggaggccgccgagcttctgtcagagcccgaggaagagtctgaacgtcacattcttgaattggaagaggtttacgactatttgtatcaaccgtcataccgaaagtttattaagcttcatcaggacctaaagagcggagaagtgacactggcagagatcgatgtcatatttaaagatttcgtcaacaagtacacagatttagacagcgagctgaaaataatgtgtaccgttgatcatcaggaccagcgagattggataaaggatagggtggagcaaatcaaggagtatcaccatttgcatcaggcggtgcatgccgcgaaggttattctccaagtgaaagagagtctgggtctgaacggtgacttcagcgttctgaacaccctgcttaacttcaccgataatttcgatgactttcgacgcgaaacccttgaccaaattaaccaggaacttatccaggccaagaagcttcttcaggatatttcagaggccagatgtaaagggctgcaagcacttagcctcaggaaggagttcatttgctgggtgcgggaagcactcggcgggattaatgagcttaaggtatttgtggacttggcctctatcagtgcgggtgaaaacgacattgatgtggacagggtggcttgcttccacgacgccgtccagggatatgctagcttactttttaagttagacccgtccgttgacttctcagcatttatgaagcacttgaaaaagctatggaaggccctggataaagaccaatacctgcctagaaagcttgtgtctcttattctgtctctaatgcaaattctactcaacagagctctgttgtcaaacgtccgagcggtcaccgtggaaatggtcgcccatctgtgcggtagattcgttcattcaaggtttcagtag

SEQ ID NO: 133075 - DNA, 15771 bp, synthetic construct
  misc_feature 1..15771: note = Description of Artificial Sequence: Synthetic coding sequence
  source 1..15771: mol_type = other DNA
atggagtgtccttcatgccagcacgtgtcaaaggaggaaacacctaaattttgttcccagtgtggcgaacgcctgccacccgcagcccccattgctgatagcgagaacaacaacagcaccatggcaagcgcctcagaaggggagatggaatgtggtcaggagctcaaggaagagggcggaccctgtctgtttcccggttctgacagctggcaggaaaatccagaggagccctgctcgaaggcttcctggaccgtgcaggaaggagctacttcagaagtgctggtcgacgcggctgtggatttgatatccgatgaatgggaagcagcaaatgcaattcctagcaagcgccggaagcaggatgcagctccattggaggcagccagcgtgcccagtgcagactgcgagcagtctaagaagaaaaaacggaaaaaaaagaaaaaaggcaacaaaagtgcatccagtgagttggcttccctgcctctctctcccgctagtccgtgccatctcacgcttttatccaacccatggccgcaggataccgctctgcctcacagccaagctcagcaatccgggcccactggccaaccatcccagccacctggaacggccaccacgcctctggagggagatggtttaagcgcccccaccgaagtgggagatagccccctgcaggctcaggcattgggcgaggctggggttgccaccgggtccgaggcccagtctagccctcagtttcaggatcataccgagggggaggatcaggatgcctccattccttcagggggaaggggcctctcccaagaaggaaccggcccacctacttcagccggcgagggccatagccgaactgaggacgctgctcaggagcttttgctgccagagagcaagggagggtcctccgagcccggcactgagctgcagacgacagagcaacaggccggggcgagcgcttccatggcagtcgacgcagtggcggaacccgcaaatgcagtgaaaggagcgggcaaggagatgaaggaaaagactcaaagaatgaaacagccacccgctacaaccccacccttcaaaacccattgccaagaggcggagactaaaaccaaagacgagatggcggcggctgaagagaaggtaggcaagaacgagcaaggcgaaccagaagacctgaaaaagcctgagggtaagaataggtctgctgccgccgtgaaaaatgagaaggaacagaaaaatcaggaagccgatgtccaagaagttaaggcctccacacttagtccaggtggcggagttactgtgtttttccacgctattatctcactgcatttcccctttaatcctgacctccacaaagtttttatacgcgggggcgaagaatttggcgaaagcaagtgggactcgaacatttgcgagcttcactacactcgagatctgggacatgaccgggtgttagtggaaggcatagtttgcatcagcaaaaaacacttggacaagtacattccctataaatatgtgatttataatggcgagtcattcgaatatgaattcatctataagcaccaacagaagaagggggaatacgtcaaccgctgcctgttcattaaatcctccctcctcggttccggtgattggcaccagtattatgatatcgtttacatgaagcctcacggccggctgcagaaggtgatgaaccacatcactgatgggccccgaaaggacctggtcaagggaaagcagattgccgcagcactgatgctagacagcacattttccattctccagacctgggacacaatcaatctgaactcattctttacccagttcgaacagttctgtttcgtactccagcaacccatgatctatgaaggacaggcccagctgtggacagatctgcagtaccgcgagaaggaggtgaaaaggtacctctggcagcacctgaaaaagcacgtggtacctctaccagacggcaagagtacagacttcctgcccgtggattgtcccgtacgctcaaagctgaaaaccgggctaatcgtcctgtttgtggtggaaaagattgagctgttgctggaggggtctctggactggctatgccacctccttacgtccgatgcctcctcgccagatgagtttcacagagatttgtcccacattttagggattccgcagagctggcgcttgtatctggtgaacctgtgtcagcggtgcatggatactagaacctacacatggttgggggcccttcccgtgttacattgctgtatggagctggccccacgacataaggatgcttggagacaaccagaagacacctgggccgcactggaaggcctcagcttcagcccttttagagaacagatgctagataccagcagtctgttacaattcatgcgcgagaagcaacatctgctgtccatcgatgaacccctgttccgctcctggttctcactgctcccgctctctcacctggtcatgtacatggagaactttatagagcacctgggccgtttccctgcacacatattagattgcctgtccgggatttactaccggttacccggcctggaacaggttctcaacactcaggatgttcaagatgtgcaaaacgtccagaacatactcgaaatgctgctgaggcttctggatacataccgggacaaaatccctgaagaagcgttgtccccttcgtaccttacggtgtgtctgaagctacatgaagccatctgctccagcaccaagctgctcaagttctacgaacttccagctctttctgccgaaatcgtatgcaggatgattagactgctgtcgctggtggacagcgctgggcagagggacgagactggcaataacagtgtgcaaacagtttttcagggcactttggcagccactaagcggtggctgcgcgaggtgtttactaagaacatgctgactagctctggagcgtcctttacctacgtgaaggagatagaggtgtggcgacgactcgtggagatccagtttccagctgagcatgggtggaaagaaagtcttctgggggacatggagtggcggttaacaaaagaagagcccctgtcacagattactgcctattgcaactcatgctgggatactaagggactggaggacagtgtcgccaaaaccttcgagaaatgcattattgaagctgtttcgtccgcatgtcaatcccaaacctctatcttacaaggcttctcttactcggacctccgaaagtttggcattgtcctctccgctgttatcacaaaatcctggccaaggactgccgataattttaatgacattttaaagcacctcctgacactcgctgatgtcaagcacgtttttcgattatgcggtacagacgagaagatcctggccaacgtgacggaagacgctaagaggctgatagctgtagctgactcagtgcttactaaggttgttggcgatctgctgtcgggcacgattttagtcggacagcttgaactgatcattaagcataagaatcagtttctggacatttggcagctgcgcgagaagagtctcagtcctcaggacgagcagtgtgccgtggaggaggcactggactggcgccgagaagaactgctgttgctgaagaaggagaagagatgcgtggactcacttttaaaaatgtgcggtaatgtgaagcacctgatccaggtggacttcggcgtcctggccgtgagacactctcaagacctcagctctaagaggctcaacgatacggtgacagtgagattatctacctcttcaaatagccagagagcaacccactaccacttgagtagtcaagtccaggagatggctggcaagatagaccttctcagggatagtcacattttccagctcttttggagagaggctgcagaaccactgtctgagccgaaggaggaccaggaggctgccgaactactgtccgaacctgaggaggaaagcgaaagacatatcctggagttggaagaagtgtatgattatctctatcagccatcctataggaagtttattaaactacaccaggaccttaagtccggtgaagtgacactagccgaaattgatgtcattttcaaagacttcgttaacaagtatacagatctggacagcgagttaaaaatcatgtgcactgttgaccaccaggatcaacgcgactggatcaaagatagggttgagcagattaaggagtatcaccaccttcaccaagcagtgcacgctgctaaggtgatcctacaagtgaaagaaagccttgggctgaacggagacttctctgtcttgaatacactattaaatttcaccgataattttgatgatttccgccgggaaactctagatcagataaatcaggagctgatccaggccaagaaactcctgcaggatatttcagaggcccgctgtaaggggttacaggcgctgagcctgcgcaaggagttcatctgctgggtccgggaggctcttgggggtattaacgaactgaaggtatttgtggacttggcctctattagcgcgggggagaatgacatcgatgttgaccgggtggcctgtttccatgacgccgtgcagggatacgcctcgctgctttttaagctagatccatccgtggatttttcggcattcatgaaacatttaaagaaactctggaaagctttggataaggatcagtatctacccaggaaactttgtgatagtgctcggaatttggaatggctgaaaaccgtaaacgagtcacacggttcagtagaaaggtccagcctgacccttgctaccgccatcaatcaaagggggatatacgtgattcaagcccccaagggcggccagaagataagtcccgacaccgtcttacacttgatcctaccagagtcgcctggctcacacgaggaatccagggaatactccctcgaggaagtgaaggagctattgaataaactcatgctcatgtcaggcaagaaggatcggaacaacactgaggtggaaaggttctcagaggtgttttgttcagttcagcgccttagtcaggcatttatagaccttcacagcgcagggaatatgctatttcgcacctggattgctatggcctattgttcccctaaacagggcgtttctttacaaatggatttcgggttggatctggtgacagaactcaaggaggggggcgatgtcaccgagctgctcgcagccttgtgccgccagatggagcacttcttagattcttggaaacggttcgttactcaaaagcgtatggagcacttctatttgaacttctacacagccgaacaactcgtctaccttagcacagaactccggaaacagcccccttccgacgccgccctgactatgcttagttttataaagtcaaactgcaccctccgagatgtgctcagagctagcgtcgggtgtgggtcggaagccgcgaggtatcgcatgagacgcgtcatggaagaactgccgcttatgctgctgtccgaatttagcctggtggacaaattgcgcatcattatggagcagagcatgagatgcctcccggcttttctgcccgattgcctagacttggagacactggggcactgcctggcacacctggccggaatggggggctctccagtggaaaggtgtttaccccgcgggctgcaggttgggcagcctaacctggtggtctgcggacactccgaagtgctgcccgctgcactcgcggtatacatgcagactccttcccagcctcttccaacctacgatgaagtgcttttgtgtacaccggcaactactttcgaggaggtggccctccttttgagacggtgtctcacgctgggttccctcggccataaggtttacagcctgctgttcgccgaccagctcagttatgaagtggctcgccaggcagaggagctgtttcataatctgtgcacacagcagcacagggaagactatcagctggtgatggtgtgcgacggtgactgggagcattgttatctgcctagcgctttttcccagcacaaggtgttcgtgaccccacaggcaccactggaggctattcaagcctacttggccgggcattaccgagtgccaaaacaaacactgtcggctgctgccgttttcaatgacagactgtgtgtagggatagtggcgtccgaacgggccggcgtgggaaaatctctctacgtaaaacgcttacacgataaaatgaaaatgcaactgaacgtcaagaatgttcccttgaaaacgatcaggcttattgaccctcaggtcgacgaatctagagtgctgggtgcactcctgcctttcctcgatgctcagtatcaaaaggtccccgttctttttcacctggacgtgacgtcatctgtgcaaaccgggatctgggtgtttctgtttaagcttctcatattgcagtatttgatggatattaatgggaagatgtggctgcgtaacccatgtcacctgtatatcgtcgaaatcttggaaagacgaacgagtgttcctagccgaagttcctctgccctgcggactagggtacctcagttttcattcttagacatttttccaaaggtcacttgtcggccccctaaggaggtgatagacatggagctttctgctctgcgctctgacaccgagcctgggatggatctgtgggagttctgctcagagaccttccagcggccttaccagtacctgcggcggttcaaccaaaaccaggatctcgacacatttcagtatcaagaagggtccgtggaagggaccccagaggagtgtctgcagcactttctgttccactgcggagtcatcaaccccagctggtctgagctgagaaatttcgctaggttcctcaactaccagctcagagattgtgaggcgtctctattttgcaacccatcattcatcggagacactctgagggggtttaaaaagttcgtggtgacttttatgatttttatggccagggacttcgccacgccatccctccacacatccgatcagagccctggaaagcatatggtcaccatggacggtgtccgtgaggaagatctcgccccgttttcattaagaaagagatgggagtctgagcctcatccttatgttttcttcaatgatgaccacaccacgatgaccttcatcggctttcacttacaacccaatataaatggctccgtcgacgctatcagccacttgacagggaaagtgatcaagcgagatgtcatgactagggacctctatcagggactgctactgcagcgggtgccgttcaacgtcgacttcgataaactcccacggcacaagaagctggaaaggctttgcctaactttaggaatcccacaagctaccgaccccgacaagacctatgaactcactactgacaacatgctcaagatcctggctatcgaaatgagattcagatgcggtatccctgtaattatcatgggtgagaccggatgtgggaaaacacggttgataaagtttctgagtgaccttagacgcggaggcacaaatgcggacaccatcaagctcgtgaaagttcacggcggaacgacagccgacatgatttactctagggtacgcgaggctgagaatgtggcctttgccaacaaggatcagcaccagttagacacaatcctctttttcgacgaggccaacaccaccgaggcaatttcctgcataaaggaggtgctgtgtgaccacatggtggacggccagcctctcgccgaggatagcgggctgcatattattgccgcctgcaatccgtatcgcaaacactctgaggagatgatctgtcgcctggagtccgccgggttggggtatcgtgtgtctatggaggagaccgctgatcgcctgggctcgattccattgcgccagttggtgtaccgagtgcatgcactaccaccctcgctgatcccactggtgtgggacttcggtcagttgagtgatgtggctgagaagctttacatacagcagatcgtccagcggcttgtcgaaagtatctccctggacgagaacggtacgcgggtgatcacagaggtcctctgtgccagtcagggcttcatgaggaaaacagaggatgagtgttcgtttgtctcccttagggacgtcgaacggtgtgtcaaggtgttcagatggttccacgagcacagtgctatgctgcttgctcagctgaatgcttttctttccaagagcagcgtctctaaaaatcacaccgagcgcgaccctgtcctttggtctctcatgttagcaatcggtgtatgctatcacgcatctctcgaaaaaaaagattcctatcgaaaggctattgctcgttttttccctaagccatatgatgattccagattgttgctagacgagattacgagagcgcaggatctctttcttgacggggtgccccttcgtaagaccattgctaaaaacctggccctcaaagaaaatgtattcatgatggtggtctgcattgagctgaagatacccctgtttctcgtagggaaacccgggagctccaagtcactcgctaagaccatagtggctgacgccatgcagggccctgcagcctattccgatttatttaggagcctcaagcaggtccatcttgtgtcttttcagtgcagcccacattccactccccagggtataatctccactttccggcagtgtgcgaggtttcaacagggcaaagatcttcaacaatatgtgagcgtcgtggtgttagacgaggttggcctggctgaggacagccctaagatgccgctcaagaccctccaccccctattggaagatggctgcattgaagacgatcccgcaccacataagaaagtggggttcgtgggcatatccaactgggccctggaccctgccaagatgaaccggggaattttcgtgtctagaggaagccctaacgagaccgaactgattgagagcgccaagggcatctgctccagcgatattctcgtgcaggacagagtgcagggctactttgcctcttttgccaaggcctacgaaacagtctgcaagcgccaggacaaggagttcttcggattgcgcgattattactccctgatcaaaatggtcttcgctgccgccaaggccagcaacaggaaaccctcacctcaagatatcgcacaggctgtccttagaaatttttcaggcaaggatgacattcaggcgctagatatcttcttggctaatctccccgaggccaagtgctctgaagaagtaagtcccatgcaacttataaagcaaaatatattcgggccttcgcagaaagtgcccggcggggagcaagaagatgctgagtcaagatacctgctggtcctcactaagaactatgtggcactgcagatactgcagcagactttctttgaaggcgaccagcagcccgaaatcatttttggaagtggctttcctaaagaccaggagtacactcaactgtgtcggaacatcaatagagtaaagatctgtatggaaacgggcaagatggtgctcctcttgaacctacagaacctgtacgagtccctgtacgatgctctgaaccaatactatgtgcacttaggaggccaaaagtacgtggacctcgggcttggaactcatcgtgtcaagtgccgtgtccatcccaacttcagactcatcgtgattgaagagaaagatgtggtttacaagcatttccccattccccttatcaatcggctcgagaaacattacctcgacatcaatacagtgcttgaaaaatggcagaaatcgatcgtggaagaattatgcgcgtgggtggagaagttcattaatgttaaggcccatcactttcagaagagacataagtacagtcccagtgatgttttcatcggctatcactcagatgcatgtgcctccgtggtgctgcaggttatcgaaagacagggccccagggctctcaccgaggagctacatcagaaggtctccgaggaggcaaagagcattctgctcaactgtgcaacacctgacgccgtcgtcaggctgtccgcctatagcctggggggattcgccgctgaatggctctcacaagagtatttccatcgccagcggcacaactccttcgcagatttcctgcaagctcatcttcacacggcagatctagagagacatgcaattttcacggagattacaaccttctcacgactattaacaagccacgattgtgagattcttgagtccgaggtcacaggcagagctcccaagccaaccttgctgtggctgcagcagttcgataccgaatactcatttctgaaggaggtccgaaactgcctgacaaatactgccaaatgcaaaattctgatctttcaaaccgatttcgaggacggcattaggagtgcacagcttatcgctagcgccaagtatagtgtgataaatgaaattaacaaaattcgcgaaaatgaagatcggatcttcgtgtattttattacaaagcttagcagagtcggccgaggcaccgcatacgtgggatttcacggaggtctgtggcagtcggttcacatagatgatctgcgccgctccaccttgatggtgagtgatgttaccagactgcagcatgtgaccatatctcaattattcgctccaggggatttgcccgaactaggcttggaacatcgcgcggaggacggtcacgaagaggctatggagacagaagcttccacctctggggaggtggccgaagtggccgaagaggccatggagactgaaagttctgagaaggtgggtaaggaaacatcggagttggggggttcggacgtgtccattctggacacaaccaggctgttgagatcttgcgtgcagagcgcagttggtatgctgcgcgaccagaatgagtcatgtacgagaaatatgcgacgtgtcgtcctactcctgggcttgctgaacgaagatgacgcatgccatgcttcgtttctccgcgtgagcaagatgaggttgtctgtgttccttaaaaaacaggaggagtcacagttccatcctctggagtggttggcccgggaagcttgcaaccaggatgcacttcaagaggcaggaaccttcagacacaccctttggaaacgggtacagggagcggtcactcctctgttggccagtatgatctcgtttatagacagggacggtaatctggaattgctgaccaggcccgatacccctccttgggctagagacctctggatgttcatttttagcgatactatgctcctcaacattccgctagttatgaataacgagcggcataagggggagatggcttacattgtggttcagaaccacatgaacctgtctgaaaacgctagcaataatgtgcctttctcttggaagataaaggactaccttgaagaactctgggttcaggcccagtacattaccgacgccgaaggcttgcccaagaagtttgtggacatttttcagcagacaccgctggggcgatttttggcccagctgcatggtgaacctcaacaggaactcttgcaatgttatttaaaagactttatcctgcttaccatgcgcgtatctaccgaagaagagttgaagttcctccagatggcactgtggtcctgtacgcggaaacttaaagctgcatctgaagccccagaagaagaagtatctctgccatgggttcacttggcttaccaacggtttcgaagtagactgcagaatttttccaggatcctgaccatatatccacaagtattgcatagcctgatggaggcacgctggaatcacgagttggctgggtgtgagatgacgctcgatgcctttgcagcaatggcgtgtactgagatgttgactagaaacactctgaagccctccccacaggcctggctgcaactggtcaaaaatctatccatgccattagagctcatctgttcagatgaacacatgcaggggagcggatccctcgcgcaggcagtgatcagagaggtgagggcccaatggtcccgcattttctccaccgctctctttgtggaacacgtcctgttgggtaccgagtcacgggtgcccgagttgcagggcctcgttacagagcatgtgtttctcctggataagtgtctgcgagagaactcggacgtgaagacccacggaccattcgaagccgtaatgagaaccctctgtgaatgtaaggagacggcctccaagacactatctcgcttcggaatccagccttgtagtatctgtctaggcgatgcgaaggaccctgtttgcctgccttgcgaccacgtccattgtctcaggtgtctgcgcgcctggttcgccagcgaacagatgatttgcccttattgtctcactgcacttccagacgagttttcccctgccgttagccaggcccaccgcgaggcaattgaaaagcatgccagatttcgacagatgtgcaatagcttttttgtcgacttagtttccacaatctgtttcaaggacaacgcaccgcctgagaaggaggtaattgagtccttgctatccctgcttttcgttcagaaaggaaggttgagggacgctgcccagcggcactgtgaacacacgaaaagtttgtcaccatttaatgacgtggtggacaaaactcccgtgatccgctcagtcatcctaaaactgctgctaaaatacagcttccatgacgttaaagattatatccaagagtatcttacgttactgaagaagaaggcctttataactgaggacaaaacagagctctacatgctgtttatcaactgcttggaagacagcatcctggaaaaaacatccgcgtatagcaggaacgacgaattaaatcacctagaggaggagggcagattcctgaaggcctacagccctgctagtagaggcagagagccagctaatgaggcatccgtggagtaccttcaagaggtagcccggattaggctgtgccttgaccgcgctgctgatttcctatctgaaccagaaggcggccctgagatggctaaggaaaaacaatgttaccttcaacaggttaaacagttctgtattcgagtcgaaaacgattggcaccgtgtatacctcgtgaggaaactgagtagtcagcggggaatggagtttgtgcagggactgtccaaacccggtagaccgcaccagtgggtgtttcccaaggatgtggtgaaacagcagggtctccgccaggaccatcctgggcaaatggacaggtatctggtgtatggggatgagtacaaggccctgcgcgatgcggtcgccaaagcggtgctggagtgcaaaccgcttggaatcaagactgctcttaaggcttgtaagacaccacaaagccagcaaagtgcctatttcctgctgactctgtttcgggaagtggctatactctatcgcagtcataacgctagcttgcacccgacgcccgaacagtgtgaagccgtctctaagttcattggcgaatgcaaaatacttagcccccctgatatctctaggtttgccacatctctcgtggataattctgttcccctcctgagagctggtccgagcgacagcaatctggacggaaccgttacggaaatggctattcatgcagccgccgttttgctttgtggacagaatgagcttctggaaccgctcaaaaacctggcattttctcccgcaaccatggcacacgcgtttctgcctactatgccagaggatctgcttgctcaagctcggcggtggaaagggctggagagggtccactggtatacatgcccaaatggccatccatgctccgtcggcgagtgcggaaggccaatggaacagtcgatatgtatcgactgtcatgccccaatcggaggcatcgaccataaacctcgcgatgggttccacctggttaaggacaaggccgaccgtacccagacaggacacgttttgggcaacccacagcgcagagacgtagtgacttgcgaccgcgggcttcctcccgtcgtgttcttactgatccgtttgttgacccatttggccctattgcttggagctagtcagagtagccaggcgctaatcaacatcattaaaccacctgtcagggaccctaagggattcctccagcagcacatcctgaaggatcttgagcagctggcaaaaatgctcgggcactctgccgacgagaccatcggcgtcgtacatctggtcctgcgcagactgttgcaggagcagcatcagctctcttcccgaaggctgttgaattttgacaccgagctctcaactaaagaaatgagaaataactgggagaaggaaatcgctgcggttatttcaccagaattggagcacctcgataagaccctaccgaccatgaataacttaatttcccaagacaagcgcatcagtagtaatcccgtagcaaaaatcatttacggcgacccagtgacgtttctcccgcatctgcctcggaaatccgtggtacattgctccaagatatggtcttgccgcaagcgtattacagtggagtatctccagcatatagtggagcagaagaacgggaaggagagggtacccattctttggcactttttgcaaaaagaggctgaactgcgcctggtaaaatttctgcccgaaattctggctctgcagcgtgacctggttaagcagtttcaaaatgtccagcaggtagaatactcatcgattcgtggcttcctgtccaaacattcaagcgacggactcaggcaactgttacacaatagaattaccgtattcctttctacctggaataaactccgaaggagtctggaaacaaatggggaaattaacctacccaaagactactgttccaccgacttggacctggatacggaatttgaaattctgctgcctaggaggcgaggactaggcctgtgtgccactgcgcttgttagttacctcattcgtttacacaacgaaattgtgtacgccgtggagaagctctccaaagagaataattcatattccgtggacgcagctgaggtgactgagttacacgtcatatcttacgaggtggaaagagacctgacaccattgatcctgagtaactgtcagtaccaggtggaagagggtcgggagacggttcaagaatttgacctggagaagatacagaggcaaatagtgagcagatttcttcaggggaagccgagactctctctgaagggcatccccaccctggtgtatcggcacgattggaactacgaacatcttttcatggacattaaaaataagatggcccaggatagtctccccagtagcgtgatcagcgctatcagtggtcaactacagagctactctgatgcttgtgaggtgctgagtgtggtggaggtgaccctggggtttttgagcactgccggcggagaccctaacatgcaactgaatgtgtatactcaggacattctccagatgggtgatcagaccatccatgtgctgaaggctttaaatcgctgtcagctcaaacacaccattgccctttggcagtttctgtcggcccataaaagcgagcagctcttgagactccacaaagaaccattcggagagatttcatcaagatataaggctgatctttcacccgagaatgctaaactgttaagcacattcttgaaccaaactggactggacgccttcctactggagcttcacgagatgatcatcctaaagctcaagaatccacagacacagacagaggagagattccgcccacaatggagtttacgcgatacactcgtgagttacatgcagactaaagagtctgagatcctgccggagatggcctcacagttccctgaggaaattctgctagcatcctgtgtctctgtgtggaagaccgctgccgttcttaaatggaaccgcgaaatgcgttag

SEQ ID NO: 133076 - DNA, 15624 bp, synthetic construct
  misc_feature 1..15624: note = Description of Artificial Sequence: Synthetic coding sequence
  source 1..15624: mol_type = other DNA
atggaatgccctagctgccagcatgtctccaaggaggagactcccaaattctgctctcagtgcggggaacgactgccgcccgccgcccccatcgccgacagcgaaaacaacaattccacaatggctagcgcgtccgaaggagaaatggaatgtggccaagagctcaaggaggagggcggtccctgtttgtttccgggaagtgatagttggcaggaaaatcctgaggagccatgttccaaagcatcatggaccgtccaggaaagcaagaaaaaaaaacggaagaagaaaaagaagggcaacaaatccgcgagttcagagctcgcctcactcccactgtctcctgcttctccctgccatcttacgctactgtcaaatccctggccacaagataccgcactgcctcactcccaagcccagcagagcggtcccacgggccaacctagccaaccgcccggcaccgcgacgacccccctggaaggcgatggcctcagtgctcctaccgaagtgggagactccccgctgcaggcacaggctctgggagaggcaggggtggccaccgggtccgaggcccaatctagcccacaattccaagatcacactgaaggagaggatcaggacgcctccattccttctggtgggagagggctgtcccaagagggcaccggcccacccacgtccgctggagaaggccattcacggacggaggatgccgcccaggagctgcttctccccgagagcaagggcggatcaagcgagcctggcacagagctgcaaacaacagagcagcaggccggcgcgtcagcaagcatggccgtggatgccgtagcagagcctgctaatgccgtgaaaggggccggcaaagagatgaaggaaaaaactcagagaatgaaacagcctcccgccaccacccctccctttaaaacgcactgccaggaagccgaaactaagaccaaggacgaaatggccgccgctgaggaaaaagtgggcaaaaacgagcagggagagcctgaagatctgaagaaacctgagggcaaaaaccggtccgccgctgccgtcaaaaatgagaaggagcaaaaaaaccaggaggccgacgtgcaggaagtgaaggctagcaccttatcccctggagggggagttaccgtattcttccacgctatcatcagtctgcattttccgttcaacccagacctgcacaaagttttcattcgcggcggggaggagtttggcgaatccaaatgggattctaatatttgtgaactgcactacacaagagacttaggacatgacagagtgctggtggaagggattgtttgtatttccaaaaagcacctggacaaatacatcccctacaaatatgtgatctataacggagagagttttgagtacgaattcatatacaagcatcagcagaaaaagggcgagtacgtaaacaggtgcctattcatcaagtccagcctcctgggaagcggtgattggcaccaatactacgacatcgtgtacatgaagcctcacggaagactccagaaagttatgaatcatatcacggatggtccccgtaaggatttggttaagggaaaacagatcgccgcggcgttgatgctggacagtacctttagtattctgcagacctgggacactattaacctgaattcattctttacccagtttgagcaattctgttttgtcttacagcagccaatgatatacgagggccaggcacaactgtggacagacttacagtaccgcgaaaaggaggtaaagcgctatctgtggcagcatctgaaaaaacatgtggtgccccttccagatggtaagtcaaccgactttttaccagtagattgccctgtccgatccaagctaaaaaccgggttgattgtactgttcgtggtggaaaagattgaactgctgctcgaaggttcactggactggctgtgccacctgctcacatctgacgcctctagccccgacgagttccatagggatctgtcccacatactggggattcctcaatcttggcgtctgtatctggtgaatctatgtcaaaggtgtatggatacaaggacctatacgtggttaggagctcttcccgtgctgcactgctgtatggaactggcaccacgccacaaagatgcatggaggcagccagaggatacgtgggccgctttggaaggtctttctttctctcctttccgggagcaaatgctcgatacatctagcttattgcagttcatgcgcgagaagcagcacctgttgtctatcgatgagccactatttcgatcatggttcagcttactgccgctctcccacctggtaatgtatatggagaacttcatcgaacacctcggccgcttcccagcacacatcctggactgtctgagcggcatttactacagacttcccggcctcgaacaggtactcaatacccaagatgtccaagacgtgcagaatgtccagaacattctggaaatgctccttaggttactcgatacatatagggataaaataccggaagaagccctcagccccagctatttaactgtgtgtttgaaactgcatgaggctatttgctcatccacaaagcttcttaagttctatgagttgcccgccctttctgctgagatcgtatgtcggatgataaggctcttgagtttagtggactccgcaggccagcgggacgagaccggtaacaactccgtgcagacagtgtttcagggcaccctggccgcaaccaaacggtggcttcgggaggtgttcaccaagaatatgctcacttcttctggtgcctcttttacttatgtcaaagagattgaggtgtggcggcgactcgtggagatccaatttccggcggagcatggctggaaagagtccctgctgggagacatggaatggagactgactaaggaggagcctctttcccagattacagcttattgtaatagctgctgggacacaaagggattagaagacagtgtcgccaaaacattcgagaaatgcatcatagaggcagtgtccagcgcatgccagagccagactagcatcctgcagggcttcagctactcagatctgcggaaattcgggattgtgctttctgcagtgatcactaagtcttggccacggaccgccgacaacttcaacgacatcctcaagcacctgctgaccttggccgatgttaagcatgtatttaggctctgcggaacagatgagaagattctggctaacgtgactgaagacgctaagcgattaatcgccgttgccgactctgtgctgacgaaggtggttggtgatctgctgagcggtaccatcttagtgggacagcttgagctcatcatcaagcacaaaaatcaatttctagacatctggcagctaagggaaaaaagcttgagcccccaggacgagcagtgcgccgtggaggaagccctggattggcggagggaagagctcctgctgcttaaaaaggagaaacggtgcgtcgactcactgctaaaaatgtgcggaaatgtcaagcacttgatccaagtggactttggagttctggccgtcagacactcccaggatctatcatctaagcgtttaaatgatactgtgacagtccggctgagtacatcctctaacagccagcgggccacgcactatcacctgtcctcacaggttcaagaaatggccggcaagatagatctcctgagggacagtcacattttccaactgttttggagggaggcagcagagccactttctgagccgaaggaggatcaggaggctgccgagctcctgtctgagcctgaagaggaatccgaacggcatatactggaactcgaggaggtgtacgattacctctaccagcccagctataggaagtttatcaagctgcaccaggacttgaaatcaggagaggttacactcgcagaaatcgatgtcattttcaaggatttcgtcaataagtataccgatctggatagtgagttgaagattatgtgtacggtggatcatcaggaccagagggactggatcaaagaccgagttgaacagattaaagagtatcaccacctgcatcaggccgtccatgcagccaaagtgattctgcaggtaaaggagtccctgggactcaacggggatttcagtgtattgaacacgctgctgaacttcactgacaattttgatgacttcaggagggaaactctggatcagattaatcaggagctgattcaggctaaaaaactgttacaggatatatcagaagctcgatgcaaaggacttcaagctctgtctctgcgcaaggagttcatctgttgggtgcgagaggcgcttgggggcataaatgaactgaaggtattcgtggacctggcttccatctctgccggcgaaaatgatatcgatgtcgatagggtcgcatgttttcacgacgcagtccagggttacgccagcctgcttttcaagctcgacccctccgtcgatttctcagccttcatgaagcaccttaagaaactgtggaaagccctcgataaggaccagtaccttcctcgaaaactttgcgattcagcacggaacctcgaatggctgaagaccgtcaacgagagtcatggttctgtggaacgatctagcctgactctcgcgactgcaatcaatcagcgaggaatttatgtcatccaggcccctaaaggtggacagaagattagccctgatactgtgctgcacttaattctgcctgagagcccaggaagtcacgaagagagccgcgaatatagtctcgaagaagttaaggaactcctgaataagctgatgctgatgtctgggaaaaaagaccgtaacaacacggaagtggaacggttcagcgaagtgttttgtagcgtgcaacggttgagccaggcctttatagatctgcattctgcagggaacatgctgttccgcacgtggatcgccatggcctattgtagtcctaaacagggtgtgtctctgcaaatggacttcgggcttgatcttgtgaccgagctcaaagagggaggcgacgtcaccgagcttctggccgcactgtgtaggcagatggagcacttcctggattcctggaaaaggttcgttacccagaaacggatggaacatttttatctcaatttctatactgcggagcagctggtatatctgagcaccgagctgagaaagcagccaccttccgatgctgccctgacaatgctctcatttatcaagtctaattgcacccttcgtgacgtcctcagggccagcgtgggttgcggaagcgaggcagcgcgatacagaatgcggcgggtgatggaagagttgcccctgatgctgctctccgagttcagtttggtcgacaaactgagaattattatggaacagtcaatgaggtgtctgccggctttcctacccgattgccttgatctcgagactctgggccactgtctcgcccatctggccggcatgggaggctcccccgtagagcgatgcttgccacgtggcttgcaggtgggccaaccgaacctcgtcgtgtgcgggcactcggaagtcctccccgcagccctggccgtgtatatgcaaaccccctctcagcccttaccgacatatgatgaggtgttgttgtgcacccctgccacgacttttgaagaggtagccttgttattgagacggtgtttgactctgggctctctgggacataaggtgtatagcttactgtttgctgaccagttaagttacgaggtcgctcgacaggccgaggaacttttccataatttgtgtactcagcaacaccgtgaggactaccagttggtgatggtgtgcgacggggattgggagcactgttacctgccttcagccttttcacagcacaaggtctttgtaaccccccaagcccccctcgaagccatccaagcttacctcgccggtcactaccgcgtgcccaaacagacgttatctgccgcagctgtgttcaacgatagactgtgcgtgggaatcgtcgcaagtgaacgggccggagtgggaaagagcctgtatgttaagagactccacgataaaatgaaaatgcagctgaatgtaaaaaacgtcccactcaagaccattaggctcatcgacccccaggtcgatgaaagtcgtgtgcttggggctcttctaccctttctagatgcccagtaccaaaaagtacccgtcctcttccatctagacgtgacgtctagcgttcagactggtatttgggtttttctcttcaagctcctaattctacaatatctcatggatatcaacgggaaaatgtggctccgcaacccgtgccatctgtatatcgtggagatactggagcggcgcacaagtgtgccatccaggtcttcttccgccctgcggacccgggtgcctcaattcagcttcctcgatatcttccccaaggtcacctgtagaccgccaaaggaagtgattgacatggagctttctgctctgaggagcgacacagaaccgggtatggacctatgggagttctgttctgaaacattccagcggccataccagtacctgcgccgatttaatcagaatcaggatctggacacattccagtatcaggaaggctccgtcgaggggactcctgaagagtgcctgcaacacttcttgtttcactgtggtgtcattaacccatcctggagtgaactcagaaactttgcccgctttctgaactatcagttgagggactgtgaagcttcgctgttctgtaatccgtctttcataggcgacacactgcgaggatttaagaagtttgttgtgacattcatgatctttatggcccgggatttcgcgacaccaagtctgcacacaagtgatcaaagtccgggaaagcacatggtgaccatggacggagtgcgggaagaagacctggccccgttttcattgagaaaacggtgggagtctgaaccccacccatatgtcttctttaacgatgatcataccactatgacgttcatcgggttccatctacaaccaaatatcaatggtagtgttgacgccatttctcacctgacgggtaaggtaattaagagagatgtgatgactcgagatctgtaccagggactgctgctgcaaagggtcccttttaacgttgatttcgacaagctaccacggcataaaaaactggaaaggttgtgtctgacactcgggatacctcaagctacggaccccgacaagacttacgagcttaccacagataatatgctcaagatactggcaatagagatgcggtttcggtgtggcattcccgttattatcatgggcgagaccggctgcggaaaaacaagactgataaagttcctgtctgacctgaggagaggtggaaccaacgccgacaccattaaattggtcaaagttcacggaggcaccaccgcggacatgatatactcaagggttcgcgaagccgaaaatgttgcatttgccaataaagaccaacaccaactggatacaattttatttttcgacgaagccaatacaacggaggcaatctcctgtatcaaggaagtgctgtgcgaccatatggtggatggtcagccccttgccgaagactcaggacttcacatcattgccgcgtgtaatccttatcgcaagcacagtgaagagatgatttgccgcttggagagcgcaggccttgggtacagagtctcaatggaagagaccgctgataggcttggaagcatccccctcaggcagttagtgtaccgcgtgcatgctctaccgcctagcctaataccgctcgtgtgggattttggacagctttccgatgtcgccgagaaattgtatattcaacagatcgttcaacggctagttgagtccatctccttagacgagaacggcactcgcgttatcacggaggttttgtgtgcctcacaggggttcatgagaaagaccgaggacgaatgttcatttgtctccttgcgtgatgtggagcggtgtgtaaaggtgttcagatggttccatgaacatagcgccatgctgcttgctcagttaaatgcctttcttagtaagtcctccgtctctaagaatcataccgagcgtgaccctgtgctgtggtctctcatgctggccatcggcgtgtgctaccacgccagcctcgagaaaaaggacagttaccgtaaagccatagcaaggttcttcccgaaaccctatgacgactcacgactactcctggatgagataactcgggctcaagatctgttcctggatggggtccccctaagaaaaacaattgccaagaatttggccctgaaggaaaacgttttcatgatggtagtgtgcattgaactcaaaattccactgtttctggtaggcaaacctggctccagtaagagcctggctaaaaccattgtggccgatgcaatgcagggtccagcagcctacagcgaccttttccggagccttaagcaggttcatcttgtgtcttttcagtgttctccccatagcaccccgcagggaatcattagcacgttcaggcagtgcgctcggttccagcaggggaaggatctacagcagtacgtctctgtggtcgtgctcgacgaggtggggcttgccgaagattctccaaaaatgccactgaaaaccctccatcccttgctcgaggatgggtgcatagaggacgacccggctccccataagaaagtgggctttgtcggcatcagcaattgggcactcgaccctgccaagatgaacagggggatttttgttagccggggctctcccaatgagactgaactcattgagagcgccaaaggtatatgcagctcagacatcctggtgcaggacagggtccaaggctatttcgcttccttcgcgaaggcctacgagaccgtgtgtaagcgtcaagacaaagagttttttggtttgagggactactacagcctcataaagatggttttcgctgccgccaaagcctccaatagaaagccatctcctcaagacatcgcccaggctgtactgcggaacttcagcggcaaggatgatattcaggcactggacatattcctagccaatttgccagaggccaagtgttctgaggaggtgagtcccatgcaattgatcaagcagaatattttcgggccgtctcagaaagtcccaggcggggaacaggaagatgctgaatctagatatctgctggtactaacaaaaaattacgtggcgctgcagatcctgcaacagacattttttgagggggaccaacagcctgagattatcttcgggtccggctttcctaaggatcaggaatacacgcagctgtgcagaaacattaaccgcgtgaaaatttgcatggaaaccggaaaaatggtgttactgttgaacctccagaacctatatgagtctttatacgacgctctaaaccagtattacgtgcacctggggggacagaaatatgtagacctagggttgggcacccaccgtgttaagtgtagagtgcaccctaatttccgcctgatcgttatcgaagagaaggatgtggtgtataagcactttccaatccctctgattaaccgcttagaaaagcactacctcgacataaacaccgtcctggaaaaatggcagaaaagcattgtggaagagctgtgcgcctgggtggaaaaatttattaatgttaaagcacaccatttccagaaacgccataaatactctccatcagatgtatttatcggctatcacagcgacgcctgtgccagtgttgttctgcaagtgatagaacgacagggcccgcgcgccctgacggaagaactgcaccagaaggtctctgaggaagccaaatcaattttgcttaattgcgctacacctgatgccgtggtccggctcagcgcctattccctcggaggctttgcagctgagtggttgagccaggaatactttcaccggcaaaggcacaactccttcgccgacttcttgcaagcccacctgcacaccgcagacctggagcgtcacgccatctttacggagatcactaccttttcaagactcttgacctcccacgattgcgagatactggaatcagaggtgaccggacgggccccaaagccaaccctgctgtggctccagcagttcgacacagagtactcgttcttgaaagaagtccgaaattgtctcacgaacaccgccaagtgtaaaattctgatttttcagactgactttgaggacggcattcgcagcgcgcagctgattgcgagcgcgaaatactcagtgatcaatgagatcaacaagatcagggagaacgaggatcggatcttcgtctacttcattaccaaattatctcgggtgggccgcgggaccgcctacgtgggtttccacggcggtctttggcaatccgtgcacattgatgacctgcgacggtcgaccctcatggtctcagatgtaacccggctgcagcacgtgaccatcagccagctcttcgccccgggggatcttccagagctcggcttggaacatcgagcagaagacggacacgaggaggcaatggagaccgaagctagtacttcaggtgaagtggccgaagtggcagaggaggctatggaaacagaaagcagtgaaaaggtcgggaaagaaacctccgaactgggaggaagcgacgtttccatcctggatacaactcgtcttctcaggtcttgcgtgcagtcagcagtgggcatgttgcgagaccagaacgagagttgtacgcgcaatatgcgaagggtggtgttgctgctgggtctgctgaacgaggacgatgcctgccatgccagtttccttcgagtctctaaaatgagactttctgtgttcttgaagaagcaggaggaatctcaattccaccccctggaatggctcgctcgcgaggcatgcaatcaggacgctcttcaggaggcagggaccttccgtcatacactgtggaaaagggtgcagggggcggtaacaccactgctggcaagcatgatcagctttattgatcgcgatgggaatctggagcttctcacaagaccagatacacccccgtgggcaagggatctctggatgtttatcttttctgacacgatgctgttgaatataccgttagtaatgaataatgaaaggcataagggcgagatggcttacatcgttgtccagaaccatatgaatttgtcggaaaatgcctctaacaatgtgccattttcatggaagatcaaggattatctcgaggaactgtgggtgcaggcccagtatattacagatgccgaagggctgccaaagaaattcgtcgatattttccagcagacgcctctgggtagattcctggcccagctgcacggcgaaccccagcaggagttgttgcagtgttacctgaaggattttatcctcctgacgatgcgtgtttctaccgaggaggaactgaagttcctgcagatggccctctggtcttgtacacgcaagttaaaggctgcttctgaggcccctgaggaggaggtgagcctgccctgggtccatcttgcttaccagcgctttaggagcagattacaaaattttagtagaatactcacgatctacccacaggtcttacacagcctcatggaggctaggtggaaccatgaactagctggatgcgagatgacactcgatgcttttgccgctatggcatgcaccgagatgctgacccggaatacactgaaaccctcaccccaggcctggttacagctcgttaagaacctctccatgcccctggaattgatctgttccgatgagcatatgcaagggtccggcagcctggcacaggcagttattcgcgaggtccgggctcaatggagtaggatctttagcaccgccctgttcgtggagcatgtgttgcttgggaccgagtctcgagttcctgagcttcagggcctagtgaccgagcacgtttttcttttggacaaatgcctgagggagaacagtgacgtgaaaacccacggccctttcgaggcagtgatgaggacactgtgcgaatgtaaagaaaccgcctccaaaactctgtcgagatttggtattcagccatgctcgatttgtctgggagatgctaaggaccctgtctgcctaccctgtgatcacgtgcactgcttacggtgccttagagcctggttcgcaagcgagcagatgatttgcccttattgcctcaccgccttgccagacgaattcagccccgctgtttcacaggctcacagagaagcaattgagaagcacgcgaggtttcgtcagatgtgcaatagttttttcgtggacttggtgtccactatctgtttcaaggataacgcccccccggaaaaggaagtgatcgagtccttgctgagcctgttatttgtgcagaagggtagactccgggacgccgcccagcggcactgtgagcatactaagagtttgagcccgtttaacgatgtggtcgataagacccctgtgattcgctcggtaattctcaagctgctgctgaagtatagtttccacgacgtaaaggattacatacaggagtacctgacccttctgaaaaagaaagcttttataaccgaggacaaaaccgaactgtatatgctttttatcaactgcttggaggacagtatactcgagaagacttccgcatacagccggaacgacgaactgaaccaccttgaagaggagggtcgattcctcaaagcctattccccagccagcagaggtagggaaccagccaacgaggcaagtgttgaatatttacaagaggtggcccggattagactgtgcctcgacagggccgccgacttcctttctgagcccgaaggcggacccgagatggcgaaagagaaacagtgctacctgcagcaggtgaagcagttttgtattagggtggagaatgattggcatcgtgtgtatctggtcagaaaactgagttcacagcgggggatggaatttgttcaggggctttccaagcccggccgaccacatcagtgggtttttcccaaagacgtcgtgaaacagcaaggcctacggcaggaccaccccggacagatggatcgctatctagtatatggtgatgagtacaaggccttacgggatgctgtggctaaagcagtcttggaatgcaagccgcttggtattaaaacagccctgaaggcctgtaagactcctcaatcccagcagtcagcttacttcttactgaccctgtttcgggaagtcgccatactttaccgcagtcataatgccagccttcaccctacccctgaacagtgcgaggctgtgagcaagttcataggggagtgcaaaatcctctcacccccagacatatcacgctttgcaacatccctggtggataactcagtgcctttactgcgtgccggaccatccgattcaaatctcgatggcaccgtaaccgagatggccatccacgccgctgctgtgctgctgtgcggccaaaatgagctcctggagccactgaaaaatcttgcattttctccagccactatggcccacgcattcctgccaactatgcccgaggatttgctcgctcaggccagaagatggaagggccttgaaagagttcactggtatacttgccccaacgggcatccttgttccgtgggtgagtgtgggcgtcctatggagcagagcatttgtattgactgtcatgccccaattgggggaatcgatcacaaacctcgtgacggctttcacttagttaaggataaggcagaccgtacccaaactggccacgtcctcggaaatcctcagaggcgtgatgtcgtcacatgtgatagaggactcccacctgtcgtgtttctgttgatacgattgctgacccacctggcactacttttaggcgccagccagtcaagccaagccctcatcaacataattaagccgccggtacgagatccaaaaggatttctgcagcagcacatccttaaagatttagagcagctggccaagatgctcgggcactctgctgacgagaccatcggcgtcgtgcatctagtgctgcgcagacttctgcaagaacagcatcagctctcgtcgagacgtttactaaactttgacacggagcttagtactaaggagatgagaaataactgggaaaaggagattgcggccgtgataagtccagagcttgaacacctggacaaaaccttaccgacaatgaataacttgatctctcaggacaagcgcatctcctccaacccggttgcaaaaattatctacggcgatcccgtgacattcctaccacacctgccccgtaaaagtgtcgtgcactgttctaagatctggtcatgccgcaagcgtatcactgttgaatatcttcagcacatagtagagcagaagaatggcaaggagagagtgcctatactgtggcatttcctgcaaaaggaagccgagctaaggctcgtgaagttcttacctgagattctggctctgcaacgtgacctggttaagcagtttcaaaacgtccagcaagttgagtattcatcaattaggggctttttatccaagcattcctcagacggtctgcgccagctccttcataacaggatcacggtgtttctgtccacatggaacaagctgcgccgcagccttgagactaacggggagatcaaccttcctaaagactactgttccacggacttggaccttgacacagaatttgaaatattgttgccgcgacgaagaggtcttggcttgtgtgcaacagctctggtcagttatctgattcggctgcataacgagatagtgtacgccgtggagaaactgtctaaggagaataattcatactcagtagacgccgctgaggttaccgaactccacgtgattagttacgaagtcgaaagggatctcacacctcttatcctttccaactgccaataccaggtggaggaaggtcgggagacagtgcaggagttcgacctggaaaaaatccagaggcaaatcgtcagtcggttccttcaaggcaaaccaaggctgtctcttaaggggatccccacgttggtctaccggcatgactggaactacgagcatctcttcatggatataaagaataaaatggcacaggactccctcccctctagcgtgatttctgccatctctggacagctgcagagttactcagacgcatgcgaagtgctgagcgtcgtcgaagtgaccctcggattcttgagcacagccggtggtgaccccaacatgcagctgaatgtctatactcaagacatactgcaaatgggtgatcagaccatccacgtgctcaaagctctgaaccgttgccagctgaagcataccatcgccctgtggcaattcctctccgctcataaaagcgaacagcttttgcgtctgcacaaagaaccatttggcgagatcagcagtaggtataaagccgaccttagccctgaaaacgcaaagctgctgtcaacgttcctgaatcagaccgggctcgacgcttttttacttgaactccacgaaatgatcatcttgaagttgaaaaatccccagactcaaacagaggaacgctttagaccccagtggtcacttagagacaccctggtctcttacatgcagacaaaggagtccgagattttaccagaaatggccagtcaatttcctgaagagatccttcttgcctcctgcgtttctgtgtggaaaaccgccgcggtactaaagtggaatcgcgagatgcggtag

SEQ ID NO: 133077 - DNA, 2772 bp, synthetic construct
  misc_feature 1..2772: note = Description of Artificial Sequence: Synthetic coding sequence
  source 1..2772: mol_type = other DNA
atggaggagggtaacaataacgaggaagtgatccatctgaacaattttcactgccatcgagggcaagagtggataaacctgagagacggcccgataacaatttcggattcttcggatgaagaacggatccccatgttagtcaccccagctccccagcagcacgaagaggaggacctggacgatgacgttatcctgactgaaactaataagccacagagaagtcggccgaacctgataaaacccgccgcccagtggcaggaccttaagcgcctcggtgaagaacgccctaagaagtctagagccgctttcgagtcagacaaaagctcctacttcagcgtgtgcaacaaccccctgttcgactctggcgcacaggatgatagcgaagacgactatggcgaattccttgatctggggcctcccggcatcagtgaatttaccaaaccctccggacagactgagcgggaacctaagccaggcccgtctcataaccaggccgcaaatgatatagttaacccgcggtcggaacaaaaggtgataattctggaagagggctcattactttacaccgagagtgacccacttgaaacgcagaatcagagcagcgaagatagcgaaaccgagctactctcaaacctcggggaatctgctgcactggctgatgatcaggccatcgaggaagactgctggctagaccacccgtacttccagagcttgaatcagcagccccgagagattaccaaccaagtcgtaccccaggagcgccagccagaggctgagctcggccgcttgctgtttcagcacgagtttcccggaccagccttccctcgcccggagcctcagcagggcggaataagcggtccatcaagcccacagccggctcaccctcttggggaattcgaggatcagcagctagctagtgatgatgaggaacccggaccagctttccccatgcaagagagccaggaaccaaacttggagaacatttggggccaggaggccgctgaggtggaccaggagctggtggaactcctcgttaaggaaaccgaggccagattccccgatgtggctaatgggttcatagaggaaataattcacttcaaaaattactatgatctgaacgttttgtgcaatttcctcctggagaatcctgactacccaaaaagagaagaccgaatcatcatcaaccccagttcaagtcttctcgcttcgcaggacgaaactaagcttcccaagatcgacttcttcgactatagtaagctgacccctctggaccagcggtgcttcattcaggccgccgatctcctgatggccgacttcaaggtgctgtcaagccaggacatcaaatgggccctgcatgagctcaaagggcattacgccattacacggaaggctttgtcggatgctattaaaaagtggcaagaactgtcacctgagacctccggcaagcgaaagaagcgtaaacagatgaaccaatacagctatatagatttcaagtttgaacaaggcgacatcaagattgagaaacgaatgttcttcctggaaaataagcggcgccactgccggtcctatgacagaagggccttattaccagccgtgcagcaggagcaggaattttacgagcagaagatcaaggaaatggcggagcatgaagacttcctcctagcactgcaaatgaacgaggaacaatatcaaaaggacggtcagctgatcgagtgtaggtgttgttatggcgaatttccattcgaggagctcacacagtgcgctgatgcgcacctgttctgcaaagagtgtcttatcagatacgcacaggaggctgtcttcgggtcagggaaactcgagctatcgtgtatggaaggttcctgcacctgttccttccctactagcgaattagaaaaggttctgccacagacaattctgtacaagtattatgaacgcaaggcagaggaagaggtggccgctgcctacgccgatgagctggtgcgctgtccctcttgctccttccctgccctgttggacagcgacgttaagcgctttagttgccctaatccacactgtagaaaggaaacatgcagaaaatgccagggcctgtggaaagaacacaacgggctgacttgcgaagagctggcagagaaggatgacattaaatatcgcacgtccatcgaagagaaaatgacagctgcccgtattcgaaaatgccataaatgcggcacagggcttatcaaatctgaaggctgcaaccgcatgtcctgtaggtgcggtgcccagatgtgttatctgtgtcgcgtgtccatcaacggatatgatcacttctgtcagcaccctcgctcgccgggggcaccatgccaggagtgctcccgatgttcattgtggaccgaccccacggaagacgatgaaaagttgatcgaagagatccagaaagaggctgaagaggagcaaaagaggaagaacggcgaaaatacctttaagcgtatcgggcccccactcgagaagcccgtggaaaaggtacagcgtgtcgaggccttacctaggccagtgcctcagaacttgcctcaacctcagatgccaccctatgcttttgcacatcctccatttccactgcccccggttcgccccgtgtttaacaattttccccttaatatggggcctatccccgccccttatgtgcctcctcttccaaatgttcgtgtcaattacgacttcggccccatacacatgcccctggaacacaacctaccgatgcactttggccctcagccgagacacagattctag

SEQ ID NO: 133078 - DNA, 63 bp, synthetic construct
  misc_feature 1..63: note = Description of Artificial Sequence: Synthetic coding sequence
  source 1..63: mol_type = other DNA
atggaggaggggaacaacaacgaagaggtgattcacctcaataattttcactgccataggtag

SEQ ID NO: 133079 - DNA, 2601 bp, synthetic construct
  misc_feature 1..2601: note = Description of Artificial Sequence: Synthetic coding sequence
  source 1..2601: mol_type = other DNA
atggaggagggaaataataacgaagaggtgatccacttgaataatttccattgccacagggggcaagagtggatcaacctgcgcgacggcccaatcaccatttctgacagttccgacgaggaacggatacctatgttagttactcccgccccccagcagcacgaagaagaggacctcgacgacgatgtgatattgacagaggacgactcggaggacgactatggggagttcctcgacctcgggccacccggcatatcagagtttacgaaaccatccggacagaccgagcgggagcccaagccaggaccatctcataaccaggcagccaatgacatcgtgaatcctcggtccgaacagaaggtcatcatcctggaagaagggagcctgttgtacaccgaatccgaccccctagagacacagaatcagtccagtgaggactcagaaacagagcttttgtccaacctcggtgaatcggccgcactcgctgacgaccaggccattgaggaggactgttggctcgaccatccctatttccaatcattgaaccagcaaccacgagaaatcaccaatcaagttgtaccccaggaacggcagcccgaagccgaactcggccgccttctcttccagcacgaatttccaggcccggcatttcctaggcccgaacctcaacagggcggcatctctggtcctagtagccctcagcccgcccatccactgggtgagtttgaagaccagcagctcgcctctgacgacgaggaacctggtcccgcattcccgatgcaggagagtcaggaaccgaacttggaaaatatttggggtcaggaggccgccgaggttgatcaggagttagttgagctgctcgttaaggagactgaagcacgattccccgacgtagcaaacgggtttatagaggagatcatccactttaagaattattatgatttgaacgtcctatgtaactttctgctggagaatcctgactaccctaaacgagaagacagaatcataattaaccccagttcatctctcctagccagccaggacgagaccaaactccccaagattgattttttcgattatagcaagcttacccctctcgaccagcggtgctttatccaggcagccgatctgctcatggctgacttcaaggtgctatcaagtcaggatataaagtgggcgctccatgaattgaagggccactacgctatcacacgtaaagctttatcagatgctattaagaagtggcaggagttgtccccggagacctcagggaagcggaagaaacgtaaacagatgaaccagtactcctatattgatttcaagttcgaacagggcgatataaaaattgagaagcggatgtttttcttggagaacaagcgacgacattgcaggtcctatgaccgaagggcactacttcccgccgtccaacaggagcaggagttctatgagcaaaagatcaaggagatggccgagcacgaagacttcctcctggcgctgcaaatgaacgaagaacagtatcagaaagacggccagctgatcgagtgccgatgctgttatggcgagtttccatttgaggagctgactcagtgtgcggatgcccacctgttctgcaaggagtgtctaatacggtatgctcaagaggccgtcttcggctcgggtaagctggagttatcctgtatggagggcagctgtacctgctcttttcccacctctgaacttgaaaaagtgctgccccagaccatactgtacaaatattatgagcgaaaagcggaagaggaagtggcggcagcttatgccgacgagctggtacgctgtccgtcctgtagttttcccgctttgctggactccgacgtgaaaaggtttagttgccctaatccacattgtaggaaggaaacttgccgcaagtgccaggggttgtggaaggaacataatggcctgacctgtgaggaactagctgagaaagacgatatcaagtaccggacaagtatcgaggagaaaatgaccgctgcccgcatccgtaaatgtcataaatgcggaaccggactgatcaagtccgagggttgtaataggatgagttgcagatgtggggctcaaatgtgttatctgtgcagggtgtcaatcaacggttacgaccacttctgccaacacccgcgatcacccggcgcgccttgtcaggagtgcagtaggtgctccctgtggaccgatcccaccgaggacgacgagaagctgatagaggagatccagaaagaggcagaggaggagcaaaaacgtaagaacggcgaaaacacatttaagcgcatcggacccccactcgaaaaaccggttgaaaaagtccaacgtgttgaagcccttccaaggcccgtgccccaaaacctgccccaaccacagatgccaccatacgcttttgcccaccccccgtttccgctccctcctgtacggcctgtgtttaataattttccattaaatatgggacccattcctgcaccttacgtgccccctctgccaaatgtgcgggtgaattacgacttcggccctattcacatgccactcgagcacaacttgcccatgcattttggccctcagcccagacatcggttttag

SEQ ID NO: 133080 - DNA, 2037 bp, synthetic construct
  misc_feature 1..2037: note = Description of Artificial Sequence: Synthetic coding sequence
  source 1..2037: mol_type = other DNA
atggaagaagggaacaataatgaagaggtgatccaccttaataattttcattgtcacagaggacaggaatggattaacctgcgcgatggaccaatcacaatatctgattcctcagatgaagagcgtattcccatgctggtgacacctgcacctcagcagcatgaggaggaagatctggacgacgacgtgatactaactgaaacgaacaagcctcagcgctcaaggcctaacctgatcaagccagctgctcaatggcaggaagcagcagaagtggatcaggagttggtggaattactggtaaaggagacagaagccagattccccgacgtggccaatggctttatcgaagagattatccactttaaaaactattatgacctcaatgtgctctgcaacttcctcctggagaacccggattatcctaagagagaagataggattatcatcaacccatccagttctcttctcgctagtcaggatgagacaaagctgccaaagattgactttttcgactattcgaagttaactccactggaccagaggtgttttatacaagcagctgatctccttatggccgatttcaaggtcctgagttcacaggatatcaaatgggctctgcacgagctcaagggtcactatgcgatcacacggaaggcactgtctgacgcgatcaagaaatggcaggaactcagccctgagacatctggaaagagaaagaagcgcaagcagatgaatcagtactcatatattgattttaaattcgaacagggagatattaagatcgaaaagagaatgttctttctcgagaataaacggagacactgccgatcatatgatcggcgcgccctgctgccagcagttcaacaagagcaggagttctatgagcagaaaattaaggaaatggctgaacatgaggacttcctgctagctctccaaatgaatgaggaacagtatcagaaagacggccagctgatcgaatgtcgctgttgttacggggagttcccttttgaagaactaacccagtgcgctgatgcccacctcttctgcaaggaatgtttgattagatatgctcaggaggccgttttcggctctggtaagctcgagctgagctgcatggaggggagttgtacctgcagctttcctacaagtgagctagagaaggtcctcccacagaccatcctgtataaatactacgagcggaaggcggaagaggaagtagcggctgcgtatgctgatgagctggtccgatgtccatcctgctctttccccgccctgctcgatagcgacgtcaagaggttttcatgcccaaaccctcactgtcggaaggaaacctgccggaagtgccagggcctgtggaaagagcataacggattgacctgtgaggagctggctgagaaagatgatatcaagtatagaacctctatcgaagagaaaatgacggcggcccgcatccggaaatgccataagtgcggtactggtctcatcaaatccgaaggatgtaatcggatgagctgtagatgcggcgcccagatgtgctacttgtgtagggttagtatcaacggctacgatcacttttgtcaacacccaagatctcccggtgcgccctgtcaggagtgttctcgctgctcattatggacagatccaaccgaagacgatgaaaagctgatcgaggagatccagaaagaagccgaagaggaacaaaaaaggaagaatggggagaatacgtttaagcgaatcggaccaccattagaaaaacccgtagaaaaggtccagagggtggaagccctgcccagaccagttccccagaacttgccacagccccaaatgcctccttatgctttcgctcacccccccttccccctgcctccagtccggcccgtatttaacaactttcctctgaatatgggacccatccctgccccctatgtgcctcctcttccaaatgttcgcgttaactacgactttgggcccatccacatgccactggaacataatctgccaatgcacttcggacctcagccaagacacagattttag

SEQ ID NO: 133081 - DNA, 447 bp, synthetic construct
  misc_feature 1..447: note = Description of Artificial Sequence: Synthetic coding sequence
  source 1..447: mol_type = other DNA
atgagttcagacttcccacattacaactttagaatgccaaacatcggatttcaaaatctgcccttgaacatctacatcgtcgtttttggaactgccattttcgttttcatcctatctctactgttctgttgctatctgatccgactgcgccaccaggctcataaggaattctacgcgtacaaacaggtcatcctcaaagagaaggtgaaggagctgaatctccatgaactctgcgcagtgtgcttagaggatttcaagccgcgcgatgagctgggaatctgtccttgtaagcatgcatttcacaggaagtgtctgattaagtggcttgaagtgagaaaagtatgtcccctttgcaatatgcctgtcctacagctcgcacagctgcatagcaaacaggacagggggccgccacagggccctctgcccggtgcagaaaacatcgtgtag

SEQ ID NO: 133082 - DNA, 447 bp, synthetic construct
  misc_feature 1..447: note = Description of Artificial Sequence: Synthetic coding sequence
  source 1..447: mol_type = other DNA
atgtctagcgacttccctcactataatttcagaatgccgaacataggctttcagaatctcccactgaacatctacatcgttgtctttggcaccgcgatctttgtgttcatcctttccctcttattttgttgttacttgatcagattgcggcaccaagcccacaaagagttctacgcatataaacaggtcatcctgaaagaaaaggtgaaagagttgaatctgcatgagctctgtgcggtgtgtctggaggacttcaagccaagagatgaacttggaatatgcccgtgcaagcacgcattccaccgaaagtgtttgatcaaatggctggaggtccggaaggtctgccccttgtgtaacatgccagtccttcaactggctcagctgcactctaagcaagatagagggccaccccaaggtccactgcccggcgccgaaaacattgtctag

SEQ ID NO: 133083 - DNA, 510 bp, synthetic construct
  misc_feature 1..510: note = Description of Artificial Sequence: Synthetic coding sequence
  source 1..510: mol_type = other DNA
atgctaaacaagtccggagaatcccgctacccggcactttttcctgtgttaggaggctcctcaatgtctagtgactttccacattacaactttagaatgcctaatataggattccagaatttacccctgaatatatacatcgtggtgtttggaactgccatatttgtgttcatattgtcgctcctgttttgttgctatttgattcggcttcgacaccaggcccataaggagttttacgcttataaacaagtgatcttaaaggaaaaggtgaaagaactcaatcttcatgaactctgcgcagtgtgtctggaggactttaaaccccgagacgagctgggaatctgcccctgcaagcacgccttccacagaaaatgcctgatcaagtggctggaagtgagaaaggtgtgccccttgtgcaatatgcctgttttgcaacttgcccaactgcattcgaaacaagaccggggtcccccacagggtccccttccaggagccgagaatattgtgtag

SEQ ID NO: 133084 - DNA, 510 bp, synthetic construct
  misc_feature 1..510: note = Description of Artificial Sequence: Synthetic coding sequence
  source 1..510: mol_type = other DNA
atgctgaacaagtccggcgaatctaggtatccagccctgttcccagtactggggggaagtagtatgagcagcgatttcccccattataatttcagaatgcccaatattggcttccaaaatctcccattgaacatttatattgtggtgttcggaactgcgattttcgtgttcatcttaagcctgctgttttgttgttacctgatcagattgcgacaccaagcccataaagaattttacgcttataaacaagtcattctcaaggagaaggttaaggagctgaacctgcacgagctgtgcgccgtgtgccttgaagactttaagcctagagacgaactgggaatttgtccatgtaagcacgctttccacagaaagtgcttgatcaagtggttagaggtgagaaaagtgtgtcctctgtgtaacatgccagtcttacaactggctcagctccactccaaacaggaccggggcccaccgcaggggcccctcccaggtgcagagaacattgtttag

SEQ ID NO: 133085 - DNA, 1302 bp, synthetic construct
  misc_feature 1..1302: note = Description of Artificial Sequence: Synthetic coding sequence
  source 1..1302: mol_type = other DNA
atggaggctgtgtatcttgtagtgaacgggctggggctcgttctggatgtgctaacactggtgcttgatcttaactttctactggtcagctccctgttagcctcgctggcatggctgttggccttcgtgtataatttgccccacacagttcttacaagtttgttgcacctgggccgaggggtgttgctgtcccttctcgccttaatcgaggctgtagtgcgattcacctgtgggggactccaagcactctgcactttactgtattcttgctgcagcggcctggagtccctgaaattacttggccatctcgcgtcccacggcgcccttagaagcagggaaattctccatcgaggcgtcctgaatgtcgtgtcttctggacacgcgctcctgagacaggcctgtgacatttgtgccatcgccatgtccctggttgcttacgtgattaacagcttggtaaatatatgtctcattggtacccagaacctgttttccctggtcctcgcgctttgggatgccgtgaccggacctctgtggcggatgacagacgtcgtggccgcctttctcgcacacatttcgtcatctgccgtggctatggccatattgttgtggacaccttgtcagctcgcactggagctgctcgccagtgccgctcgattactggcctcattcgtactcgtcaatttgacaggcctcgttctcctcgcttgcgttcttgccgtaactgtgacagtgctgcaccctgactttacgctgagactcgctacccaggccctgtcacagctgcatgctagacccagttaccaccgactgcgtgaggacgttatgcgcctgtccagacttgcgttgggctcagaggcttggagacgggtgtggtctagatcattacagctggcatcctggccaaatcgcgggggagcccccggtgcaccccagggagacccgatgagggtcttctcagtccgcactcgccgtcaggatactctccctgaggccggtcggcgtagtgaggcggaggaggaagaggcccgtacaatccgcgtgaccccagtgcgtggacgagaacgtctgaacgaggaggaacctccaggcgggcaggacccttggaagcttctaaaggagcaggaggaacggaaaaagtgtgtgatctgtcaagaccagtcaaaaactgtgttgctgctgccctgccggcacctttgcctgtgtcaagcgtgcacagaaattttgatgcggcaccctgtctaccaccggaactgcccactatgccggcgcggaatcctccagacactcaatgtgtacctttag

SEQ ID NO: 133086 - DNA, 3219 bp, synthetic construct
  misc_feature 1..3219: note = Description of Artificial Sequence: Synthetic coding sequence
  source 1..3219: mol_type = other DNA
atgcctggcgaggaggaagagcgggccttcctggttgccagagaagaattggccagtgcgctgaggcgagactccggtcaggcattctctctggagcagctgcggccacttctagcgtcctccctcccacttgccgcacgttacttgcagctggacgcagcacgcctggtcaggtgcaatgctcacggggagccccgcaactatctgaatactctgtccacggcattaaatattctggagaaatatgggaggaatctactgagtccccaacgtccacgatactggcggggcgtaaagtttaacaatcctgtgtttcgctctaccgttgatgctgtacagggcgggcgggatgtgttgcgcctttacgggtatactgaagagcagcccgacggcttaagctttcccgagggacaggaggaacctgatgaacatcaggtggcaacagtgaccctggaggtcctgcttcttcgaaccgagctgagcctactgttgcagaacacccacccacgccaacaggccctcgaacagcttcttgaggataaggtcgaggatgacatgctacagctttcagagtttgatccccttctcagggaaatcgcacccggccctctcacaacaccttcagtgcctggatccacacccggcccatgcttcctgtgcggtagcgcccctgggaccttacattgcccgagctgcaagcaggccctgtgccctgcatgcgatcacctttttcacggtcatccttcccgagcccaccacctgcgtcaaacattgcccggcgtgctgcagggcactcatctgtctccgtctttgccagcaagtgcccagcccagaccgcagtcaacgtctctgttggcgctgggcgactccagcttatcctctcctaatcccgcatcagctcatctgccttggcactgcgctgcatgtgctatgctgaacgaaccatgggctgtcctttgcgtggcatgtgacagaccacgcgggtgcaagggactcggactggggaccgagggtccacagggcaccggaggtctggaacctgatctcgccaggggacggtgggcctgtcagtcctgtacatttgagaacgaagcggctgctgtgttatgttcgatctgcgagcgtccgagactggctcagccaccatctttagtggtagattctagagacgccggtatttgccttcaacctctccagcaaggggatgcactgcttgcatcagcccagtcccaggtatggtattgcattcactgcacgttttgtaatagcagtcctggctgggtgtgtgtcatgtgtaatcggaccagcagcccaattcctgcacaacatgccccccgtccctatgcttcctccctggagaagggccccccaaagccagggcccccaaggcgcctgagcgctcccctgcccagtagctgcggcgatcccgagaaacagcggcaggataagatgcgggaggagggattgcagctggtgtcaatgatacgggaaggtgaggccgctggggcctgtcccgaggaaattttttctgcactccaatacagcggaactgaggtgcctctccagtggctgcgctctgaactcccctacgtcctggaaatggtcgccgaacttgcaggccagcaagaccctggcctcggagccttcagctgtcaggaggcccggcgggcctggcttgatcgtcacggaaatctggatgaggctgttgaagaatgcgtaagaacccgcaggcgcaaggttcaagaactgcagtccctgggattcggaccggaggagggctcccttcaggctctgtttcaacacgggggagacgtctcgagagctttaacggagctccagaggcagaggctggagccatttagacaacgactgtgggatagcggtcccgaacccacgccctcttgggacggacctgacaagcagtcactcgtgcgcaggctgctggctgtttacgccctgcccagttggggccgggccgaattggccctgagtctgctgcaggagacgcccagaaactacgagctgggcgatgttgtcgaagccgtgcggcactcccaagaccgcgcgtttctgcgacgactgctagcacaggaatgcgcagtctgcgggtgggcactccctcacaatagaatgcaggctttaacttcatgtgaatgcacaatctgccctgattgcttcagacagcattttacgattgctctgaaagaaaagcacataacagatatggtgtgtcccgcctgcggccgacctgacttaaccgacgatactcaactgttgtcgtacttcagtaccctggatatccagttgcgggagtcattggagcctgacgcgtatgcccttttccacaaaaagctcacagagggcgtgctgatgcgcgaccctaaatttctctggtgtgcccagtgttcattcgggttcatttacgaaagagagcaactagaggctacatgtccccagtgccaccagaccttctgcgtccgctgtaagcggcagtgggaggaacaacatagaggacggtcatgtgaggattttcaaaattggaagaggatgaatgaccctgaataccaagcacaggggctggccatgtatcttcaggagaatggcatcgactgcccaaagtgcaagtttagttacgcattggcaaggggagggtgcatgcatttccactgcacccagtgtcgccaccagttctgttcaggttgttataacgcattttacgcgaagaacaagtgccccgagcctaactgtcgggtgaagaaatcattgcacggccaccacccaagggattgccttttttatctgcgagactggacagcacttcgcctgcagaagctcctgcaggataacaatgtcatgttcaacacggagcctccagcgggagcaagagccgtccctggtggaggctgccgcgtcatcgaacagaaagaggttcccaacgggctgcgcgacgaggcatgtggaaaggagactccagcgggctacgcgggcttatgccaagctcactacaaagagtacctcgtgtccctgataaacgcccactctctagatcctgccacattgtacgaggtggaagaactggagaccgcaaccgagcgatacctccacgtgaggcctcagccccttgcaggagaagatcccccagcgtaccaagctcgattgctacagaagcttactgaagaggtgcctctgggacagtccatccctcgtcgtagaaagtag

SEQ ID NO: 133087 - DNA, 1518 bp, synthetic construct
  misc_feature 1..1518: note = Description of Artificial Sequence: Synthetic coding sequence
  source 1..1518: mol_type = other DNA
atgccaggcgaggaggaagaacgtgccttcctggtggctcgcgaagagttagcctccgcactcaggcgcgatagtggccaggctttttcccttgagcagctgcggcccctgctcgcatcctctctccctttggcagcaagatacctccaactggacgctgccaggctcgtcagatgtaatgcccacggcgaacctagaaattacttgaacactctgccgacaccatcttgggacggaccagataaacagtctttggtccgccgactgttggcggtatatgccctgccttcgtggggtcgggccgaacttgcattaagtctattacaggagactcctagaaactacgagctgggagatgtggttgaggctgtgcggcatagtcaggaccgcgcatttctaagaaggttactggctcaggagtgcgccgtatgtggttgggccctccctcataacaggatgcaggctctcacttcttgtgagtgcacaatctgccctgattgttttagacagcattttacaattgcccttaaggaaaaacatattacagacatggtctgcccagcctgtggcaggcccgacctcaccgatgacacgcagctcctgtcctatttttctaccctggacattcagctgagagaatctctggagccagacgcttacgctctgtttcataagaagctcacggagggagtgctcatgcgtgatccaaagtttctttggtgtgcgcagtgtagcttcggctttatctacgagagagagcaactggaagcgacatgccctcagtgtcaccagaccttctgtgtccgctgtaagaggcagtgcgaagacttccagaattggaagagaatgaacgatccagagtaccaggcccaggggctggctatgtacctgcaggagaatggcatcgactgtccgaaatgcaaattcagctatgccctggcacgtggagggtgcatgcacttccactgtacccagtgtagacatcaattctgcagcggttgctacaacgctttttacgcaaaaaataaatgccctgagcctaattgccgggttaagaaatctcttcacggtcaccaccctcgggattgtctgttctacttgcgcgactggacagctctgcggcttcagaagttactgcaggacaacaacgtgatgtttaacaccgaacctcccgccggggccagagccgttccaggcggaggatgccgcgtgatcgagcagaaggaagttcctaacggcctcagagatgaggcttgcggaaaggagacgccagccggctacgccggactgtgtcaggcccactacaaagagtatctcgtgtctcttatcaatgcccattcactggatcccgcaacactgtacgaggtggaagaactggaaaccgcgaccgagaggtatcttcacgtcagaccccagccactagccggggaggaccctcctgcatatcaggcacgcctgctccagaaacttacggaagaagtgccgctagggcagagtatcccccgaagaaggaaatag

SEQ ID NO: 133088 - DNA, 2766 bp, synthetic construct
  misc_feature 1..2766: note = Description of Artificial Sequence: Synthetic coding sequence
  source 1..2766: mol_type = other DNA
atggatctctgcacacgcgctggggagccaagtctgacccagaacactcacccacgtcaacaagctctggaacaacttctggaagataaggtggaagacgacatgctgcagctgagtgaatttgatccgctgttaagagagatcgcaccaggccctttgactacaccttccgtcccaggcagcacccccggtccgtgctttctttgcgggagtgccccggggactctgcattgtccctcttgtaaacaagcactttgtcccgcttgcgatcatctttttcacggccatccatccagagctcaccacttacgccagacactgcccggcgtcctgcaaggcacacatctttcgccaagtttacccgcatcagcacagccaaggccacagtccacttccctcctggcgctgggcgattcgagtctgtcctcccctaatcccgcatccgctcatctgccatggcactgcgcagcctgcgctatgttgaacgaaccatgggcagtgctgtgtgtggcctgcgaccggcctcggggttgtaaggggttaggactgggcacggaagggccccaggggactggagggctcgagcctgacctggcccggggccgctgggcctgtcagagttgcacttttgaaaacgaagcagccgctgtcttatgctcaatatgcgagaggccacggctcgcacagcccccctccctagtggtagacagcagagacgcggggatatgtcttcagcccctccagcagggtgatgcgctactggcttctgcccagagccaagtatggtactgcattcactgcacgttctgcaacagtagcccaggctgggtgtgtgtgatgtgcaatcgcacctccagcccaatcccagctcagcatgcccctcggccctatgcctcttcactcgaaaagggcccaccaaaaccaggccctccaaggagactgagcgctcccctcccctccagctgcggtgatccagagaagcaaaggcaggataagatgcgggaagagggcttacaacttgtttcaatgatccgtgaaggggaggccgcgggagcttgccccgaagaaatctttagcgctctgcagtacagtggaacggaggtgccattgcaatggctccgcagtgagcttccatatgtcctcgagatggttgccgagttagccggccagcaggacccagggctgggggcatttagctgccaggaggcccgcagagcctggttggaccggcatgggaacctggatgaggcggtggaggaatgtgttcggacaaggaggcgaaaggtgcaagagttgcaatccttggggtttggccccgaggagggttccctgcaagccttatttcaacacggtggtgatgtatcgcgggcactgactgaacttcagagacagcggctcgagcctttcagacagagactgtgggattcagggccagagccaacccctagttgggacggtcctgacaagcagtcccttgtcagaagactgttggccgtgtacgccctccccagttgggggcgggcggaacttgccctctcactattgcaagagacgccccgcaattacgaacttggggatgtggtagaggctgttcgccactctcaggatagagcttttctccgccgacttctcgcacaggagtgtgccgtctgcggttgggcactgccccacaatcgaatgcaggctctgacctcctgtgaatgtactatctgtccggactgctttaggcagcattttacaatcgcgctgaaagaaaagcatatcactgatatggtttgtcctgcatgcggccgtccagacctgactgatgacactcagctactgtcgtatttctctacgctcgacattcagttgagggaaagcctcgaaccggacgcttacgcactgttccataagaagctgacagagggtgtgctgatgagggacccaaaattcctttggtgcgcacagtgcagctttggatttatctacgagcgcgagcagctcgaggccacctgtcctcagtgtcatcagacgttttgcgtgaggtgcaaacgtcagtgggaagagcagcatagggggagaagctgtgaggactttcagaattggaagcgcatgaatgatcccgagtatcaagctcaggggttggccatgtacctgcaggaaaacgggatcgattgtccaaagtgtaagttctcttacgcacttgcccgagggggctgtatgcactttcactgcactcagtgcagacatcagttctgcagtggctgctacaacgccttttacgctaagaataagtgtcccgaaccaaattgccgggtgaagaagagtctgcatggtcatcatcctagagactgcttgttctacctgcgggactggacagccctgcggctgcagaaactgcttcaggataacaacgtgatgttcaataccgagccgcccgccggtgcccgtgctgtacctggtggaggctgtcgcgtcattgaacagaaggaggttccaaacggtttacgggatgaggcctgtggtaaggagactccagccgggtacgccggactgtgccaagctcattataaggagtatctggtgtctcttattaatgctcattctttagacccagccaccctttatgaagtcgaggaattggagaccgccacagagaggtatctgcatgtccgtcctcagccactcgccggcgaagaccctcccgcatatcaggcaagactgcttcagaagctcaccgaggaagtgccgctggggcagtcgattcccagacggcggaagtag

SEQ ID NO: 133089 - DNA, 513 bp, synthetic construct
  misc_feature 1..513: note = Description of Artificial Sequence: Synthetic coding sequence
  source 1..513: mol_type = other DNA
atgcctggggaggaggaagagcgcgcattcttggttgccagagaagaacttgcttccgcactgaggagggattcaggacaagccttttccctggaacagctccgaccactgttggcatcttctctacccctcgctgcaagatacctgcaactggatgccgcccgactcgtgaggtgtaacgctcacggggagcctcgcaactacctcaatactctgtccacagcgttaaatattctggagaagtacggtcgaaacctgttgtccccacaaagacctaggtattggcgcggggtgaagttcaataatcccgtctttcggagtactgtagatgccgtccagggtggccgcgatgtgctgcgtttatacggctacactgaggagcagccggatggcctgtcattccccgaaggacaggaagaacctgatgagcaccaggtggcgactgtgacactggaagtgttactgttgcgcacggaattgtcactgctcttgcagaatacacacccccggtag

SEQ ID NO: 133090 - DNA, 171 bp, synthetic construct
  misc_feature 1..171: note = Description of Artificial Sequence: Synthetic coding sequence
  source 1..171: mol_type = other DNA
atgccaggggaggaggaagagcgagcgtttctggtggcgagggaggaacttgcctccgcccttcggcgagacagcgggcaggcattcagcctggagcagctgaggcctctattggccagttctctgcctctggcagcacgctacttgcagctcgatgcagctaggctgtag

SEQ ID NO: 133091 - DNA, 1122 bp, synthetic construct
  misc_feature 1..1122: note = Description of Artificial Sequence: Synthetic coding sequence
  source 1..1122: mol_type = other DNA
atgcggaaggcgggcgcgacctcaatgtgggctagctgctgcggcttgctgaacgaagtgatgggaactggcgccgtcagaggccagcagtctgctttcgccggcgccacaggaccattccgatttacccccaacccggagttttctacatacccacccgccgcaaccgagggccctaacatcgtgtgtaaggcctgtgggttaagcttctcagtgttccggaagaaacatgtctgttgtgactgcaagaaagatttctgcagtgtctgctcagtgcttcaggagaacttaagacgctgctcgacttgccaccttctccaagaaaccgcattccagcggccacagcttatgcgtctgaaggtgaaggatctacggcagtatctgatactgcggaatattcctatcgatacttgtcgggaaaaggaagaccttgtggatttggtgctgtgccatcacggattgggatcggaggacgacatggatacatcgtcactaaacagctctagatctcaaacatcctcatttttcactcggagcttcttcagtaactatactgctccatccgccactatgagcagtttccagggtgagctgatggacggagaccaaacatctcggtcaggagttccagctcaggttcagtccgagatcacgtccgctaacacagaagatgacgacgacgacgacgacgaagacgatgatgacgaggaagagaacgctgaggacagaaatccggggttatcaaaggaacgcgtccgggccagcctgtccgacctttccagcctcgatgacgtagagggcatgagtgtgaggcagctcaaagaaatactggctaggaacttcgtgaattatagcggatgctgtgaaaagtgggagcttgtagagaaagtgaacagactgtataaggagaatgaggaaaaccagaagtcttacggggaaaggctgcagttgcaggacgaggaggatgactccctttgtcgaatctgtatggatgcagtaattgattgcgtgctgttggagtgcgggcacatggtgacctgcactaagtgtggcaagaggatgtccgagtgccccatatgcaggcagtacgttgtccgggccgtacatgtcttcaagtcttag

SEQ ID NO: 133092 - DNA, 1119 bp, synthetic construct
  misc_feature 1..1119: note = Description of Artificial Sequence: Synthetic coding sequence
  source 1..1119: mol_type = other DNA
atgaaagctggtgcaacttctatgtgggcatcctgttgcggattattgaacgaagtcatgggaacaggtgctgtgaggggacagcaaagcgcattcgctggtgctaccggcccattccggtttaccccaaatcctgagtttagcacttacccacccgccgcgacggaaggacccaacatcgtatgtaaggcttgcgggttgtcttttagtgtgttcaggaagaagcatgtgtgttgcgattgtaaaaaggatttctgcagcgtgtgctccgtgctgcaggagaaccttaggaggtgtagtacatgccatctcctacaagagactgcttttcagcgcccacagttaatgagacttaaggtaaaagacctgcggcagtatttgattctcaggaacatccccatcgacacctgtcgcgaaaaggaggacctagtagatctggttctctgtcaccatggccttggcagtgaggacgacatggataccagttccctgaactctagtagaagccagacttcaagcttcttcacccgaagctttttctctaactataccgctcccagcgccacaatgtcctccttccagggagagctaatggacggcgatcagacaagccgaagtggggtgcccgcccaggtccaatcagaaatcacatccgcgaatacagaggatgacgatgatgatgatgatgaagacgacgatgatgaggaggagaacgctgaggacaggaatccggggctgagtaaagagagggtccgcgcgtcactaagtgatttgagcagcctcgacgatgtagaagggatgtcggtgcgccagctgaaagagattctcgcccggaacttcgtgaattactctggctgctgtgaaaagtgggagctggtggagaaggttaaccgtctgtacaaagagaacgaggagaaccagaaatcttacggcgaaagacttcagttacaggatgaagaggacgattcactctgcagaatctgcatggacgctgtcatagactgtgtcctgctcgaatgtggccacatggtcacttgcacgaagtgcggtaaaaggatgagcgagtgccccatctgtcgccagtacgtggtacgagcggtgcacgtttttaaatcctag

SEQ ID NO: 133093 - DNA, 1122 bp, synthetic construct
  misc_feature 1..1122: note = Description of Artificial Sequence: Synthetic coding sequence
  source 1..1122: mol_type = other DNA
atgcgcaaggctggcgcgacatcaatgtgggcttcctgttgtgggcttctcaatgaggtcatgggcacaggtgcagtcaggggccaacaatctgcattcgcgggagccacaggccccttccgcttcacccccaatcccgagttctcaacttacccgcctgcagctaccgagggccccaacatcgtctgcaaggcgtgcggattatcattcagtgtgttcaggaagaagcacgtatgttgcgattgtaaaaaggatttctgctcagtgtgcagtgttctccaggaaaacctgcgtaggtgctccacctgccatttgctgcaagagaccgcgttccaaagaccacagctgatgaggctgaaggttaaggacctcagacagtatcttatactcagaaacattcctatcgacacttgccgcgagaaggaggacctagtggacctcgtgttatgccaccatggcctcggttccgaagacgatatggacaccagttccctcaatagtagccgatcccagacaagttcattcttcacgaggagctttttctctaactacaccgcccccagcgctacaatgagtagttttcaaggcgaactgatggatggcgaccaaactagccggtcaggggtgcctgcccaggtgcagtccgaaatcacatcggctaacaccgaggatgacgacgatgatgatgatgaagacgacgatgatgaagaggagaacgcagaggaccgaaatcctgggttgtccaaggaaagggttcgcgctagcctgagcgacctctcctccttggatgacgtggagggaatgagcgtgcggcagttgaaagagatacttgcccggaatttcgttaactactcaggctgttgtgagaagtgggaattggtggagaaagtgaataggctgtacaaagaaaatgaggagaatcagaagtcctacggggagcgcttgcagctgcaagacgaggaagacgactccctctgtcgcatctgcatggatgcagttatcgattgcgttctgctcgagtgcggccacatggttacatgcacgaagtgtggtaaacgaatgtccgaatgtcctatctgtaggcagtatgtagtcagggcagttcacgtctttaagagctag

SEQ ID NO: 133094 - DNA, 1548 bp, synthetic construct
  misc_feature 1..1548: note = Description of Artificial Sequence: Synthetic coding sequence
  source 1..1548: mol_type = other DNA
atggcctgcaaaataagcccgggcgcaaattctgcaagtctgcctggacatccgaacaaggttatctgtgagcgcgtgcggctgcagagtttatttccactactgccatccgatcagaacactaccgtccaggaggacgctcattttaaggcctttttccagtccgaggattccccctcaccgaagaggcagcggctgtctcactccgtgttcgactatacaagcgccagcccagccccctcccccccgatgagaccgtgggaaatgactagtaatcgtcagccaccctcggtcaggccatcccagcatcacttcagtggcgagcgctgtaataccccagcccggaaccggaggagcccccccgtccgtcgacaacggggacgacgagatagactgtctcgtcacaattctatctcccaggatgaaaattaccaccatctaccgtacgcgcagcagcaggctattgaggagcctagagctttccatccgccaaatgtgagcccaagactgctgcatccagctgcccacccgcctcaacagaacgcggtcatggttgacattcacgatcagctccatcagggcacagtgcctgtctcgtatactgtgactactgtggccccacacggcattccactgtgtaccggccagcacattcctgcatgttcaacgcagcaggtgccggggtgcagtgtggtcttctcaggacagcaccttcccgtctgttccgtgccaccacctatgctccaggcatgcagtgtgcagcaccttcctgtcccgtatgcagcattccctccgttgatttcaagtgatccattcctgatccaccctccccacctgtctccccatcaccctcctcacctcccacccccaggccaattcgtgcctttccaaactcagcagtcacgaagtcccctacaacggatagagaatgaggtggagctccttggagaacatcttccggttgggggtttcacatatcccccgtccgcacaccccccaactctgcccccgagcgctccgctgcagttcctgacccacgatccgctgcatcaggaggtcagctttggcgtgccatatccaccatttatgccccgcaggctgacaggcaggtcgaggtaccgctctcagcagccaataccaccacctccttatcacccttcccttctgccttatgtcttaagtatgttgcccgtaccgccagccgttgggcctaccttctcatttgaactcgacgtggaagacggggaagtggagaattatgaagctctcctgaatctggctgagcgtctgggcgaggccaagccgcgaggactcaccaaagctgacatcgagcagttaccttcttacaggttcaatcctaacaatcaccagtctgaacaaacactgtgcgtcgtgtgtatgtgtgattttgagtcgcgtcagctgctgcgcgtcttgccatgtaatcatgaatttcatgcgaaatgcgtcgataagtggttgaaggctaaccggacctgtccaatttgtcgagccgacgcctcagaagtgcatagggactctgagtag

SEQ ID NO: 133095 - DNA, 1299 bp, synthetic construct
  misc_feature 1..1299: note = Description of Artificial Sequence: Synthetic coding sequence
  source 1..1299: mol_type = other DNA
atgaggccgtgggagatgacatcaaatcggcagcccccctcggttagaccatcccagcatcatttttccggagagagatgtaacacacctgctaggaatagacggtcacctccggtgcgccgacagagaggccgacgggatcgcctatcgcggcataactccatctcacaggacgagaactaccaccatctaccttacgctcagcagcaggcaatagaggagccaagagcctttcaccctccaaacgtgagtccgaggctcctccaccccgcagcgcatcccccccagcagaatgccgtgatggtggatatacacgaccagctgcatcaaggtacagtgcccgtgtcttatactgttacaactgtggcaccccatggcataccactctgtaccggacaacatattcctgcatgttctacccagcaagtcccagggtgcagcgttgttttcagtgggcaacatcttcccgtgtgctctgtcccaccaccaatgctgcaggcatgcagcgtgcagcacctgcccgtcccttacgccgccttccctcctcttatctcaagcgaccccttccttattcacccgccccatctgagcccacatcatcctccgcaccttcccccacccggtcaattcgttccattccagactcaacaatctaggtcaccacttcagcgcatagagaacgaagtcgagctgttgggagagcaccttcccgtcggcggctttacatatccgccttccgcacatccacctactctccctccttctgcaccactccaatttttaacccacgatcctctgcaccaggaggtctcctttggcgtcccctaccctccgtttatgccccggagactaacaggcaggtccaggtaccgtagtcaacagcctataccgccccctccctatcacccaagcttactcccatatgtgttgtccatgttgccagtgccgccagcggtgggcccaacctttagtttcgaacttgatgtggaggacggagaagtggaaaattacgaggcattgctgaacctcgccgagagactcggagaggccaagccccgcggactgaccaaagctgacattgaacaacttcctagctaccgcttcaacccaaataaccaccagagcgaacagacactgtgcgttgtttgcatgtgcgacttcgagtctagacaattgctacgagtgctgccatgtaaccacgagtttcacgccaaatgcgtagacaaatggctgaaggcaaatcgcacgtgcccaatttgcagggccgatgcctcagaagtacatcgagatagcgagtag

SEQ ID NO: 133096 - DNA, 1398 bp, synthetic construct
  misc_feature 1..1398: note = Description of Artificial Sequence: Synthetic coding sequence
  source 1..1398: mol_type = other DNA
atggcttgcaagagtgaagactcaccctctccaaagcggcagagactgagtcactccgttttcgattacacctccgcctcacctgctcctagtcctcccatgaggccctgggaaatgaccagcaatcgccagcctcctagtgtcaggccctctcagcaccacttcagcggcgaaagatgcaacacgcccgccagaaacagaagaagtccgcccgtcaggaggcagaggggacgcagggacaggctttcgagacataactcaatctcccaggacgaaaactaccaccacctaccttacgcccagcagcaagccattgaagagccacgcgccttccacccacccaacgtgagtcccaggctcctacaccccgcagcgcatccgccccagcaaaatgccgtcatggtagatatccatgaccagctgcatcaggggaccgttcccgtgagctacactgtaacgaccgtggcaccccatggcatccccctgtgtacaggtcagcacatccctgcttgttctacacagcaggtgcctggctgctccgtggtgtttagcgggcagcacctgcccgtttgtagcgtgcccccccctatgctacaagcttgttctgtgcagcatctcccagtgccgtatgccgcgtttccaccgctgatcagcagcgatcctttcctgatccaccccccacacctgtcgccccaccatcccccccacctccctccgccaggacagttcgttccgttccagacacagcagtccagatctcctctccaacggatcgagaatgaggtcgagctgctgggagaacacttaccagtcgggggttttacgtaccccccctccgcccacccaccgacgcttccaccatcagctccgctgcagtttctaacccacgatccgcttcaccaggaagtttccttcggggtgccgtaccctccatttatgcctcgacgattgacagggagaagtaggtaccgcagtcaacagcccatacctcctcccccatatcacccttctctgctgccctatgttctttccatgctgcctgtgcctcctgcagtcggccctaccttctcttttgaattggatgtggaagacggtgaggtggaaaactacgaggcgctcctgaatctggccgaaagactgggtgaggccaagccaaggggcctcacaaaagcggacattgagcagctccctagttaccggtttaacccgaacaaccatcagagtgagcagactttatgcgttgtgtgcatgtgtgactttgagagccggcagctcctcagagtcctcccttgtaaccacgaatttcacgctaaatgcgtggacaagtggctgaaagccaatcggacgtgccccatttgccgcgctgacgcctctgaggttcacagagactccgagtag

SEQ ID NO: 133097 - DNA, 1299 bp, synthetic construct
  misc_feature 1..1299: note = Description of Artificial Sequence: Synthetic coding sequence
  source 1..1299: mol_type = other DNA
atgcggccctgggagatgaccagcaacaggcagccaccctcggtgcgcccctcccagcatcacttcagtggagaaagatgcaacactccagctcggaacaggcggagccctccggtcagacgccagcggggtcgccgcgacaggttgagtcgccacaactcaataagccaggatgagaactaccatcatttgccctatgctcagcagcaagctattgaggaaccaagggcattccacccgccaaacgtctcacctcgcctgttgcaccctgccgctcaccccccgcagcagaatgctgtcatggtggacatacacgatcagctgcaccagggaaccgtgcccgtttcttataccgtgactaccgtggctccccatgggataccactatgtaccggccaacatattccagcttgcagtacacagcaggtgccgggctgttccgtggttttttcagggcagcatctcccggtgtgttccgtcccgcctcctatgctacaagcctgctcggttcagcacttacccgtcccatatgcggctttcccaccgctcatcagctcggatccatttttaatacatccgccacatctatctccacaccacccccctcatctcccacctcctggtcagtttgtgccattccagacccagcaatccaggagcccattgcagcgcattgagaatgaggtggaactcctaggggagcatctacctgtgggcggatttacttaccccccctccgcgcacccacccacactgccaccctccgccccattgcagttcctgactcacgatcccctccatcaggaggtcagctttggggttccataccctcccttcatgccccgtagactcacaggccggtctagatacaggtcacagcagcccataccaccgcccccgtatcacccaagtttgctcccctacgtgctgagtatgctacccgtcccgcccgccgttgggcccactttctctttcgaactcgatgttgaggatggagaagtggagaattatgaggctttgctgaacctggccgagcggttgggagaggctaagccacggggcctgacaaaagcggatattgaacagctgccaagctaccgtttcaaccccaacaaccaccagagcgaacaaaccttatgtgttgtgtgcatgtgtgatttcgaatcacgccaactgctgcgagttctgccgtgcaaccatgagttccacgcaaagtgcgttgacaagtggctgaaagctaacagaacttgcccgatatgtagggcggacgcctcagaagtccacagggattcagagtag

SEQ ID NO: 133098 - DNA, 1320 bp, synthetic construct
  misc_feature 1..1320: note = Description of Artificial Sequence: Synthetic coding sequence
  source 1..1320: mol_type = other DNA
atgcagcatacatgtacacaacaaaaaaaggtcacatataagcatattgccagattctcacctcggaaccggctttgtcaagcagatgcagtctttaacaacaatctggccggatttcaacttcaatccccaccagttcgtcgacagagagggcggcgtgataggttaagcaggcataattctatcagtcaggatgaaaattaccaccacttgccctatgcccagcaacaggctattgaggagcctagagcctttcaccctccaaatgtgagcccacgcctcttgcacccagccgcccaccccccacagcagaatgctgttatggtcgacatacatgaccagttgcaccaaggtacggtgccagtgtcctacactgtgactaccgtagccccacacgggatcccactatgcactggccagcatatccctgcttgtagcacacagcaagtgccagggtgtagtgtggtcttctctggacagcatttacccgtctgttctgttcctcctcctatgttgcaggcttgctctgttcagcatctgccggtaccctacgctgcctttccccctctgatctcctcggacccttttctaatccaccccccgcatctgtctccccaccaccccccacacctgccacccccaggccaattcgttcctttccagacacagcagtcccgcagccccttacagagaattgagaacgaagtggaactgttaggcgagcacctgcctgtgggcggattcacctatcctcccagcgctcaccctccgacattaccaccctccgctcccttgcaatttctcacccacgaccccctgcatcaggaagtttctttcggggttccgtatcctcccttcatgccccggcgcttgaccggtaggagccggtataggtctcaacagcctatacctccccccccctaccacccatccctcctgccttacgtcttatccatgctgcctgtgccgcctgccgttggcccaactttttcttttgagctggatgtcgaagatggagaggtagagaattacgaggcgctgttaaaccttgcagagagacttggagaagccaagccacgcgggctgaccaaggcagacattgagcagctgccttcctatcgatttaatcccaataatcatcagtccgagcaaacactgtgtgtggtgtgtatgtgtgacttcgagagccggcagctcctgagagtcttaccgtgtaaccatgagttccacgctaagtgcgttgataagtggctgaaggccaaccgaacttgccccatctgcagggccgacgcttccgaagtccaccgggattcagagtag

SEQ ID NO: 133099 - DNA, 999 bp, synthetic construct
  misc_feature 1..999: note = Description of Artificial Sequence: Synthetic coding sequence
  source 1..999: mol_type = other DNA
atggtagatatccacgaccaactgcaccagggcacagtgcccgtgagctacaccgtgacgacagtcgcaccccacgggattcctctgtgcactggccagcatattcccgcttgcagtacacagcaggtccccggttgcagcgttgtcttctctggccagcacttgccagtgtgcagcgtgcccccaccgatgctgcaggcatgcagcgtgcaacacttgccggttccctacgctgctttcccccccctaatcagcagcgatcctttcctgattcaccccccacacctgagccctcaccaccctccccatttacccccgcctggccaatttgtgccatttcagactcaacaaagtcgatcaccacttcagcgtattgaaaacgaggtggagcttcttggggagcatcttcccgttgggggtttcacgtacccaccatctgctcaccctcccactctgccaccgtctgctcctctgcaatttttaactcacgaccccttacaccaggaagtgtccttcggagttccctacccaccctttatgccacggcgtctcaccggccgctccagatacaggtcgcagcagccaatcccgccccccccctatcatcctagcctcttgccatatgtgctatcaatgctcccggttccccctgccgtcggcccaacattttcttttgaactcgatgtggaggacggagaagtggagaactatgaagccctgctgaatctcgccgaaagactgggtgaagctaagccaagggggttgaccaaggcggatattgaacagttaccctcctaccgcttcaatccgaacaatcatcagagcgagcagacgttatgtgtggtgtgcatgtgtgattttgagtccaggcagttactgcgtgtgctgccctgtaatcatgagttccacgctaagtgtgtggacaaatggctcaaagccaataggacgtgtccgatctgcagggcagacgcttctgaagtgcaccgggactccgagtag

SEQ ID NO: 133100 - DNA, 1320 bp, synthetic construct
  misc_feature 1..1320: note = Description of Artificial Sequence: Synthetic coding sequence
  source 1..1320: mol_type = other DNA
atgcagcacacctgtacgcagcagaaaaaggtcacttataagcacatcgccagattttcaccccggaaccgtctctgccaggctgatgcagtattcaataataatttggccggcttccagttgcagagtccaccagttcgtaggcagagagggcgtagagaccgactatctcgtcataactccatcagccaggacgagaactaccatcacctgccttacgcccagcagcaggctattgaagagccacgggcattccaccccccgaacgtctcccctaggctgctgcaccccgccgctcatccacctcagcaaaacgccgttatggttgacatacacgatcaattacaccaaggtaccgtgccagttagctatactgtcactactgtggcacctcatggcattcctttatgtacaggacagcatatccctgcatgcagtacccagcaggtgcccggatgcagcgtagtgttcagcggccagcatctgcccgtctgctctgtgccacctcccatgttgcaggcctgctcagtgcaacatctgcctgtgccctatgccgcttttcctccactgatctcctccgatccctttttgattcacccgcctcacctatcacctcaccacccccctcatctacctccgcctgggcagtttgtacccttccagacacaacagagccggagtccactgcagaggattgagaacgaagtcgaactgctcggagaacacctgcccgtcggaggtttcacttatccaccttctgcgcatccacccaccctgcctcctagtgcacctctccaattcctgacccatgatcccctgcaccaggaggtaagctttggtgtaccctaccctcctttcatgccacgccgactgaccgggcgcagccggtaccgttctcagcagccaatccctccgccaccataccacccatccctcctgccttatgtgctgtctatgcttcccgtcccccctgctgtcggtcctacattttcttttgagctcgacgttgaggacggagaggtcgaaaactacgaggcgctgttaaaccttgccgagcgtctgggtgaagctaaacccagaggactgactaaagccgatatagagcagttgccttcctatagatttaatcccaataaccaccagagcgaacaaacactgtgtgtcgtttgcatgtgcgattttgaatcaaggcagctcctgcgggtgttaccatgtaaccatgaattccatgcaaaatgcgtcgacaagtggttaaaggccaataggacttgcccaatttgtcgcgccgatgcaagcgaagtgcaccgggactcagagtag

SEQ ID NO: 133101 - DNA, 1299 bp, synthetic construct
  misc_feature 1..1299: note = Description of Artificial Sequence: Synthetic coding sequence
  source 1..1299: mol_type = other DNA
atgagaccttgggaaatgacttccaatcgtcagccacccagcgttcggccctcacagcatcacttcagcggagagagatgcaacacccctgcgcgaaacaggcgttctccccctgtccggcgccagcgcggacgccgggatcgacttagcagacacaattctatttcacaagatgaaaattatcaccacctgccttatgcacagcagcaggcaatcgaggaaccacgggcttttcatccaccaaatgtctctcctcgtctccttcacccagccgcccatccaccgcagcaaaatgctgtcatggtggatatccatgatcagttgcaccagggcaccgtgcccgtgagttacaccgtcactaccgtcgcaccccacggcattcccttatgcacagggcagcacatccccgcatgcagtacacagcaagtgcctggttgtagcgtggtgttttcgggccagcatttaccagtgtgttccgtgccgcctcccatgctccaagcttgctcagttcagcatctcccggtgccttatgccgcattcccccctctgatctcaagcgatccgttcttaatccatccaccccacttgtccccacatcatcctccccatctacccccccccggccagttcgttccctttcagacacagcagagcagaagccctcttcaacgcatcgagaacgaagttgaactgttgggggaacatctcccagtgggcggattcacctatcccccgagtgcacaccccccgacacttccaccctctgcccccctccaattccttacccacgaccctttacatcaggaagtgagtttcggggtcccttatccgccttttatgcccagacggctgactgggaggtcgcgctatagaagccagcagcctattccaccacccccttatcatccctccctgcttccatacgtactttcaatgctgcccgtgccgccagccgtcgggcctacattcagctttgaactagatgtcgaagacggggaggtggagaactacgaagcactcctgaacctcgcagaacggctcggggaagcaaagccacgtggcctgaccaaggctgacatcgagcagctgccgagctatcggtttaacccgaacaaccaccaaagcgaacaaacactgtgtgtcgtgtgtatgtgcgattttgaatcgagacagctcctgagggtgttaccttgtaaccacgagttccatgccaaatgcgtcgataaatggctgaaggctaatagaacatgccctatctgccgtgccgatgcgtctgaagtgcaccgtgactctgagtag

SEQ ID NO: 133102 - DNA, 1263 bp, synthetic construct
  misc_feature 1..1263: note = Description of Artificial Sequence: Synthetic coding sequence
  source 1..1263: mol_type = other DNA
atgtggtggcgcgacctgactcggttgcgcctgtggcttaaaagggaggccataccaggtgaaggaaggaaagctgcaaaagtgaatgccggtgtgggtgagaaaggcatttacaccgcttcctcccgcgggggccctccttccgcccgaagcaaagcagtgaccgttgtggccgagggggctgccagtcgttcctggctcagcatggacgcccctgaactggggccaggattggtcgagagactggagcaattagctacctgccccctttgtgggggcagctttgaagacccagttctcctggcctgtgaacattcattttgtcgcgcttgtcttgctaggcgctggggtacgccgccagccaccggtacagaagccagccctaccgcctgcccatgctgtggtctcccatgcccacggcgcagcctaagatcaaatgtaagactggctgtcgaggtgcgcatcagccgggagctccgtgagaaactggccgagccaggggctagagccggccgacgccgcggcggccgcataccaactatgggatgcctggatctgccaggcgaagacatgcggaagacctggaggcggtttgaggtgccaacttcgaagtcctcaaactctgaagatgacctgcccgaagattatccggtcgttaagaagatgctccacagactgacggccgacctgacgctggatccagggactgcacaccgcaggttgcttataagtgcagaccgccgatccgtccagcttgcaccacctggaacacctgccccaccagacgggcctaaacgattcgaccagcttcccgccgtattgggggctcagggcttcggtgccgggagacactgctgggaggtggaaactgccgacgctgcttcatgtcgagactcctcaggagaggatgccgacgacgaagaatcacactatgctgtgggggccgcaggcgaatctgtgcaacgcaagggttgcgttaggctctgccctgctggagctgtgtgggctgtagaaggaagaggaggccgattgtgggccttaacggctcccgaaccaacattgcttggtggagttgaaccgcccccaaggagaataagagtggacctcgactgggagcgcggtcgagtagccttttatgacgggcgttccctggacctgttgtatgccttccaggctccagggccgctgggcgagaggattttccctcttttttgcacctgcgacccacgcgccccactgcgcatcgtccctgctgaatcttag

SEQ ID NO: 133103 - DNA, 756 bp, synthetic construct
  misc_feature 1..756: note = Description of Artificial Sequence: Synthetic coding sequence
  source 1..756: mol_type = other DNA
atgtggtggagggatcttactcgcttaaggctatggcttaagagggaagcaatcccaggtgagggcagaaaagcagcaaaagtgaacgccggcgtgggcgaaaagggcatttacacggcatcaagcaggggcgggccaccttctgccagaagtaaggcagtcaccgttgtcgcagagggagccgcgtctagaagctggttatccatggatgctcctgagctggggccggggctggtcgaacgcctggagcagctcgccacatgcccactgtgcggaggttcttttgaagaccccgtactcttagcctgcgagcattccttctgtagggcttgcttagcaaggaggtgggggacaccaccggccaccggaacggaagctagccctacagcttgtccctgttgcggtttaccttgcccccgaagatctctgcgcagtaacgtgcgcctggccgtcgaggtccgtatatctagagagcttctgttcgggggagggattccccactcctttctggggacccattcccatgcccattgccgaagcatcaatagcaatccccactttagacccaagatcatgagaccccacctggtctcaaccttcccacgcccatgtagtaagccgaacccatttctgccttctgggtcgcagaacctgctgtctcctacagccaccacggtcctacctgactttagccatagtaaccattctaggccagccatgggaaatagaccaagtcccagcgtcctggtcaaatag

SEQ ID NO: 133104 - DNA, 1065 bp, synthetic construct
  misc_feature 1..1065: note = Description of Artificial Sequence: Synthetic coding sequence
  source 1..1065: mol_type = other DNA
atgtggtggagagatcttaccagactgcgactctggttgaagcgcgaggcaatacctggggaaggcagaaaggccgctaaggtgaacgcaggagtcggcgaaaaagggatttatactgcaagctctcggggagggccaccaagtgcccgttcaaaggccgttactgtggtggccgaaggggctgcatctaggtcttggctgtcgatggacgcaccagaactcggtcccggactggttgagcgtctagaacagctggcgacatgccctctgtgtggcggctcttttgaggacccagtcctccttgcatgcgaacattcattttgcagagcctgtctggcccggcggtggggtaccccacctgccaccggtacagaggcctcaccaaccgcctgcccctgctgcggactcccatgcccacggcgtagtttacggagtaatgtccgcctggccgtggaggtcaggatcagccgggaactgcgcgagaagctggctgaaccgggcgcccgggcaggtaggaggcgggggggaagaatccccaccatgggatgcctggatctccctggagaggatatgaggaagacctggcgccggtttgaagtgcctactcctaagtcctccaactcagaggacgacctccccgaagactatcctgtcgtgaaaaaaatgctccaccggttgacggctgacctgacattggatcctggcaccgcacatagacgactccttatttcgacagatagaagatcagtccagctggcacccccaggcacgcccgcgcctcctgatgggccaaagcggttcgatcagttacccgcagtgcttggcgcccaaggattcggagccggaagacactgctgggaggtcgaaacggcagacgctgcaagttgcagggatagcagcggcgaagacgaagacgacgaggaaagccactatgccgtcggagctgccggtgagtcagtgcaaaggaagggttgtgctcccggaccactcggggaacgaattttcccgctcttctgtacttgtgaccctagggcgccactgagaatcgtccccgcagagtcatag

SEQ ID NO: 133105 - DNA, 1065 bp, synthetic construct
  misc_feature 1..1065: note = Description of Artificial Sequence: Synthetic coding sequence
  source 1..1065: mol_type = other DNA
atgtggtggcgcgatcttacccggttacggctctggctgaaacgggaggctataccgggggaagggcgcaaggcggcgaaggtgaatgccggcgtcggagagaagggcatctacactgccagcagccggggaggcccgccttctgctcgaagtaaggctgtgactgtggttgctgagggagccgcgtcacgttcgtggctgtccatggacgctccagagctaggacccggcctggttgagcgcctcgaacagctggctacctgccctttgtgtggtggctccttcgaggacccggtgctgttagcctgtgagcattccttctgtagagcttgtctggctaggcgatgggggactcccccagctacgggcactgaagcttctccaaccgcatgcccttgttgcggactgccctgcccaagaaggtcgctgagatcaaatgtaaggctggccgtggaggtacgcattagtagagagctgcgggagaaactcgcagagcctggggctagggctggacgacggcggggcggcagaatccccacaatgggctgcctggacttaccgggcgaagacatgcgtaagacatggaggagatttgaggtccctacgtctaaatccagcaatagcgaagatgatctccctgaggactacccagtggtgaaaaaaatgctgcataggctgactgctgacctcaccctcgatccaggtaccgctcacaggcgcctgctcatttcagctgaccgccggtctgtccagctcgcacctcccggcactcctgcaccacctgatggaccgaaaaggttcgatcagctccctgctgttctgggcgctcaggggtttggagccggtagacactgttgggaggtggagaccgccgacgctgcctcttgtcgtgacagtagcggggaggacgcggacgacgaagagtcacactatgccgtgggcgcagcaggggagagcgtccaaaggaagggctgcgccccagggcctctgggagagagaatctttcccctattctgtacatgtgaccccagagccccgctacggatagtgccagctgaaagttag

SEQ ID NO: 133106 - DNA, 1263 bp, synthetic construct
  misc_feature 1..1263: note = Description of Artificial Sequence: Synthetic coding sequence
  source 1..1263: mol_type = other DNA
atgtggtggcgtgatttaacaaggctccgtctgtggctcaagagggaagcaattcctggggagggcagaaaggcagccaaggtgaacgcaggggtgggagaaaagggcatctatactgcttcaagtaggggcggcccaccatccgctaggagtaaagccgtgactgtagtggccgagggcgcagcctcaagaagctggctgagtatggacgcaccagaactcggcccagggctggtggagagactcgaacaattagccacctgcccactttgcgggggttccttcgaggatcccgtactcctggcttgcgagcattccttttgcagggcttgtcttgcaagacgctggggaactcccccagccaccggcacagaagcgtcaccaacagcgtgcccgtgctgcggccttccatgcccaaggcgttctctcagatctaacgtaaggctagccgtggaagtgagaatttcaagggaattgcgggaaaagcttgcagagcccggagctagagccgggcggcgtcgtgggggacgtatacccactatgggttgcttggacctgccaggcgaggatatgcgtaagacatggcgccggtttgaggttcccacccctaaatcctccaatagtgaggacgatctgcctgaggactatcccgtggtaaagaaaatgttgcaccggcttactgccgatctcaccctcgacccaggaacggctcacagacggctattgatatcaactgacagaaggtccgttcaacttgcaccccctggcactcctgcccctcccgatggccccaagagatttgaccagttaccagccgtgctcggggctcaagggttcggagcaggcaggcattgctgggaggtggaaacagcagacgcagcatcgtgcagagattctagtggtgaggacgaggacgacgaggagtcgcattatgccgtcggggcagcaggggaatccgtccagaggaagggttgcgttcgcctgtgtcctgccggtgccgtgtgggctgtagaaggccgggggggccgactgtgggccctgacggcccccgagcccacactgctgggaggcgttgagccaccccccagaaggatcagagtggacttggattgggagcgcggccgcgtcgcattttatgacgggagatctctggatctgctttacgccttccaggcccctggccccctaggggaaagaatctttcccctgttttgcacttgcgatcctcgggctcctctgaggattgtccctgcggaatcctag

SEQ ID NO: 133107 - DNA, 1065 bp, synthetic construct
  misc_feature 1..1065: note = Description of Artificial Sequence: Synthetic coding sequence
  source 1..1065: mol_type = other DNA
atgtggtggcgcgacttaaccagactgaggttgtggctgaagcgggaagcaattcccggcgagggacgaaaagccgccaaggtcaatgcgggcgttggggagaaaggtatttacacggcttcctcccggggcggccctccttctgctcgctccaaagctgttactgtggtggcagaaggcgcggcctcccggtcatggttatcaatggacgcccctgagctggggccgggcctcgtggagagactcgagcagctggctacttgccccttatgtgggggttcctttgaagacccagtcttattggcttgcgaacacagcttttgccgcgcctgcctggcacgccggtgggggaccccacccgctaccggaaccgaggcctctcctacagcgtgtccatgctgcggactaccctgtccaaggcgatcactaagatctaatgtgcgcttagctgttgaggtaagaatatcaagagaactccgagagaagctcgccgaaccaggggctcgagctggtcggcgccgcggggggaggattcccactatgggctgcctggatttgcctggggaagatatgcgcaagacatggagaagatttgaggtacccacctcaaagagctcgaacagcgaggacgacctccccgaagactatcctgtggtaaaaaagatgttacatagattgaccgccgacctcacgctggatcctggcaccgcccatcgccggttgttgatttctgcagataggaggtcagtccagctcgctccacccgggacccctgctccccctgacggacctaagcggtttaaccaattgccagcggtactgggggcccagggattcggagcagggaggcactgctgggaggtcgaaactgctgatgcggcctcctgcagagacagtagcggagaagacgctgacgatgaagaatcccactacgctgtaggagctgccggggagtcggtgcagaggaaagggtgcgctccagggcctctgggagagcgaatctttcctttattttgcacctgcgatccgcgcgcccccctgaggatcgtgcctgcagaaagttag

SEQ ID NO: 133108 - DNA, 1263 bp, synthetic construct
  misc_feature 1..1263: note = Description of Artificial Sequence: Synthetic coding sequence
  source 1..1263: mol_type = other DNA
atgtggtggcgagacctgacccgtctgcggctctggctcaaacgtgaggcaatcccaggtgagggaaggaaggccgctaaggtcaacgctggggtgggcgagaagggaatatacaccgcctcctccaggggcggaccgcctagtgcacgttctaaagcagttacagtcgtggccgagggggccgctagccgcagctggctctctatggatgcccctgagctgggacccgggctcgtcgaaaggctggaacagctggccacctgtcccttgtgtggagggagttttgaagatcccgtccttttggcttgcgaacattccttctgtagagcctgcctggcaagacgctggggcacgccgcccgcaaccggtactgaggctagccccacggcttgcccttgctgcgggctcccttgccctcggagatctctcagaagtaacgtccgactggctgtggaggttaggataagtcgggaactgagggaaaagttggccgaaccgggagcgcgagcgggtcggagaaggggaggccggattcctaccatgggctgtttggatctcccgggggaagacatgcgaaagacgtggcggagatttgaggtaccgaccagcaagagcagcaacagtgaagacgacttgcctgaggactacccagttgtcaaaaagatgctccatcgcctcacagcggacctcacgctcgaccccggcacagcacatagaagactgcttatctcagctgacaggaggagcgttcagctggcacctcccggcaccccagccccaccagacggcccaaaaaggtttgatcagctgcccgccgttttaggcgcacaagggttcggtgccgggagacattgttgggaggtggagacagccgacgctgccagctgcagggatagtagcggtgaggatgccgacgatgaagagtctcattacgccgtgggcgccgccggcgaatccgtccagaggaaaggttgtgtccgcctctgcccggccggggccgtttgggcagtgggagggaggggcggaagactgtgggctctcaccgctcctgagcccacgctgctcggtggagttgaaccaccgccgagacgtatccgtgtggatctcgactgggaacggggccgcgtggccttctacgatgggcgttctcttgatctgctatatgctttccaggcaccaggacccctgggagaacgtattttccctctgttctgcacatgcgacccaagggcacctcttagaatagtccctgccgagagctag

SEQ ID NO: 133109 - DNA, 1263 bp, synthetic construct
  misc_feature 1..1263: note = Description of Artificial Sequence: Synthetic coding sequence
  source 1..1263: mol_type = other DNA
atgtggtggcgggatctgactcgactcagattgtggttaaagcgggaggctattcctggggagggtagaaaggccgccaaagtcaatgcaggtgtcggtgagaaaggtatctataccgcgtcctcccgtggaggacctccttccgcgcgttcaaaggctgtcaccgtagtggccgagggagcggcttctcggagctggttgtctatggatgctcctgagttgggcccaggcctggttgagcggctagagcagctggcaacttgccccttgtgcgggggtagtttcgaagaccctgttctgttagcttgcgagcattcattctgtcgcgcttgcctggctcggcggtggggcacacctccagcaacgggcaccgaagcgagccctacagcctgcccctgttgcggactcccttgtcctaggcggagtttgagaagcaatgtcagattggctgttgaggttagaataagccgcgaacttagagaaaagctcgccgagccaggcgccagggctggccggagacgcggcggccgcatacccacaatgggctgtctcgacctaccaggcgaggatatgaggaagacctggagacggtttgaggtgccaacctctaaaagtagcaattccgaagacgacttgccagaggattacccagtggtgaaaaagatgctgcaccgactaaccgccgacctcacgctagatcccggtacagcccaccgacgactgctcatttccgccgatcggagaagtgtgcagttagcaccacccggcactcctgcacccccggatggtcctaagcgcttcgatcagctgccagccgtactaggtgcgcagggttttggcgctggcaggcattgctgggaggtagagacagccgatgcggccagctgtcgcgactcgtctggagaagacgcagacgatgaggagtcccattatgctgtgggcgctgccggggaaagtgtccagaggaaaggttgcgtcaggctttgccccgcaggtgcagtatgggccgtggagggcagaggcggccgcttgtgggcgctgacggcccctgagcccactctgctcggtggcgttgaacctccgcctcgacgaatcagggtggatcttgattgggagagaggtcgggtcgctttttatgatggccggtctctcgacctcctttatgcctttcaggcccccggacctttaggagaaagaatcttccctctgttctgtacctgcgatccaagagcccctttgagaatcgtgcccgctgagtcatag

SEQ ID NO: 133110 - DNA, 1263 bp, synthetic construct
  misc_feature 1..1263: note = Description of Artificial Sequence: Synthetic coding sequence
  source 1..1263: mol_type = other DNA
atgtggtggcgagatcttactcggctgcgcttgtggctcaagcgagaagccatccctggagaaggcaggaaagccgctaaagtaaatgctggcgttggtgagaagggtatatataccgccagttcgcgcggcgggccgccctctgcccgctctaaagccgtcactgttgttgccgaaggtgccgcaagtaggagctggttatcgatggatgctcctgagctgggaccaggactggtggagcgcctggagcagttggcaacttgccctctctgtgggggaagttttgaagaccccgtcctgctggcatgtgaacatagcttctgtcgcgcctgcctagctagacggtggggtacacctcctgcaaccggaacggaggcctctcccactgcctgtccctgttgtgggttgccgtgcccgcggcggagtcttagaagcaatgtcaggcttgctgtggaggttcggatctcccgcgaactccgggagaaattggccgagcccggcgccagagctgggcgaagacgcggtggtagaatccctacaatgggctgcctggacctgcctggggaagatatgaggaaaacctggcgaagattcgaggtccctactagcaaatccagcaactccgaggacgatttaccagaggattatccggtggttaaaaaaatgctgcatcgcctgactgcagatctcactttagaccccggcactgctcaccgtagactattgatctcagccgacaggcggagtgttcagctggctccccctggcactccagcgcccccagacgggcccaagcggttcgatcagctccctgccgtgctgggggcccagggcttcggcgcaggacgccattgctgggaagtagagacggccgacgccgcctcctgtcgagacagttctggcgaggatgctgacgacgaggagagtcactacgccgttggagcagctggggagagtgtacagcggaagggatgcgtgcgtttatgcccggctggtgcagtctgggccgttgaagggcgcggtggccggttgtgggcactgacagccccagaaccaactcttctcgggggcgttgaacccccacccagacgcataagagttgacttagattgggaacgaggtcgggtagctttttacgacggccggtccctggacctgctttacgcatttcaggcgccaggcccactcggtgagcgaatattcccgctcttctgcacctgcgacccaagggctccgctgagaatcgtgccagcggagagttag

SEQ ID NO: 133111 - DNA, 1065 bp, synthetic construct
  misc_feature 1..1065: note = Description of Artificial Sequence: Synthetic coding sequence
  source 1..1065: mol_type = other DNA
atgtggtggagagacttgaccagactgagactgtggctcaagcgcgaggcgattcctggagaaggaaggaaagccgccaaggtaaatgcaggcgtgggtgaaaaaggaatctacacagcttcctcaagagggggacccccctcggccaggagtaaggccgtgactgtggtcgctgagggcgccgcatcacgatcttggctgagtatggatgctcccgagttagggcccgggttggttgagaggctggaacagttggcgacctgccccctgtgcggtggcagtttcgaggatcctgttttgctggcgtgcgagcattctttttgtcgcgcttgcctggccaggagatggggtacgcctcctgctacgggcactgaggcctcccctactgcatgcccctgctgtgggttgccttgtccacgacgctctctgagaagcaatgtgagactcgctgtggaagtgcgaatatctcgcgagctgagagaaaagttggccgagcctggggcccgggccggacggagacgagggggcagaattccaaccatgggctgtttggacctccccggcgaggatatgaggaaaacctggcggaggttcgaagttcccacctccaaaagtagcaattctgaagacgacttgccagaggattaccctgtggtgaaaaaaatgctgcatagacttacagccgatcttacactggaccctggaacagcgcaccggcgactcttaatctcggccgaccgaaggtctgttcagttggccccccctgggactccagccccccctgatggccctaagagattcgatcaacttcctgctgtcttaggagctcagggctttggtgccgggcgacactgttgggaggtggagacagctgatgcggcatcctgcagggatagctccggcgaggatgcagacgacgaagaaagtcattatgctgtgggggcagcgggtgagtccgtccagcgaaaagggtgtgcccccggacccttaggcgagcggatcttccctctcttctgcacctgcgatccccgtgcccccctgaggatcgtccccgccgagagttag

SEQ ID NO: 133112 - DNA, 1065 bp, synthetic construct
  misc_feature 1..1065: note = Description of Artificial Sequence: Synthetic coding sequence
  source 1..1065: mol_type = other DNA
atgtggtggcgcgaccttacccggctgcgcctgtggctaaagcgagaggccatcccaggcgagggacgcaaagcagccaaagtcaatgcaggcgtaggagagaaaggcatttacaccgcaagcagccggggtgggcccccctcagcccgcagtaaagccgtcaccgtggttgccgagggagccgcctcccgcagctggctgagtatggatgcaccggagctcggcccaggactggtagaaagattagaacaactcgccacatgtcctctgtgcggcgggtccttcgaggaccccgtgctgcttgcttgtgaacattctttttgtcgcgcctgcttggcccggagatggggcactccaccagccacagggacagaggcctccccaaccgcctgcccctgttgcggactgccttgtcccagaagaagcctgaggtccaatgtgcggctggcagtggaggtcaggattagcagggaacttagggaaaagctagctgaacccggggcccgcgcaggaagacgcaggggcggccgaattcccaccatgggttgcctcgacttaccaggagaggacatgcggaaaacttggcggcggttcgaggtcccaacttcgaagtccagcaactcagaggatgacctccccgaggattatcctgtggtgaagaaaatgttgcatcgactcactgccgacttgaccctggaccccggaacagcccaccgccggttattgatttctgctgacagacggagcgtccagctcgctcccccaggcactcccgcacccccagacgggcctaagaggttcgaccaactgcccgcggtgttgggagcacaaggcttcggtgccggacgtcactgttgggaagtggaaaccgcagacgcggcttcatgcagggactctagcggagaagacgccgacgatgaggaatcacactacgccgttggggcagctggcgaatctgtccagcggaaaggctgtgcgcctgggccactgggcgaacggatctttccccttttctgtacatgcgatccacgcgcaccactcaggattgtgcctgcagaatcttag

SEQ ID NO: 133113 - DNA, 1065 bp, synthetic construct
  misc_feature 1..1065: note = Description of Artificial Sequence: Synthetic coding sequence
  source 1..1065: mol_type = other DNA
atgtggtggagggacctgaccagacttcggttatggctaaaaagagaagcgatccctggggagggccgcaaggcagctaaagtcaacgctggggtcggtgagaaaggcatttacacagcgtcatctcgcggcggtccccctagcgcccgtagtaaagccgtgacggtagtggctgaaggagcagcctcccggagctggctaagcatggatgcacctgagctaggccctggtctagtagaaagactggagcagttagccacttgccctctctgtggcgggtctttcgaggatcctgtgctcttagcctgcgagcacagtttctgtagggcctgcttagctaggcggtggggcacaccaccggccactgggacggaggcctcgccaactgcctgcccttgctgtggacttccttgcccccggcgtagtttacgctccaatgtgaggctagcagtggaggttcgcatttccagggagctgagagagaagctggctgaacccggtgcccgggcgggtagaaggcgggggggccggatcccaacaatggggtgcctggacctacccggcgaagatatgcggaaaacatggagacgttttgaggtcccaactagtaagagttccaacagtgaagatgacctgccggaagactaccccgtagtcaaaaagatgttgcatcgcctgactgccgacttaacactggacccgggaactgcgcacagacggctgctcatctcggctgatcgtcgatcagtgcagttagctcccccaggaacgccggctcccccggatggcccaaaacgtttcgaccagctccctgctgtccttggagctcaagggttcggagcaggacggcattgctgggaggtggaaaccgccgacgcagctagctgccgggattcgagtggagaggacgcagacgatgaggagtctcactatgcggtaggcgctgccggtgaaagcgtccagcgtaagggctgtgcgcctggtcctctaggcgagagaatttttccgctcttttgtacatgtgatcctagggctcctctaagaatcgtacccgccgagtcctag

SEQ ID NO: 133114 - DNA, 1263 bp, synthetic construct
  misc_feature 1..1263: note = Description of Artificial Sequence: Synthetic coding sequence
  source 1..1263: mol_type = other DNA
atgtggtggagagatttgactcgtctcagactgtggctgaagagagaagccatccccggcgaggggagaaaagctgcaaaagttaatgctggcgttggagagaagggcatctacaccgctagcagccgagggggacctcccagcgcacggtctaaggctgtcaccgttgtcgccgaaggagctgcctctagaagctggctgagcatggatgcacctgagctcggtcccggattggtggaaagactggagcaattagccacatgccctctgtgcgggggttcgttcgaggatcccgtcttgctggcctgcgagcactctttttgcagggcttgcttggctcgcagatggggcacccctccagctacaggcaccgaggcttccccgactgcgtgcccctgttgtgggctgccttgccccagaagaagcctacggagcaatgtgagactggccgttgaggtcaggatttcccgagagctccgggaaaagttggccgaaccaggagccagagccggccgccggaggggaggaagaatcccaaccatgggctgcttggatctgcctggcgaggacatgagaaagacttggcgacggttcgaggtgcctacctccaagagctcaaacagcgaagacgatcttcctgaagattacccagtagttaaaaaaatgctccaccggctaactgctgacttgacactcgacccgggaacagcacacaggagactgctgattagcgcagatcgccggagtgtccagctcgctccaccgggcacacccgcgcctcctgatggccctaagaggttcaaccaattgcctgctgttctaggcgcccagggatttggagctggcaggcattgctgggaagttgaaacagcagatgctgcctcttgccgggatagttctggagaagacgctgatgacgaagagagccactatgctgtgggcgctgcgggcgagtccgtacaacggaagggttgcgtgcggctgtgcccagcaggcgccgtgtgggccgtcgagggtcgaggtggacgtctgtgggctctcaccgctcctgaacctacactccttgggggggtggaacctcctcccagacggatccgagtggatctggactgggagaggggcagagtcgccttttacgacggaaggtctcttgacctgttgtatgctttccaggctccagggccgcttggagagcgaatctttccactgttttgcacctgtgaccctagagctcctctcagaatagtgcctgccgaatcctag

SEQ ID NO: 133115 - DNA, 1263 bp, synthetic construct
  misc_feature 1..1263: note = Description of Artificial Sequence: Synthetic coding sequence
  source 1..1263: mol_type = other DNA
atgtggtggagagatctgacccgcctgagattatggctgaaacgagaggcaatacccggagaaggacgaaaggccgcgaaagtcaacgctggggttggggagaagggcatctataccgcatccagtagggggggacctccttccgcccggagcaaagccgtgactgtcgtggcagaaggggctgcttctcggagctggcttagcatggacgcacccgagttagggcctgggctggttgagaggctggaacagctcgcaacctgccccctgtgtggtggctctttcgaggatcctgtcctgctcgcctgtgaacactcgttttgtagggcatgcctggcccggcgatgggggacgccacctgctacaggaactgaagcaagtccaaccgcgtgtccttgttgtgggctcccatgtcctaggaggagcctcaggtccaacgtgcggcttgccgtggaagttcgaatttcccgggaattacgggaaaagttggctgaacctggtgctagagccgggagaagacgcggcggaagaattcccaccatgggatgtcttgacttgcctggcgaagacatgcgtaaaacctggaggcgttttgaagtgcccacttccaagagctctaattccgaggatgaccttccagaagattaccccgtcgtgaagaagatgcttcatcggttgacggccgatcttaccctcgacccaggtaccgcccacaggcgtcttttaatctccgctgacagacggagcgtgcaattagcaccacccggaaccccagcaccccctgacggccccaagcgcttcgatcagttgccggcagttctaggggcccagggctttggggctggcaggcattgttgggaagtcgagaccgcagacgccgccagctgtagagattcatccggggaggacgctgatgatgaggaaagccattacgcagtaggggctgctggggagtcagtacagagaaaagggtgcgtaaggctttgcccggccggggccgtgtgggctgttgaaggtcggggtgggcgactgtgggccctgacagcgcccgaacctaccctgctaggaggcgtcgagccgccaccacgtaggattagggtggatctagactgggagaggggtcgagtggctttttacgacggccggtccttagatttactctacgccttccaggcacccggtcccttgggcgaacgcatctttcccctcttctgtacttgtgaccctagggcgcctctcaggatcgtgccagcagaaagctag

SEQ ID NO: 133116 - DNA, 1065 bp, synthetic construct
  misc_feature 1..1065: note = Description of Artificial Sequence: Synthetic coding sequence
  source 1..1065: mol_type = other DNA
atgtggtggcgtgacttgaccagactccgtctgtggctgaagagggaagccatacctggcgaggggaggaaagccgcgaaggtcaatgccggggtgggagaaaaaggcatctacaccgcaagcagcaggggaggcccacccagcgcccggtccaaagctgtgaccgtagtcgcggagggtgctgctagcagatcttggttgagtatggatgcccccgagctcgggccaggactggttgaacgccttgagcagcttgcgacatgccccctgtgcggtggatcttttgaagaccccgtccttcttgcctgcgaacactccttttgtcgagcgtgcttggcaagaaggtgggggactcctcccgccactggcacagaagcatcccctaccgcctgcccatgctgcggcctgccctgccccaggagaagcttacggagcaatgtgcgcctagcggttgaagttaggatatctagagagctgcgcgaaaagctggctgagcccggagctagagctggacggcgcaggggaggcaggattcccacaatggggtgccttgatctgcctggagaggacatgcgcaagacctggcggcggtttgaagtcccaacttctaagagcagcaatagcgaggacgacttgcctgaggactaccccgtggtgaagaaaatgctgcataggctgacggctgatttgaccctggatcctggaaccgctcatcgcagactcttgatcagcgccgatcggcgatctgtgcagcttgctccgcctggtacacctgcgccccctgacggaccaaagaggtttgaccagctccccgccgtattaggtgctcagggctttggagcgggccggcactgttgggaggttgaaaccgccgacgcagcgagctgtagagacagctctggcgaagatgctgatgacgaagagagccattacgccgttggggccgcaggcgagtctgtgcagagaaaaggatgtgcccctggtcctctgggggagcgcatcttccctctgttttgtacgtgcgatcccagggccccgctgagaatcgtgccggctgaatcctag

SEQ ID NO: 133117 - DNA, 1263 bp, synthetic construct
  misc_feature 1..1263: note = Description of Artificial Sequence: Synthetic coding sequence
  source 1..1263: mol_type = other DNA
atgtggtggagggatttgacccgactccgactttggttgaaacgggaagccatacctggcgagggccggaaggccgctaaagtgaatgctggcgtcggcgaaaaagggatttatacggcatcctcccgtggcggcccaccttccgcaaggtccaaagcagtcacggtcgtagccgagggcgctgcatcccggagttggctgagcatggacgcacccgagcttggccccggcctggtggaaaggctggagcagctcgccacctgcccgctgtgtggtggctcatttgaagatccggttctgctggcatgcgaacattccttctgcagggcatgcttggctaggagatgggggacccctcccgctaccggaaccgaagcctcacccaccgcctgtccctgttgcgggcttccctgccccagacgatctcttagatctaacgttaggctggctgtcgaagtgcggatttcccgggaattaagagagaagctcgcagaaccaggcgctcgggccggccgcagaaggggcggccgaatccccaccatgggatgcttggatctgccaggggaggacatgaggaaaacatggcggcgttttgaggtccccacttcaaagagttctaactcggaagatgacctgcccgaggactatcctgtggtcaagaagatgctgcaccgacttaccgccgacttaaccctggatcccggaactgcccatcgtaggctgctcatctcagctgatcgtcggtctgtccagttggccccccccgggacgcctgccccgcctgatggcccgaagcgcttcgatcagctcccggccgtgctcggtgcccaaggattcggggcggggcggcactgctgggaagtcgagactgccgatgcagctagctgccgggatagctctggtgaggatgcagatgacgaggaatctcactatgctgtaggagcagccggggaatccgttcagagaaagggctgtgttaggctgtgtcccgccggtgccgtatgggctgtagaggggcgcgggggacgtctttgggcactgactgcccccgaacccacattattgggcggtgttgagccccctcccaggcggattcgggttgaccttgactgggaacgcggtagagtggcattttacgacggacggagcctcgatctgctgtacgcgtttcaggccccaggccctcttggcgagagaatcttcccattattctgtacctgtgaccctcgagcccccctccgtattgttcctgctgaatcatag

SEQ ID NO: 133118 - DNA, 1065 bp, synthetic construct
  misc_feature 1..1065: note = Description of Artificial Sequence: Synthetic coding sequence
  source 1..1065: mol_type = other DNA
atgtggtggcgagacttgacccgtctccgactttggctcaaacgtgaggccatccccggtgagggacgcaaggctgccaaagtgaacgccggggtaggagagaagggtatatacacagcatcctctagaggaggtcctccaagcgctcgaagcaaggccgtcacagtcgtagcagaaggagctgcaagcaggagttggttatcaatggatgcccccgaactcgggccaggcctcgtagagagactggagcagctggccacctgtccgctgtgtggcggaagcttcgaggatcccgtacttttagcgtgtgagcactccttctgtcgtgcctgtttagcacgcagatggggcacaccccccgcaacaggcacagaagcctcccccacagcctgcccctgttgcggtctcccctgtcctcgtagaagccttagatccaatgtccggctggctgtggaagttcgaatcagcagagagctgcgagaaaaattagccgagccgggcgctcgagccggaaggcgacgcggaggtcggattcccaccatgggatgtctggatctgcccggcgaggacatgcgaaaaacctggcggcgcttcgaagtgcctactagtaagtcctcaaattcggaagacgatcttccagaggactaccccgttgtcaagaaaatgctccaccgactgacagccgatctgacactggaccccggcaccgcccaccgacgcctcttgattagcgccgacagacgcagcgtccaacttgcccctccggggacgcctgcgccccctgacggtcccaaacggtttgaccagctgcccgctgtgctgggtgcccagggatttggcgccggccgccattgctgggaagtcgagacagccgatgccgcctcttgtcgtgattcttcaggcgaagatgccgacgacgaggaatcccactacgctgtgggggcagccggggagagtgtgcagcgcaaggggtgtgcccctggccctcttggtgagcgcatcttcccgctgttttgcacgtgcgatccaagggcccccctgcggatcgttccggcagagagctag

SEQ ID NO: 133119 - DNA, 756 bp, synthetic construct
  misc_feature 1..756: note = Description of Artificial Sequence: Synthetic coding sequence
  source 1..756: mol_type = other DNA
atgtggtggagagatttaactcgtctaagactttggctcaagcgagaggcaatacctggggaaggacgcaaggcggccaaggtgaacgcaggagtcggtgaaaaaggtatttacacagcatcaagccgcggcgggcctccaagtgccagaagtaaggccgtgactgtggtggctgaaggggcagccagccgctcctggttgagcatggatgcaccagagcttggacctggtttggtagaacggttggagcagttggccacctgtcccctatgcgggggctcattcgaagaccccgtgcttctcgcctgcgaacactcattctgccgagcatgccttgcgagacggtggggcactccacctgctactggtacagaggccagtcctaccgcttgcccctgctgcggtctgccctgccccagacggtctctcaggagcaatgtccggctggctgttgaggttcgcatttctcgcgaattactttttggaggtggtattccccatagcttcctgggcactcattcacatgcgcactgtcgttctattaattccaatcctcatttcagacccaagatcatgcgtccacacctagtctctaccttccctagaccctgctctaagccaaacccttttttgccaagcggtagtcagaatctgttgagccccaccgccaccacagttctgccagattttagccactctaaccacagcagacccgcaatgggtaatagaccctctccctcggtcttagttaaatag

SEQ ID NO: 133120 - DNA, 756 bp, synthetic construct
  misc_feature 1..756: note = Description of Artificial Sequence: Synthetic coding sequence
  source 1..756: mol_type = other DNA
atgtggtggagggacctcacaagactcagattgtggctcaaacgagaagctattccaggggaaggacgcaaggccgcaaaagtcaacgccggagtgggcgagaaaggcatctatacggctagctcccgtgggggccctccatccgcacgcagcaaggctgttacagtcgtcgctgagggcgcagcttcacgctcatggctgtccatggacgcgcccgagctcggtcctggccttgtagaacgtcttgagcagctggcaacatgtcccttgtgtggggggagcttcgaggatcccgtgctgcttgcctgtgagcattcgttttgtagagcatgtctggcccggagatggggtacgccccctgcaaccggcacggaggcatctcctactgcctgcccatgctgcggacttccttgccctcgtcggtcacttcgctctaatgtgcgcctggctgttgaagtcagaatctctagagagctgctctttggtggcggcatccctcactcttttcttgggacccattctcacgcgcattgcagaagtatcaactccaatccccattttcgtccaaaaatcatgcgaccccaccttgtcagcactttcccccgcccttgcagcaaacccaatcccttccttccgagtggcagccaaaacctcctgtcaccaacagcaaccaccgtcctgccagactttagccacagcaaccactcaagaccagccatgggaaatagaccttccccatctgtcctagttaagtag

SEQ ID NO: 133121 - DNA, 756 bp, synthetic construct
  misc_feature 1..756: note = Description of Artificial Sequence: Synthetic coding sequence
  source 1..756: mol_type = other DNA
atgtggtggagagatctgacgcgactcaggctctggctgaagcgcgaggccatccccggagaaggcagaaaggctgctaaggtaaatgccggcgtcggggaaaaagggatctatactgcgagttctagaggaggcccaccctcggccaggtcgaaggctgtgacagtggtggccgagggagccgcaagccggtcatggctctctatggatgcccctgagcttggtcctgggctggtcgagcggctggaacagcttgcaacctgccccctgtgcggcggttcttttgaagatcctgtgctgcttgcttgtgaacacagcttttgtcgagcttgcttggcaaggcgctggggtaccccccctgctactggtaccgaagcgtctcccaccgcctgtccttgttgcggcctcccctgtcccagaagaagcctgcgatcgaatgtcagactagccgtggaggtgcgcatatctcgggagcttctgtttggcgggggaattccacattccttcctcggaactcactcacatgcccattgcagaagcatcaactctaatccccactttcgccctaagataatgcgaccacatctggtgtcaacgtttcctaggccatgtagtaaacctaatcccttcctcccgagcggatctcaaaatcttcttagtccgaccgccacaaccgtcctacccgatttttcgcactccaaccactccaggcctgccatgggtaacaggccaagtccctcagtgcttgtgaaatag

SEQ ID NO: 133122 - DNA, 756 bp, synthetic construct
  misc_feature 1..756: note = Description of Artificial Sequence: Synthetic coding sequence
  source 1..756: mol_type = other DNA
atgtggtggagagatttgacacggcttagattgtggttgaaaagagaagcgatccctggagaggggcgaaaggccgcgaaggtgaatgcaggtgtgggggagaaggggatttacaccgcctccagcaggggcggtccaccatcagctagatctaaggcagtcactgttgtggcagagggggccgccagccgttcttggttgagcatggacgcacccgagctcggtccaggactggtcgagaggctcgagcagttggcgacatgccctctgtgtggaggaagcttcgaggatccggtcctgctcgcctgcgaacactctttttgtcgggcctgtcttgcaaggagatgggggactccccccgcaacagggaccgaggcctctccaactgcctgcccatgctgtggtctcccctgccccagacggagtctccggagtaacgtccggctggcagttgaagtgcggatttctcgcgaactactgttcgggggcgggataccgcacagctttctggggacccactctcacgcccattgtcgatctattaactctaacccgcattttcgcccaaagatcatgcgcccacatctcgtttctaccttcccaaggccctgtagcaagccaaatccgttcttgccatccggcagtcaaaacctactgtctcccacggccaccactgtactaccggatttttcacactcaaaccatagcaggccggcgatgggaaatcgacccagtccttcagtgctggtgaaatag

SEQ ID NO: 133123 - DNA, 756 bp, synthetic construct
  misc_feature 1..756: note = Description of Artificial Sequence: Synthetic coding sequence
  source 1..756: mol_type = other DNA
atgtggtggcgggacctcactagattaagactctggctaaagagagaagccattcctggcgagggacggaaagccgccaaggtcaacgcgggcgtgggtgagaaaggaatctacacggcctcaagtcgaggtggtcctccaagcgcccgcagtaaggcagtaacggtagtagcagagggtgccgccagtcgctcttggctaagcatggacgcccctgaactagggccgggactggtggagaggttggaacagctcgccacctgtccgttgtgtggtggcagcttcgaggatcctgtcctcctcgcgtgtgagcactcattttgtcgtgcttgtctcgctaggagatggggcactcctccagctacgggaactgaagctagtccgacagcttgcccatgctgcggtctcccatgcccccgccgctccttgcgctccaatgtgagactggctgtggaggtgcgcatttctcgcgaactgctattcggaggcgggattccacactcgtttcttggtacgcatagccatgcccactgcagatccatcaacagtaacccccattttaggcctaagatcatgaggcctcacttggtctctaccttcccacggccttgcagtaagcctaacccctttctgccgagcggtagccagaatctactgtccccaaccgccaccacagtgctgccagacttctcccactccaatcactctcggccggctatgggtaatagacccagtccctctgttctcgttaagtag

SEQ ID NO: 133124 - DNA, 756 bp, synthetic construct
  misc_feature 1..756: note = Description of Artificial Sequence: Synthetic coding sequence
  source 1..756: mol_type = other DNA
atgtggtggagagatctgacccgactgaggctttggctgaaaagggaggccatcccgggtgagggccgcaaggcggcaaaagtcaatgccggtgtcggcgagaaaggaatttatactgcctcaagtagaggtggccctccctctgcgcggtctaaagcagttaccgtggtggctgagggcgcggcctctcgatcctggctttcaatggatgcacctgagctgggacccggtctcgtcgaaaggttagaacagctcgccacctgtcctctgtgtggtggctcgttcgaggaccctgttttgctggcatgtgaacacagtttttgcagggcatgcctcgctagacgttgggggacgcccccagccaccggaacagaagctagtccaaccgcatgcccttgctgcggcttgccttgtcctcgcagaagtctgaggtcaaatgtgcggcttgctgttgaagtacggatttcacgcgaattactgtttggcggtggaatcccacattcttttctgggtactcactcccacgcacactgcaggtccatcaactccaatccccatttccgccccaagatcatgcgtccccaccttgtcagtacattcccgaggccttgcagcaaacccaatccctttctaccctctggttcccaaaatctgctctcacctaccgctgctacagtcctacctgacttcagccacagtaaccattctaggcccgccatgggtaatcggccttctccaagcgtcttggtaaagtag

SEQ ID NO: 133125 - DNA, 756 bp, synthetic construct
  misc_feature 1..756: note = Description of Artificial Sequence: Synthetic coding sequence
  source 1..756: mol_type = other DNA
atgtggtggagagatctcacccggctgaggctctggctaaagcgcgaggcgattccaggtgagggacgcaaagccgccaaagttaacgcaggcgtaggtgagaagggaatctacactgcaagttctaggggtggcccgcccagtgcaagatctaaagcggtgacagtggtcgctgagggggcagcaagccgaagttggttatctatggatgcacccgagctagggcccggccttgtcgaaagactggagcaactggccacatgtcctttatgcggcggaagcttcgaggacccggtgctgcttgcctgcgagcattctttttgcagggcttgcttggccaggcggtggggaaccccccctgcaaccggcactgaagcgagcccgactgcctgtccatgttgcggattgccgtgtcctagaaggagtctccgcagcaacgtccgactagccgtggaagtccgcatctctcgggagcttctgtttggtaggggcatcccacactctttcctcggcacacactcacatgcacactgcaggtccatcaattctaacccacactttcgacctaagatcatgcggccccatcttgtgagcactttcccacacccatgcagcaaaccaaatccatttttgccgagcggcagtcaaaatcttctgagccctactgccacaaccgtattgcctgactttagtcactctaaccacagtagacccgccatgggcaaccgaccatctccatctgttctggttaaatag

SEQ ID NO: 133126 - DNA, 573 bp, synthetic construct
  misc_feature 1..573: note = Description of Artificial Sequence: Synthetic coding sequence
  source 1..573: mol_type = other DNA
atgagcactagaaaaagacgagggggcgcaatcaactccaggcaagcccagaaaagaacccgtgaagcaacctcaactcccgagatcagcctggaggcagaaccaattgagctcgtagagaccgccggcgacgagatcgtcgacttgacctgcgagagcctcgagccagttgtcgtggacctgacacacaatgactccgtggttatcgttgacgagcggcggcgcccacgcaggaatgcaagaaggcttccacaggaccacgccgacagttgtgtggtgtcttctgacgatgaagaactatcaagagatcgagatgtttacgtgacaactcacactccccgcaacgcaagagacgagggcgccactggcttgcgacctagtggcacagtgtcttgccccatttgtatggatgggtactcagagatcgtccaaaacgggaggctgatagtttcaacagagtgtgggcacgtgttctgtagccagtgcctgcgggactccctgaagaatgctaacacctgtccaacatgtcgcaagaagatcaaccataagaggtaccatccaatatacatttag

SEQ ID NO: 133127 - DNA, 18 bp, synthetic construct
  misc_feature 1..18: note = Description of Artificial Sequence: Synthetic coding sequence
  source 1..18: mol_type = other DNA
atgtctacgagaaaatag

SEQ ID NO: 133128 - DNA, 573 bp, synthetic construct
  misc_feature 1..573: note = Description of Artificial Sequence: Synthetic coding sequence
  source 1..573: mol_type = other DNA
atgtcaacacgtaaacgaagaggcggagcaatcaatagccgacaagcacagaagcgcacccgggaagccactagtacacccgagatttctctggaagctgagcccattgaactcgtcgagactgctggggacgaaattgtcgacctgacgtgtgagtcacttgagcctgtcgttgtggacctgacccataatgacagcgttgtgattgtggacgagcgccgcagacccagacgcaacgcacgccgactccctcaagaccacgccgattcgtgtgtcgtgagctcggacgatgaagagctgtcaagagacagagatgtgtatgtcacgacgcatacacccagaaatgccagagacgagggcgctaccggactgagaccaagtggtactgtgagctgtcctatttgcatggatggctattcagagatagtgcaaaatggccgactgatcgtcagcacagaatgtggccacgtgttctgcagccagtgcctgcgagatagcctcaaaaatgccaacacatgcccgacgtgtcggaaaaaaatcaatcacaagaggtatcatcctatctacatctag

SEQ ID NO: 133129 - DNA, 573 bp, synthetic construct
  misc_feature 1..573: note = Description of Artificial Sequence: Synthetic coding sequence
  source 1..573: mol_type = other DNA
atgtccacgcggaaaaggcgagggggagcaattaattccagacaagcccagaagcgcacgcgggaagccacaagcactcccgagatctccctcgaggcagagccaatcgaattagtggaaaccgctggcgatgagatcgtggacctgacttgtgaaagcctggagcctgtggtggtagacctgacccacaatgatagcgttgtcatcgttgacgaacgtagacgccctcgtcggaacgcccgtaggctcccccaggaccacgcggactcctgcgtcgtctctagtgatgacgaagagctgagccgggaccgggacgtttatgtgacgactcacactccccgcaatgctcgggatgagggagccacaggactccggccctccgggaccgtctcttgcccgatctgcatggatggctattcggagatcgtccaaaacggacggctgattgtgtcaactgagtgtggacatgtgttctgctctcagtgccttcgcgatagtttgaagaatgccaacacttgccccacatgtcgcaagaagattaatcacaagagatatcatccaatttatatctag

SEQ ID NO: 133130 - DNA, 165 bp, synthetic construct
  misc_feature 1..165: note = Description of Artificial Sequence: Synthetic coding sequence
  source 1..165: mol_type = other DNA
atgtcaactaggaaaaggcgtggaggtgcgatcaacagtcggcaggcacagaaacgtactagagaagccacttccacgcccgagatttcactggaagctgagcctatcgaactggtcgagaccgctggtgatgaaatcgtcgatttaacctgcgaatctctgtag

SEQ ID NO: 133131 - DNA, 345 bp, synthetic construct
  misc_feature 1..345: note = Description of Artificial Sequence: Synthetic coding sequence
  source 1..345: mol_type = other DNA
atgtctacccggaaaagacgggggggtgccataaactcacggcaggcccaaaaacgtacacgggaagctacatctaccccggaaatatccctcgaagcggaacctatcgagctcgtggaaacagcaggcgatgaaatcgtcgaccttacctgtgagtcactggagcccgttgtggtcgatctcactcacaatgattctgtcgttgtatccgtgggcgtcccacaggtgctgtccgtcgtcccgtcagcttggaccgacacccaaagatcatgccgtatggacgtttcatcttttccccaaaatgccgcaatgtctagtgtcgcttctgcaagcgtgatcccttag

SEQ ID NO: 133132 - DNA, 573 bp, synthetic construct
  misc_feature 1..573: note = Description of Artificial Sequence: Synthetic coding sequence
  source 1..573: mol_type = other DNA
atgagtacacgaaaacgacgggggggagcgatcaattcaagacaggctcagaaaaggacaagggaagccacctctacacccgagatcagcttagaagcggagcctattgagcttgtggaaaccgctggcgacgagatcgtagatctgacatgtgaaagcctcgagcccgtggtggtggatctcacccataacgattctgttgtcgtgtctgacgaacggaggagaccacgccgcaacgctcgtagactaccacaggaccacgctgactcatgcgtggtatccagcgatgacgaggaactgagcagagatagagatgtgtacgttaccacccacactccacggaatgctcgggacgaaggtgcaaccgggctgcggccctcagggactgtcagttgtcctatctgcatggatggctactcagagatagtgcagaacgggagattgattgtatccactgagtgcggacatgtattttgttcccagtgcctgagagactcccttaaaaatgcgaatacgtgcccgacgtgccgcaagaaaattaaccacaaaaggtatcatccaatctacatttag

SEQ ID NO: 133133 - DNA, 342 bp, synthetic construct
  misc_feature 1..342: note = Description of Artificial Sequence: Synthetic coding sequence
  source 1..342: mol_type = other DNA
atgtccacgcggaaacggcgggggggagctattaatagtagacaggctcagaaacggacacgtgaggctacgtctacaccggaaatctccttggaggctgaacctatagagctggtggagactgccggtgacgaaatcgtcgacttaacatgcgagtctctggagcctgtggtcgtggacctgacccataatgattcagtggttatcgtcgacggtccacaggttctctccgtggtcccatccgcttggacagatacccagaggtcttgtcgcatggacgtctccagcttcccccaaaatgctgctatgagtagcgtggcttcggcctccgtgataccatag

SEQ ID NO: 133134 - DNA, 2352 bp, synthetic construct
  misc_feature 1..2352: note = Description of Artificial Sequence: Synthetic coding sequence
  source 1..2352: mol_type = other DNA
atgtcaggcggccatcagttgcagttggccgccctgtggccctggctgcttatggcaacgttgcaggccggctttggacgcaccggattggtacttgcagccgccgtcgaatctgagagaagtgccgaacaaaaagcgatcattagagtgatcccattaaagatggatcccactgggaaactgaacctgaccctggagggcgtcttcgcaggggtggcagaaataacacccgccgaggggaaactgatgcagtctcaccccctgtacctgtgcaacgcttctgacgatgataacctggagcctggattcattagcatcgtgaagctggagagcccacggagagcacctcggccttgtctgtcgctggcgtcaaaggctcggatggcaggcgagaggggcgcttccgccgttctgttcgacattactgaggatcgcgctgccgctgagcagctacagcagcctctgggactcacctggcctgttgtcctgatctgggggaacgatgcagagaaactcatggaattcgtgtataaaaaccagaaagcccacgtcaggatcgagttgaaggagcctcctgcgtggccagattatgacgtgtggattctgatgacagtcgtggggactatctttgtcattatcctggcgtctgtgcttaggatccgatgtcggcccaggcacagtagacccgacccccttcaacagcgcacagcctgggccatctcgcagctggcaactagacgataccaagcctcctgtcgccaggcgcggggtgagtggcctgactctggaagcagttgttcatcagcccccgtgtgtgccatctgcttggaggaatttagcgaagggcaggagctccgcgtgatttcatgtctgcacgaattccatcgtaactgcgtggacccttggttgcaccagcatcgaacctgtcccctatgcatgtttaatatcacggagggggattctttcagccagtctctcggacccagccggtcatatcaagagccaggacggagactgcacctgatacgccagcaccccggccatgcccattatcatttgcccgcagcctatctattgggaccgagtagatcagccgtagctcggccgccaagacctggtccatttctgccatctcaggaaccagggatgggccccaggcaccaccgattccctcgcgctgcgcacccaagagctccgggtgaacagcagcgcctggcaggcgctcagcatccctacgcccagggttggggtctgtcacatctacagtccacctcacagcatcccgccgcgtgtcccgtcccactgaggagggcgcgcccaccagactcttctgggagtggggagtcatactgtacagagcgcagcggttacttagctgacggacccgcaagtgattcaagcagtggtccatgccacggttcctccagtgactcagtggtcaactgcaccgacatttctcttcagggcgtgcacggttccagttctactttttgcagcagtttgagttctgattttgatcctttggtctattgctcccccaaaggggatcctcagcgggtggacatgcaaccatcagttacatcacggcccaggtccctggatagcgtggttcctactggagagactcaggtcagcagccacgtgcactaccatcggcacaggcaccatcactacaagaagcggttccagtggcatggtaggaagccgggcccagaaaccggggtgccccagagtagaccccctatcccacgtacacagcctcagcctgagcctccatctcccgatcagcaagtgaccagatccaattccgctgctcccagcgggcgtctgagcaatccccagtgccctagggcactccccgagccagcaccaggcccagttgatgccagcagtatatgtccttctacaagttctctgtttaatctgcagaagagctcactttcagccagacatcctcagaggaagcgtaggggcggaccctctgaacccactccaggctcaaggccacaggacgccacagttcatcccgcctgtcagatcttccctcattatactccaagcgtggcatacccctggagccccgaggctcatcctctcatttgcggcccacccggtcttgacaagaggctcctgcctgagacgccagggccatgctactccaacagccagccagtctggttgtgcctgaccccccgtcagcccttggagccacatcccccgggggaaggacccagcgagtggtcatcggacaccgctgaaggccgaccatgcccctaccctcactgtcaggtgctctcagcacagccaggcagtgaggaagaactagaggaactctgcgagcaggctgtttag

SEQ ID NO: 133135 - DNA, 2229 bp, synthetic construct
  misc_feature 1..2229: note = Description of Artificial Sequence: Synthetic coding sequence
  source 1..2229: mol_type = other DNA
atgtcagggggccaccagctccagctagcggccctttggccatggttgctaatggctactcttcaggccggattcggtagaacgggtctcgtgctggctgccgcggtcgaaagcgagcgttcggctgagcagaaggccataattcgggtcatccctcttaaaatggatcccaccgggaagttgaatcttacactggagggggtctttgctggcgtggcagaaatcactcccgcagagggcaagctcatgcaggctcggatggcaggcgagcggggtgctagcgcggtgttattcgatataacagaagatagggccgccgccgaacagctgcaacagcctctggggttaacctggccagtagtcctgatatggggaaacgacgcagagaaattaatggagtttgtctataagaatcagaaggcccatgtgaggatcgagttgaaggaaccgccagcctggcccgactacgatgtgtggattctgatgactgtcgtgggaaccatcttcgtgataatactagcgtccgtgctacggattcggtgtaggcccaggcattccaggcccgacccattacagcagagaaccgcctgggcaatatctcagctggctactagacgctatcaggcaagttgccgtcaagcccggggtgaatggccagattccggcagcagctgttcaagcgccccagtatgcgctatctgcctggaggaatttagtgaaggtcaggagttgcgggtgatcagctgcctgcacgagttccaccgcaactgcgtggatccttggcttcaccagcatagaacatgcccactatgcatgttcaacatcaccgaaggggactccttcagtcagtcactggggccctctaggagctatcaggagcctggccgccgactccacttgatcaggcagcatcctggacacgctcactatcatcttccagccgcctacttgctaggtccaagcagaagcgccgtcgccaggcccccacggcccggacctttcctcccatcccaagaacctggaatgggaccgagacatcacagattccctcgggccgcgcatcccagggccccaggcgaacagcaaagattagctggcgctcaacacccctacgcccagggatggggattgtctcacctgcaaagtacctcgcaacatccagctgcctgcccagtgccgctacgccgggcaagaccccctgatagctcaggatcaggggagagttactgtaccgaacgctccgggtacttggcagacggccctgctagtgacagcagttcggggccgtgccacggctcttcttcagactctgtggtgaactgtacagatatcagcttgcagggtgtccatggctcctcttctacgttctgcagctctctcagttctgatttcgatccattagtatattgtagtcccaagggcgaccctcaacgagtcgatatgcagcctagtgttaccagcaggcctcggtctctcgatagcgtggtgcccacaggggagacccaggtttctagtcacgtccattatcaccggcatcgccaccatcattataagaagcggttccagtggcatggtcgtaagccaggccctgagactggtgtcccccagtcccgccctcctataccacggacccagccacaaccggagccgccaagccccgaccagcaggtgacacgatctaactccgctgctccatctggacggctgtcaaatccccagtgtccgagagccctgccagaaccagcacccggacccgtcgacgcatcctccatttgtcccagtacgtcttccttgttcaatctgcagaaatcaagcttgagtgctagacatccacagaggaagagacgcggaggacccagtgagcccacaccaggttcccgaccgcaggacgctactgtccaccccgcatgtcagatctttcctcactacaccccttcagtagcttatccatggagccccgaggcacatcccctcatttgcggccctcctggactggacaaacgcctgctgcctgaaactccagggccttgctattctaactcgcagcctgtatggctgtgtctgaccccaagacaacccctggagcctcatcctcccggggagggccctagcgagtggagctcagatactgccgaaggccgaccttgcccttaccctcattgtcaggtgctgtccgcccaaccaggcagtgaagaagagctggaagagctctgtgaacaggcagtctag

SEQ ID NO: 133136 - DNA, 543 bp, synthetic construct
  misc_feature 1..543: note = Description of Artificial Sequence: Synthetic coding sequence
  source 1..543: mol_type = other DNA
atggccgctgctgaggaggaagacggggggcccgaggggccgaacagggagagggggggcgccggggccacatttgaatgcaatatctgcttggaaaccgctcgcgaggctgtagtctctgtttgcgggcacctgtactgctggccctgcctgcaccagtggctggaaactagacccgagcgtcaagagtgtcctgtttgtaaagccggaatcagtagagagaaggtggtgcccctatatggcagaggtagtcagaagccccaggacccacgactaaaaacccctccgagacctcagggacagcgcccggcacctgagtcccgcggcggatttcaaccgtttggagacaccggaggatttcatttctccttcggagtgggcgctttcccctttgggtttttcacaaccgtgtttaacgcccatgaacctttccgtcgcggcacaggggtcgatctgggccagggccatccagcctcatcttggcaggacagcctgttcctttttcttgcaatattctttttcttttggctcctgtctatctag

SEQ ID NO: 133137 - DNA, 543 bp, synthetic construct
  misc_feature 1..543: note = Description of Artificial Sequence: Synthetic coding sequence
  source 1..543: mol_type = other DNA
atggccgccgctgaggaggaagatggcggtcccgaggggcctaacagggagcgagggggagcaggcgcaacgtttgaatgtaatatttgtttagaaacagctcgcgaggcagtggtctcggtgtgtggccatctctattgctggccctgtcttcatcagtggttagaaacccgccctgagcgccaggaatgtcccgtctgtaaagctggaattagtcgcgagaaagtcgttcccctctatggacgcggatctcagaagccccaagatccccgacttaagacccctcccaggccccagggtcagcggccagcccccgagagccgagggggattccagccctttggcgatacaggcggattccacttcagttttggggtgggggccttcccattcggctttttcaccaccgtgttcaatgctcacgagccctttagacggggaaccggcgtggaccttggccaagggcatcccgcaagttcatggcaggatagcctcttcctcttccttgctatatttttcttcttctggctattgagtatttag

SEQ ID NO: 133138 - DNA, 549 bp, synthetic construct
  misc_feature 1..549: note = Description of Artificial Sequence: Synthetic coding sequence
  source 1..549: mol_type = other DNA
atggcagccgcagaggaagaagatggcgggccagaggggcccaaccgtgagaggggaggagcgggagccaccttcgagtgtaacatctgcctggaaacggcccgcgaggcggtcgttagtgtctgcggccacttgtattgttggccctgcttgcatcaatggctggagacgcgccccgaaagacaggaatgccctgtttgcaaggcagggatctctcgcgagaaagttgttcctctatatggtagaggtagccagaaaccccaggaccctcgactgaagacccccccacgaccacaaggtcagcgacctgcccctgaatcacgcggtgggttccagccatttggggatacagggggcttccacttctcgttcggtgtgggggcctttccattcggatttttcaccactgtgtttaatgcccacgaaccctttcggaggggcactgggccattctctacttccccagcatttttccactacctgatcggaaataccagcagggaatttcgcggtaggatctataacttctggttgccccgcaacctgtag

SEQ ID NO: 133139 - DNA, 543 bp, synthetic construct
  misc_feature 1..543: note = Description of Artificial Sequence: Synthetic coding sequence
  source 1..543: mol_type = other DNA
atggcggccgccgaagaggaggacggtggccctgaaggacctaacagggagaggggaggtgcaggcgctacatttgagtgcaatatctgccttgagacggctcgggaggccgtcgtgtctgtgtgtggacatctgtattgctggccttgcctgcaccagtggctggagaccaggcccgagagacaggagtgtccagtctgtaaagccggtatcagccgcgaaaaggtcgtgcctctttacggaaggggcagccagaagccgcaggatccccgccttaagaccccaccaaggcctcaagggcagagacccgcaccggagagccgaggtgggtttcagccatttggggatacgggaggattccacttttctttcggggtcggggctttcccgtttgggtttttcacgaccgtgttcaacgctcatgagccctttcgacggggcacaggcgtcgacctgggccagggacatccagctagttcctggcaggacagtctttttttgtttcttgccattttcttttttttctggctcctctcaatctag

SEQ ID NO: 133140 - DNA, 543 bp, synthetic construct
  misc_feature 1..543: note = Description of Artificial Sequence: Synthetic coding sequence
  source 1..543: mol_type = other DNA
atggcagctgccgaagaagaggatggaggtccagagggaccaaatagggaaaggggaggtgcaggtgccacatttgaatgcaacatctgtctcgaaacagccagggaggccgtggtcagcgtctgcggtcacctctattgctggccctgcttacaccagtggcttgaaacgaggcctgaaaggcaggaatgtcccgtatgcaaggccggcatttctcgggagaaggtggttccactgtacggtcggggcagccaaaagccacaggatcctagactgaagaccccccccagaccacagggtcagcgcccagcccccgaaagcaggggcggctttcaaccatttggggatacaggtggattccacttctctttcggcgtcggcgctttcccgtttggcttcttcaccacagtctttaacgcccatgaaccatttcggaggggcactggggtagatctgggacagggtcatcctgcaagttcatggcaagacagtttgtttctgttccttgcgattttcttcttcttttggttacttagcatctag

SEQ ID NO: 133141 - DNA, 543 bp, synthetic construct
  misc_feature 1..543: note = Description of Artificial Sequence: Synthetic coding sequence
  source 1..543: mol_type = other DNA
atggccgcagccgaggaggaggatggggggccggagggccctaacagagagagggggggtgctggcgcaacttttgagtgcaacatctgtctagaaaccgctagggaggccgtagtgagcgtgtgtggccacctctattgctggccgtgccttcaccagtggctcgagacaagaccggagcggcaggagtgccctgtgtgtaaggccgggatatctcgcgagaaagtggtgccgctttatgggcgcggcagccagaagccgcaggacccacggctgaagacacctcctagaccacagggccagaggcccgcgcctgagtctcgcgggggatttcagcccttcggagacaccggaggcttccacttctcatttggagtgggcgcattcccctttggcttcttcacaaccgtttttaacgcacacgagcccttcagacgcggaacaggggtggacctcggccagggccatcccgcaagctcctggcaggactcactgtttttgtttctggcgatcttttttttcttctggctgctcagtatctag

SEQ ID NO: 133142 - DNA, 543 bp, synthetic construct
  misc_feature 1..543: note = Description of Artificial Sequence: Synthetic coding sequence
  source 1..543: mol_type = other DNA
atggctgccgcagaggaggaggacgggggcccggaggggcccaacagagaacgcggcggggccggcgccaccttcgaatgcaacatatgcttagagactgcaagggaagccgtcgttagtgtttgtggacatctgtattgctggccctgtttacaccagtggctcgaaaccagacctgaacggcaggagtgccccgtgtgcaaggccggaatatcacgagaaaaggtcgttccactttatggtcgagggtcacaaaagcctcaggacccgagactgaaaaccccgccacggccgcagggtcagcggccagctccagagagccggggagggttccagcccttcggcgatacagggggcttccacttttcgttcggggtcggcgccttccccttcgggttttttacaactgtgtttaacgctcacgagcctttccgaaggggaaccggagtggacctgggccaaggacatcccgcgagtagctggcaggatagtttgtttcttttccttgctattttctttttcttctggttactgtctatctag

SEQ ID NO: 133143 - DNA, 543 bp, synthetic construct
  misc_feature 1..543: note = Description of Artificial Sequence: Synthetic coding sequence
  source 1..543: mol_type = other DNA
atggcagctgccgaagaagaggacggaggccccgagggccccaatcgcgagcgcgggggcgctggcgccacatttgaatgtaatatctgcctggaaacagccagagaggcagtggtgtccgtctgcggtcatctttattgctggccctgcctgcatcagtggctggaaacaagacccgagaggcaggagtgtcccgtgtgcaaagccggcatttcccgcgagaaggtggtgcctctatacggacgtggatctcagaaacctcaggatcctaggctcaagacacctcccagacctcagggtcagagacccgctcctgagagtcggggtggcttccagcccttcggggacaccggcgggttccacttcagttttggcgtgggagcgttccctttcggattcttcaccacagttttcaacgcccatgagccgttccgtcggggcactggcgtagatctgggacaagggcaccctgcttcatcttggcaagacagcctgtttttgttcctggctatttttttcttcttttggctactgtctatttag

SEQ ID NO: 133144 - DNA, 549 bp, synthetic construct
  misc_feature 1..549: note = Description of Artificial Sequence: Synthetic coding sequence
  source 1..549: mol_type = other DNA
atggccgcggccgaggaagaagatggtgggccagagggtcccaatcgggaaagaggcggggccggggccacattcgagtgcaacatctgtctggagaccgccagggaagctgtggtcagcgtgtgcgggcacctgtactgttggccctgccttcatcagtggctcgagacaaggccagagagacaggagtgtcctgtgtgtaaggccggaatctcgcgggagaaggttgtccccctgtatggtagaggaagtcagaagccccaggacccccgcctcaaaacccctcctaggcctcagggacagaggccggcccccgagtccagggggggtttccaacccttcggagacacagggggcttccactttagctttggagttggtgcttttccttttggattttttaccacggtgttcaatgcacatgagccctttcggagggggacagggcctttttcaacaagccccgctttcttccactatctgatcggcaatacatcccgagaattcagagggcgtatctacaacttttggctccctcgcaacctatag

SEQ ID NO: 133145 - DNA, 549 bp, synthetic construct
  misc_feature 1..549: note = Description of Artificial Sequence: Synthetic coding sequence
  source 1..549: mol_type = other DNA
atggccgcagctgaggaggaggatggaggcccggagggcccaaatagagaaagaggtggggctggggcgacgtttgaatgtaatatatgcttagagactgccagggaggcagtggtgtccgtgtgcggccatttgtactgttggccatgtctccaccaatggctggaaacgaggcccgaacgccaagagtgtccagtgtgcaaggctggaatatcaagggagaaagtagtgccactgtacgggagaggctcccagaagcctcaggaccctaggttgaagacaccaccccgcccgcaggggcagaggcctgcccccgaatctaggggggggttccagcctttcggggacaccggggggttccattttagcttcggggtgggtgcatttccatttggattcttcacaaccgtattcaatgcacatgaaccctttagacgcggtaccggtccctttagtacctcccctgcctttttccattacttgatcggcaacacgagccgagagttccgcggcaggatctataatttctggctcccccgaaatctatag

SEQ ID NO: 133146 - DNA, 549 bp, synthetic construct
  misc_feature 1..549: note = Description of Artificial Sequence: Synthetic coding sequence
  source 1..549: mol_type = other DNA
atggcggccgctgaagaggaagatggcgggccagagggcccaaatcgggaaagggggggggcaggtgctacttttgagtgcaatatttgtctcgaaacagcgcgggaggctgtcgtcagcgtctgcggtcatctgtattgttggccttgcctccaccagtggctggagacaaggccagaaagacaggaatgtccagtctgcaaagccggcatttcacgagaaaaggtggtccccctctacggacggggatcccagaaacctcaggatccccgtctgaaaactccgccacggccgcagggacagcgcccagcgccagagagcaggggcggtttccagccgtttggtgatactggcgggttccacttctcttttggagtgggtgctttccccttcggcttctttaccactgtttttaatgctcacgagccttttcggaggggaacaggcccgttcagtacgtccccagcattcttccactatctgataggtaacacttcccgagagttccgagggcgcatctataatttctggctccctcgtaacctttag

SEQ ID NO: 133147 - DNA, 549 bp, synthetic construct
  misc_feature 1..549: note = Description of Artificial Sequence: Synthetic coding sequence
  source 1..549: mol_type = other DNA
atggccgcggcagaggaggaggacggcggacccgaggggcctaaccgcgagcgcggaggtgccggcgctacttttgagtgtaacatctgtttagaaacggcgcgagaggcagttgtctcagtgtgcggccacttgtactgttggccatgtctgcaccagtggcttgagactaggccggaaaggcaggagtgcccagtctgcaaagcaggcatttcaagggagaaagtggtcccactctatggcagaggcagccagaagccacaggacccgcggctcaaaactccccccagacctcagggacaacgaccagctccggaatctaggggcgggttccagcccttcggcgacaccggtgggtttcatttttcctttggcgtgggagccttcccatttgggttttttaccactgtcttcaacgcccatgaacccttcagacgcgggacaggcccattctccacctcaccagcattcttccactatctgatcggcaatacctcccgcgagttccgtggccggatctataacttttggcttcctcgaaacttatag

SEQ ID NO: 133148 - DNA, 549 bp, synthetic construct
  misc_feature 1..549: note = Description of Artificial Sequence: Synthetic coding sequence
  source 1..549: mol_type = other DNA
atggccgccgctgaagaggaggatgggggacccgagggtccaaatagggagagagggggcgccggcgcaacattcgaatgcaacatatgtctcgaaacagcacgagaggctgtcgtgtccgtgtgcggacatctttactgctggccctgtcttcaccagtggttggagacccgccccgaaaggcaggagtgccctgtgtgcaaggctgggatctcccgggaaaaggtggtgcccttgtatggccggggatcccagaaaccccaagaccctcgtctgaagacgccacctcgcccacaaggtcagcggcccgctccggagtctagggggggctttcagccattcggcgacaccggcggattccatttcagtttcggcgtgggggcgttccccttcgggttcttcacaacggtgttcaatgcgcacgaaccctttcggcgcggaacagggcctttttccactagtccagccttttttcattatctgattggtaacacaagccgcgaattccgcgggaggatctataacttctggttaccgcgtaatctgtag

SEQ ID NO: 133149 - DNA, 549 bp, synthetic construct
  misc_feature 1..549: note = Description of Artificial Sequence: Synthetic coding sequence
  source 1..549: mol_type = other DNA
atggcagctgccgaggaagaagacggtgggcctgagggccccaatcgagagcggggtggggctggtgctacctttgagtgcaacatctgtctggagacagcccgagaggcagtagtgtccgtatgcggccacctttactgttggccctgcctgcaccagtggctagaaactcgtcccgagcggcaggaatgtccggtctgtaaagctggtatctctcgtgagaaagtcgtgcctttgtatggtcgtggctcccagaaacctcaagatcctaggctgaagacaccacctagacctcaaggccagcgccccgcacctgagtcccgaggcggctttcagcctttcggcgacacaggagggttccacttctctttcggggtgggagcctttccctttgggttctttacaaccgtcttcaacgctcatgagccttttcgcagaggaaccggccctttctctactagccccgctttttttcactacctcatcggcaacaccagccgcgagtttcggggtagaatctacaacttttggttgcctaggaacctctag

SEQ ID NO: 133150 - DNA, 342 bp, synthetic construct
  misc_feature 1..342: note = Description of Artificial Sequence: Synthetic coding sequence
  source 1..342: mol_type = other DNA
atggccgacgtagaggatggcgaggagacctgtgcacttgccagccactccgggagttctgggtccaaaagcggaggcgacaaaatgtttagtttaaaaaagtggaatgctgtggcaatgtggagctgggatgtcgaatgcgacacctgtgcgatctgccgggtacaggtcatggacgcttgcctgcgctgccaggcagagaacaaacaagaagactgcgtcgtggtctggggggagtgcaaccattctttccacaactgttgtatgagtctgtgggtcaaacaaaataatcgctgtccactctgccagcaggactgggtcgtgcagcgaatcggcaagtag

SEQ ID NO: 133151 - DNA, 273 bp, synthetic construct
  misc_feature 1..273: note = Description of Artificial Sequence: Synthetic coding sequence
  source 1..273: mol_type = other DNA
atggctgatgtggaggacggcgaagaaacctgtgctctggcatcacactctggcagctccggcagtaagtcagggggcgacaagatgtttagcttgaaaaaatggaacgccgtggcaatgtggagctgggacgttgaatgtgatacgtgtgcaatctgtcgcgtgcagatgcctgttctcgacgtgaagcttaaaacaaataagcggaccgtgttgtggagcggggaaaatgtgatcattccaagtaccaccgccgcttgcccgtgcggttag

SEQ ID NO: 133152 - DNA, 294 bp, synthetic construct
  misc_feature 1..294: note = Description of Artificial Sequence: Synthetic coding sequence
  source 1..294: mol_type = other DNA
atggctgacgtcgaggatggcgaggaaacctgtgccctggcgagccacagcgggagctcggggtcaaagagtgggggtgataagatgttttccctgaagaaatggaatgccgtagccatgtggtcgtgggacgtggaatgcgacacctgtgctatctgcagggtgcaggtcatggtggtctggggcgagtgtaatcatagctttcataactgttgcatgagcctctgggtcaaacagaacaatcgctgtcccctgtgtcaacaggactgggtggtccaacggatcggtaaatag

SEQ ID NO: 133153 - DNA, 1875 bp, synthetic construct
  misc_feature 1..1875: note = Description of Artificial Sequence: Synthetic coding sequence
  source 1..1875: mol_type = other DNA
atggagaattcagactctaatgataagggttctggagatcagtccgcagcccagcgacgtagtcagatggatcgtctcgatcgagaagaggccttctatcagtttgtgaataatctttccgaggaagactatcggctgatgcgcgacaacaatctccttggcacgcccggggagtctacggaagaagaactgctccggcgcttacaacagatcaaagagggcccccctccccaaaactctgacgaaaaccgaggaggcgacagctctgacgacgtatccaacggcgattccataatagactggcttaatagtgttcgccagaccggaaataccacacgatctggccagcgcggaaaccagtcctggcgtgccgtgtcaagaacgaacccaaatagcggagacttccggttctccttggaaattaatgttaataggaataacgggagtcagaatagtgaaaatgagaatgagccaagtgcccgccgctcttctggggaaaacgtcgaaaacaatagccaacggcaggtcgagaacccccgctctgagagcacatctgcaaggccaagccgcagcgagcgcaattctacagaagcccttaccgaagtccctcctacccgtggccagaggcgggcaagatcacgatcccccgaccatcgccgtactagagccagagccgaaaggtccaggtcccccctgcatcccatgtccgaaatcccacgtcgcagtcatcatagcatttcttctcagaccttcgagcatcccctggtcaacgagaccgagggtagctccaggacgagacaccacgttacactccgacaacagatcagtgggcctgagctcctcagccgaggcctctttgccgcctccggtacacggaacgcttcccaaggggctggctcctctgatactgccgccagcggcgagtcaaccggcagtggacagcggcccccaacaatcgtcttggatttgcaggtgaggcgagtgcggcctggggagtaccggcagagagactctattgcatctaggacgcggagcagaagccagacacctaataataccgtcacttacgaatctgagagaggcggatttagaaggacattctcccgctccgaacgagcaggtgttcgtacctatgtgtctaccatcagaatccccatccgacggattctgaacacaggcctcagcgaaaccaccagcgtggccatccagactatgcttcgacagattatgaccggctttggtgaactgtcttactttatgtactctgactctgattccgaacccacaggtagcgtgagcaaccggaacatggagcgcgctgaaagcaggtcaggacggggcgggagcggtggagggtctagctctggcagtagcagtagctcttcatctagtagcagctcatcgagttcttccagttcttcaagttccccttcctcaagctcagggggcgagtcctctgaaactagcagtgacctgtttgaaggatctaatgaaggttctagctcctctggaagctcaggagctaggcgtgagggcagacaccgagcacccgtgacctttgacgagtccgggtcactacccttcttgagcctcgcccagttcttcttacttaatgaggacgacgatgaccagcctcgtggattgacaaaggaacagatagacaacttggcaatgcgtagcttcggggaaaatgacgctctgaagacctgttctgtctgtattaccgaatacacagaagggaataagctccgaaagctcccttgtagtcatgagtaccacgtccattgtattgatcgatggctgtctgagaattctacgtgccccatatgcagacgggccgtgctggcgagtggtaatcgggaaagcgttgtctag

SEQ ID NO: 133154 - DNA, 1875 bp, synthetic construct
  misc_feature 1..1875: note = Description of Artificial Sequence: Synthetic coding sequence
  source 1..1875: mol_type = other DNA
atggaaaatagtgattccaacgataagggttccggagaccaatcagctgctcagcgccgtagccagatggatcgccttgatcgggaggaagcgttctaccaattcgtcaacaatttgtcggaagaggattatcgcctgatgagggacaataaccttttagggaccccaggcgagagtacagaggaggagctcttgagaagactgcagcagatcaaagagggcccccccccacagaattcagatgagaacaggggaggcgatagctccgacgatgtgagtaacggagatagtataattgattggttaaacagtgtgagacagactggaaatacaacaaggtccggacagagagggaaccagagctggagggctgtgagccgaaccaatccgaatagcggggactttcggtttagtctcgaaatcaacgtcaaccggaataacggctcacagaactcggagaacgagaacgagccaagcgccagaagatcaagcggtgagaatgtcgaaaataactctcaacgtcaggttgagaatcctagatctgagagtacatctgcacgcccctctaggtcggagagaaacagcacggaggctcttactgaagtgcctcctacccgtggccaacgcagggctagatcccgctctcccgaccaccggagaacaagagcccgtgcagaaagaagcagatcacccttacatccaatgtccgagatccccaggagatcccatcacagtattagttcccaaacattcgaacaccccttagtcaacgaaactgagggcagcagcaggaccaggcatcatgtgacgcttcgacagcaaatttcgggccctgagctgctcagtcgcggattgtttgctgcatcagggactaggaatgcgtcccagggggccggctcatccgacaccgccgccagcggggaaagtactggaagcggccagaggcccccaactattgtgctcgacctgcaggtgaggcgagttaggcctggggaatataggcaaagggattctatcgccagccggactagaagccgcagccagactcccaacaataccgtcacctatgagtcagaaagaggcggttttcgaaggacgttcagtcggtctgagagggccggtgtgaggacatatgtctcaacaataagaatcccaataaggcggattctgaataccgggctgagcgaaactacatcagtggcaatccaaacaatgcttcgccagattatgactggctttggagaattgtcatattttatgtatagcgattctgattccgagcctaccgggagtgtgagtaatcgaaacatggaacgtgccgaaagtcgatcagggaggggcggctcaggggggggcagttcttccggaagtagttcatctagttcctcctcctcaagcagttctagcagcagcagttcttcctctagccccagttcctccagcgggggagagagtagtgagacaagctccgacctgtttgaggggtccaatgagggctcctctagctctggctccagtggcgcaaggcgcgagggaaggcaccgagccccggttacctttgatgagagcggctctctccccttcctgtctctggcccagttcttcttgctgaacgaggatgatgacgatcagcctcggggactcacaaaagagcagattgataatctcgctatgaggagcttcggcgagaatgacgctctgaaaacttgtagcgtatgcatcaccgagtacacggaagggaataaactccgcaaactcccctgcagtcacgaatatcatgtccactgcattgataggtggctgagcgagaattcaacctgccctatttgccgccgggccgtcttagcttctggcaatcgggaaagcgtggtgtag

SEQ ID NO: 133155 - DNA, 954 bp, synthetic construct
  misc_feature 1..954: note = Description of Artificial Sequence: Synthetic coding sequence
  source 1..954: mol_type = other DNA
tgactgcccgccccggccgcagctctacccggcgcgcccccgccaccccctggcgtgagaggttaccctgcgagagcgcgcgggctccagggagctagcggtggtgcacggttccctagtagccttagcctgcctgtccccggaaaaggaggctgggtggtctcaagggcgaagttccccgcgcttgatagctgcgagattactacagcccacccaaggttgtgctttgcagtgtctccccccttttcctgcagcctcccgctcccatcgcttttcccccacagccccctgcttggacggcccaaacgacaggccaagcccgcggccgacgagggattttgggactgcagtgtctgcacattccgcaattcagccgaggccttcaaatgcagtatctgcgacgtccgtaaagggacctccacgcggaagccaaggatcaactcccagctcgtggctcaacaagttgcccagcagtatgcaacccctcccccccccaagaaggagaaaaaagagaaggtggaaaaacaggacaaggaaaaaccagagaaggacaaagaaatctctccaagtgtaaccaagaaaaataccaacaagaagaccaagcccaaaagtgacatcctgaaagatccgccctctgaggcaaacagcattcagtcagctaatgcaactaccaagacatccgagaccaaccacacaagcagaccacgcttgaagaacgttgaccgctcaacggcccagcaactggcagttacagtgggcaacgtgaccgtgatcattaccgatttcaaggagaaaactagatcctcctcgaccagtagtagtaccgtgacaagtagcgcgggaagtgagcagcaaaaccagagctctagtggaagcgagtcaacagacaaaggctcgtctcggagctcgactccgaagggcgatatgtccgccgtgaacgatgaaagcttttag

SEQ ID NO: 133156 - DNA, 456 bp, synthetic construct
  misc_feature 1..456: note = Description of Artificial Sequence: Synthetic coding sequence
  source 1..456: mol_type = other DNA
atggactcggctgcttgcgccgcggctgctacccctgttccggctctggccctggcactagcccctgacctggcccaagctccgctggcactgccaggcttgctgagtccctcctgtctcctcagctctgggcaggaggtgaatggatctgagcgggggacttgtctctggagaccatggctgtcgagcacaaatgacagcccccgtcagatgaggaagctagtcgatctggccgctgggggagcgactgctgccgaagtgactaaagcggaatccaaatttcaccacccagtccgacttttttggccaaagtctcgttccttcgattatctgtactctgctggagagatcctgctgcagaattttcccgtccaggcaactataaatctctacgaagactctgatagcgaggaggaggaggaagatgaagagcaggaagacgaggaagaaaaatag

SEQ ID NO: 133157 - DNA, 315 bp, synthetic construct
  misc_feature 1..315: note = Description of Artificial Sequence: Synthetic coding sequence
  source 1..315: mol_type = other DNA
atggattccgccgcttgtgccgctgctgctacacccgttcctgccctggctttggctctcgcccctgaccttgcacaagctcccctcgccttacccggcctgctctctccaagttgcctgctgtcttcaggacaagaagtgaatgggagcgagaggctgttttggcctaaatcccgctcatttgattacctgtacagtgcaggagaaatccttcttcagaattttccagtgcaggcaaccatcaacctgtacgaagactctgatagtgaggaggaagaggaggacgaagaacaggaggatgaggaggagaagtag

SEQ ID NO: 133158 - DNA, 213 bp, synthetic construct
  misc_feature 1..213: note = Description of Artificial Sequence: Synthetic coding sequence
  source 1..213: mol_type = other DNA
atgcctgatgggccaggcatgaccgcggccagcggaaagttgtaccaatttcgacacccagtgaggctgttctggccaaagagcaagtgctacgactacctctatcaggaggcagaggcacttctaaaaaactttcctatccaggcaactatatcattctacgaagattccgattctgaagatgaaatagaagacctgacttgcgaaaactag

SEQ ID NO: 133159 - DNA, 387 bp, synthetic construct
  misc_feature 1..387: note = Description of Artificial Sequence: Synthetic coding sequence
  source 1..387: mol_type = other DNA
atggagaatgccggtggggccgaaggcaccgaaagtggtgctgccgcttgcgcggcaaccgacggccccacaagaagagcgggcgcggattctgggtatgcgggcttttggagaccctgggtcgatgccgggggcaaaaaggaagaggagacccccaatcacgccgccgaggcgatgccggatggccctggcatgaccgcagcttcagggaaactgtaccaattccggcacccggtcaggctcttttggcccaaatccaaatgttatgactatttgtatcaggaggccgaagcactgctcaaaaacttccccatccaggctacaatcagcttttacgaggactcggatagtgaggatgagatcgaggacctcacatgcgaaaattag

SEQ ID NO: 133160 - DNA, 444 bp, synthetic construct
  misc_feature 1..444: note = Description of Artificial Sequence: Synthetic coding sequence
  source 1..444: mol_type = other DNA
atggctgcggccgccgactcgttctctgggggcccagcgggggtacggctgccccgctcccctcctctgaaggtgctggccgaacagctcagaagggatgcagagggcggccccggagcgtggcgactgtcacgggcggcggcaggtcgtggacccttggatttggcagctgtgtggatgcaagggcgagttgtgatggcagacaggggagaggcccgactcagggatccatctggcgatttttctgtgcgagggttggagagagtgcctcgaggaaggccttgtctagtgcctggtaagtacgttatggtgatgggcgtggtccaggcctgcagcccagaaccctgtctccaagccgtgaagatgaccgacctcagtgacaatcctatccatgaaagtatgtgggagctggaggtggaagacctccatcggaatattccctag

SEQ ID NO: 133161 - DNA, 255 bp, synthetic construct
  misc_feature 1..255: note = Description of Artificial Sequence: Synthetic coding sequence
  source 1..255: mol_type = other DNA
atgaagcagacccaggtaggaagcctcttttcattgggcattagaaacccagagccgggacctgtgtccggcactgcagtccctaggcagctagcttggaaaagcggcaagtatgttatggtgatgggggtcgtccaagcttgttctccagagccttgtctccaagcagtgaaaatgacagatctttccgataatcctattcacgagtcaatgtgggagctcgaggtggaggatctacaccgtaacattccatag

SEQ ID NO: 133162 - DNA, 1431 bp, synthetic construct
  misc_feature 1..1431: note = Description of Artificial Sequence: Synthetic coding sequence
  source 1..1431: mol_type = other DNA
atggcaaattccgcgaaggccgaagaatatgagaagatgagcctagaacaggccaaagccagcgtgaattctgagacagagagttcatttaatattaacgaaaataccactgcgagcggtacaggcctgtccgagaagaccagcgtgtgccgccaagtcgacatagccaggaagagaaaagaattcgaagatgacttggtgaaggagtcgagttcatgcgggaaggacactccttctaaaaaacgcaaacttgacccggaaatcgtacctgaggagaaggactgtggggacgcagagggtaatagtaaaaagcgcaaacgcgagacagaagatgtcccgaaggataaatcttccactggagacgggacccagaacaaacggaaaatcgcattagaggacgtccccgagaaacagaagaacctcgaagaggggcacagcagtacagtcgccgctcattataatgaacttcaagaagtcgggctcgagaagcgctctcagagtcgtatcttttacctcaggaatttcaataactggatgaagtccgtcctgatcggggagtttctggagaaagtgcgtcagaagaagaagagagatattacagtattggatcttgggtgcggaaaggggggcgacctacttaagtggaaaaaaggtagaatcaacaaactggtctgcactgacatcgccgatgtgtctgttaaacagtgccaacaaaggtacgaggacatgaagaatcggcgggactctgaatacattttttccgcagagtttattactgcagacagcagcaaagagctattgatagacaaatttcgggatccgcagatgtgtttcgatatttgttcctgtcaattcgtctgtcattattccttcgaaagctacgagcaggctgacatgatgctgagaaacgcctgtgaaagattgagtccaggtggctactttatagggaccactccgaactcctttgagctgatccgccgcctcgaggccagcgagactgaatcattcggcaacgaaatatatacggtcaagttccagaagaaaggagactacccactgtttggctgcaaatacgatttcaacctggaaggcgtggtggatgtgccagagttcctggtgtatttccccctcctgaacgaaatggctaagaagtacaacatgaaattggtgtacaaaaagaccttcctcgaattttatgaggagaaaattaagaataacgagaacaagatgttacttaaacgtatgcaggcgctggaaccctaccctgccaatgaaagctcaaaactcgtctccgaaaaagtggacgattatgaacatgccgcaaaatatatgaagaactcacaggtccgccttcccctcggcacgctgtccaagtccgagtgggaggctacttccatctatctggtgtttgccttcgaaaagcagcagtag

SEQ ID NO: 133163 - DNA, 1431 bp, synthetic construct
  misc_feature 1..1431: note = Description of Artificial Sequence: Synthetic coding sequence
  source 1..1431: mol_type = other DNA
atggcaaacagcgccaaagctgaagagtacgagaagatgtcattggagcaagcaaaagctagtgtgaactccgaaacggaatcaagctttaatattaacgagaatacaactgcctctggaacaggcctgtccgaaaaaacctccgtgtgtaggcaggtggatatagcccgcaagcggaaagaatttgaggatgatttggttaaggaaagcagcagttgtggcaaagatacaccttctaagaaaagaaaactagacccagagatcgtccccgaagagaaagactgtggagacgccgaaggcaatagcaagaaacgaaaacgggaaactgaagacgtgcccaaagacaagtccagcacaggagatgggacccagaacaaaaggaaaattgccttggaggacgtaccagagaagcaaaagaaccttgaggaagggcacagcagcactgtggcagcacattataatgaactccaagaagttggactggaaaagaggtctcagtccagaattttctacctgcggaacttcaacaattggatgaagtccgtgttaatcggggaattcctggaaaaagtccgacaaaaaaagaaacgagacataacagtgctagacctgggctgcggcaaaggtggggacctcctgaaatggaaaaaggggcgaatcaacaaattggtctgtaccgatatcgcagatgtgagcgtgaagcagtgccagcagagatacgaggacatgaaaaacagacgggactccgagtacatcttctccgcagagtttattactgctgactcaagtaaagagttgctaattgataagtttagagatccacaaatgtgttttgatatctgctcctgccagttcgtctgtcactattcctttgaaagctacgagcaagctgacatgatgcttcgcaacgcctgtgagcggctgtcacccgggggttattttataggaactacccccaacagcttcgaacttattagacggctcgaagcaagcgagaccgagagtttcgggaacgaaatctacactgtaaaattccaaaagaagggcgattatccactcttcggatgtaagtatgattttaatctagagggcgtggtggacgtgccagagttcttagtttacttccctctactcaatgagatggccaagaagtataatatgaagctcgtgtataagaaaacctttctcgagttctatgaggagaagatcaaaaataatgagaataaaatgctactgaagaggatgcaggcgctggaaccctacccagctaatgagagcagtaaacttgtgagtgagaaggtggacgattacgagcacgccgccaagtatatgaagaacagtcaggtgcggctaccgttgggaacactgagcaagagtgagtgggaggccacaagcatctatctcgtattcgcttttgagaaacaacagtag

SEQ ID NO: 133164 - DNA, 705 bp, synthetic construct
  misc_feature 1..705: note = Description of Artificial Sequence: Synthetic coding sequence
  source 1..705: mol_type = other DNA
atgaaaaaccgcagggacagcgaatacatcttcagtgcagaatttatcaccgccgacagttcgaaggagctgctgattgataaattcagggaccctcagatgtgcttcgatatttgctcatgtcaatttgtgtgccattatagcttcgaatcatatgagcaagccgatatgatgctcaggaacgcgtgtgagcggctctcaccaggcggttatttcatcggtacaaccccaaattcttttgagctgatcagacgcctggaggcgagtgaaaccgagtcctttggaaacgaaatctatactgttaaattccagaaaaagggcgattaccccctgttcggttgcaagtatgacttcaatcttgagggggttgtcgatgtgccagagtttcttgtttacttcccccttctcaacgagatggcaaaaaagtacaatatgaaacttgtatataagaagactttcttggagttttacgaagagaaaatcaagaataatgaaaacaagatgctgctcaaaaggatgcaggcacttgagccatatcctgctaacgaaagttcgaaacttgtctctgagaaagtcgacgactatgaacatgctgccaaatatatgaaaaactctcaggttaggctgcctctgggtacgctttcaaaatcagagtgggaagctactagcatatacctggtttttgcatttgagaagcagcagtag

SEQ ID NO: 133165 - DNA, 1431 bp, synthetic construct
  misc_feature 1..1431: note = Description of Artificial Sequence: Synthetic coding sequence
  source 1..1431: mol_type = other DNA
atggcaaatagtgccaaggctgaagagtacgaaaaaatgagcctggagcaagccaaggcctctgtgaacagtgaaaccgagtcttcttttaatattaatgagaatacgacagcttcaggaaccggacttagtgaaaaaacatcggtatgtcgccaggtggatatcgccagaaagcggaaggagttcgaagacgacttggtaaaggagtcatccagctgcgggaaagacactccaagtaaaaagaggaagcttgatccggaaattgtacccgaagaaaaggactgtggcgacgctgaagggaactcaaaaaaaaggaagagggagacagaagacgttcccaaagataaaagctcaactggcgacgggacgcagaacaaacgaaagatcgctctagaggacgtgcccgagaaacaaaagaatttggaggagggccatagttctacggtagcagctcattataacgagctgcaggaggtgggcttagagaagagatcacaatcccggattttctatcttaggaactttaataattggatgaaatcagtgctaatcggcgaattcctggagaaagtacggcagaagaaaaaaagggacattacggtcttagatctgggctgcggtaaggggggtgatcttttgaaatggaaaaagggccgaatcaataaattagtttgcacagatatcgcggatgtgtccgtgaaacagtgccagcaaaggtatgaagatatgaagaacaggcgcgatagtgagtacatcttttccgcagagtttataacagctgatagctccaaggagttacttatcgacaaattcagggacccccagatgtgctttgacatatgctcctgtcagtttgtctgtcattactcttttgagtcttacgagcaagccgatatgatgctgcgcaacgcctgcgagagactgagcccaggcggttacttcattggaaccaccccgaacagcttcgagctcattcgacgactggaggcgagcgaaacggaaagctttggcaacgagatttatacagtcaaatttcagaaaaagggtgattaccccttgtttggctgtaaatatgactttaacctcgagggcgttgtggatgtgccagagttcctggtctacttcccattgctcaacgaaatggctaagaaatataacatgaagcttgtgtacaaaaagactttcctcgagttctatgaggaaaagataaagaataatgaaaacaaaatgctgttgaagagaatgcaggctcttgaaccatatcccgccaacgagagcagtaagcttgtgagcgaaaaagtcgatgattatgagcatgcagcgaaatacatgaaaaactcccaggttaggctgccgctgggaacgctgagtaagagcgaatgggaggccacatccatctatctagtattcgccttcgagaaacagcagtag

SEQ ID NO: 133166 - DNA, 390 bp, synthetic construct
  misc_feature 1..390: note = Description of Artificial Sequence: Synthetic coding sequence
  source 1..390: mol_type = other DNA
atgaagtccgtgcttataggcgagttcctggaaaaggtaagacagaaaaagaaacgtgacattaccgtccttgacttaggatgcggtaaaggtggcgatctcttgaagtggaaaaaaggcaggattaacaagctcgtatgcacagatattgccgacgtttctgtcaagcagtgccaacaacgatacgaggacatgaagaaccgtagggatagcgagtatatttttagtgcagaatttatcactgcggattcttccaaggagcttttaattgataagtttcgtgaccctcagatgtgttttgacatttgcagttgtcagttcgtatgccattacagttttgaatcctatgagcaggccgacatgatgctgagaaatgcctgcggaacatag

SEQ ID NO: 133167 - DNA, 468 bp, synthetic construct
  misc_feature 1..468: note = Description of Artificial Sequence: Synthetic coding sequence
  source 1..468: mol_type = other DNA
atggccccacgtacctggtgtccagcaggaatttttggactgttttgtcctttaacccttgcatgctcaagtctgacaatcgccctcactgactgccagccaattattttggtgtcccccacattgtccctgtggatggtcgtgagatctgtctggataatgcaagcttccttactcggggaaccagaagaggtcgcacttgggccaatgggcgtggttgcagccacactggaagtggtcggtacccgtgctatgggtgtggccggcataatgactgtggacctggaagggatggatatggatatggatgtccccgaaaccatcatggctgaaaccagggttgtcatgaccgccacccaggaggagatcacagaaacgatcatgacgaccgaaatgagacatgcgcacaacatcggcgaaacatggatatccgctctctctgaacccgtgtgccacactctgtcctag

SEQ ID NO: 133168 - DNA, 474 bp, synthetic construct
  misc_feature 1..474: note = Description of Artificial Sequence: Synthetic coding sequence
  source 1..474: mol_type = other DNA
atgtcttccgaagagggaaaactgtttgtcggcggtcttaactttaatacagacgaacaagccttggaggaccacttttccagctttggacctattagcgaggtcgtggtggtgaaagatcgcgaaactcagcggagtcgcggctttggcttcataaccttcacaaaccccgagcacgcctcagtggccatgcgggctatgaatggggaaagtttggacggccgccagatccgggtggaccatgcagggaaatctgctcgtggaacaagaggcggcggattcggtgcccacggaagaggccgctcttattcacgcggaggtggagatcaagggtatggtagtggaaggtattacgacagccgaccagggggttacggctatggttatggacggagccgcgattataacggaagaaatcagggagggtatgacaggtattccggcgggaattacagggataattatgataattag

SEQ ID NO: 133169 - DNA, 474 bp, synthetic construct
  misc_feature 1..474: note = Description of Artificial Sequence: Synthetic coding sequence
  source 1..474: mol_type = other DNA
atgagcagcgaggaaggaaaactgttcgttgggggcctgaacttcaacactgatgagcaggcccttgaagaccacttctcctctttcggacccatcagtgaggtcgttgtggtgaaggaccgcgagactcagcgcagcaggggattcggctttattactttcaccaatccagagcacgccagcgttgccatgagggccatgaacggtgagtctttggatggacggcaaattcgagtcgatcacgctgggaaatcggccaggggcaccagggggggcggatttggggcacatggacgagggcggtcttattcgcgcggtggcggagatcaagggtatgggtccggacgctattacgacagtaggcctgggggatacgggtacggctatggaaggtctcgtgactacaacggcaggaaccaagggggctacgatcgttactctggaggcaactatcgggataattatgataattag

SEQ ID NO: 133170 - DNA, 510 bp, synthetic construct
  misc_feature 1..510: note = Description of Artificial Sequence: Synthetic coding sequence
  source 1..510: mol_type = other DNA
atggcccctaggacctggtgtcctgctggcatctttggcctcttttgtcccctgaccctagcctgctccagcctcacgatagccctcacagattgtcagcccatcattctggtgagtcccaccctgagtttgtggatggtagtcagaagcgtttggattatgcaagccagtctccttggcgaacccgaggaagtggctctgggtcctatgggcgtggtggccgcgaccctcgaggtcgtgggtacccgggctatgggggttgcgggaattatgaccgtcgatctcgagggaatggatatggacatggatgtgcctgaaacaataatggcagagacacgggtggtgatgacggctacccaggaggagatcactgaaaccatcatgacgacggaaatgcgacacgctcacaacattgacacccagggtatcatatcagaccccggcagttcatttcagatggctgtcttcataaaagtcttcggcgcagcgcctaaacaccttatcctgtag

SEQ ID NO: 133171 - DNA, 2559 bp, synthetic construct
  misc_feature 1..2559: note = Description of Artificial Sequence: Synthetic coding sequence
  source 1..2559: mol_type = other DNA
atggagtatgagaggagagggggacggggtgaccggactggtcgctacggcgccacggatcgctcgcaagacgatggcggggaaaataggtcaagagatcacgactacagggatatggactacagatcctatccaagagaatacggctcacaagaggggaagcacgactacgacgatagttccgaagagcaaagtgccgagataagaggccagctccagtcccatggggtgcaggcacgtgaggtgagactcatgcggaacaagagtagcggacaatctagggggttcgcatttgtcgaattttctcacttgcaggacgcaacgaggtggatggaagctaaccagcacagtctaaacatcctcggccagaaagtgtctatgcattattccgatccaaagccaaaaatcaacgaagattggctgtgtaacaaatgcggtgtgcagaacttcaagaggcgtgaaaaatgtttcaagtgcggagtgccaaagtcagaagcagaacagaaactgccactggggacaagacttgatcagcagaccctgcctttaggagggcgcgagctgagccagggcttgctcccactacctcagccatatcaggctcagggcgtgctggcatctcaggcactgagccagggtagcgaaccttcctcagagaacgcaaacgacactattattctgagaaatctgaacccccacagcaccatggacagtattctgggcgccttagcaccctatgcagttctgagctcaagcaacgtacgcgttattaaggacaagcagactcagctgaatcgcggatttgctttcatccaactttctactattgaagcagcccaattactccagatactgcaggcattgcatccccctctcaccatcgatgggaagactatcaacgtcgaatttgcaaaaggatccaaacgggacatggccagcaacgaaggttcgcgaatttctgcggcctcagtcgcctcaacagcgatcgctgccgcccagtgggcaatctcgcaggcttcccagggtggagagggcacctgggccacaagcgaggagccccctgtcgattactcatactatcaacaggacgaggggtatggaaacagtcaggggacagagagctctctgtacgcccacggctacctcaagggaaccaaaggacccggtatcacaggtacaaagggcgaccctaccggagcgggccccgaggcctcacttgagcctggcgctgattcagtctccatgcaggcgttttctagggctcaaccgggcgcggctcccggaatctatcagcagtcagccgaagcgagttcgagccaagggacagccgcgaactcccaaagttatacaatcatgagccctgccgtgctcaaaagcgaactgcagtcccccacccacccctcatctgcactacccccagccacctcaccgacagctcaagagagctactctcagtatccggtgcccgatgtgagtacataccagtatgacgagaccagtggttattattatgaccctcagaccgggctctattatgaccccaattcccagtactactacaacgctcaatctcagcagtatttgtattgggacggagagcgcaggacctatgtcccagcactggaacagtccgcagacggacacaaggagacaggcgccccatccaaggaggggaaagagaaaaaggagaaacataaaaccaaaaccgcacaacagattgctaaagacatggagagatgggcacgctctttgaataagcagaaggagaacttcaagaactctttccagcctatttctagtctgcgggatgatgagcgtagagagagcgctacagcggacgcaggctacgcaattctagaaaaaaaaggggcccttgctgaaaggcaacacacctccatggatctgcctaaattagcttccgatgatcgcccgagtcctcctagaggtttggttgccgcgtacagtggtgagtctgattccgaggaggaacaagagagaggaggaccagagagggaagagaagctgaccgattggcagaaattagcctgcctgttgtgtcggagacagttcccaagcaaagaggctttgatcagacatcaacaattgtcaggtttgcacaagcaaaatcttgagatacacaggcgggctcatctttccgagaatgaattggaagctctggagaaaaacgacatggagcaaatgaaataccgagatcgagctgctgagagacgggaaaaatatggcataccagaaccccctgaacccaaaaggcgcaaatacggaggcatttcaacagcttccgtagatttcgaacaaccaactagggatgggttaggctcagacaacatcgggtctcgtatgttgcaggctatgggctggaaggagggcagcggcctagggaggaaaaagcaagggattgtcacacccattgaggcgcagactagagttagggggtccggtctgggggcacggggcagcagttatggtgtgacttccaccgagtcctacaaagaaactttgcataagaccatggtgactcgctttaacgaagcccagtag

SEQ ID NO: 133172 - DNA, 2562 bp, synthetic construct
  misc_feature 1..2562: note = Description of Artificial Sequence: Synthetic coding sequence
  source 1..2562: mol_type = other DNA
atggaatacgaacgccgggggggtaggggggatagaaccggacgttatggggccactgacaggtcacaagatgatggaggcgaaaataggagcagggaccatgactaccgagacatggattacaggtcctacccaagggagtatggcagtcaggaaggtaagcatgactacgatgattcgtccgaggaacaaagcgccgagatcagggggcagctccagagtcatggggttcaggcccgggaggttcgccttatgcggaataagtcctccgggcagagccggggcttcgctttcgtggaattcagccatcttcaggacgctactcggtggatggaggctaaccagcattccctcaatattctgggccaaaaagttagcatgcattatagcgaccccaaacccaagattaacgaagattggttatgcaacaaatgtggcgtacagaacttcaaacgaagggagaaatgttttaagtgtggagttccaaaaagcgaggccgagcagaagctgccccttggcacaaggttagaccaacaaacgttacccctgggaggacgcgagcttagccagggactccttcctctgccacagccataccaggcccaaggagtgttggcctcccaggcactgtctcaaggatcagagccctcatccgagaatgccaacgataccatcattttaaggaatttgaatccacacagcaccatggatagtatcctgggagcgctcgccccttatgctgtgttgagtagcagcaatgtccgagtgatcaaggacaaacagacacagctcaaccggggatttgcattcattcagctgtccacaatcgtagaggcagctcagcttcttcaaattctgcaggctctccatccccctctgactattgacgggaaaactatcaacgtagaattcgcaaaaggatccaaacgggacatggcctcgaacgaaggctctagaattagtgctgcctcggtagcttcgactgcgattgccgccgcacagtgggctatatctcaggcttcacagggaggggagggcacctgggccacctccgaagagccccccgttgactacagttactatcagcaggatgagggctatggaaattctcagggcaccgagtctagcctgtatgcccacggataccttaagggaacaaaaggacctggcatcactggtaccaagggggatccaaccggggccggacccgaagcaagcctcgaacctggcgcggatagcgtcagtatgcaagctttctcccgggcgcagcccggggccgcccctggtatttaccagcagtcggcagaggccagtagctcgcaaggaacggctgccaactcccagtcctatacaattatgtcacccgccgtgctcaagtcagaactccaaagcccaacccatccctcatcagcactccctcccgctacctccccgacggcacaagagtcttactcccagtaccctgtgccggacgtgtcaacatatcaatacgacgagacaagcggctactactacgatccacaaactgggctctattacgacccgaactcccagtactactacaacgcacagtctcagcagtatctttactgggatggggagagaagaacctacgtccctgccctggaacaaagcgccgatggtcacaaggagacaggggcccccagtaaagaaggtaaagaaaagaaggagaaacataagaccaagaccgctcagcagattgccaaagatatggaaagatgggcccgctcgctgaacaaacagaaagagaatttcaagaattcctttcagcccatttctagtttacgagacgacgaacgcagagagtcggcaacggccgacgcgggctacgcaatactagagaaaaagggagccctggctgagagacagcatacaagcatggacctacctaagctcgccagcgacgatcggccctcaccacccagaggcctggtggctgcctattctggagagagcgatagcgaggaggagcaagaaaggggaggtccagagagagaagagaagttgactgactggcagaagcttgcttgtctcttatgcaggagacagttcccttctaaagaggccctcatcaggcaccagcaactgagcggactgcataagcaaaacctggagattcatagaagagcgcacctaagtgaaaacgaactggaagcactggagaagaacgatatggaacagatgaaatacagagaccgcgccgctgaaagacgggagaaatatggaatccctgaacctccagagcccaaaaggcgcaaatacggaggcatcagtacagcctccgtggatttcgagcaacctacacgggacggcctcgggagcgataatatagggtctcgcatgttgcaggccatggggtggaaggagggatccggattggggcgcaaaaaacaggggatcgtgaccccaattgaagcacagacccgcgttcgcggatcagggctgggggctcgggggtcgtcttacggcgtaacgtccacggagagctacaaagagactctgcataaaaccatggtgacacggttcaacgaagctcagtag

SEQ ID NO: 133173 - DNA, 2793 bp, synthetic construct
  misc_feature 1..2793: note = Description of Artificial Sequence: Synthetic coding sequence
  source 1..2793: mol_type = other DNA
atggagtacgagagacgcggcggtagaggagacagaaccggacggtacggcgctaccgaccgctcccaggatgatgggggggagaaccgctctcgcgaccacgactaccgggacatggactatagatcataccctcgagagtacgggtcacaggagggtaaacatgactacgacgattcatctgaagagcagtcagccgaggattcctacgaggcatcacccgggagcgaaacccagcgcagacggcggcgacgccacagacacagtcccacgggccctccaggctttccaagagatggcgattatcgggatcaggattatagaacagaacagggggaggaggaagaagaggaggaagacgaggaggaggaggagaaggcctccaatattgtcatgctgagaatgcttcctcaagccgcaacagaggacgacatccgtggccagttgcagagccatggtgtgcaagcgcgcgaggtcagacttatgagaaataagagcagcggccagtcaaggggatttgctttcgtggaattcagccaccttcaggacgccacacgttggatggaagctaatcagcacagtttaaatatactgggtcagaaggtctctatgcactattcagaccccaagcccaagattaacgaggactggttgtgtaataagtgtggcgtccaaaactttaagaggcgagagaagtgcttcaaatgcggcgtgcctaagagcgaagcagaacagaagctgcccctcgggacacggctggaccagcaaacattgcccctgggcggccgcgaactgtctcagggactcctcccacttcctcagccctaccaggcccagggcgtgctggcctctcaggcactcagccagggctccgagcccagctcggaaaatgctaatgatactattatcctcaggaacctgaatccccattctaccatggactcaatcttgggggcactcgcaccctacgctgtgttgtcttcttccaacgtgagagtaatcaaggacaagcaaacccaattaaataggggcttcgccttcattcagctgagtacgatcgtagaggccgcgcagttgctgcaaatcctccaggctctgcaccctccattgacaattgatggtaagacgatcaacgtggaattcgccaaaggtagcaaacgcgacatggcttccaacgaaggctcccggatcagtgccgccagcgtcgccagcaccgctattgctgctgcccagtgggctatcagccaggcctcccagggaggggaggggacttgggcaaccagcgaagagccgcctgtggattactcctactatcaacaggacgagggttatggcaacagccagggcaccgaatcgagcctctatgcccatgggtacctaaagggcacgaaagggcctggcatcactgggaccaagggcgatcccactggagcaggcccagaggcctcactcgagcctggtgccgacagcgtgtcaatgcaggcatttagtcgggctcagccaggggccgctcctggaatctaccaacagtctgctgaagcctcttcttcccagggaaccgctgccaatagtcaaagctataccatcatgtctcccgccgtccttaagtcggaattgcagtctcccacacaccctagttcggcccttcctcccgccactagtccgactgcccaggaaagctactcccagtaccccgtgcctgacgttagtacctaccagtacgacgagacgagtggctactactatgacccgcaaaccggtttatactatgatccaaacagccagtactactataacgctcaatctcaacaatatctgtactgggatggcgaaagacggacatacgttcccgccttggagcaaagcgccgacggtcacaaagaaaccggcgcgcctagcaaagaagggaaggagaaaaaagagaaacacaagactaagaccgcccaacagatcgcaaaagatatggagcggtgggctcggtcactaaacaagcagaaggaaaacttcaaaaacagctttcagcccatcagctctttgagagatgatgagcggcgcgaatccgcgaccgcggacgctgggtacgctatcctcgaaaagaagggggccctcgccgaaagacagcatacatccatggacctgcctaagctggctagtgacgacaggccctcgccaccacgagggctggtcgccgcgtattccggagaatccgatagtgaagaagagcaagagcgaggcggccccgagcgtgaagagaaactgactgactggcaaaaacttgcctgcctcttatgtcggaggcagtttccttcaaaggaggcgttgatcaggcaccagcaactgagtggcctacacaaacagaacctcgagatacatcgacgagcccacctctccgagaacgaattggaggcactggagaagaatgacatggagcaaatgaagtatagggatagggcagctgagcgtcgtgaaaagtacggcatcccggaaccgcctgagcccaagcggcggaaatacggcggaatctccacggccagcgttgactttgagcagcctaccagagatggcctcggcagtgacaatatcggaagtcgaatgcttcaggcgatgggttggaaggaggggagcggacttggtaggaagaaacaaggtattgtgacgcctattgaagcccagacccgcgtccgaggcagcgggctgggagccaggggatcttcctatggagttacctctacagaatcctataaagagaccctccacaaaactatggtgactcgcttcaacgaagcacagtag

SEQ ID NO: 133174 - DNA, 2010 bp, synthetic construct
  misc_feature 1..2010: note = Description of Artificial Sequence: Synthetic coding sequence
  source 1..2010: mol_type = other DNA
atgaaaattttcgttgggaacgtcgatggtgctgatacgacgcctgaagagctggctgcattgttcgccccctacgggaccgtgatgagttgcgccgttatgaaacagtttgccttcgtacacatgcgtgagaatgccggagcacttcgcgctatcgaagcgctgcatgggcacgaattgaggcccgggcgcgccctagtggtagagatgtcaagaccccgacccttgaacacatggaagatatttgtgggaaatgtgtcagccgcgtgtaccagccaagagctacggtcactcttcgagcggagaggacgcgtcattgaatgtgatgtggtgaaggactacgctttcgttcatatggaaaaagaggctgacgcaaaggctgctatcgcccagctcaacggtaaagaagtaaaaggcaaacgtattaacgtcgaattatcaacaaaaggacagaagaaaggtcctgggctagccgtacagagcggtgataagactaaaaagcccggggctggcgacactgcattccctgggactgggggcttctcagctacatttgactaccagcaggcgttcgggaattcaacaggtggatttgacggccaagccagacaacctaccccaccatttttcggccgagaccggagccctctgcgccggagtcctccccgggcctcttacgttgctcccctaaccgcccagcccgccacatatcgggcccaaccatctgtgtctcttggggcagcgtacagagcccagcctagcgcctcgttgggtgtggggtaccggacgcaaccaatgacagcacaggccgccagctaccgggcccagccttcagttagtctgggggccccatatcgcggacagctggcaagtccgagcagtcagagtgcggctgccagttcactgggaccctatggtggagcgcagccctcagcctccgctctaagttcttatggcggtcaggccgctgccgcgtcatctcttaattcctacggggcccaaggaagttcactggcctcatatggtaaccagccaagctcctatggggcccaggctgccagctcttatggcgtgagggcagccgcatcttcctacaacacccagggcgccgcttcatctctgggttcctacggagcccaagctgcaagctacggcgcccagagtgctgcaagcagtctggcctatggggcgcaagcggctagttacaacgctcaacctagtgcgtcatacaatgctcagtccgctccctatgcggcccagcaggccgcttcctacagttcccagccggctgcttatgtggctcaacctgccacagccgccgcatacgcctcccagcctgctgcctacgcggctcaggccaccacacccatggccggatcttatggtgctcagccagtcgtgcagactcagctgaatagctatggagcccaggcttctatgggactttcaggaagctatggggcacaatccgcagccgccgcgactggctcttatggtgccgccgccgcctatggggcgcaaccttccgccactctggcggcaccttatcggacacagtctagcgcctcgttagccgcttcctatgccgcccagcagcacccacaggccgcggcaagctataggggtcagcccggcaacgcatatgacggtgctggccagccttccgctgcatatttgagcatgagtcagggggccgtggccaacgccaacagcacgccacccccctacgaacgcactcgactgtcaccaccaagggcaagttatgacgatccctacaaaaaagccgttgcaatgagcaaaagatatggcagcgaccgtcgcctcgctgaattgagcgattacagaagactcagcgagtcccagctttcttttcgtcgcagccctaccaagtcttcactcgactacaggcgtctgcccgacgctcacagcgactacgcccgctactccggctcttataacgactacttaagggcagctcagatgcattccggataccagaggcgtatgtag

SEQ ID NO: 133175 - DNA, 471 bp, synthetic construct
  misc_feature 1..471: note = Description of Artificial Sequence: Synthetic coding sequence
  source 1..471: mol_type = other DNA
atgaaaatctttgttggcaacgtagatggagccgacaccaccccagaggaactcgctgcattattcgcgccatacggcacggtgatgtcgtgtgccgtgatgaagcagttcgcgtttgtccacatgcgagagaacgccggagctcttcgtgccatagaagcactccacgggcacgagctgaggcccgggcgggccctggtcgttgagatgagccggccacgccccctcaacacctggaaaatattcgtcggcaacgttagcgcagcctgtacaagccaggaactccgcagcctgttcgagaggcggggcagggtgatcgagtgcgatgtcgtgaaggattatgcctttgtgcacatggagaaagaggctgacgccaaggctgccattgcacaactgaacggcaaagaggtgaaggggaagcgcatcaacgtagagctgagcactaagggcatggttcccacgggggtatag

SEQ ID NO: 133176 - DNA, 360 bp, synthetic construct
  misc_feature 1..360: note = Description of Artificial Sequence: Synthetic coding sequence
  source 1..360: mol_type = other DNA
atgaaaatctttgtcggaaatgtggatggcgcagacacaacaccagaggaactggcggcattgttcgctccatacgggacagtcatgtcatgcgccgtaatgaagcaattcgccttcgtgcacatgcgcgagaacgccggggcactcagggccatcgaggcgcttcacgggcatgagcttcgccccggccgggccctggttgtggaaatgagccgccccagaccactgaacacatggaagatctttgtgggcaacgtgagtgcagcctgcacaagccaggaacttagaagcctgttcgagcgccgtggaagagttatcgagtgtgatgtcgtgaagggtatggtgcccacaggagtgtag

SEQ ID NO: 133177 - DNA, 2934 bp, synthetic construct
  misc_feature 1..2934: note = Description of Artificial Sequence: Synthetic coding sequence
  source 1..2934: mol_type = other DNA
atgcggactgcaggaagggatcctgtcccacggaggtcaccaaggtggcgccgcgccgtgcccctctgcgaaacctcagcgggtcggcgcgtaacccaactgaggggagacgatctccgtcgccctgcaaccatgaagggcaaggaacgcagccctgttaaggcaaaacgaagtcgaggtggcgaggattccacctctcggggcgagcgctccaaaaaactcggtggcagtggaggaagtaatggctcaagcagtggcaagacagattccggcggcgggtcacgaaggtccctacatctggataagtcctccagtagaggcggctcacgcgagtacgataccgggggcggaagcagtagcagccgcctccatagctacagctccccgtctaccaaaaacagttccgggggaggggagtctaggtcaagcagtagagggggcggcggcgagagtcgtagctccggagctgctagctccgcgccagggggcggtgacggcgcagagtacaagactctaaaaatctcagagctagggtcacaactgtcggacgaggccgttgaagatggcctcttccacgaattcaagagattcggcgacgtgtccgttaaaatttcacacttgagtggatcaggatctggggacgaacgagttgctttcgtcaattttcggagacccgaagacgccagagcggccaagcatgcccgcggaaggctggtgctgtatgaccgccctctgaagatcgaggcggtatatgtttcgcgcaggaggagccggtctcctctggataaagatacatacccccccagtgccagcgtggtgggtgcctccgtggggggacaccgccaccctccgggcggtggtggcggccaaagaagccttagccctgggggagcagctctgggttaccgagactatcgcttgcagcagcttgccctcgggcgcctgcccccccctccaccaccccctctgcctcgcgatcttgaaagagaacgagattacccgttttatgagcgagtacggcccgcctacagtctcgagcctcgcgtgggcgctggcgctggggcagcaccttttcgtgaggtcgacgagatttctccggaggatgatcaacgggccaaccgcactctgttcctcggcaacctggacattactgtgacagagtccgatctgaggcgcgccttcgataggttcggcgtgattaccgaagtcgacattaaacgcccctctcgcggccaaacatccacctacgggttccttaagttcgaaaacctggacatgtcccaccgcgccaaattggcaatgagcggcaagatcattataaggaatccgataaagatcggctatggcaaggccacgcctaccacccggctgtgggtgggaggtctgggtccctgggtgcctctggccgcactcgctagggagttcgacagattcggaactattcgtaccatcgactatagaaaaggtgactcctgggcttacattcagtacgaatccctagatgcagctcacgcggcatggactcacatgcgcggctttccccttggcggaccagaccgccggctgagggtcgattttgcagatacggagcacaggtaccaacagcagtatcttcagcctctcccccttactcattatgagctcgtgaccgatgcatttggacaccgtgcccccgacccccttcgcggagcccgtgatcggaccccacctcttctgtatcgggatcgagatcgagatctataccctgactctgattgggtacctccaccccctccagtccgagaacgcagcacacggactgcagccacaagtgtaccagcttacgaacctctggactctctggatcgacggagagatggatggtcactggatcgggaccgaggagaccgagacctcccgagcagtagggaccagccgcggaaaagacgtctacctgaggaatccggggggcggcatcttgaccgatctccggaatctgataggccaaggaaaagacactgtgctcccagcccggatcggtctccagaactgtcaagctctagagatagatacaacagtgataatgatagaagctcgcgccttctgttagagcgcccttcccccattcgtgacagacgtgggagtctcgagaaatctcagggggacaaaagggacagaaaaaatagcgcctcggctgaaagggatcgaaaacaccggacgactgctcccacagagggtaagtctcccttgaagaaggaggaccgttccgacggaagtgcaccgtccaccagtactgcctcatcgaaactcaaatccccctcacagaaacaggatggaggtacagcccctgtcgcgtcagcctcaccgaaactgtgcttagcctggcagggcatgctgttgttgaagaacagcaatttcccttcaaatatgcacttgctgcaaggtgatttacaggtcgcatcatcactgttggtcgaaggaagcacaggcggaaaggtggcccagctgaaaataacacagagactgcgtctggatcagccaaaattagacgaagtcactcgccgcattaaagttgccgggcccaacggatacgcaatcctgctcgcggttcccgggtcgagcgacagccgaagcagcagtagtagcgcagctagtgatactgccacctctactcagcgccctttaaggaacctggtatcctatctgaagcaaaagcaggccgccggcgtgatctctctccctgtgggtgggaacaaagacaaggagaacaccggggtgctgcacgcattcccgccctgcgagttctcccagcagtttctcgacagcccggccaaagccttggccaaaagcgaggaggactacctagtcatgataatcgtcagaggtttcgggttccagatcggcgtccgctatgaaaacaagaagagagagaacctcgctctaacgctcttatag

SEQ ID NO: 133178 - DNA, 2673 bp, synthetic construct
  misc_feature 1..2673: note = Description of Artificial Sequence: Synthetic coding sequence
  source 1..2673: mol_type = other DNA
atgaagcgacagtctgaacgtgattcatctccaagcggtagaggttcctcttcttcagccaagcggcccagagaaagagaacgggaggcagaggctggaggtagacgagctgcacacaaggccagtgggggtgcaaaacatccggtgcctgcccgtgcacgggataaaccaagagggtcggggtccggggggggaggtcatcgggatggtcgcgggacaggggacgccaaccaccgagcatctagtggtaggagcagcggaagcggcgctggcggaggcgggcggggggggaaagcaagtggcgaccctggcgcgtccggtatgtccccacgcgctagtcctcttcccccccccccgcccccaccaggcgcagagcccgcttgccctgggagttccgccgcagcgccagaatacaagacactcttgattagcagccttagcccggctctcccagcggaacatctggaggaccggcttttccaccagttcaagcgatttggagagattagcctcagactgtctcatacccctgagctgggaagagtggcctacgtgaatttcaggcacccacaggatgcccgcgaggcgcgtcagcatgccctggctcggcagctgctcctttacgaccgccctctcaaagtggaacctgtttatctcagaggaggcggcgggtcttcgaggcggtcaagcagtagctccgcagctgcctctaccccccctccaggacctccagcccccgcagacccattaggctacctgccgctccacggcgggtaccagtacaagcaacggtctctgtcacctgttgctgcccctcccctccgcgagcctcgggcccgacatgccgctgccgcgttcgcgttggacgctgcagccgcggccgccgtgggcctgagccgtgaaagagccctcgactactacggactgtatgacgatagaggtagaccctatggttatcccgccgtgtgcgaagaggatctgatgcctgaggacgatcaacgagctacacgcaacttatttatcggaaacttagatcattcggtttccgaagtcgaactgcggcgggcttttgaaaagtacggaatcatcgaggaagtggtcatcaagaggcctgctcggggacagggaggcgcctatgccttcctgaagtttcagaatttggatatggcccatagggccaaggtcgcaatgtcgggccgggtgattggcagaaaccctataaaaattgggtacggaaaggccaatcctaccacccgcctctgggtgggcggccttgggcctaacaccagcctggccgcgctcgcccgagaattcgaccggttcggtagtatccggactatcgatcacgtgaaaggggacagcttcgcctatatccagtacgaatctctggatgctgcccaagcagcctgcgccaaaatgaggggcttcccactgggaggacccgaccgaaggttaagggtggatttcgcaaaggcggaggaaactcgctacccacagcaataccagcccagcccacttcccgtccactatgaactcctgaccgatggctatacaaggcatcgtaatctcgacgccgacctggtcagagaccgaactcctccacatctcctttattctgatagagataggacatttctcgagggtgactggaccagcccaagtaaaagctccgacagaaggaattcacttgaggggtacagcaggagtgtgcgctctcgtagcggagaacgctggggcgcagacggcgatagagggttaccgaagccatgggaagagagaagaaagagaagatctctgtcttctgaccgggggagaacaactcatagtccctatgaagaaagatccagaactaaagggtccgggcagcagtccgaacgtggttctgacaggacaccagagcgcagtcggaaagagaaccatagctcggagggcacgaaagaatcttcaagcaatagcctgagcaactccagacacggagctgaggagaggggacatcaccatcatcatcacgaagccgctgactctagccatggaaagaaggcccgtgactctgagcggaaccacaggaccactgaggctgagccaaagcctctggaggaacctaaacatgaaaccaaaaagctgaagaatctgtctgaatatgcacagacactgcagctggggtggaatggtttgctcgtactgaagaattcctgctttcccaccagcatgcacatcttggagggggatcagggcgtgatctcttccctgctgaaggaccacacttcgggtagtaagttgacacagctcaaaatagctcagaggttaaggctggatcagcctaagctcgatgaggttacccgacgaatcaaacagggctctcccaacggatacgcagttctcctcgccactcaggctaccccatctggtctgggcacggaggggatgcctaccgtggaaccaggcttacagcgcagattgcttcgtaacctggtgtcttaccttaaacagaaacaagccgccggagtgatcagcttaccagtgggaggatctaaaggaagagatggcactggcatgttgtacgcatttcctccttgtgatttttcccagcaatatctgcagtctgccctgaggacccttgggaagctagaagaggaacacatggtaatcgtcatcgtgcgcgacacggcatag

SEQ ID NO: 133179 - DNA, 765 bp, synthetic construct
  misc_feature 1..765: note = Description of Artificial Sequence: Synthetic coding sequence
  source 1..765: mol_type = other DNA
atggagactgtggtatgtcccccttgggaagagcgtcgaaagcggaggtccctgtcctccgatcgaggacggaccactcactcaccatatgaggagcggagccgtaccaaaggcagcgggcagcaatcagaaagaggctctgaccgcaccccagagagatcccgaaaagaaaatcacagctcagaagggaccaaagaatcctcctcgaatagtctaagtaactctaggcatggggctgaggagagaggacaccatcatcatcatcatgaggcagcagattcctcacacggaaaaaaggctagagattcagaacgcaaccatagaaccacggaggcagaacctaaaccactggaggagcctaagcatgaaactaagaaactaaagaacctttctgagtacgctcagaccctgcagctgggctggaacgggctgcttgtgctcaagaactcctgtttccccactagtatgcacatcctggagggggatcagggggtgatttcctccttactcaaagaccacacttctgggagtaaactgacacagttgaagattgctcaaagactccggttggatcaaccaaagctggacgaggttacccgccggattaagcaaggaagtcccaacggctatgccgtccttcttgcaactcaggcgactcccagcgggttgggcacggagggcatgcccacagtggaacccggtctccagcggcggctgcttcggaacctcgtgtcttacttgaaacagaaacaggctgcaggctag

SEQ ID NO: 133180 - DNA, 636 bp, synthetic construct
  misc_feature 1..636: note = Description of Artificial Sequence: Synthetic coding sequence
  source 1..636: mol_type = other DNA
atgaaaagacagtccgagaggaatcacagaacaaccgaagctgaaccgaagccattggaggagccaaaacacgaaaccaaaaaacttaagaacttatcagagtatgcccagactctgcagctgggctggaatggtctcttggtcctgaagaacagctgcttccccacaagcatgcacatcttggagggcgaccagggcgtgatttcgagcctacttaaagaccacacgtcaggatcaaagctgactcaactgaagattgcccagcgcttgcgtctcgaccagcctaagttggatgaagtaactagacggatcaaacaaggaagcccaaatgggtacgctgttcttctggctactcaggccaccccgagtggcttaggcactgaaggcatgccaactgtagaacccggcctccagaggcgccttctgagaaacctcgtctcctatcttaagcagaaacaggccgcgggcgtgatttctctccccgtaggaggatccaagggcagggatgggactgggatgctgtatgccttcccaccttgtgacttcagccagcagtatttgcagtcagctctacggacgctcgggaagctagaggaggagcatatggttattgtgatcgtgcgcgacacagcttag

SEQ ID NO: 133181 - DNA, 1692 bp, synthetic construct
  misc_feature 1..1692: note = Description of Artificial Sequence: Synthetic coding sequence
  source 1..1692: mol_type = other DNA
atgcccgaagacgaccagagggcgacaagaaatctgtttatcgggaatctggaccatagtgtgtccgaggtcgagttgcgacgggcgtttgagaaatacggtattattgaggaggttgtgatcaagaggccagcacgggggcagggcggtgcctacgcatttctcaagttccagaacctggacatggcacacagagcaaaagtggcaatgagtggcagggtgattggcaggaaccctattaagatcggctacgggaaagctaacccaaccacacgattatgggttgggggcctgggcccaaacacctcccttgctgctctggcccgcgagtttgatcgctttggcagcatcagaaccattgaccacgtcaaaggggacagcttcgcatacatccagtatgagtcccttgacgccgcacaagccgcctgcgccaagatgagggggtttcccctcggcgggcccgaccggcgcctgagggttgactttgcgaaggcagaggaaacacgatatccccagcagtaccagccaagtccgttgccagtgcactatgagctgctgactgatggatacacaagacaccgtaacttggacgctgaccttgtgagagataggacaccgcctcacctcttatactccgatcgggatcgtactttcttggaaggggactggacaagtccctctaagagctccgaccgcaggaacagcctagaaggatatagccggagtgtccggagccggagcggcgagagatggggagccgacggcgatagagggctccccaagccctgggaggaacgcagaaaacggagatcgttgtccagcgacagaggtagaaccacccatagtccctacgaggagaggtctagaaccaaggggtcggggcagcagtccgaacggggatcagaccggacacctgaacgctcacggaaggaaaaccatagtagcgagggtacgaaggagtcgagctctaacagcctctcaaattcccggcatggcgcagaggaaaggggccaccatcaccatcatcatgaagccgccgattcttctcacggaaaaaaggcccgcgactctgaacgaaaccatcgcaccactgaagccgagccgaagccattagaagagcccaagcacgaaactaagaaattaaaaaatctgagcgagtacgcacagacactccagctgggctggaacggcttgctggtgctaaagaactcctgcttcccgacctccatgcatatcctggagggcgatcagggcgtgatctcatctctgctaaaggatcacactagcggatctaagctgacacagttaaagatagcccagaggttacgcttggatcaacctaagctggatgaggtgaccagacggatcaagcagggatctccaaacggctacgcagttctcttagcgacacaagctaccccgtctggcctgggcaccgaggggatgcccaccgtggagccaggcctccagagaaggctgctacggaacctggtttcctacctgaagcagaaacaggcagctggcgtgatctctctccccgtgggcggaagcaagggaagggatggtacaggaatgctctacgcttttcccccgtgcgattttagccagcaataccttcagtctgctctgcgaaccctcggcaagctcgaggaggagcatatggtgatagtgatcgtccgtgacaccgcctag

SEQ ID NO: 133182 - DNA, 732 bp, synthetic construct
  misc_feature 1..732: note = Description of Artificial Sequence: Synthetic coding sequence
  source 1..732: mol_type = other DNA
atgggcagagtgggtagagccggtagatcacagaggacaaagcagtccacagtgctggcccccgtcatcgacctgaaacgtggaggcagcagtgacgaccgccaaatcgtagatacacccccacacgtcgccgccggacttaaggaccctgtgccttctggattctccgccggcgaggtcctcataccacttgctgacgaatacgatccgatgttccctaacgattatgagaaagtcgttaaacggcagagagaggagaggcaaaggcagcgcgaactggaacgacaaaaggaaatcgaggagagggagaaacggagaaaagacaggcacgaagcgtctggtttcgctcgcaggcccgaccctgattcggacgaggatgaagactacgagcgggagcgcaggaagagatccatggggggtgcggcaatcgcccctcccacgagcctcgtcgagaaagataaggagctgcctcgtgattttccctacgaggaagattcacggcctaggagccagagcagtaaggccgccatcccaccgcctgtatatgaagaacaggatcgcccgagatcacccaccggcccctccaacagtttccttgcaaatatgggcggcaccgttgcacacaagatcatgcagaagtacggttttagggaaggacagggactgggcaaacacgagcaagggctgagtacagcgctcagtgtcgagaagacatctaaacggggagggtag

SEQ ID NO: 133183 - DNA, 1206 bp, synthetic construct
  misc_feature 1..1206: note = Description of Artificial Sequence: Synthetic coding sequence
  source 1..1206: mol_type = other DNA
atgtcactctacgacgacttaggcgtggagacttcagattctaaaacggaaggttggagcaagaacttcaaattgcttcagtcacagcttcaagtgaagaaggccgccttaactcaggccaagtctcaaagaactaagcagagcacagtcctggctccggttattgacctgaagagaggcggctcttctgatgaccggcagattgtagacacgccccctcatgttgccgccggactgaaagacccggtccctagcggattcagcgccggcgaggtgctaatcccacttgccgacgaatacgacccaatgtttcctaatgactatgagaaggttgtcaaacgccagcgcgaagaaagacagagacagagggaattggagcggcagaaggagatcgaagaaagagagaagaggagaaaagatcgtcacgaagcatcgggatttgctcgtaggcctgacccagacagtgacgaagatgaggattatgaacgggagcgtagaaagaggtccatggggggagccgccattgcccctccaacaagcttggttgaaaaggataaagaactgcctcgagattttccatacgaggaagatagcagaccgcggtcacagtccagcaaggctgccattccaccccctgtctacgaggaacaggatcggccgaggagcccaaccgggccgtcaaactctttccttgctaatatgggcggcacagtggcacacaagataatgcagaaatacgggttcagagaagggcaggggttgggcaaacacgagcaaggcctaagtacagccctctccgtggaaaaaacgagcaaaagggggggaaaaattattgtgggtgatgcgactgaaaaggacgcatccaaaaaatccgattctaatcctctgaccgagattctcaagtgtcctaccaaagtagtgctacttcgtaacatggtcggcgcgggggaggtggatgaagacctggaggttgagactaaagaggaatgtgaaaagtatggcaaggtgggcaaatgtgtgattttcgaaattcccggagcccccgacgatgaggccgtgcgtatattccttgagttcgagcgagtcgaatccgccattaaagcagttgtggacctgaatggtcggtatttcggtggacgggttgtcaaggcctgtttctataacctggataagtttagggtgttggacctggccgagcaggtgtag

SEQ ID NO: 133184 - DNA, 639 bp, synthetic construct
  misc_feature 1..639: note = Description of Artificial Sequence: Synthetic coding sequence
  source 1..639: mol_type = other DNA
atgagtctttatgatgatctgggcgtggaaacatcggattccaaaactgaaggttggagcaagaacttcaagctgcttcagtcccaactgcaggtaaagaaggccgccctgacgcaggccaaatcccagagaaccaagcagtcaaccgtgctagccccagtcattgatttaaagcggggcgggtcctccgatgatcggcagatcgttgatacacccccgcacgtggccgcgggcctcaaagacccagtgccttccggattcagtgccggcgaagtcttgatccctctggccgatgagtatgaccctatgtttcccaacgattacgagaaagtggtgaagcgccagcgcgaagaaaggcagcgacagagggaactcgaaagacaaaaagaaatagaagagcgggagaaaaggagaaaagacaggcacgaagcatcagggttcgcccgtcggccagaccctgactccgacgaagacgaagattatgagagggagaggcggaaacggagcatgggcggggctgcaattgccccacctactagcctagtggagaaagataaagagctgccaagagactttccttatgaggaggatagcagaccccggtcccagagttcaaaggcagcaatcccacctccttag

SEQ ID NO: 133185 - DNA, 666 bp, synthetic construct
  misc_feature 1..666: note = Description of Artificial Sequence: Synthetic coding sequence
  source 1..666: mol_type = other DNA
atgagcctttacgatgacctcggagtggaaaccagcgactctaaaacagaaggatggagtaagaacttcaaactgttgcagtctcagctccaggtgaagaaggcagcattaacacaggcgaaatctcagaggactaagcagagcactgtccttgcgcccgtcatcgatctgaagaggggggggagctctgatgataggcagatagttgacaccccgccacatgtggccgctggcctgaaagacccagtgccatccgggttttcagctggagaggtgctcataccactcgccgatgaatatgatcccatgttccccaacgattacgagaaagtggtgaagcggcagcgggaggaaaggcagaggcagcgcgagctggaaaggcaaaaagagatcgaagaacgggagaagcgcaaggaccgccatgaggcatctgggtttgcccggcggccggatcctgattctgacgaggatgaagactacgagagggaacgcaggaaaaggtctatgggtggagccgccattgccccccctacgtctctcgtggagaaggataaggaattgcctcgtgactttccttacgaagaagatagcaggccaaggagccaatctagcaaagcggccatccccccacccgtatatgaagaacaggatcgcccccgctcttag

SEQ ID NO: 133186 - DNA, 732 bp, synthetic construct
  misc_feature 1..732: note = Description of Artificial Sequence: Synthetic coding sequence
  source 1..732: mol_type = other DNA
atggggcgtgttggtagagctggccgcagtcaacgaacaaagcagtccacagttctggccccagtgatcgacttaaaacgcggaggatccagcgatgaccggcagattgtggatactccgccccacgtggctgccggtctcaaagatccagtccccagcgggttcagtgccggcgaggtcctgataccactagccgatgagtacgacccaatgttccctaatgactacgagaaagttgttaagcggcagagagaggagcggcaaagacagcgcgaactggagcgacagaaggagattgaagagcgagagaaaagacggaaagaccggcatgaagcttccgggttcgccaggaggcccgatccagattccgatgaggacgaggactatgaacgggagaggcgtaagagaagtatggggggtgccgcgatagcaccccctaccagcttggtggaaaaagataaggaactgccgcgcgatttcccgtatgaagaagattccaggcctaggagccagtccagcaaggccgccattccaccccccgtgtatgaggagcaagacagacctcgatcccccactgggccatccaactcttttcttgccaacatgggagggaccgtggctcacaagatcatgcagaagtacgggtttcgagagggacaaggtctgggtaaacatgagcaggggctgagtacagccctctctgtcgaaaaaacttccaagcggggaggctag

SEQ ID NO: 133187 - DNA, 1206 bp, synthetic construct
  misc_feature 1..1206: note = Description of Artificial Sequence: Synthetic coding sequence
  source 1..1206: mol_type = other DNA
atgagcctgtacgatgaccttggcgtcgaaacgtcagacagcaaaacagagggctggtccaaaaattttaaactgctccagtcccaactgcaggttaaaaaggcagcactgactcaagcaaaatctcagcgaaccaagcagtctaccgtgcttgctccagtcattgaccttaaaagggggggcagctccgatgacagacagattgttgacactcctccgcacgtggcggctggcctgaaggaccctgtacctagtggatttagcgctggcgaggtcctgattccactcgccgacgagtatgaccccatgtttcccaatgactacgagaaggtggtaaagagacagagagaagagagacagagacagcgggagctggagagacagaaggagattgaggaaagagagaagcgccgaaaggacaggcacgaagcttccggcttcgctcgcaggccagacccagacagtgacgaggacgaggattacgagcgcgagagacgcaagcggagcatgggcggcgcggcaattgccccgcctactagtctggtggagaaggataaagaactacctcgggactttccatatgaagaagatagtagaccgcggagtcagagctccaaggccgctattcctcctccagtgtacgaagagcaggaccggccccggtcaccgaccggccccagcaacagctttctcgccaatatgggcggaacggtggctcataaaattatgcaaaaatatggattccgggaagggcagggactgggaaagcatgagcaggggctgtcaacggccctctccgttgaaaagacatccaaaagggggggaaagatcatcgttggagacgcgacagagaaggatgcatccaagaagagcgactccaacccactgaccgaaatcttaaagtgtcccactaaagttgtgctgctgcgcaacatggttggagccggtgaagtggacgaggacctggaagttgaaactaaagaagagtgtgaaaaatacggcaaggtgggcaagtgtgtgattttcgaaattccgggggctcctgatgatgaagcagtgcgcattttcctggagtttgagagagtggaatccgctattaaggctgtagtggatttaaacggccgctacttcggaggacgtgttgtcaaagcctgcttttacaacctcgataagtttagagtgctggatttggctgagcaggtatag

SEQ ID NO: 133188 - DNA, 678 bp, synthetic construct
  misc_feature 1..678: note = Description of Artificial Sequence: Synthetic coding sequence
  source 1..678: mol_type = other DNA
taaccactggccgatgaatatgatcctatgtttccaaatgactatgaaaaggtggtgaagaggcagcgcgaggagcgtcaaagacagagagagctcgaaaggcagaaagagattgaagagcgcgagaagcgtcgaaaagataggcacgaagccagcggcttcgcccgcagaccagatcctgattcagacgaggatgaagactacgagcgggagcgtcggaagcgatctatgggcggggcagccatcgcaccccccacctctttggtggaaaaggacaaggaactgccccgtgattttccgtacgaggaagatagccgtcctaggagccagtctagtaaggcggccatacccccccctgtctatgaagaacaggatagaccacggagtccaacaggccctagtaattcttttttggccaacatggggggcaccgtggcccacaagataatgcaaaagtacggattccgcgaagggcaggggttaggaaaacacgagcagggtctgtcaacggccctcagtgttgaaaagacttcgaagcgcggcggaaagattatagtgggtgatgccaccgagaaaggcgtctcaccgggcaagcgtgtcacccgtggcaagggtctggcacccagcatcagcgatatggcttctcttgacccccacgtgtccgcaggcggacaatag

SEQ ID NO: 133189 - DNA, 3684 bp, synthetic construct
  misc_feature 1..3684: note = Description of Artificial Sequence: Synthetic coding sequence
  source 1..3684: mol_type = other DNA
atggtgctagcggctgccatgtcgcaggacgcagatcctagcggacccgaacagcccgaccgcgtggcctgttccgtgcctggagccagggcatctcctgccccttccggaccgagaggtatgcagcagccaccacctcccccccagcctcccccacctccgcaggccgggttaccccagatcatccagaatgccgccaaactcttggataaaaacccctttagcgtttccaatcctaatcctctgttgccttctcccgcctcacttcagctggcccagttgcaagctcagctcacactgcatcggttgaagctggctcagactgccgtgacgaataacaccgccgctgcgaccgtgcttaaccaagtgttatcaaaggtggctatgtcgcagcctttgtttaatcagctgagacatcccagcgtgattacagggccccacggtcacgctggggtccctcagcacgccgcagccatcccatccacccgctttccctcaaatgctatcgcctttagtccaccctcacagaccaggggtccggggccttccatgaacttaccaaaccaaccgcctagtgctatggtcatgcaccccttcacaggtgtaatgccgcaaacacctgggcaaccagcagtgatactcgggattggcaaaacgggcccagctcccgctaccgcagggttctatgaatacggaaaggcctcatctggccaaacctacgggcctgaaactgatggccagcccggatttctgccttcttcggcgtctacctcaggcagtgtaacctatgaagggcactattcacacaccgggcaggatgggcaggccgccttttccaaagacttctatggccctaactcccagggatcacacgttgccagcggctttccagcagagcaggcaggaggactgaagagcgaagtgggtccactgctgcagggcacaaattcccagtgggagtccccacatgggttcagcggccagtccaaaccagatcttaccgcaggtccaatgtggccccccccccataatcagccatacgaactgtacgaccctgaagagccaacgtccgatcgtacacctcctagctttgggggccgacttaataactcaaaacagggttttatcggagcgggccgacgagctaaagaggaccaggccttgctgtctgttcggccccttcaggcccacgaactaaatgacttccatggcgtcgccccgctccaccttccacacatttgttccatttgcgacaaaaaggtgtttgacctgaaagattgggagctccacgtcaaaggcaaattacacgcacagaaatgtctagtcttcagtgagaacgctggcatacgatgcatcctagggtctgccgaggggacgctgtgcgccagcccaaatagtacagcagtctacaatcccgctggtaacgaagattatgcctccaatctcggtacgtcctacgtacccattcctgcacggtccttcacccagtccagtcctacattcccactggctagtgttgggaccaccttcgcccagaggaagggcgccggaagggtggttcatatttgcaatttgccagaaggatcgtgcacggagaacgatgtaatcaacttgggactccctttcgggaaggtaactaattacatccttatgaaaagtactaatcaggcctttttagaaatggcgtacaccgaggctgcccaggcaatggtacagtattatcaagagaagagtgctgttataaacggagagaagctgctgattcggatgtccaagcgttataaagagctgcaactgaaaaaacctgggaaggcagtagcggctatcatacaggatatccattctcagcgcgagagagacatgttcagagaagccgacagatatggcccagagaggccccggagtcgctcccctgttagcagatctttgtcaccgcggagtcatactccttccttcacatcctgttcttcctctcattccccacccggaccatctagggctgattggggcaatggaagagacagctgggaacattctccttacgctcgtagggaggaggaacgcgatcctgcaccttggagagataacggcgacgataaacgagataggatggacccttgggcccatgatagaaaacatcacccccgccagctcgacaaagcagagttggacgaacgccccgaggggggccgcccacacagggaaaagtacccccggtccggctcccctaatctccctcattcagtgtcatcctacaaatcccgcgaggacggctactacagaaaagagcctaaagcaaaatgggataagtacttgaagcagcagcaggatgcaccaggacgtagccgcaggaaggacgaggcacggctgagagaatctcgccacccccacccagatgactctggcaaggaggatggtctcggccccaaagtgactagagcgcctgaaggcgcgaaggccaagcagaatgaaaagaataagacaaaacgcaccgatcgcgatcaggaaggcgctgacgatcgaaaggaaaacaccatggctgagaatgaagccggcaaggaggagcaagagggaatggaagaatcccctcagagtgtggggcggcaggaaaaggaggccgagttctctgaccctgagaacacccgcaccaagaaggaacaggattgggagagcgaatctgaagccgagggcgaaagttggtatccaacaaatatggaggaactggtgaccgtcgacgaagtgggggaggaggaggattttatcgtcgagccagacatcccagagttagaagaaatcgtgcccatagatcagaaggataaaatctgtcctgagacctgtttgtgcgtgaccaccacactggatcttgacctcgcacaagacttccccaaagaaggtgttaaggccgttggaaacggagctgcagagatcagcctgaagagtcctagagaactcccttctgcctccacatcctgccctagcgatatggatgtggagatgcctggcctgaacctcgatgctgagcggaagcctgctgaaagcgaaacagggctgagcctcgaagattccgactgctatgagaaagaagctaagggcgtcgaaagctctgatgtgcatccggcaccaaccgtccagcagatgtcatccccaaaaccggctgaagaacgtgcccggcagccttcaccttttgttgacgattgcaaaacccgcgggacgcccgaagatggggcttgcgaaggtagcccgcttgaggagaaggcgagtcctcctatcgaaacggacctgcagaatcaggcgtgccaggaggtgctgacaccagagaattccaggtacgtagagatgaagagtttagaggtccgcagcccagaatatacggaggttgagttgaagcagcccctgtcccttccttcttgggagccggaggatgtgttttcggagctgagtatacccctcggggtcgagttcgtcgtaccgcggacgggtttctattgcaagttgtgtgggctgttttacaccagcgaggagacggcaaaaatgtcccactgccgatcagcagtgcactatcgtaatctgcaaaagtacctgagccagcttgcggaggaaggcctcaaagagaccgagggtgctgattcacccaggcctgaggacagcggtatcgtgcccaggttcgagagaaagaagctgtag

SEQ ID NO: 133190 - DNA, 3378 bp, synthetic construct
  misc_feature 1..3378: note = Description of Artificial Sequence: Synthetic coding sequence
  source 1..3378: mol_type = other DNA
atggtcctagcagctgccatgagtcaagacgctgatcctagcgggccagagcaacctgaccgcgttgcctgcagtgttcccggcgctcgagctagtcctgcgccctccggccctaggggaatgcagcagccaccccctcccccccagcccccaccacctccccaagctgggctgcctcagattattcagaacgccgccaaactgctggacaaaaacccctttagcgtgtctaatccgaacccgttgctgccttcccccgcatctctccaacttgcccagcttcaggcccaactgaccctacacaggcttaaactcgctcagacagctgtcactaataacaccgccgccgccactgtgttgaaccaagttctttccaaagtggccatgtctcaacccctctttaaccaactcaggcatccgtccgtgattacaggtcctcacggccatgctggggtcccccagcatgcggccgccatcccttctactagatttcccagcaacgctatcgccttcagccctccctcacagaccagggggcctggcccgtctatgaatttaccaaaccagccaccttctgccatggtcatgcatcccttcacaggagttatgccacagacccctggccagccagccgtcatcctcggcatcggaaaaaccggcccagcgccggcgaccgcagggttctacgaatatggaaaagcatctagcgggcaaacctatggccccgagaccgacggccagcccgggtttctgccaagctctgccagcacaagtggctctgtgacctacgaggggcactattctcacaccggacaggatgggcaggccgcctttagcaaagatttctatgggccaaattctcaggggagtcatgtggcttctgggtttcctgctgagcaggccggcggactgaaatcggaggtggggcccctgttgcagggaacaaactcgcagtgggaaagtccccacggatttagtggtcagtccaaacccgaccttaccgccggacctatgtggccaccaccccataaccaaccctatgagctatatgaccctgaagaacctacctcagatcgtacacctccatcttttggcggtaggctgaacaactccaagcaaggctttataggtgctgggaggagagctaaagaagaccaggccctcctctctgtgagacctcttcaagctcacgagcttaatgattttcacggagtggccccgcttcatttaccacatatatgtagtatatgtgataagaaagtatttgatttgaaggactgggagctgcatgtcaagggcaagttacacgcacagaagtgcctcgtcttctccgagaacgccggaataagatgcatcctggggtctgcggagggaaccctgtgcgcatccccaaatagcacagccgtgtacaatcctgctggcaacgaggactatgccagcaacctggggacatcctacgtaccaattcccgctaggagcttcactcaatcgtcgcccaccttcccactagcgagtgtcgggacaacatttgcacagcgaaagggcgctggccgcgtcgtacacatttgcaacctgccagaaggctcctgtacagaaaatgatgtgattaacctgggactgccatttggtaaggttacaaattacatcctcatgaaatctactaatcaggcatttttggagatggcctatacagaggctgcccaggccatggtgcagtactatcaggagaagagtgccgtgattaatggcgagaaactgttgatcagaatgagtaagcggtacaaagaactgcagttaaaaaaacccggcaaggccgtggccgccatcattcaagacatacatagtcagcgagaaagggacatgttccgagaggccgatcgttatggtccggaacgaccccgctcgcggagtccggtcagcaggagcctctcccctaggagtcatactccttcctttaccagctgcagctcttcccatagccccccgggaccatcaagagctgattggggaaatggccgggactcctgggagcacagtccttacgccaggagggaggaggagagagacccggctccttggagagacaacggagatgataaacgggatcgaatggatccatgggctcacgatcgcaagcaccaccctcgccagttagacaaagccgaactagacgagaggcccgaagggggacggccacatagggaaaaataccctcgctcagggtcccctaacctccctcactccgtgagctcatataagagccgcgaggacggctactaccggaaagagccaaaggctaaatgggacaagtatctgaagcagcagcaagatgcgcccggaagaagtcgtaggaaggacgaggccagactgagggagtctagacacccccacccagacgattctggaaaagaagatggcctggggcctaaggtgacacgcgctccagaaggagcgaaggcaaagcagaatgagaagaataaaaccaagaggacagaccgcgatcaggaaggcgcagatgatcggaaagagaatacgatggctgaaaacgaagctggtaaagaggagcaggagggaatggaagagtcgccccagagcgtggggcgtcaagaaaaggaagccgaattcagcgacccggaaaacacacgaacaaaaaaagagcaggactgggaaagcgagagtgaggcagagggcgagtcatggtatcctaccaatatggaagagctggtgacagtggacgaagttggtgaggaggaggattttatagtagagccagacatcccggaattggaagaaatcgtccctattgaccagaaggataaaatttgtcctgagacttgcttatgcgtcactacaacactcgatttggatctggcccaggattttcctaaggagggagtcaaagccgtggggaacggagcagctgaaatcagcctgaaatcgccgcgggaacttccctctgcatctacttcatgccctagcgacatggacgttgaaatgcccggcctgaatctggatgcagaaaggaagccggccgaatctgaaaccggtctgagtttggaggatagcgactgttacgagaaagaagccaaaggcgtggaatcgagtgacgtccaccccgcccccacggtccaacagatgagcagccccaagccagccgaagaacgtgcgcgccagcctagccccttcgtggatgactgcaagacgcggggtacgccagaggatggcgcatgtgagggatcaccactggaggagaaggccagcccgcccatcgaaaccgatctccaaaatcaagcttgtcagggttccgacagtgatacccgcctggtgtccggctacagtctcaccccgctagaaaagacacccggcacttggaagtag

SEQ ID NO: 133191 - DNA, 1263 bp, synthetic construct
  misc_feature 1..1263: note = Description of Artificial Sequence: Synthetic coding sequence
  source 1..1263: mol_type = other DNA
atggccacgtcactgggaagcaacacctacaaccggcagaactgggaagacgctgattttccaatcctctgccagacttgcttgggcgagaacccgtatattcgtatgaccaaggagaaatacggtaaggagtgcaagatatgtgcaagaccattcaccgtcttcagatggtgcccgggcgtgcgcatgcgttttaaaaaaactgaggtgtgccagacatgctcgaaacttaagaatgtgtgtcagacctgcttgcttgacctggaatacggactgccgattcaggttagggacgccggactttcattcaaggatgatatgcccaaatcagacgtcaataaggagtattacactcagaatatggagcgcgagattagcaactccgacggcacaagacctgtcggcatgctgggaaaggccacatctacttccgatatgcttctcaaactggcaagaacaacgccatactataaacgcaacaggccacacatctgctccttttgggtgaagggcgaatgtaaacgaggcgaggaatgcccctaccggcatgaaaagcctactgatcccgacgaccccctcgccgaccagaacatcaaggatcggtactatggaataaatgaccctgtggcagacaagctactgaaaagagcatccacaatgccaagactggacccccctgaggacaagactatcactaccttgtacgtgggcggactgggggacactatcactgagacagaccttaggaatcacttttatcagtttggcgagatacgcacaatcactgtggtccagaggcagcagtgcgcttttatccaattcgccactcgccaggccgccgaggtggctgccgaaaagtcctttaacaaactgattgtgaatggccggcgcctcaatgtcaaatggggaagaagccaggccgcccggggtaaggaaaaggagaaggatggaacaaccgacagcgggattaaactagagccagtgccgggcctgcccggcgctctgccccctcctccagccgctgaggaggaggcatctgctaattattttaaccttcccccctcggggcccccggcggtggtgaatatcgctctcccacccccgcccggaatcgcccctcccccccctccaggcttcgggcctcacatgtttcatccaatgggccctccgcctccttttatgagggcacccggcccgatacactatcccagtcaggatcctcagcggatgggagcccacgctggaaaacactcatctccctag

SEQ ID NO: 133192 - DNA, 1116 bp, synthetic construct
  misc_feature 1..1116: note = Description of Artificial Sequence: Synthetic coding sequence
  source 1..1116: mol_type = other DNA
atggccacatctctggggtctaacacttataaccgccaaaactgggaggacgccgactttccaatcctttgccagacctgtctgggggagaatccatatatcagaatgactaaagagaagtacgggctccctatccaggtgcgagacgctggcctaagttttaaggacgatatgcccaagtccgatgtgaacaaagagtattatacacagaacatggaaagggagatttcaaacagcgatggaacacgacccgttgggatgcttggaaaggcaacctcaaccagcgatatgttactgaagctcgcacgcacaactccttactataaaagaaacagacctcacatctgtagtttttgggttaagggagaatgtaagaggggagaagaatgcccataccggcatgagaaacctaccgacccggatgaccccttagccgatcagaatataaaggataggtattacggcatcaacgatccagtggcggacaaactgctcaagcgtgcctctaccatgcctagattggatccccccgaggataagaccattaccaccttgtatgtgggcggcctgggggacaccataaccgagactgatctgcggaatcacttttaccaattcggcgagattagaactataacagtcgtacagagacagcagtgcgcctttatccagtttgccactaggcaggctgctgaggttgccgctgagaagagcttcaacaagttaatagtaaacggacgccggcttaatgtgaaatggggacgtagccaagctgcccggggaaaggagaaagagaaggatggaacaaccgactcagggattaaactggaaccagtaccaggactcccaggtgccctgccacctcctcctgctgccgaggaagaggcctccgctaactacttcaatctccctccttcagggccccctgcagtagtgaatattgcccttcccccccccccaggtatcgcccctccacccccccctggtttcgggccccacatgttccaccctatggggcccccgccccctttcatgcgtgctccagggcccattcactacccttcccaagaccctcagagaatgggggcccatgcaggcaagcactctagcccttag

SEQ ID NO: 133193 - DNA, 1116 bp, synthetic construct
  misc_feature 1..1116: note = Description of Artificial Sequence: Synthetic coding sequence
  source 1..1116: mol_type = other DNA
atggcaacctcgctgggttcaaacacgtacaatcgccaaaactgggaagacgctgacttccctattttgtgccagacctgcctgggagagaacccttacatcagaatggaacgggaaaaatcgggccttccaattcaggtacgggacgccggactcagctttaaagatgatatgcccaaaagcgacgtaaataaggagtattacacacagaatatggagcgagagatctccaatagcgacgggacacgccccgttgggatgctaggtaaagccacttccacgtctgatatgctgctcaagctcgcacggacaacaccatattataagcgtaaccgcccacatatttgcagcttttgggtgaagggggaatgtaagaggggggaggagtgtccgtaccggcacgaaaagccaacagacccggacgatccccttgcagatcagaacattaaggatcgttactatgggattaacgaccctgtggctgataagctgcttaagagagcatccaccatgcctcgacttgaccccccggaggacaagactatcacaaccctgtatgtcggaggcttgggtgacaccattacggaaacagatctccggaaccatttctatcagttcggcgagatccgaaccattactgtagtacaaaggcagcagtgtgcctttatccaattcgccactcgccaggcggccgaggtggcagcagagaagagtttcaacaagctgattgttaacgggcgcagacttaatgtcaagtgggggcggtcacaggccgctcgcggcaaagaaaaagaaaaagatggcactactgatagcgggatcaagctcgagcctgtgccgggactgcctggcgccttacccccccccccagctgccgaggaggaggccagtgctaattattttaacctgcccccatcaggcccaccagcagtcgtgaacattgcgttgccacctccgcctggcatcgctccccccccaccacctgggtttggcccccatatgttccatccaatgggccccccaccccctttcatgagagctcccggtcccatccattatccctctcaggacccccaacggatgggagcccatgccggcaagcacagctcaccttag

SEQ ID NO: 133194 - DNA, 2532 bp, synthetic construct
  misc_feature 1..2532: note = Description of Artificial Sequence: Synthetic coding sequence
  source 1..2532: mol_type = other DNA
atgtctttcccaccccacctgaatcgacccccaatgggaatccctgccctgcctccaggaatacccccccctcagtttcctggctttccccctcctgtcccacccgggactcccatgattcctgtgcctatgagcatcatggcgccagcaccgactgtgcttgtgccaactgtatccatggtgggtaaacacctcggcgctagaaaggaccatccagggctgaaggctaaggagaacgatgagaattgcggacccaccactaccgtgtttgtcggtaacatcagcgagaaggcttccgatatgcttatcaggcagctgctggcaaaatgtggactcgttttgagttggaagcgcgtgcagggagctagcgggaaactgcaggcattcggcttctgtgagtataaagaacctgagtctactcttagggccctgcgattgctgcatgacttgcagattggggagaaaaaacttctggtgaaggtggacgctaagaccaaggcccagctagatgaatggaaggccaaaaaaaaagcttctaacgggaacgcccggcccgagaccgttactaacgatgacgaggaagcgctggacgaggaaactaagaggagagaccagatgattaagggggcgatcgaagtcttaattagagagtatagctctgagttaaatgctccttcgcaggaaagtgactctcatcccagaaaaaaaaaaaaagagaagaaggaggacatctttcggcggttccccgtggccccactcataccttaccctctgattaccaaggaggacatcaacgcgatagagatggaagaagataagcgcgatctcatttcacgtgagatcagtaagtttagagatacccataagaagctggaggaggagaaggggaaaaaggagaaagaaagacaggagatcgagaaagaaaggcgcgagcgggagagggaacgagaacgggagagggagcggcgggaacgggaacgggagcgggagagggagcgcgagagagagaaggaaaaagaaagggagagggaacgtgagagggatagggatcgtgacagaaccaaggaacgtgatcgggatagggatagggagcgcgaccgggatagggacagggaacgcagcagcgacaggaacaaagataggtcccggagccgcgagaagagcagggacagggagagggagcgagagagagaacgcgagagagagcgagagcgggaaagagagagagaaagggagagggaaagggaaagggagagagaacgcgagagagagcgagaaaaggacaagaagcgtgacagggaggaggacgaggaagacgcctatgaacgccgcaaactggaacgaaaactccgagaaaaagaagccgcataccaagagcgactgaagaactgggagattcgggagcggaaaaaaacgagagagtatgaaaaagaggccgagagagaggaggaaagacgccgggagatggcgaaagaagcgaagagattgaaggagttcctagaggattatgatgacgatagagatgatcctaagtattacagagggagtgccctgcagaagagactccgcgatcgagaaaaggagatggaggccgatgaaagggaccggaaaagagagaaggaggagttagaggaaattcgacagcggttgcttgccgaagggcatccagaccctgatgccgaactgcaacgaatggagcaagaagctgagaggcgaaggcagcctcagattaaacaggaaccagagtccgaggaggaggaagaagaaaagcaagagaaggaagaaaagcgggaagaacccatggaagaagaagaggagcccgaacaaaagccctgtttgaagcccacgcttcgccctatatcatcagccccaagtgtctcctctgcaagcgggaatgccactccaaacacaccaggagatgagtctccatgcggcatcattataccacatgagaacagccccgatcagcagcagccagaagagcaccggccaaaaattggactttctttaaagctcggagcaagcaatagcccggggcagcctaactccgtgaagcggaaaaagctccccgttgactccgtattcaacaagtttgaagatgaggactccgacgacgtgcctcgcaagcgcaaactagtacctcttgattatggcgaggatgataagaacgccaccaagggcactgtgaacactgaagagaagcgaaagcacatcaagtcactcatcgaaaaaatccccacagctaaaccggagctcttcgcctaccctctcgattggagcattgttgactcgattctgatggaaaggcgaatcaggccatggatcaacaagaaaatcattgaatacattggcgaagaagaggccacactcgttgattttgtgtgttctaaggtaatggcccactcatcacctcaaagtatcttggacgacgtagcgatggtcctcgatgaagaggctgaagtcttcatcgtgaagatgtggcgactgctgatttacgaaacagaggctaaaaaaattgggctggttaaatag

SEQ ID NO: 133195 - DNA, 384 bp, synthetic construct
  misc_feature 1..384: note = Description of Artificial Sequence: Synthetic coding sequence
  source 1..384: mol_type = other DNA
atgagctttcctcctcatctgaataggccacccatgggtatccccgcgttgccgcctgggatcccacccccacagttcccaggcttcccgccccccgtccccccgggcacccctatgattccagttcccatgtcaataatggcacctgcccctaccgtgctagtgcccaccgtctccatggtggggaaacacttaggcgcccggaaggatcatcctggactgaaggcaaaggagaatgatgaaaattgtggacctacaaccaccgtttttgtcggaaatataagcgagaaggccagcgacatgctgatccgacaactgctggccaaatgtggccttgtgctttcttggaagcgggttcagggcgcgagtggaaagctgcagtag

SEQ ID NO: 133196 - DNA, 903 bp, synthetic construct
  misc_feature 1..903: note = Description of Artificial Sequence: Synthetic coding sequence
  source 1..903: mol_type = other DNA
atgtccttcccacctcacttgaaccgaccaccaatgggaatccccgctttgccgccaggaatccctcccccgcagtttccaggatttccaccgcccgtgccaccggggacaccaatgattccggtgccgatgagtatcatggcgcccgcccccactgtgctcgtgcccacagtctcaatggtaggaaagcatctgggagcgagaaaagatcaccctgggttgaaggcaaaggagaacgacgaaaattgtgggcccaccaccaccgtctttgtgggaaatatttccgaaaaggcctcagatatgcttattcgccagctccttgctaagtgtgggcttgtgctcagctggaagagagtgcagggagcttcggggaagcttcaggcatttggtttttgtgagtataaagaacccgaatcgacgctgcgggccctccgactcctgcacgaccttcaaataggcgaaaaaaagctgctggtcaaggtagacgctaagacaaaggcgcagctggatgagtggaaggctaaaaaaaaagcctccaacggtaatgccagaccagagactgtgacaaatgacgatgaagaggccttagatgaggaaactaaaagacgcgatcaaatgatcaagggcgcaattgaagtgctgattcgggagtatagcagcgaactgaatgccccttctcaagagagcgattctcacccgaggaaaaagaaaaaggagaaaaaagaggatatctttcggagattccccgtggcacccctgataccgtaccccctgatcaccaaggaggatattaacgccatcgagatggaggaggataagagagacctcattagccgggaaatctccaagtttagagacactcacaaggttgtgttcctctctttccacctgatccccatctag

SEQ ID NO: 133197 - DNA, 885 bp, synthetic construct
  misc_feature 1..885: note = Description of Artificial Sequence: Synthetic coding sequence
  source 1..885: mol_type = other DNA
atgtcctttccacctcatcttaatagacctcctatggggatccctgctctccctccagggatcccccctcctcagtttcctgggttccctcctccagtgcccccgggcacccctatgatccccgttccaatgtccatcatggccccggcgcctacagtgctggttcccactgtgagcatggtcggaaagcacctgggtgcccgaaaagatcatcctgggttaaaggccaaagagaacgatgagaattgcggaccgacgacaactgtcttcgtcggaaacatttccgaaaaagcatctgacatgcttatacgccaactgctggccaaatgtgggcttgtgttgtcttggaaacgagtgcaaggggctagcgggaaactgcaggccttcggtttttgcgagtacaaagagccggagagcactctgcgcgcactccgactgctgcacgatcttcagataggtgagaaaaagctgcttgtgaaagtggacgccaaaaccaaggctcagctggacgagtggaaggcaaagaaaaaggccagcaacgggaatgccaggccagaaacagtgaccaatgatgatgaagaggcccttgacgaggagactaagcgaagggatcagatgatcaaaggtgccattgaggtcctgatcagggagtatagctccgagttgaatgcccccagtcaggagtcggactcccaccctcgtaagaagaaaaaagagaaaaaggaggacattttccgcagatttcctgtagcccctttgatcccttatcccctgattaccaaggaagacattaacgccatcgagatggaggaggataaacgtgatctaatctcccgagagatctccaaattcagagacacccacaaacgctcatatggcgattag

SEQ ID NO: 133198 - DNA, 2532 bp, synthetic construct
  misc_feature 1..2532: note = Description of Artificial Sequence: Synthetic coding sequence
  source 1..2532: mol_type = other DNA
atgtctttcccccctcacttaaatagaccacccatgggaattcctgccctgccacccggcataccgcccccacagtttcccgggttcccaccacctgtacctccaggcacccccatgattcccgttccaatgagtattatggctccggcacccacagtgctcgtccccaccgtcagcatggtcggcaagcacttgggcgctagaaaggatcacccaggcctgaaggccaaagagaacgatgagaactgcggtcctacaactacggtctttgtgggcaatattagtgagaaggcctctgatatgctcatacgacagctgctcgcaaaatgcgggctggtcctgtcctggaaaagagtgcaaggagctagcggcaagctgcaggccttcggtttttgtgagtacaaggaacctgaatcaacgttacgagctctgcgccttttacacgacctgcaaatcggagagaaaaagctgctggtaaaggttgatgccaagactaaggcccagctcgacgaatggaaagcaaaaaaaaaagcctcaaatgggaatgctaggcctgaaaccgtcaccaatgacgacgaggaggcacttgacgaggagacaaagcgtcgagaccagatgattaaaggggccatagaggtgctgataagagaatattcttcagagctgaatgccccatcccaggaatctgattcccaccccagaaagaaaaagaaggaaaagaaagaagatatttttcgccggtttcctgtggccccactcataccatacccactgattacaaaggaggacattaacgccattgaaatggaggaagataaaagagacttaatttcccgcgagatatcaaagttcagggatacgcacaagaagctggaggaggaaaaagggaaaaaggaaaaagaacgccaggagatcgaaaaggaacgaagggagagggagcgagagcgggagcgtgaacgcgagagacgggaacgtgaaagggagcgggagcgtgagcgggaacgcgaaaaggaaaaggagcgcgagagagaaagagaacgagatagagaccgggatagaactaaagagcgggaccgagatagagatcgggagagggaccgagacagggatcgtgagcggagttcggaccgcaataaagatcgatccagatctcgcgagaaatctcgcgaccgggaaagggagcgagagcgtgagcgggagagagaaagggaacgggagagagaaagggagcgcgagcgcgaaagggagagggagcgagagcgggagcgcgagcgcgagaaggacaaaaagcgagatcgcgaggaggatgaggaggacgcatacgagcggaggaaactcgagaggaagctgagagagaaagaggccgcataccaggagagactgaagaattgggaaatcagggagcgcaaaaagacccgcgagtacgaaaaggaagcggagagggaagaagagagacgtagggagatggctaaggaggctaaacgtctgaaggagtttttagaagactatgatgacgacagagacgaccctaagtactatagaggcagtgctctgcaaaagagactccgtgatcgcgaaaaagagatggaggccgatgagcgagacagaaagcgggaaaaggaagagctggaagaaatcagacagcggcttcttgcagaaggccaccctgacccggacgcagaacttcagcgcatggagcaggaggcagaaagaagaaggcaaccgcaaatcaagcaggagcccgagtcagaagaggaggaggaggagaaacaagagaaagaggaaaaacgggaagaacccatggaggaagaagaggaacctgaacagaaaccctgcttgaagcccaccctgaggcctatctcgtcagccccgagtgttagctccgcatctgggaacgccacacctaatactccgggagacgaatccccctgtggtattattattccccacgagaatagcccggatcaacagcagcccgaggagcacaggcccaagatcggcctgtctctgaagctgggagctagtaacagccccgggcagcccaacagcgttaaaaggaagaagctgccggtggattcggtgttcaacaaatttgaagacgaagattctgatgacgtgccccgcaagcgtaagctagtaccactggattacggcgaggacgacaaaaacgccactaagggtactgtcaatacagaagaaaaacggaagcatataaagtccctgatcgaaaagatccctactgcaaagcccgaactgttcgcctaccccttggactggtctatcgtcgacagcattctgatggaacgacggattcgaccctggattaataagaaaattattgaatatataggcgaagaagaggccaccctggttgatttcgtgtgctctaaggtcatggcccactcgagcccccaatcaattctggatgacgtcgccatggtactggacgaagaggccgaggtgttcattgtgaaaatgtggagattgcttatatatgagaccgaggctaaaaagatcggcctggtgaagtag

SEQ ID NO: 133199 - DNA, 732 bp, synthetic construct
  misc_feature 1..732: note = Description of Artificial Sequence: Synthetic coding sequence
  source 1..732: mol_type = other DNA
atgtccttccctcctcacctcaatcggcccccaatgggaatacccgcattgccacctggcattccaccaccccagttcccaggcttcccccctcctgtgcctccggggacacctatgatccctgtacccatgtccatcatggctcccgcaccaacagtgttggtccccactgtgtctatggtgggcaaacacctgggtgcacggaaggaccatcccggcctgaaagctaaggaaaacgacgagaactgcggcccaaccacaactgtctttgtgggtaatatatccgaaaaggctagcgatatgcttatccgccagttgctggccaaatgcggactagtactgtcatggaagcgcgtccagggagcctcaggaaaactgcaagccttcggattctgcgaatataaggagccagagagcactctacgcgcgctgcgtctgctacacgatctgcagatcggcgagaaaaagctcctggtgaaggtggatgctaaaacaaaagctcagctcgacgaatggaaggcgaagaaaaaagcaagtaatggcaatgcacggccagagaccgtcacaaatgacgacgaagaggcccttgacgaagagactaagcggcgggaccagatgattaagggtgctattgaagtgctgatccgtgagtattcatccgagttgaatgctcctagccaggaatctgactcccatccccgtaaaaaaaaaaaggaaaagaaagaagactag

SEQ ID NO: 133200 - DNA, 885 bp, synthetic construct
  misc_feature 1..885: note = Description of Artificial Sequence: Synthetic coding sequence
  source 1..885: mol_type = other DNA
atgtccttcccccctcaccttaatagaccaccaatggggattcccgcacttcccccgggcatccccccgccgcaatttcctggctttccacctcccgtcccaccaggcactcccatgatcccagtgcccatgagtataatggcacctgcgccaaccgttttagtgcctaccgtatccatggtcggaaagcatcttggcgcaagaaaagatcatccaggtctgaaggcgaaagagaatgatgagaactgtggaccaacaaccacagtgtttgtgggcaacatttccgagaaggcaagtgacatgctcatccgccagctcttagccaagtgcggactcgtgcttagttggaaacgcgtgcaaggcgccagtggtaaactgcaggcattcggcttctgtgagtacaaggaaccagaaagcaccttgagggccctgagactgctccatgacctccagataggcgagaagaagctcttggtgaaggtcgacgccaaaacaaaggcccagctcgatgaatggaaggccaaaaagaaggcctctaacgggaacgcccgcccagagacggtgaccaatgacgatgaggaggctcttgatgaggagaccaagaggcgggatcagatgatcaagggcgcgattgaagtgctgatccgtgagtactcatcagagttgaatgctccatcccaagagtctgacagccatccccgaaaaaagaaaaaggaaaagaaagaagacatcttcagaagatttccagtggcacccttgatcccgtaccctctcatcacaaaggaagatatcaatgctatagagatggaagaggacaagcgggatctgatcagtagagaaatttcaaaatttagagatacccacaagcgctcctacggcgattag

SEQ ID NO: 133201 - DNA, 1350 bp, synthetic construct
  misc_feature 1..1350: note = Description of Artificial Sequence: Synthetic coding sequence
  source 1..1350: mol_type = other DNA
atgctgcccgcagccactgcttccctattgggacctcttcttacagcatgcgcactgttaccattcgcccagggacagacacccaattacacccgccccgttttcctgtgcggcggggatgttaaaggggagagcggctatgttgcctccgagggctttccaaacctctacccgcctaataaagagtgcatttggacaatcaccgtcccagagggccaaactgtgagcttaagcttccgcgtgttcgatctggaattgcatcccgcttgcaggtacgacgccttagaagtgtttgcagggtccgggactagcggccaacggttaggccggttttgcggaacttttagaccggccccactagtggcacctggtaatcaggtgaccctaagaatgactacagatgaggggaccggcgggaggggatttttactgtggtactccgggagggccacaagtggcactgagcaccagttctgtggaggtcgtctcgagaaggctcagggcaccctcaccacccccaactggcctgagagtgattacccccccggtattagctgctcatggcacataattgcgccacccgatcaggttattgccttgactttcgagaagttcgatctggagcctgacacctactgtcgctacgactcagtttctgtgtttaacggggcagtctctgacgactctcggaggctggggaagttctgtggtgacgctgtgcccggctctatcagttccgaagggaatgaactcctcgtgcagttcgttagcgatctctccgtgacggccgatggcttttccgcatcttataagactctgcccagaggaacagctaaagagggccagggaccaggaccgaagagaggaacagaacctaaggttaaactgccacccaaaagccagccacctgaaaaaacggaggaaagcccaagtgccccggacgcgcccacctgtccaaagcagtgtcgtcgcacgggcaccctgcagtccaatttttgcgcttcgtcattggtcgtgacggccaccgtgaagagcatggtgagagaaccgggggagggactggcagtcacggtttccttgataggagcctacaagacaggaggcctggaccttccatctcctcccacgggcgcatccctgaaattttatgtaccatgtaagcagtgcccgcctatgaagaaaggtgtctcttatttacttatgggacaggtggaggagaacaggggcccagtgctgccacctgagagtttcgttgtgctgcaccgccccaatcaggaccagatcctgacaaacctaagtaagcgcaagtgtccctctcaacccgtgagggcagccgcctcacaggattag

SEQ ID NO: 133202 - DNA, 1857 bp, synthetic construct
  misc_feature 1..1857: note = Description of Artificial Sequence: Synthetic coding sequence
  source 1..1857: mol_type = other DNA
atggcgggcctgacattgttcgttggtcgtctcccaccctctgcccgctccgagcagctcgaggaactgttttctcaggtcggccctgtcaaacagtgtttcgttgtgaccgaaaaaggccgaactgtggcggtggattgggccgtcgcaaaggacaaatacaaagacacccagagcgtgtcggctattggggaggagaagtcacacgagtccaagcaccaggagtccgtcaagaaaaaaggacgagaagaagaagacatggaagaggaagagaacgatgatgacgacgatgacgatgacgaggaggatggcgtgttcgatgatgaagatgaggaagaagaaaacatagaaagcaaggtgactaagcctgtgcagatccagaaaagagctgtcaagaggcctgccccagcaaaaagctccgaccattcggaagaggactccgacttagaagagtcagattcaatcgacgatggcgaagagctcgctcagtccgacacctctaccgaagagcaggaagacaaggctgtgcaggtctctaacaagaaaaaacggaagctccctagtgacgtaaacgagggaaagactgtctttatccggaatttgtctttcgactcagaagaggaagagctcggggagctgctgcagcagtttggtgagttaaagtatgtgaggatcgtgttacacccagatactgagcactcgaagggatgcgcttttgctcaattcatgacgcaggaggcagcccagaaatgtttactggcagcctcaccagagaacgaagcaggagggctgaaattagatggaaggcagttaaaggtcgatctggccgtgacgagggacgaggctgccaaactccagacaacgaaggtcaaaaaacctacgggcacccggaatctgtaccttgctagagagggccttatccgggcgggaacaaaggcggccgagggggtaagcgctgctgatatggctaagcgagagaggtttgagctactcaaacaccagaagttaaaggatcagaacatcttcgtatcgcgcacgcgactctgcttgcacaacttgcctaaagccgtcgatgataaacaacttcgtaagctcctccttagtgctacctctggggaaaaaggcgttaggatcaaggaatgcagagtgatgcgagacctcaaaggagttcatggaaatatgaagggccagtccctcggatatgcgttcgccgaattccaagaacacgagcatgctctgaaggcgcttcggctgattaacaataacccagaaatctttgggcctctgaagcgccctatagtggagttctccctggaggatcgacgtaagctgaagatgaaggagctccggattcagaggtcgctgcaaaagatgaggtccaagcccgctaccggagagcctcagaagggccagccagagccagccaaagaccaacagcaaaaagctgcacaacaccacaccgaggaacaaagtaaggtgccacccgaacagaagcgcaaggctggttctacgtcgtggaccggctttcagacaaaggccgaagtcgaacaagtggaactgcccgatggtaagaagcgtagaaaagtcctggctctgccctcccataggggccctaagatacggctgcgtgacaaaggtaaggtcaagccggtacaccctaaaaagcccaagcctcaaataaaccagtggaagcaggaaaagcaacagctctcatcagaacaagtttcaagaaaaaaagccaagggtaataaaaccgagactagatttaaccagcttgtggagcagtataagcagaaactgcttgggccgtccaaaggcgccccattggccaagcgttccaagtggtttgattcctag

SEQ ID NO: 133203 - DNA, 720 bp, synthetic construct
  misc_feature 1..720: note = Description of Artificial Sequence: Synthetic coding sequence
  source 1..720: mol_type = other DNA
atgctgctgcaaccagctccctgtgccccttcagcgggtttccctaggcctctcgctgcccctggcgcaatgcacggaagtcagaaagatacaacctttaccaagatttttgtagggggcttgccctaccatactacggatgcgagcctgcggaaatatttcgagggattcggcgatatcgaggaggctgtggtaattaccgacagacagacaggaaagtcccggggctacggtttcgtgactatggctgacagagcggccgcggagcgagcatgcaaagacccaaatcccatcattgatggcaggaaagcaaacgtgaacctggcatatttgggcgctaagcctcgcagtttgcagaccggtttcgcaatcggtgtgcagcagctgcatccaaccctcatacagagaacttatggactgactccacactacatatatccccccgccatcgttcagccaagtgtggtcattcccgccgcacctgtcccaagcctgtcttctccctatatcgagtatacgcctgcctctcctgcttacgcccaataccctcccgcaacatacgaccagtacccttacgcagcgtcgcccgctacagcagcgtcattcgtcggatattcgtatccagcggccgttccacaagccctttccgcagcggctccagcaggtacaacgtttgtgcagtaccaagcaccacagctgcaaccagacaggatgcagtag

SEQ ID NO: 133204 - DNA, 477 bp, synthetic construct
  misc_feature 1..477: note = Description of Artificial Sequence: Synthetic coding sequence
  source 1..477: mol_type = other DNA
atggccgatcgagccgcagcagagcgtgcctgcaaagacccaaaccccattatcgatgggcggaaagcaaacgttaacttggcctaccttggagctaaaccgcggagtttacagaccggcttcgccatcggagtccagcaactgcatcctaccctcatccagaggacctatggcctgacccctcactatatctacccgccagccattgtgcaaccgagcgtggtgatccctgccgctccggtgccctctctgagctccccctacattgagtacaccccggctagccccgcgtacgcccagtacccccctgctacctacgaccaatacccctacgctgcctcacccgcaactgctgcgtccttcgtgggctactcgtatccagcagcagtgccccaggctctaagcgccgcagccccagccgggactactttcgttcaataccaggcgccacagttacaacctgataggatgcagtag

SEQ ID NO: 133205 - DNA, 366 bp, synthetic construct
  misc_feature 1..366: note = Description of Artificial Sequence: Synthetic coding sequence
  source 1..366: mol_type = other DNA
atgctgctacagcctgccccttgcgctcccagtgccggttttcctcgcccactcgcagcccctggcgccatgcacggctcccagaaggacacaacttttacaaagattttcgtgggcggactgccataccacaccaccgatgccagcctaaggaaatacttcgaaggcttcggtgacatcgaagaggcggtggtgattaccgataggcagacagggaagtcacgcggctatggcttcgtgaccatggcagatcgggcagcagctgagcgagcatgcaaggaccctaacccaatcatagacggaagaaaagcaaatgtcaatttagcctatctgggagctaagccccggtctctgcagacgggatag

SEQ ID NO: 133206 - DNA, 1095 bp, synthetic construct
  misc_feature 1..1095: note = Description of Artificial Sequence: Synthetic coding sequence
  source 1..1095: mol_type = other DNA
atggtgaaactcttcatcggtaacttaccccgcgaagccacagaacaggagattcggtcactgttcgaacagtacggaaaggtgctagagtgcgatattattaagaattatggctttgttcacattgaagataagaccgcagcagaagacgcaatcagaaacctccatcactataagcttcatggcgtgaacatcaatgtcgaagccagcaagaacaagtccaagacaagcaccaaactccatgttggcaatatctcacccacatgtacaaacaaagagctcagggctaagtttgaagaatacgggcccgtgatcgagtgcgatatcgtaaaagactacgcttttgtgcacatggagcgcgcagaggacgcagtcgaggcaatccggggccttgataatacggaattccagggtaaaaggatgcatgtgcaattatcgacgagtcgtcttcgaacggcaccaggtatgggggaccagtcaggttgctatcgttgcggcaaagaaggtcattggtcgaaggaatgccctatcgataggtccggacgtgttgcagatctgacggaacagtacaatgagcagtacggtgctgtcagaacaccttataccatgtcgtatggggatagcctgtactacaacaacgcctacggggcgctggacgcctactacaagcgatgcagagccgctaggagttacgaggcggttgctgccgccgctgccagtgtatataattatgcagagcagacgctctcccagctacctcaagtccagaatacagctatggctagtcatctcaccagtacatcgctcgacccatatgatcgccacctgctgcctacctccggagcggccgctaccgccgccgccgcagccgctgctgctgctgccgtgacggcggccagcacctcctactacgggagagaccgcagtccactgcggagggcgaccgctccagttccaactgtcggagaagggtacgggtacggccacgagtcagagctttcccaagcaagtgcagctgcacgcaacagtctttatgatatggcgaggtatgagagggaacagtatgctgaccgcgcaaggtactcagccttctag

SEQ ID NO: 133207 - DNA, 1095 bp, synthetic construct
  misc_feature 1..1095: note = Description of Artificial Sequence: Synthetic coding sequence
  source 1..1095: mol_type = other DNA
atggtcaagcttttcatcggcaacctacccagggaggcaaccgagcaggaaattaggtctctgttcgaacagtacggcaaggtactggaatgtgacatcatcaagaactacggtttcgtgcacatcgaggataagactgctgcggaagatgcaataagaaatttgcatcactataaactgcacggcgtgaatattaacgtggaagcttcaaaaaataagtctaagacctctacaaagctacacgtaggtaacatcagcccgacctgtacaaacaaggaactgagggccaagtttgaggagtacggcccagtgatcgagtgcgacattgttaaggattacgctttcgttcatatggagcgagcagaggacgccgttgaggcaatcaggggcctcgataacacagagtttcagggcaagagaatgcatgtgcaactgagtacaagccgactgcgcactgctccaggcatgggcgatcagagtgggtgttatcgatgcgggaaggaagggcattggtctaaggagtgccccattgacaggtctggtcgggtcgccgacctaactgagcaatataatgagcagtatggggctgtgagaaccccttacacaatgagctacggcgatagcttgtattataataatgcctacggcgcgctggacgcatactataaaaggtgcagggccgccagatcttatgaggctgtagccgccgcggcggcaagcgtgtacaactacgcagagcagacactgagtcaactaccccaggtgcagaacactgccatggcatctcacctgacttctacctctctggacccctatgatcggcatctcttgccaacaagcggggctgcggcaacagccgccgccgccgcggccgctgcagcagccgtgaccgctgcatctacctcatattacggccgagaccgaagtccgcttaggcgggctacagcccccgtcccaaccgtcggcgaaggatacgggtatggacatgaatcggaactgagccaggctagcgcggctgccagaaactctctgtacgatatggcccggtacgagagagagcaatatgctgatagggcacgatattccgctttctag

SEQ ID NO: 133208 - DNA, 1095 bp, synthetic construct
  misc_feature 1..1095: note = Description of Artificial Sequence: Synthetic coding sequence
  source 1..1095: mol_type = other DNA
atggtaaaactcttcattggtaacctgccgcgcgaggccactgagcaggagattcgtagcttgttcgaacagtacgggaaggtgctcgagtgcgatataattaagaactacggctttgtgcatattgaagacaaaacagcagccgaggacgctatacggaacttacaccactataagctgcacggcgtgaatattaacgttgaagccagcaaaaataaaagtaagacctctaccaagctccatgtgggaaacatatcccccacttgtacaaacaaggaactgcgggccaagttcgaggagtatggaccggtgattgaatgtgatatagtgaaggattacgcctttgtgcatatggaacgagccgaagatgctgttgaagctatccgaggcttggataacacagaatttcaaggaaagcgcatgcacgttcaactgagcaccagtcggttgcgcaccgccccgggtatgggcgaccaaagcggctgctatcgatgcggcaaagagggccattggagcaaggagtgtccaatcgaccgttcagggcgcgtagccgatttgacggagcagtataatgagcagtacggcgccgtaaggaccccctatactatgtcttatggagactctctgtactataacaatgcttacggggccttagacgcatactacaaacgctgccgggccgcgcgtagctacgaggccgtcgcggcagctgcagcctcagtgtacaactatgctgaacagactctgtcccagcttccacaagtgcagaatacagctatggcatctcatctgacttctacgtccctggacccatacgatcgccatttactccccacctccggtgctgccgccaccgccgcagctgccgccgccgccgcagctgcggtaacagccgctagtacgtcctactacggcagggatagatctcctttgagacgggccactgctcctgtaccaactgtgggggagggctacgggtatggacacgaaagcgagctaagccaagcatcggccgccgcccggaacagtctgtatgacatggctcggtatgaacgagagcagtacgccgatcgtgcacgttactccgcgttctag

SEQ ID NO: 133209 - DNA, 534 bp, synthetic construct
  misc_feature 1..534: note = Description of Artificial Sequence: Synthetic coding sequence
  source 1..534: mol_type = other DNA
atggtcaagctcttcattggtaatctgccccgtgaggctacagaacaggaaattcgctctcttttcgaacagtacggcaaagtactggagtgtgatatcattaagaattacggttttgtgcatattgaagataagacagccgccgaagacgccattaggaacttgcaccactacaagctccacggagtgaatatcaacgtggaggcaagcaagaataagtccaagactagcactaagctccacgtagggaacatatcacctacttgcacaaataaggagctacgcgcaaagttcgaggagtacgggcctgtgatcgagtgtgatattgtcaaggattacgccttcgtccatatggagagggctgaagatgctgtcgaggctattcgtggcctcgacaacaccgagttccagggagaaccaccaagcctgggacgaggacttaacacacgcctttgcgctgaaaatggatggatctccaagcggcgtggactggttaaaattacagcagtgggatggctcgtgatgaaaaagtag

SEQ ID NO: 133210 - DNA, 534 bp, synthetic construct
  misc_feature 1..534: note = Description of Artificial Sequence: Synthetic coding sequence
  source 1..534: mol_type = other DNA
atggtcaaactgtttatcggcaatcttccccgggaggcgactgaacaggagataaggagcctcttcgaacagtacggcaaagttctggagtgcgacattatcaaaaactacggcttcgttcacatcgaggataaaaccgcagctgaagatgccatcaggaatttgcaccactataagctgcatggagttaatattaacgtggaggcctcaaaaaacaaatcgaagacatccacaaaactgcacgtgggcaatatcagccctacctgcaccaataaagagctgcgtgctaaatttgaggaatacggacccgtgatcgagtgtgacatcgtcaaggactatgcatttgtgcatatggagcgtgcagaagatgctgtggaggctattcgaggactagacaatactgaatttcaaggggagcccccgtcactgggccgagggctgaatactagactgtgtgccgaaaatggctggatatcaaagaggaggggattggtgaaaatcaccgctgtggggtggctggtcatgaaaaagtag

SEQ ID NO: 133211 - DNA, 522 bp, synthetic construct
  misc_feature 1..522: note = Description of Artificial Sequence: Synthetic coding sequence
  source 1..522: mol_type = other DNA
atggtgaaactcttcatcggaaacttgccccgggaagctacagagcaagagattagaagcttgtttgagcaatacggaaaggtccttgagtgtgatataattaaaaattacggatttgtgcatatagaagataagacagcagccgaggacgcgatcaggaatctgcaccactacaagctccacggcgtcaatatcaatgtcgaagcaagcaagaacaagagcaagacctcgaccaagctccacgtgggaaacatcagcccaacatgtactaacaaagaactgcgggccaaattcgaagaatatggccctgtgatcgagtgtgatatagtaaaagactacgccttcgtccacatggaacgggctgaggacgccgtcgaagccatcaggggactggataatacagagtttcagggtaaaattaccccagtcaccgagggctattgctgttgcaataaaggtcacacctatatcttcaaaaattgcaaccttatcttagagagccggaagtccagacggtgctag

SEQ ID NO: 133212 - DNA, 432 bp, synthetic construct
  misc_feature 1..432: note = Description of Artificial Sequence: Synthetic coding sequence
  source 1..432: mol_type = other DNA
atggtgaagctttttattgggaatcttccccgtgaagccacagagcaggaaatccggagtctctttgagcagtacggaaaagtgcttgagtgcgacatcattaagaattacgggttcgtgcatatcgaggacaaaactgcagccgaggatgcaattcggaacctgcaccattacaaactgcacggcgtaaatattaacgtggaggccagcaagaacaagtcaaaaacttccaccaagttacacgttggcaacattagtcctacctgcaccaataaggagctcagggcaaagttcgaggagtatgggccagtcatcgagtgcgatatcgtaaaggattacgcttttgtgcacatggaacgggccgaagacgctgtggaggctattaggggccttgacaacaccgaattccaaggcgggatgtgtgtcggctag

SEQ ID NO: 133213 - DNA, 1443 bp, synthetic construct
  misc_feature 1..1443: note = Description of Artificial Sequence: Synthetic coding sequence
  source 1..1443: mol_type = other DNA
atggcaggcgccggaccagctccaggcctccctggggccggtgggcccgtggtgcctggcccgggcgcaggtattcctgggaaaagcggagaggaacggttaaaagaaatggaggctgagatggccctattcgagcaggaagtgctgggcgctccagttccaggtatacctaccgccgttcctgccgttcctaccgtgccaacagttcccacggtcgaggctatgcaggtccctgctgcgccggttatcaggccaatcattgcaacaaatacctaccagcaggtgcagcaaaccctggaagctagagcagctgctgctgcaaccgtggtgccaccaatggtcgggggcccacctttcgtcggtcccgtcggcttcgggcctggtgaccgctcccaccttgactctcctgaggcccgagaggctatgtttcttaggagggctgccgtggccccgcagagagccccaatcctccgcccggcattcgtcccgcatgttttgcagcgtgcagattctgctctgtctagcgcagctgccggaccccgccccatggcactaaggcctccacaccaggctctggtcgggccccctctcccaggccccccaggtccccccatgatgctaccccccatggcacgtgcgcccggcccacctctcggatcaatggcggccctgcgcccacccctggaggagccagcagcaccgagagaattgggtttggggctgggccttgggctgaaggagaaggaggaagccgtggtggcagccgctgcaggcttggaggaagcgagcgctgctgtggccgtgggcgccggcggcgcccctgctggaccagccgtcataggcccgtcattaccattggcgctggccatgcccctccctgagccggagccactgcctctccccctagaggtggtcagagggctcttaccgcctttaaggataccagagttgttatctctgcgacctagacctcgtccaccaagacccgaacccccaccaggcctgatggccttagaggtcccggaacccttgggagaggacaagaagaaaggaaaaccagagaagctcaagaggtgcatccggactgccgctgggagtagctgggaagatccatcgttgttggaatgggacgccgatgatttccgcatcttctgtggcgacctggggaacgaagtgaacgacgatattctggcccgcgcttttagccggttcccctctttcctgaaagcaaaggtcataagagataaacgcacgggcaaaaccaaggggtatggcttcgtgtcatttaaggatccatcagactatgtcagagctatgcgggaaatgaatggaaaatacgttggaagcaggcctataaagctgaggaagagcatgtggaaagatcgcaacctggacgtggtgagaaagaaacagaaggaaaaaaagaagctcggacttcggtag

SEQ ID NO: 133214 - DNA, 1356 bp, synthetic construct
  misc_feature 1..1356: note = Description of Artificial Sequence: Synthetic coding sequence
  source 1..1356: mol_type = other DNA
atggccggtgccggaccagcccccggccttccaggagctgggggccccgtcgtccccgggcccggggccggaatccccggaaagagcggagaggagagactgaaggagatggaagccgaaatggccttgtttgagcaggaggtgctgggcgctcctgtgcccggaattccaactgccgttcctgctgtgcctacagtgcccaccgtgcctacagttgaggcgatgcaggtgccagcggccccagtcatccgaccaatcattgccacaaacacctaccagcaggtgcagcagacccttgaagcccgggccgcagctgctgccacagtcgttcctccaatggtggggggaccaccatttgtgggcccagtcggctttggcccgggggaccgtagccatctggactcccccgaggctcgtgaagcaatgttcctgcgccgggccgctgcaggcccaaggcccatggccctccggccacctcaccaagctctagtgggcccccccttgccgggaccccccggaccacccatgatgttacctccaatggcacgcgcacccggaccaccactgggctccatggccgcactccgcccgccactcgaagaacctgcagccccacgcgaattgggcttgggactgggattgggtctgaaggagaaagaggaggcggtggtggcggcggccgccggattggaggaagcatccgccgccgtggccgtgggtgcgggaggcgctccagcagggccagcggtcatcgggcctagtctgcccttagctttggccatgcccctgcctgaaccggagccactgccattacctttggaagtggtgcgcggcctgttacccccattgagaattcctgagctcctcagccttcggccacgtccccgacccccccggccagaacctcctccagggttgatggccctcgaggttcctgaaccactcggcgaggacaaaaaaaagggcaaaccggaaaagctgaagcgatgtatccggaccgcggcaggatccagctgggaggacccaagcctgttggagtgggacgcggatgatttccgcatcttttgtggggatctgggcaatgaagtaaacgatgatatactggctagggctttcagccggtttccctcattcttgaaggcaaaggtaataagagacaaacggacagggaaaaccaagggctacggatttgtgtcttttaaagacccatcagactacgtgcgggcgatgcgcgagatgaatggaaaatacgtaggctcccgccccataaagttacgcaaatcaatgtggaaggacaggaatttggatgttgtccgcaagaagcaaaaggaaaaaaaaaagctcggcctgcgttag

SEQ ID NO: 133215 - DNA, 801 bp, synthetic construct
  misc_feature 1..801: note = Description of Artificial Sequence: Synthetic coding sequence
  source 1..801: mol_type = other DNA
atgggggccgctgccgctgaagccgacagaacgctgtttgtgggtaatttagagacaaaagttactgaagagctattgttcgaacttttccatcaggctggcccagtgataaaggtgaagataccaaaggataaagacggtaagcctaagcagttcgctttcgtcaatttcaaacacgaggtgagtgtcccgtacgcaatgaacctgcttaacggtatcaagttatacgggagacccattaagatccagttccgatctggttctagccatgcccctcaggacgttagtctgagctatccccagcatcatgtgggaaattcttctcctactagtactagcccaagtagatacgagaggaccatggacaacatgacctctagtgctcagataattcagcgaagcttcagctctccagaaaatttccagaggcaggcagtgatgaactccgctctgaggcaaatgagctatgggggaaagtttggctccagtcctctggaccagagtggcttttccccgtccgtgcagagccacagccatagctttaaccagtcttctagttcgcagtggcgccaagggacgcctagtagtcagagaaaagtcagaatgaatagctacccttacttagccgacagacactactcccgtgagcaaaggtataccgaccatggtagcgaccatcactatagagggaagcgggacgatttcttttacgaggaccggaaccatgatgattggtcccacgactacgacaatcgacgagactcaagcagagacgggaaatggagatcaagtagacactag

SEQ ID NO: 133216 - DNA, 525 bp, synthetic construct
  misc_feature 1..525: note = Description of Artificial Sequence: Synthetic coding sequence
  source 1..525: mol_type = other DNA
atggcagacgtgctcgatctacatgaggccggaggggaggattttgctatggatgaagatggagacgagagcatccacaagctgaaggaaaaagctaagaaacggaagggacgcggttttgggtccgaggagggtagcagagcaaggatgagggaagattacgactctgtggagcaagatggtgatgaacccggaccccaacgtagcgtggagggatggatccttttcgttacaggggtccatgaggaggccaccgaggaggatattcatgataaattcgcagaatacggcgaaattaaaaacattcatctgaacctagaccgaagaacaggatacctgaagggatacacattggtggagtacgaaacttacaaggaggcccaggccgctatggagggactcaatggccaggatttgatgggacagccaataagtgtggattggtgcttcgtgcggggaccacccaaaggaaaaagaaggggggggcggcggcggtcccgtagccccgatagacggcgcagatag

SEQ ID NO: 133217 - DNA, 522 bp, synthetic construct
  misc_feature 1..522: note = Description of Artificial Sequence: Synthetic coding sequence
  source 1..522: mol_type = other DNA
atggctgatgtactagatttgcatgaggctggcggcgaagacttcgctatggacgaagacggagatgagtccatccataaactcaaggaaaaagccaaaaaaagaaagggccgcggatttgggagcgaggggagccgcgcacgtatgcgcgaagattacgattcggttgaacaggacggcgacgaacctggcccccaacggtccgtggagggctggatactgtttgttaccggcgtgcatgaagaagcaaccgaggaggacatccacgacaaattcgccgaatacggcgagatcaaaaacatccacctcaacctggaccggaggaccggttacctgaagggctatacactcgtcgagtacgagacctacaaggaggctcaggctgcaatggagggattaaacggtcaggatctgatgggccagccaatcagcgtcgactggtgcttcgtccgtggacctccaaagggcaagaggaggggcggccgtcggcgttcaaggtccccagaccgcagaaggcgctag

SEQ ID NO: 133218 - DNA, 1179 bp, synthetic construct
  misc_feature 1..1179: note = Description of Artificial Sequence: Synthetic coding sequence
  source 1..1179: mol_type = other DNA
atggttgaagccgacaggcccggaaagctgtttatcggcggccttaacctggagacggatgagaaagctctggaagccgaatttggcaagtacgggagaatcgttgaggttttgctgatgaaagatcgggagacgaacaagtcaaggggatttgccttcgtgacttttgaatcccccgcagatgcaaaagccgcagccagagacatgaacggcaagagtctcgatggcaaggcaattaaggtggctcaggcgaccaaacccgcattcgaaagttctcgacgaggccccccccccccacggtcacgcggaagacctagattcctgagaggaacccgcggtggtgggggcggccctcgacgctccccttctagggggggcccagatgacgatggtgggtatacagccgatttcgacctgcgcccttctcgtgcccctatgcccatgaagagagggcctcccccaagacgggttgggccgccacctaagagagccgcgccaagcggacctgctaggtcgtcagggggaggtatgcgaggacgggccttggccgtcagaggaagggacggatactccggcccccctagaagggagcctctgccacccaggagggatccatacttggggcctagagacgagggctattcctcacgtgatggatacagtagccgagattacagagaaccacggggctttgcccccagccctggcgagtacacccacagggattatggccattctagcgtgcgggatgactgtcccctgcgaggatattcagaccgggatggctatggagggcgagaccgcgattatggcgatcatctgagccgtggaagtcaccgtgagccgttcgaaagttacggggaactgcggggagcagctcccggtaggggcacaccaccaagctacggaggcgggggcagatacgaagagtacagagggtatagtcctgacgcatactcaggggggcgagactcatacagttcaagctatggaagatcagacagatactctaggggacggcaccgtgtgggtcggcctgaccggggcctgtccctgagcatggaaagaggctgtccacctcaacgggattcttattcgcgtagcgggtgtagggtgccgaggggcggtggacgactgggaggaagactcgagcgcggtggcggtagatccagatattag

SEQ ID NO: 133219 - DNA, 1491 bp, synthetic construct
  misc_feature 1..1491: note = Description of Artificial Sequence: Synthetic coding sequence
  source 1..1491: mol_type = other DNA
atggtggaagcagatcaccccggtaagctgttcattggaggtcttaatagggaaactaacgagaaaatgttgaaggctgtgtttggcaaacacgggccgatcagcgaggtactgctcatcaaggataggaccagtaaatctcggggctttgcctttataaccttcgagaatccagcagacgccaagaatgcggccaaagacatgaacggaaaatcccttcatgggaaagctataaaagtcgagcaggcaaaaaaaccctcttttcagtccgggggccgacgacggccacccgcctcctcccgcaaccgatccccgtcaggatcacttcggtccgccagaggatcccggggcgggacgcgggggtggttgccgtctcacgaggggcaccttgacgacggcggatatactcctgatttaaagatgtcatactcccgggggctgatcccagtgaagaggggccctagcagcagatcaggtggcccaccaccgaaaaagtctgctccttcagcagtggctcgatctaattcttggatgggcagccagggaccaatgtcgcaacgcagggaaaactatggcgtacccccccgtcgagcgacaatctccagttggaggaacgatagaatgtccactcgacacgatggttatgccactaatgatggcaatcatcccagttgtcaagagacaagggactacgcaccaccgagtcgcggctatgcttatcgagacaacgggcatagtaaccgagatgagcatagcagcaggggttacagaaatcaccgctctagcagggaaacacgggattacgctccgccaagtcgagggcacgcctaccgcgattacggtcacagcagaagggacgagtcctattcgcgtggatatcgaaacagacgctcctctcgggagaccagggaatacgcccctcccagccgtggccatgggtaccgcgattacgggcactctagaaggcatgagagctactcgcgcggctatcgtaatcatccctcttcaagagaaacccgagactacgccccaccgcatagggattacgcctatcgggattacggccattcttcttgggacgaacatagcagcagaggttattcctatcacgacgggtacggggaggctctgggacgcgatcactctgagcacttaagtggctcctcctatagagatgccctgcagagatatgggacgtcacatggggcaccaccggctcgggggcctagaatgagctacggagggtccacgtgccatgcatatagtaacacacgagacagatatggacgatcttgggagagctattcctcatgtggtgatttccactattgcgaccgcgaacatgtctgcaggaaggaccagaggaacccaccttcactgggccgggttctgccagatccccgagaagcgtgtggtagctcctcgtatgtcgccagtatcgtcgatggcggggagtcccggtctgagaaaggggactcatcacggtattag

SEQ ID NO: 133220 - DNA, 1491 bp, synthetic construct
  misc_feature 1..1491: note = Description of Artificial Sequence: Synthetic coding sequence
  source 1..1491: mol_type = other DNA
atggtggaagcagaccaccctggcaagctttttatcggcggccttaatagagagaccaatgaaaagatgctaaaagccgttttcggtaaacatggaccaatatcggaagtgttgctcattaaggatagaacttccaagtcaagggggttcgcttttattactttcgagaatccagcagacgcaaaaaacgcggccaaggatatgaacggtaaaagcctgcatggtaaagctatcaaagtcgaacaagctaaaaagccttcctttcagagcggagggcgccggcgcccccctgcgtcgagccgtaaccgctcaccctctggctccctcaggagcgcgcgcggcagtcgcggcgggaccagaggatggctgccttcacacgaaggacatttggatgacggtggttacaccccagacctgaagatgagctactcacgtggattaatacccgtgaagcgaggtcccagttcaaggtcaggagggccccccccgaagaaaagcgcaccatctgccgtagctaggagcaatagctggatgggctctcaggggccgatgtcgcaaaggcgggaaaactacggagttcctccacgacgggctacgattagctcatggaggaatgaccgtatgtccactagacatgacggctatgctaccaatgacggcaatcacccctcttgtcaagagactcgagactatgcgcctccttcccggggctacgcctacagagataacggccattctaatagagacgagcacagcagcagaggctatcggaaccatcgctccagcagggagacacgcgactatgccccccctagccgcggacacgcttacagggactacggtcactcccgtcgcgacgaaagctatagccgaggttaccggaatcggcgaagctccagggaaacccgcgagtacgccccacctagtagaggccacggataccgagattacggccattctagacgccacgagtcgtattctcgaggctatcgcaaccacccgtctagccgggagacccgagattacgcgcctccccaccgcgattatgcttacagagattacggacatagttcttgggacgaacatagcagtaggggttacagttaccacgacggctatggtgaagctcttggaagggaccatagcgagcacttgtcaggatctagctatcgcgacgcacttcagcgctatggaacttctcacggagctccgcccgctagaggtccccgaatgagttacgggggcagcacctgtcatgcctatagcaacaccagagaccgatatggccggtcgtgggaatcctatagttcttgtggcgacttccattattgtgacagggaacacgtctgccgcaaagaccagagaaaccccccctccctcggccgggtcctgcctgatcctagagaagcctgcggcagttcttcctatgttgcctctatcgtggacgggggtgagtcgcgcagtgagaagggggattcaagtaggtactag

SEQ ID NO: 133221 - DNA, 870 bp, synthetic construct
  misc_feature 1..870: note = Description of Artificial Sequence: Synthetic coding sequence
  source 1..870: mol_type = other DNA
atgtcaacccgacacgacggatacgccactaatgacggaaatcacccaagttgtcaggagactcgtgactacgccccaccatcccgcggctatgcatatagagataacggccacagcaaccgagacgagcattccagcaggggatacagaaatcaccgatcaagccgagaaacccgggattatgcgccaccctcccgggggcacgcctacagggattatggccactcacgccgcgacgagtcttacagtcgcgggtacaggaacagacgtagcagtagggaaaccagggaatatgctccacctagtcggggccatgggtatcgagactacggccacagccgccggcacgaatcctattctcgaggatatagaaatcatcctagctcgcgggaaactcgggactatgcacctccacatcgtgactacgcatacagagactacggtcatagctcttgggatgagcactcttcacgtggctacagctaccacgatggatacggagaggccctgggccgagaccactcagagcatctgtcaggatcgagctaccgcgacgcccttcaacgttatggcaccagccatggagcaccacctgctaggggtcctcgtatgagctatggtggttctacttgccatgcctacagtaatacacgagataggtacggcaggtcctgggagtcctacagcagctgcggtgacttccattactgtgatagggagcacgtctgtcggaaggaccaacggaatcctcctagtctaggccgagtcctgccagatcctcgcgaggcctgtgggagcagctcctacgtggcaagcattgtggatggaggcgaatcgagatctgaaaaaggagatagctctagatactag

SEQ ID NO: 133222 - DNA, 1266 bp, synthetic construct
  misc_feature 1..1266: note = Description of Artificial Sequence: Synthetic coding sequence
  source 1..1266: mol_type = other DNA
atgggcaagagactggaccagcctcagatgtacccgcagtatacctattactatccacattatcttcaaaccaaacagtcttacgcccccgccccacacccgatggctcctccgagtccaagcaccaatagtagcagtaacaactccagcaataatagctcaggggaacaacttagcaagacaaatctgtacatacgaggactgccaccaggtactactgatcaggatctgataaagctatgccagccatacgggaaaattgtatcaaccaaggccattctcgacaagaataccaaccagtgcaaaggatacggtttcgtcgattttgacagccctgccgcggcgcaaaaagccgtcgccagcctgaaggccaacggtgtgcaggcacaaatggccaagcagcaggaacaagacccaaccaatttatatatttctaatctgccaatctcaatggatgagcaagaacttgagaacatgctgaaaccttttggacacgtgatatctaccaggattcttcgcgatgcaaatggtgtaagccgtggggttggcttcgcccgcatggaatccaccgaaaagtgcgaggtagtcatccagcattttaacgggaagtatctgaagactcctccagggatccctgcgccctccgagccactcctctgcaagttcgcggatgggggccaaaaaaagcggcagaatcaatccaaatatactcagaacgggagaccatggccacgggagggggaggccggaatggcactcacctacgatccaactgccgccatccaaaacgggttctacagttccccttactctatcgccaccaatcgcatgatcccgcagacatccatcactcccttcatagcggcctctcccgtttccacttatcaggtgcagagcaccagctggatgccgcacccaccatacgttatgcagcccaccggagccgtgattacacctacaatggaccacccgatgagcatgcaaccagcaaacatgatgggacccctgacacaacagatgaaccatctgtcactgggaacaacaggcacgtatatgaccgcagccgctccaatgcagggaacgtacataccacagtataccccagtgccacctactgcggtgtccattgaaggcgtggtcgccgacactagcccgcagaccgtggctccctctagtcaagacacaagcggtcaacagcagcaaattgccgtcgacacctcaaacgaacacgctcccgcatactcttatcagcagagcaagccctag

SEQ ID NO: 133223 - DNA, 1263 bp, synthetic construct
  misc_feature 1..1263: note = Description of Artificial Sequence: Synthetic coding sequence
  source 1..1263: mol_type = other DNA
atgggaaagcgattggaccagcctcaaatgtaccctcaatacacctactactatcctcactacctccaaacaaagcagagttacgctcctgcccctcaccctatggccccaccaagtccttctactaattcttcatcgaataatagttctaataactccagcggggagcaattaagcaagacgaatttgtacattagggggttaccccccggcactactgaccaagacttaatcaagctttgccaaccctacggtaaaatcgtatcaaccaaggcaattctggataaaaataccaatcagtgtaaggggtacggttttgttgactttgatagccccgcagccgcccagaaagccgtggcctcgctgaaggctaacggggtccaggcccagatggcgaagcagcaagagcaagatccaacaaatctctacatttcaaacctgcctatttccatggacgagcaagagctggaaaacatgcttaagccgttcgggcacgtgatctccacccggattctgagagatgcaaatggcgttagtagaggggtcggcttcgcacggatggagagcaccgaaaaatgtgaggtcgtaatacaacatttcaacggtaagtatctgaagacccccccaggcatcccagccccaagtgagccgttgctctgcaagttcgccgacggcggccaaaagaagagacagaatcagagcaaatatacccagaatggccggccgtggcctagagaaggcgaagctggaatggcccttacgtacgaccccacagctgctatccaaaacggattctactcgtcgccatactcgatcgccaccaatcgtatgattccacagacctccatcacgccattcattgcagcttctcctgttagcacataccaggttcaaagcacaagctggatgcctcaccccccatatgtgatgcagcccaccggcgcagtcataacacccacgatggaccacccaatgtcaatgcagcccgctaatatgatgggccctctaacacagcaaatgaaccatctttcactcgggacgacaggaacctacatgacagccgccgccccaatgcagggtacctacatcccgcagtatacacctgtccccccaaccgcggtgagcattgagggagtggtggcagacacaagcccacagactgtcgctccctctagtcaagatacatcgggccagcaacagcagatagccgtcgacacttcaaatgaacacgctccggcctactcctatcagcaaagcaagtag

SEQ ID NO: 133224 - DNA, 1260 bp, synthetic construct
  misc_feature 1..1260: note = Description of Artificial Sequence: Synthetic coding sequence
  source 1..1260: mol_type = other DNA
atgggcaaaagactcgaccagccacagatgtatccccagtatacatattattaccctcactatcttcagacaaaatcctacgcacccgctccccaccccatggcccctccctcaccctccacaaactcgtcttcaaacaactcctctaataatagctccggggaacaattgtccaagacaaatctgtacatccgcggtctcccacctggaaccactgaccaggacctgatcaaactttgccagccttatggcaaaatcgtcagtacaaaggcgatcttagataagaacaccaatcaatgcaaaggctatggatttgtagattttgattcacctgccgctgcccagaaggcagttgcaagcctgaaggccaatggcgtgcaggcccagatggctaaacagcaggagcaggatcccacaaatctctatattagtaatctcccaatatcaatggatgaacaggaactcgagaatatgcttaagcctttcgggcacgtgatctccactcgcattctgagggacgccaacggcgttagccggggagtgggtttcgctcgtatggaatctacagagaaatgtgaggtagtgatccaacattttaacggtaagtacttgaagacgcccccaggaatcccagctccttctgagccccttttgtgtaaatttgctgatggcggccagaagaagagacaaaatcagagtaagtatactcagaatggtagaccatggccaagagaaggagaggcaggcatggcactcacctacgatcccacggcagctatccagaatggtttctattctagcccttactctatcgcaactaatcgcatgattccacagacatcaattacacctttcatagctgcctccccagtttcaacctaccagggtgcggtcatcacgcccacgatggaccatcctatgagtatgcaacccgcgaacatgatgggacctttgacccagcagatgaaccacctctccctgggcaccacaggaaccattcagtcccaggaccggatcatgatcctccaccagctgctgtgccagtatatgactgctgccgccccgatgcaaggcacgtatattccccagtacacccccgtcccaccaaccgcagtgtctatcgagggggttgtggcagacacatccccacaaactgtagccccgtcctctcaggatacttccggccagcaacagcagatcgctgtcgatacttccaatgagcacgctcccgcctactcttatcagcagagcaaaccttag

SEQ ID NO: 133225 - DNA, 1314 bp, synthetic construct
  misc_feature 1..1314: note = Description of Artificial Sequence: Synthetic coding sequence
  source 1..1314: mol_type = other DNA
atggggaagaggctggatcagccccaaatgtatcctcagtacacctactactatcctcattacctccaaactaaacaatcatatgcaccggcacctcaccccatggcaccaccgagtcccagtactaactccagtagtaataacagctccaacaattcaagcggcgagcagttgagcaagacaaatctgtacattcggggactgccacctgggactaccgatcaggacctcataaaactctgccagccatacggtaagattgtctcaacgaaggccatcctggacaagaacacaaatcagtgcaagggctacggttttgttgactttgactcacccgccgccgctcagaaggctgtcgctagcctaaaggcaaacggagtgcaagcccagatggccaagcagcaggaacaggaccccacaaacctgtatatctctaacctgcctatcagtatggatgagcaagagcttgagaacatgctcaagcccttcgggcacgtgatctcaacccgtattttgcgtgatgctaacggcgtatcacggggagtcgggttcgcaagaatggaatcaactgaaaaatgcgaggtagtaatccagcactttaacggcaagtatctaaagacacccccaggaatacctgcaccaagcgagcctctgctgtgcaaatttgctgacggggggcaaaagaagcgccagaatcagtcaaagtatacacagaatggccggccttggcccagggaaggggaagctgggatggcccttacgtacgatccgaccgccgccatccagaacgggttttactcgagtccttactctatcgcaaccaatcgaatgattccacaaacctcaattaccccctttatcgccgcatcaccagtgtcaacttaccaggtccagtcaacatcatggatgccccatcccccttacgtcatgcagccaacaggggccgtgatcacgcccaccatggaccacccgatgagtatgcaacccgctaacatgatgggtcctctcacacaacaaatgaaccacctgagcctgggcaccacggggactatccaatcccaggacagaattatgatactgcaccagcttttatgccagtacatgaccgcggctgccccaatgcaggggacgtatatcccccagtacaccccggtgccgcctaccgcagtctcaattgaaggcgtggtcgcggacacatctccacagaccgtcgcacccagttctcaagacaccagcgggcagcagcaacaaatcgccgttgacaccagcaacgaacacgccccagcgtattcttaccagcaatccaaaccttag

SEQ ID NO: 133226 - DNA, 1305 bp, synthetic construct
  misc_feature 1..1305: note = Description of Artificial Sequence: Synthetic coding sequence
  source 1..1305: mol_type = other DNA
atgggcaaacggttagatcagccgcagatgtacccacagtatacttattattacccgcattatcttcaaaccaaacagagttacgcccctgcgccacacccaatggctcctcccagcccaagcacgaatagtagctccaacaactcctctaataacagcagcggcgaacaattgtctaagaccaacctgtatattcggggcctccctccaggcacaaccgatcaagacctgataaaactgtgccagccttacgggaaaatagtgagcacaaaagcaatcttggacaaaaacaccaatcaatgcaaaggctacggatttgtcgattttgacagtccagcggcagctcaaaaggccgtggcgtcgctgaaggctaacggggtgcaagcacagatggcgaaacagcaggaacaagacccgacaaatctttacatcagcaacctccccatatccatggacgaacaggagctggaaaatatgctgaagcctttcggacatgttatctccacgcgcattctgcgggatgctaacggagtttcccggggcgttggcttcgctcgtatggagtctacagaaaagtgtgaagtggtgattcagcattttaacggaaagtatcttaagaccccacccggaatacctgctcctagtgaacccctgctgtgcaaattcgccgatggaggacagaagaagcggcaaaatcagtccaagtatacccagaacggccgcccctggccccgagaaggcgaagtactcagggggcggactgttcctcggcaaaatcgcgaggccggcatggctctgacatacgatcctactgctgcgatccaaaacggcttttactcttctccctactctatcgctacgaacaggatgatcccccagacttccattaccccttttatagcagcgtcccctgtttcaacatatcaggtgcagagtacctcatggatgccccacccaccctacgtcatgcagcctaccggggccgtgattacgcccacaatggatcatccaatgtctatgcagcccgccaacatgatgggcccactcacccagcagatgaatcacctgtctctgggtactacaggcacctacatgaccgctgccgcaccaatgcaaggcacctatatacctcagtataccccagtgcctccgactgcggtttcaattgagggcgtggtcgcagacacaagtccccagactgtggccccaagcagtcaggatacttccggccaacagcaacagatagctgtggatacttctaatgaacacgcgccggcttattcataccagcaaagcaagccttag

SEQ ID NO: 133227 - DNA, 1311 bp, synthetic construct
  misc_feature 1..1311: note = Description of Artificial Sequence: Synthetic coding sequence
  source 1..1311: mol_type = other DNA
atgggcaaaagattagaccagcctcagatgtaccctcagtacacctattattatccccactacttacagaccaaatcttatgcacccgctccccaccccatggcacctccatcgccctccacaaactcgtcctcaaacaacagttccaataactcttcaggcgagcagctgtccaaaacaaatctttatattcgaggactgccaccgggcaccacagatcaggacctgatcaagttgtgccagccttacggaaagatagtgtccacaaaggctatcctggacaagaacacaaatcaatgcaagggctacggctttgtcgactttgattctcctgcagcagctcagaaggctgtggcatccctgaaggcaaacggggtacaggcccagatggccaaacagcaagaacaggaccctaccaacctgtacataagcaatctgcctatcagtatggacgagcaagaattagagaatatgttgaaaccatttgggcatgtcatttctacgcggattctcagggatgctaacggcgtgtccagaggcgtcggctttgcacgcatggaaagcaccgagaaatgtgaggtagtcatccagcacttcaacgggaagtacttaaaaacgccccctggcatccctgcccctagcgaaccactgttgtgcaaatttgctgatggcggacaaaaaaagcgccagaaccagagtaagtatacccagaatggccgaccctggccgcgggaaggcgaggcaggcatggcactcacgtatgaccctaccgctgccatccagaatgggttctactccagcccttacagcatcgccactaacagaatgatcccccagactagcatcacaccattcatcgcagcatcaccagtctccacctaccaggtgcaatcgacgtcttggatgccccaccctccctacgtgatgcagcccaccggggccgttattacgccaacaatggaccaccctatgagtatgcagcctgctaacatgatgggaccactcactcagcaaatgaatcatttgtctttgggaaccacagggacaattcagagccaggaccggatcatgattctccaccagctcctatgccagtacatgaccgccgcagccccaatgcagggtacatacattccccagtacacaccggtgcccccgaccgccgtgtccattgaaggagtggtagcagacacatccccacaaaccgttgcccccagttcacaggacactagtggccagcagcagcagatagccgtggacacttccaatgaacacgcccccgcgtactcataccagcagtctaagccatag

SEQ ID NO: 133228 - DNA, 1302 bp, synthetic construct
  misc_feature 1..1302: note = Description of Artificial Sequence: Synthetic coding sequence
  source 1..1302: mol_type = other DNA
atgggcaaaagactggaccagccccagatgtacccccagtatacgtattactacccacactacctccagaccaagcagtcctacgcccccgcacctcaccctatggcaccaccatcccccagcacaaacagctcatcgaataacagctccaacaattctagcggagaacagctctctaagaccaatctgtacatccgcggactcccgcctggcaccaccgaccaggacctcataaagctgtgccagccatatgggaaaattgttagcacaaaggcaatccttgataagaatacaaatcagtgtaaaggatacggatttgtggacttcgacagcccggctgccgcgcagaaggccgtagcctcactcaaagcaaacggagtacaggctcaaatggctaaacagcaggagcaggacccaactaacctttacattagtaaccttccaattagcatggatgagcaagaattagaaaacatgctcaaaccctttggacatgtgatatctacccggatactccgtgatgcgaacggcgtgtctagaggggtgggatttgctcgaatggaatctacagaaaaatgtgaggtcgttatccagcacttcaacgggaagtatcttaaaacgcctccagggatccccgcgcccagtgagccccttctctgtaaattcgcagacggcggtcaaaaaaaaaggcagaaccagagcaagtacacccagaacggaagaccctggccaagggaaggcgaagtacttcgggggagaacagtcccccggcagaacagggaggccgggatggcactgacgtacgaccctacggcggctatacagaatggcttttactcctcgccgtattcgattgctaccaaccggatgattcctcagacctctattactccctttattgcagcctcgccagtgtcgacctaccaggtccagagtacctcttggatgccccatcctccatacgtaatgcagcctactggcgctgtcatcactccaacgatggaccaccccatgtctatgcagccagctaatatgatgggccccttaacgcagcaaatgaaccatctttccctaggcaccaccgggacgtacatgaccgccgccgctcccatgcaggggacctacattccacagtatacacctgttcccccaacagcagtttctatcgagggggtggtagccgacacctccccacagactgtggctccaagttcccaggacaccagtggacagcaacaacagatcgcggtggacacaagcaatgaacacgcgcccgcgtatagctaccagcagtccaagtag

SEQ ID NO: 133229 - DNA, 615 bp, synthetic construct
  misc_feature 1..615: note = Description of Artificial Sequence: Synthetic coding sequence
  source 1..615: mol_type = other DNA
atgaacaatggtggaaaggccgagaaggaaaacacgccgagcgaagcaaatcttcaggaagaggaagttcggacactgttcgtttctggactgccattggatatcaagccgcgggaactgtatttactgttccggccatttaagggctatgagggctcactgattaagttgacatccaaacagcccgtcggcttcgtgtcattcgactcgcgatcagaggccgaggccgcgaaaaatgcccttaatggaatccgcttcgatccagagattcctcagactctcagactggagttcgccaaagctaacaccaagatggccaaaaacaagctggttggtacacccaatccttctacgcccttacctaacactgtgcctcagtttatagctagagaaccgtacgaactcaccgttccagccttgtatccttcctctccggaagtatgggctccttaccccttgtaccccgccgagttagccccagctttgcccccgcctgcctttacctaccctgcctctttgcacgcgcagctctgtgagggacagacggtacgcaggagccatcctctgtctgcacccagtcccgattccgccagcttggcatggtttcccgtgtag

SEQ ID NO: 133230 - DNA, 591 bp, synthetic construct
  misc_feature 1..591: note = Description of Artificial Sequence: Synthetic coding sequence
  source 1..591: mol_type = other DNA
atgaacaacggagggaaagccgagaaagagaacacaccatccgaagctaatctgcaggaggaggaggtgagaactttgttcgtcagcggtctgccactggacattaaaccacgagagctctatctgctgtttagaccgtttaaaggctatgaaggaagtttgataaaattgacctctaaacagcccgtcggtttcgtgtccttcgacagtcgaagcgaggccgaggccgcaaaaaatgcactcaacggaatccgctttgacccagagattcctcagacacttcgccttgagtttgcaaaggccaacactaagatggcaaagaacaaactggtggggacacctaatccttccacacctcttcctaacacagtgccccagtttatcgcccgagagccctatgagctgactgtgcctgccctttacccatctagcccagaggtttgggccccttaccctctttatcctgccgaactcgccccagccttaccaccaccagcctttacctatcccgcttccctgcacgcgcagatgcgatggctgccaccaagtgaggccactagtcaaggttggaagagtaggcaattttgttag

SEQ ID NO: 133231 - DNA, 660 bp, synthetic construct
  misc_feature 1..660: note = Description of Artificial Sequence: Synthetic coding sequence
  source 1..660: mol_type = other DNA
atgaacaatggcggaaaggctgagaaagagaataccccatcagaagctaacctccaggaagaagaggtccgcactctgttcgtgtccggcctgcccctggacattaaacctcgtgaactgtatctgttgtttcgaccctttaaagggtatgagggatctttgattaagctgacatctaagcagcctgtgggattcgtgtcatttgacagtaggagcgaagcagaggccgcgaaaaatgccttaaacggcatcaggtttgaccctgagatccctcagactcttaggttagagtttgccaaagcaaatacaaagatggcaaaaaataaactggtagggactccgaatccctctacgcctttacccaatacagtgccacagttcatagcgcgcgagccttatgaactgaccgtgccagccctctatccctctagtccagaagtttgggctccgtatccactgtaccccgctgagcttgctcccgccttacctcctcccgctttcacgtaccccgcatcactccatgctcagtgtttcagtcctgaggcaaagcccaatacgccagtgttctgtccccttctgcaacaaatcagattcgtgagtggcaacgtcttcgttacatatcagccaactgctgaccagcagagagaactgccctgctag

SEQ ID NO: 133232 - DNA, 591 bp, synthetic construct
  misc_feature 1..591: note = Description of Artificial Sequence: Synthetic coding sequence
  source 1..591: mol_type = other DNA
atgaataacggcggcaaggcagaaaaagagaatacaccgagcgaggccaatctgcaggaagaggaggtaagaaccctgtttgtctccggcctcccacttgatattaagcccagggagctgtacctcttgtttcgacccttcaaaggttacgagggatcgctcattaagttgacgtcgaagcagcccgtggggttcgtgtcgttcgactctagaagcgaagccgaggctgccaagaatgcactgaatggaatacgcttcgatcccgaaattccccagacattaagactggagttcgccaaggctaacaccaagatggccaaaaacaagctcgtggggactcctaatcctagcactccattgcctaacaccgttccacagtttatcgcacgagagccatacgagctgacagtccccgccctgtacccctcctctccagaggtatgggccccgtacccgctctatcctgctgaacttgcacccgccctgcctccaccagcatttacctatccagcaagcttacatgcgcagatgagatggctccctccctcagaggctacgtctcaggggtggaagtcccgacaattttgctag

SEQ ID NO: 133233 - DNA, 462 bp, synthetic construct
  misc_feature 1..462: note = Description of Artificial Sequence: Synthetic coding sequence
  source 1..462: mol_type = other DNA
atgaacaatggcggcaaggctgaaaaggaaaacacccccagtgaagctaacttgcaggaagaggaggtgaggacgctgtttgtatctggactgcctctcgatatcaagccccgggagctttatttactgtttaggccattcaagggctatgaaggatccttgatcaaactcacaagtaaacagcctgtcggtttcgtttcattcgactcacggtccgaggcggaagcagccaagaatgctttgaacgggattagattcgatccagagattcctcagacactacgcctcgagtttgctaaggccaacaccaaaatggcaaaaaataagttagtgggcacccctaatccatctactcctctcccaaataccgtgccccaattcatcgccagagaacccctgatgcgatggctacccccctcagaagctacctcccagggatggaagtcccggcagttttgctag

SEQ ID NO: 133234 - DNA, 1257 bp, synthetic construct
  misc_feature 1..1257: note = Description of Artificial Sequence: Synthetic coding sequence
  source 1..1257: mol_type = other DNA
atgttggcatctcaaggcgttttattgcatccatatggcgttccaatgatcgtgcctgccgctccttatttgccaggcttgatccagggaaatcaagaggcggccgccgcccccgataccatggcccaaccttacgcctcagctcaattcgcccccccgcagaacggtatacctgctgaatataccgccccccacccacaccctgcgccagagtataccgggcaaaccacggttccagagcatacactgaatctgtacccacccgctcagacacactctgaacagtcacctgctgacacatcagcgcaaacggtcagcggaacagctacccaaaccgacgatgcagcgccaaccgatggccagcctcagacacaaccctccgagaataccgaaaacaagagtcagcccaaaaggcttcacgtgtccaacataccatttcgctttcgggatcccgacttgagacagatgttcggtcagtttggtaagatcctcgatgtggaaatcatattcaacgaaaggggcagcaaaggcttcggcttcgtgacctttgaaaactctgctgacgccgatagagcaagggagaagttgcacggcaccgtcgttgaaggaagaaaaatcgaggttaacaatgcgacggctagggtgatgacaaataagaaaaccgtgaatccttatacaaatggctggaagctcaaccccgttgtgggggccgtgtattcccccgagttttacgctgggaccgtcttactgtgccaggctaaccaggaaggctctagtatgtatagcgcccccagttcccttgtctacacatccgcgatgccagggtttccttaccccgccgcgaccgccgccgccgcctatcgcggagcccaccttaggggccgcggccgcaccgtgtataatacatttagagcggccgcacccccacccccaattcccgcctacggcggtgttgtttaccaggagccggtctacgggaacaagctgctgcagggaggttacgccgcctacagatacgcacagccaactccggccacagccgccgcctactccgatagctacgggagagtgtacgctgcagacccttatcatcatgccctggccccagccccaacatatggtgtgggcgctatgaacgcctttgcacccttgaccgatgcgaaaactcgctcacacgctgatgacgttgggcttgttctctcaagtctgcaggcctccatttaccggggaggctataaccgatttgctccctattag

SEQ ID NO: 133235 - DNA, 1209 bp, synthetic construct
  misc_feature 1..1209: note = Description of Artificial Sequence: Synthetic coding sequence
  source 1..1209: mol_type = other DNA
atgatcgtgcccgctgctccttatctaccaggtctcatccagggtaaccaggaggctgccgctgcaccagatactatggcacaaccatacgcatctgcccaatttgcaccaccccagaatgggatcccggctgaatatactgccccacacccgcacccagctccggagtataccggacagactaccgtgccagagcacacgctgaatctgtacccccctgcccagacacactccgaacagtcccccgctgacaccagcgctcagactgtttccggaacggccacccaaacggacgatgccgcacctacagatggccagccccagacccagccctctgagaacaccgagaataagagtcagcccaagcgtctgcacgtgtcgaacatcccatttagatttagagaccccgatttgaggcagatgttcggccagttcggcaagattctggacgttgaaataatcttcaatgagcggggaagcaaaggtttcggcttcgttacctttgagaactcagctgacgccgatagagctagagagaagctccatggtaccgtcgtagagggacgcaagattgaagtcaacaacgctacagctcgggttatgactaataaaaaaacggtcaacccgtacaccaacggctggaaactgaaccctgtggttggagccgtgtactcgccagaattttacgcaggcacagtccttttgtgtcaggctaaccaggagggcagctcaatgtattcagccccctcttccctggtctataccagcgctatgccgggattcccatatcctgccgccactgccgccgcagcatatcggggcgcccatctgcgtggacgtggacgcaccgtgtacaatacgtttagagcagccgcaccaccacccccaattcccgcatacggaggagtggtttaccaggacgggttttacggcgcagatatttacgggggctacgcggcctatagatacgcacagccaacgcccgccaccgcagcggcctactcagatagttatggaagagtgtatgctgctgacccgtaccaccacgcgctggctcccgcccccacttatggggttggtgccatgaacgcgtttgccccactgactgatgctaagactagaagtcacgctgacgacgtggggctggtactcagctctctgcaggcatccatctacaggggcggttataatagattcgcaccgtattag

SEQ ID NO: 133236 - DNA, 1176 bp, synthetic construct
  misc_feature 1..1176: note = Description of Artificial Sequence: Synthetic coding sequence
  source 1..1176: mol_type = other DNA
atgctggccagccagggcgttctgctgcacccctatggcgtgcccatgatcgttcctgccgccccatatcttcccggcctgattcagggtaaccaggaggctgctgctgcaccagatacaatggctcaaccctacgcctcggcccaattcgccccgccacaaaatgggattccagccgagtacaccgccccccatccgcacccggcccctgagtacacaggccagacgaccgtaccagaacacactctgaacctgtatcctccagctcagacccacagtgagcagtcacctgctgacacatccgcacagaccgtgtctggcacggcaactcagaccgatgacgccgctcctaccgatggccagccccaaacccagcccagcgaaaacacggaaaacaagtctcagccaaagcgcctccatgtgtccaacatccccttcagatttcgggatccagaccttcgtcagatgtttggccagtttggcaaaatactggacgtcgaaattattttcaatgaaagaggaagcaaaggtttcggatttgtcaccttcgagaatagcgccgatgccgatcgagccagagagaaactgcacggcactgtcgtcgagggccggaagattgaagtgaacaacgccaccgctcgggtgatgaccaataagaagaccgtgaacccttacaccaatggatggaagcttaaccccgtcgtcggcgcagtttacagtccagagttttatgcagtcccaggttttccctatcctgcggcaacagcagctgccgcataccggggcgcgcatctccgaggacgaggacgcacagtgtataatacctttagggccgctgcccccccacctccgatccctgcttacggaggagtcgtgtaccaagagccagtgtacggcaacaagttgctgcaggggggctatgccgcctaccggtacgctcagcccacccccgccactgccgcagcgtatagtgacagttacgggcgagtatacgcagccgacccataccaccatgcgctggcacccgctccgacatatggggttggcgccatgaacgcctttgcacctttgaccgatgccaagactcgctctcacgcagatgatgtcggccttgtgctgtcatcgctccaagcatccatttaccgaggcggctacaatcgctttgctccctattag

SEQ ID NO: 133237 - DNA, 1188 bp, synthetic construct
  misc_feature 1..1188: note = Description of Artificial Sequence: Synthetic coding sequence
  source 1..1188: mol_type = other DNA
atgctggctagccagggagttctattgcacccctatggcgttccgatgatcgtccccgccgcaccatatctgcccggtctaatccagggtaatcaggaagctgcagcagccccggataccatggcccaaccttatgcctcagcccagttcgcaccaccgcagaatggtatccctgccgaatacaccgcaccacacccgcacccagccccagagtacactggacaaacaacagtgccagagcacactttgaacctataccctcctgcacagacgcactccgagcagagccccgccgacaccagtgctcagaccgtgtcggggacggcaacacagacagacgatgctgctccaaccgatggacagcctcaaacccagccatcggagaataccgagaataaatcgcagccaaaaagactgcacgtgtctaacatccctttcagattcagagacccagacttaaggcagatgttcggccaattcgggaagatccttgatgtagagatcattttcaatgagagaggatctaaaggtttcggattcgtgacctttgaaaattcggctgacgccgatagggctagggagaagctgcacggaactgtcgtggagggccgcaaaatcgaagtgaataatgccacggccagagtcatgaccaacaaaaaaacggtcaatccatatacgaatggctggaagctgaatcctgtcgtgggggctgtctactcaccagaattttatgccggcactgtattgctgtgtcaggccaatcaggagggatcttctatgtactctgctccatcttctttagtctacaccagcgccatgcctgggtttccctaccccgcggctaccgctgccgctgcttatagaggcgcccacctgaggggccggggaaggactgtgtacaatacatttagagcagctgcccccccacccccgattcccgcctacggcggtgtggtttatcaggaaccagtctacggaaacaagttgctccaaggaggctacgccgcctataggtacgcacagccaaccccagccacggccgccgcatatagcgaccgcaaccaattcgtctttgtggccgctgatgaaataagttgcaatacttccgccgtgaccgacgaattcatgttgccgacccccacaaccacccacctcttgcagccaccccctacagccttggtgccttag

SEQ ID NO: 133238 - DNA, 1179 bp, synthetic construct
  misc_feature 1..1179: note = Description of Artificial Sequence: Synthetic coding sequence
  source 1..1179: mol_type = other DNA
atgcttgcctcacagggggtgctactccacccgtacggcgtgccgatgatagtgccagcagccccttatctacctggcctgattcaaggcaaccaagaggccgcagcagctcctgacaccatggcgcagccatatgccagcgcccagtttgctccaccccaaaacggaatccccgccgaatacactgccccccaccctcaccctgccccggagtacactggtcagaccaccgtgcctgagcacacacttaatctttaccctcccgctcaaacacatagcgaacagagcccggccgatacctctgcccagacggtctctgggactgctactcaaaccgatgatgcagcccccaccgatggacagcctcagactcaaccttccgagaataccgagaataaatcacagccgaagcggttacacgttagcaatatccctttccgctttagagacccagacctgcggcagatgttcggtcagttcggaaaaatcctggacgtcgagatcatatttaatgaacggggaagtaagggctttgggtttgtaacatttgagaactcagccgatgccgaccgggctcgcgaaaaactgcacgggaccgtggtagaggggcggaaaattgaggtcaacaacgcaaccgctagggtgatgacaaataaaaagactgttaacccgtacaccaacggatggaaactcaatcctgtggtgggagccgtgtacagcccagagttctatgccggtactgttctgctctgccaggccaaccaagagggcagtagtatgtatagtgcaccttcttcactcgtatatacctctgccatgccaggtttcccttaccctgctgccaccgccgccgcggcatataggggtgcccacttaaggggtagggggcgcaccgtttacaacacctttagggcagcagccccgccgcctccaatcccagcttatggcggagtcgtttatcaagagcccgtgtatggcaacaaactgctacagggcggatatgctgcctatcgatacgcgcagcccacacccgctactgctgcggcctactctgattcttatgggcgggtctatgctgctgacccctaccaccatgcgctcgcccccgctcccacgtatggggtcggtgccatggcttctatctaccgggggggctataatcgattcgccccatactag

SEQ ID NO: 133239 - DNA, 1194 bp, synthetic construct
  misc_feature 1..1194: note = Description of Artificial Sequence: Synthetic coding sequence
  source 1..1194: mol_type = other DNA
atgaattgcgagcgcgaacaactgcggggcaaccaggaggccgcagctgccccagatacgatggcacagccatatgcaagtgcacagtttgccccacctcagaatgggatcccagctgaatacactgccccgcacccccatccagcaccggagtacacaggacaaactactgtgcctgagcatactctgaatctctaccctccggctcagacccactcagagcagagtccagcagacacttccgcacaaaccgtttcaggtaccgcaactcagactgatgatgccgctcccaccgacggtcagcctcaaacgcaaccgagtgagaacactgagaacaagagtcagccaaagcggttgcacgtctctaatattcctttccgatttagagatccagacttgcggcaaatgtttgggcagtttggaaaaatcctggacgtggaaatcatattcaacgagcgcggaagcaaaggtttcggcttcgtaacttttgaaaactcagcagacgcagacagggcccgcgagaaactccatggtactgttgtcgaaggtcggaaaattgaagtgaataatgccaccgcaagagtaatgaccaataaaaagactgtcaacccttacacaaacgggtggaaactaaaccccgtggttggtgccgtctactcaccagagttttatgctggcactgtgctactttgccaagctaaccaggaagggagttctatgtacagtgcaccctccagcctggtgtacacaagcgcaatgcccggatttccctatcctgccgccaccgccgctgccgcctacaggggggcacatctcagaggcaggggcagaaccgtatacaacacttttagggccgccgctccaccccctccgatccccgcctatgggggggtcgtttaccaggacggcttttacggggcagatatctacggaggatacgctgcatacagatacgctcagccgacaccagcgaccgccgctgcctacagcgatagctatggcagggtgtacgcagccgacccgtaccaccatgccttggctcctgctcccacatatggagtgggtgccatgaacgctttcgctccactcaccgacgcaaaaacacgcagccatgcagatgatgttggtctcgttctcagctcactacaggctagtatttataggggtgggtacaacaggttcgctccatactag

SEQ ID NO: 133240 - DNA, 1401 bp, synthetic construct
  misc_feature 1..1401: note = Description of Artificial Sequence: Synthetic coding sequence
  source 1..1401: mol_type = other DNA
atggagacagggcaaaggacgcacgccagcggaacctatagttttctcgatcgcacgcagcattcagatataaaagctgattgcaatacctgtgtggagatcgaggataggaaagtgtcccggcagcagatgaattgcgagcgtgaacagctgagaggcaaccaagaggctgcagccgctccagatactatggcccagccgtatgctagcgcccagttcgcccccccacagaatgggatcccagccgagtacactgcgcctcatccgcatcccgcaccagagtacaccgggcagacaacagtgccagaacacactttgaacctctacccaccagcccagacacatagcgagcagtccccagccgacacatccgcccagacggtgtctggcacggcaacacagacagacgacgctgccccaactgatggacagcctcagacccaacctagtgagaacaccgaaaacaagtcccagcctaagaggctgcacgtgtctaatatcccatttcgttttagagaccccgacctaagacagatgtttggacagtttggaaaaatcctcgatgtagagattattttcaacgagcggggcagcaagggatttggattcgtcacattcgaaaactccgcagatgccgacagagcccgcgagaaactacatggcacagtggtggaagggcggaagattgaggtcaataacgctacggcacgggtgatgactaacaagaagacggtgaatccctacacaaatggctggaaacttaaccctgtagtgggggcagtatactcacccgaattctacgccgggactgtgctgctgtgccaggctaatcaggaaggatcaagcatgtattcggcgcccagcagcctggtgtacacttcggctatgcccggttttccctaccctgctgccaccgccgccgcagcttaccggggagctcatctccgggggcggggtcgcactgtgtacaatactttccgcgcagctgctcccccacctcccattcccgcctatggcggagtggtctaccaggacggcttctatggggcagacatttatggaggctacgcagcctatcgctacgcacaaccaacccctgctacagctgcagcatattccgataggaatcagtttgtgttcgtggctgccgacgaaatctcctgcaacaccagcgctgtgactgacgaatttatgctgcccacccctacgactactcacctactgcaaccaccaccaactgccctggtcccatgcccgaaagtgccagcacctgctcaaacgagtgaagaactgagctgcaccctgcctggactttgctgtcaggcagccgaaaacctgactgcttccccacccctgctgcagttcatgtttaaagtgattgtggctcaagaaaggaaatag

SEQ ID NO: 133241 - DNA, 1194 bp, synthetic construct
  misc_feature 1..1194: note = Description of Artificial Sequence: Synthetic coding sequence
  source 1..1194: mol_type = other DNA
atgaactgcgagcgggagcagctgcggggcaaccaggaggcagcggctgctcccgatactatggcacaaccgtacgcttcagcccaattcgcccctcctcagaacggcataccagcagaatacaccgccccgcacccacaccctgctcctgaatacaccggacagacaaccgtacccgagcacactctcaatctgtatccccccgctcagacacatagtgagcagtcacccgctgatacaagcgcccagacagtctccggaacggcaacacagaccgacgatgcagcccccaccgatggacagccacagacacagcccagcgagaacacagaaaacaagtcccagcctaaacgccttcatgttagcaacatacctttcaggttccgggacccagatttacggcaaatgttcggccagtttggtaaaatcctcgacgtcgagataattttcaacgagagaggatcaaagggctttggattcgttacatttgagaatagcgctgacgccgaccgggcccgggaaaaactgcatggaactgtggtagaggggcggaaaatagaagtcaataacgccacagcccgggtcatgaccaataaaaagactgtcaacccgtataccaacgggtggaagttgaatcccgtagtgggggctgtttactcacccgagttttatgctggaacggtgctcttatgtcaggcgaatcaagagggctcttccatgtattctgctccaagcagtttggtgtatacatcagccatgccggggtttccatatccagctgctacagccgccgccgcataccggggagcacacctccgcggcagaggcaggactgtctacaacaccttccgcgctgcggccccacccccccctattccagcgtatgggggggtggtctaccaggacggattttatggagcagacatttacggagggtatgctgcttacagatacgcccagcctacacctgcaaccgccgctgcctattctgactcctacggccgggtctacgcagccgacccatatcaccacgcgctcgctccagcccccacctatggcgtgggcgcaatgaacgctttcgcacctctgaccgacgcaaaaacgcgtagccacgccgatgatgtggggttagtgttaagctccttacaggccagtatatacagagggggatacaaccgcttcgcaccctattag

SEQ ID NO: 133242 - DNA, 792 bp, synthetic construct
  misc_feature 1..792: note = Description of Artificial Sequence: Synthetic coding sequence
  source 1..792: mol_type = other DNA
atgaactgcgaaagagagcagttacgtgggaatcaggaggccgctgctgctcccgacactatggcccagccatatgcctctgcacaattcgcaccccctcagaacggaatacccgccgaatacaccgcgccacatccacatcccgcacctgagtacaccggccagaccactgtccccgagcacactttaaatctctatcccccagcgcaaacacactccgagcagtcacctgccgataccagcgctcagaccgtgtcaggaacagccacccagacagacgatgccgcacccaccgatgggcagccccaaacccagccctctgaaaatacggagaacaaaagtcaacccaagcgcctccacgtaagtaatatccccttccgcttcagggatccagatttgcgtcagatgtttggacagtttgggaaaatcctcgatgttgagattattttcaacgaaagaggaagcaaaggctttgggttcgttacattcgagaattccgccgacgccgaccgagctcgggagaagttgcatggaacagtggtcgaaggtagaaagatcgaggtgaataatgcgacagcacgcgttatgaccaataagaaaactgtgaacccctataccaatggctggaaactcaaccccgtggtcggcgccgtgtactcccccgagttctacgccggaaccgtactattatgtcaggccaatcaagagggttcatccatgtattccgccccctctagtctggtctacacaagcgcaatgccaggtttcccttacccagccgcaacagcctag

SEQ ID NO: 133243 - DNA, 1113 bp, synthetic construct
  misc_feature 1..1113: note = Description of Artificial Sequence: Synthetic coding sequence
  source 1..1113: mol_type = other DNA
atgaattgtgagagggagcagttgcggggtaatcaggaggctgcagccgctccggacacgatggctcaaccttacgcctccgcgcagttcgcacctccacagaacggaatcccagccgagtacaccgctccacaccctcatcctgctcccgaatacacaggccagacaacagtgccagaacacacattaaacttgtatccgcccgctcagacccactcagaacagagccctgcggatacaagcgcccaaacagtgagcggcacagcaacccagacagatgacgctgcccccaccgatgggcaacctcaaacccagccgtcagaaaacactgagaataagtctcaacccaagcgactccatgtctcaaacattcccttcagattcagagaccccgacttacgccagatgtttgggcagttcggtaagatcctagacgtggaaattatctttaacgaacgggggtctaagggctttggattcgtcacctttgagaattccgcagacgccgaccgtgccagggagaagctgcacgggactgtggtggaagggaggaaaatcgaggtaaataatgcaaccgctagagtgatgacaaataagaaaactgtgaatccctacaccaacggttggaaactgaacccagttgttggagctgtgtacagtcccgaattctacgccgtccccggattcccgtatccagccgcaacagctgctgctgcctacaggggcgcccatttgagaggccggggtaggacagtctacaacacgtttcgtgcagcagctcctcctccccctatccccgcttacgggggcgtggtttatcaggacggattttatggcgccgacatctacggcggctatgcagcttataggtacgcccagccaacccccgccactgctgccgcttatagtgatagctatggcagggtgtacgccgctgatccgtaccaccatgcacttgcccctgctccgacctatggcgtgggagcgatgaatgcattcgcacccctgaccgatgccaaaacccggtcacacgctgatgacgttggtttggtgctctctagcctacaggcgagcatctaccgcggtggatacaacagattcgctccatactag

SEQ ID NO: 133244 - DNA, 1725 bp, synthetic construct
  misc_feature 1..1725: note = Description of Artificial Sequence: Synthetic coding sequence
  source 1..1725: mol_type = other DNA
atggcccacaacaaaatacccccgaggtggttaaactgtccacgtcgcggccagcctgtggctggtcgatttcttccccttaaaaccatgctcggcccacggtacgatagccaagtggctgaagagaatcgctttcaccccagcatgttatcgaactatctgaaaagcttgaaagtaaagatgggcctgctggtggatctgaccaacacatctcgcttctatgaccgcaatgacattgagaaggaaggtatcaagtatatcaaactacaatgtaagggacatggcgagtgccccaccaccgaaaacactgaaaccttcattcggctgtgtgaaaggttcaacgagagaaacccgccagaactgattggtgttcactgcactcacgggttcaatcggacagggtttctcatctgtgcgttcctggtggaaaagatggactggtctatcgaagcagcagttgccaccttcgctcaggcccgtcctcccggaatatataaaggagactatctgaaagagctgttccgaagatacggtgacatcgaagaggctccaccccctcccctgttgcccgactggtgcttcgaagatgacgaagatgaagacgaggatgaggatgggaaaaaggaatccgagcctggaagttcagctagctttggcaaaagacggaaggagagactgaaactcggtgctatatttctggagggggttaccgtgaaaggagtgacccaagtgacgactcaaccgaaactgggcgaagtccagcagaagtgtcatcagttttgcgggtgggagggctcgggattcccgggcgctcagcccgtttccatggacaagcagaacattaagttgctggatctgaaaccatataaagtcagttggaaagccgatgggaccaggtacatgatgctgatcgacgggacaaacgaggtgttcatgattgatcgcgacaacagtgtttttcacgtatccaacttggaattcccatttagaaaagacttaaggatgcatttgtctaacactctgctagacggggaaatgatcatagatcgcgtcaacggccaagcggtccctagatatctgatctatgatataataaaattcaactcgcagcctgttggggattgtgactttaacgttagacttcagtgcatcgagcgtgagatcatcagcccccgacacgaaaagatgaagacaggtttgattgataagactcaggagcctttttccgtccggaacaaaccttttttcgatatttgtacaagccggaagaagtataagcccggacggtgtgatgatatactcaaatggaaaccgccctctttgaattctgttgactttcggctcaagatcacacggatggggggggaagggctgttgccacagaacgttggacttctttatgtcggaggatacgagagaccattcgcccagatcaaagtgactaaggaactcaaacagtacgacaacaaaatcatcgaatgtaagttcgagaataattcctgggtgttcatgcgccagagaaccgacaagagctttcctaatgcatataacaccgctatggctgtgtgcaactctattagcaacccagtaacaaaagaaatgctctttgaatttattgatagatgcaccgctgcatctcagggccagaagagaaaacatcacttagatccagacacggagttgatgcccccaccgcctccaaaaagacctaggccattgacctag

SEQ ID NO: 133245 - DNA, 1626 bp, synthetic construct
  misc_feature 1..1626: note = Description of Artificial Sequence: Synthetic coding sequence
  source 1..1626: mol_type = other DNA
atggcccataataaaatccccccccgttggctgaactgtccccgccggggccaacccgtcgcaggccgctttctccccctgaagacgatgctgggcccccgctacgacagtcaggtcgccgaggagaatcgctttcacccttctatgttgtcaaactatctaaaatcactgaaagtaaaaatgggacttctggtggacttaacaaacaccagcaggttctacgataggaatgatatcgagaaagagggaatcaagtacatcaagctgcaatgcaaaggccacggggaatgcccgactactgagaacacagaaacattcatacggctctgcgagagattcaatgagcgtaacccaccagaattaatcggcgtacattgtacccacggttttaacagaaccggcttcctgatctgtgcctttttggtggaaaagatggactggtctatcgaagccgcagttgcaaccttcgcacaggccagaccaccaggaatctataagggcgactatttaaaagaactgttcaggcgttatggcgatatagaagaggcccctccaccacctttactccctgactggtgttttgaagacgacgaagatgaggacgaagatgaggacggaaagaaggagagtgagccaggcagctccgcgtcatttggtaagcgccgcaaggaacggttgaagctaggagctatctttctggagggagttaccgtgaagggcgtgactcaagttaccacccagccaaagctgggtgaggtccagcagaagtgccatcagttctgcggctgggaggggtcaggattcccaggcgcccagcccgtgtctatggataagcagaacatcaagctgcttgacctaaagccttataaagtctcttggaaggccgacgggacaaggtatatgatgttgatagatgggacgaatgaagtcttcatgattgatagagacaatagtgtgtttcacgtcagcaatctcgagttccctttcaggaaagatttgcggatgcacctgtcgaatacactcctcgatggcgagatgattatagaccgcgtaaacggccaagccgtgccacgctacctaatctatgatatcatcaagtttaatagccagccggtcggtgattgcgatttcaacgtgcgtctgcagtgcatagagcgtgagatcatcagtccaaggcatgaaaagatgaagacaggactcattgataagacccaggagccgttttccgttaggaacaagcccttttttgatatctgcactagtagaaagttgctggaggggaacttcgccaaggaggtgagtcatgagatggatgggcttatattccagccaacaggaaagtacaaaccaggtaggtgcgacgacatcctaaaatggaaaccaccatctttgaattctgtggactttcgccttaaaattactcggatggggggtgagggactactgccgcagaatgtcggtctcctatacgttggtgggtatgaacgcccatttgctcagattaaggtgtgcctcttcatcttcagtgtgttgtttttggacgttctgctgtctagaatacaccaaaacctggctaataacaatcagcatatcaagatatcttgcagctcgaccctgggcggttag

SEQ ID NO: 133246 - DNA, 1794 bp, synthetic construct
  misc_feature 1..1794: note = Description of Artificial Sequence: Synthetic coding sequence
  source 1..1794: mol_type = other DNA
atggcacataacaaaattcctcccaggtggctgaattgcccccgccgcggccagcccgtagcaggtaggttcttgccattgaagaccatgcttggcccccgttatgatagtcaggtggctgaggagaaccgcttccaccccagcatgcttagcaattatctgaaatctttgaaagtgaaaatggggttacttgtggacctgactaatacctccaggttctacgaccgcaacgacatcgagaaggagggcattaaatacatcaaactccagtgtaagggccatggagaatgtcccactacagaaaatacggagacattcattcgcctatgtgagcggtttaacgagagaaatccccccgaactaataggggtgcattgcacacatgggttcaatcggaccggattcctcatatgcgccttcctggtagagaaaatggactggtctattgaggccgcggtggctacctttgctcaagcacgaccgccagggatctataagggggattacttgaaggaactattccggagatacggagacatcgaagaagctcccccacctcccctactgcccgattggtgctttgaagatgacgaggacgaagacgaagatgaggatggcaagaaagaaagcgagcctggctcctctgcgtcttttggaaagcggaggaaggagcgcctgaaacttggagccatttttttggaaggagtcacagtgaaaggggttacacaagttacaacgcagccaaagctcggcgaggtacagcagaagtgccatcagttctgtggttgggaggggtccggatttcctggagcacagcctgtgtcaatggacaagcagaacatcaagctcctggatctgaagccttacaaggttagttggaaggctgatggtacccgatacatgatgcttatagacggaacaaatgaagttttcatgattgatagggacaacagcgttttccacgtgtccaatctggaatttcctttccgcaaagacctgcgcatgcacctgtctaacactcttctggacggtgagatgatcatcgaccgagtcaatggccaggccgtccccaggtaccttatttatgacatcattaagttcaacagccaacccgttggcgattgtgatttcaatgttcgactccagtgcattgagcgggagatcatcagcccaaggcacgagaaaatgaagaccgggctaatcgataagactcaggaacccttttccgtgagaaataagcccttcttcgatatttgtacgagtcggaaacttttagagggcaatttcgcaaaggaggtgtcacatgaaatggatggtctgatcttccaaccaactgggaagtacaagccaggaagatgcgacgacatcttaaaatggaagccgccatctctcaattcggtggatttccggctgaaaatcacaagaatggggggagaggggttgctgccacagaatgttggactcctgtacgtgggtgggtatgagcggccctttgcccagatcaaagtcacaaaggagctgaaacaatacgataataagatcatagagtgcaaattcgagaacaacagctgggtcttcatgcggcagagaacagacaaatcttttcccaacgcatacaataccgcaatggctgtgtgcaactcgatctctaatcccgtcacaaaagagatgctttttgaatttatagataggtgtacagcagccagccagggacagaagcggaaacaccatcttgatcctgatacagagctcatgccacccccaccccccaagcgaccacgccctcttacatag

SEQ ID NO: 133247 - DNA, 1707 bp, synthetic construct
  misc_feature 1..1707: note = Description of Artificial Sequence: Synthetic coding sequence
  source 1..1707: mol_type = other DNA
atgctgggccctagatacgacagccaggtcgctgaagaaaaccggtttcacccttcaatgttgagcaattatctaaagtccctcaaggtaaaaatggggcttctggtcgacctcactaatacaagccggttctatgatagaaacgatattgaaaaagaaggtatcaagtatattaagctgcagtgtaagggccacggcgagtgccctacaactgaaaacactgagacttttatccggctttgtgaacggtttaatgaaaggaatcccccagaactgataggcgtgcactgcacacacggcttcaatcgcaccggtttcctcatttgcgctttcctggtagaaaaaatggattggtctatcgaggcggcggttgccactttcgcgcaggcccgacctcctggaatctacaagggggattacctcaaggaactattcagacgctacggcgacatcgaagaagccccccccccacctctgttgcccgattggtgcttcgaggacgacgaggacgaagacgaggatgaggacggaaaaaaggagtccgagccgggctctagcgcttccttcggtaagcgccgcaaggaacggctgaagctgggagcaattttccttgagggtgtcactgttaaaggggtcactcaggttacaacccaacctaagctgggcgaagtgcagcagaaatgtcaccaattctgtggatgggagggctcaggcttccctggagcccagccagtgtcgatggacaagcaaaatatcaagctcctggatctaaagccttacaaggtgtcttggaaggctgatggaacccgatatatgatgctgatagatgggactaacgaggtgtttatgattgaccgcgacaattcagtgtttcacgtatctaatttagagttcccattccggaaggatctgagaatgcacctgagcaacacacttctggacggagaaatgataatcgatcgggtgaatggacaggctgtgccaaggtacctcatatacgacatcattaaattcaattctcagcccgtgggagattgtgacttcaacgtgcggctccaatgcattgaacgagaaatcataagccctcgccacgaaaagatgaaaactggcctgatcgacaaaacacaagagcctttctcagttcgcaataagcccttctttgacatttgtacctctagaaagctgcttgaaggcaattttgcaaaggaggtgagtcacgagatggacggcttgatttttcagcctaccggcaaatataaacctggacgttgtgatgatatcttgaagtggaagccccccagtctgaactcagtggattttcgactaaaaatcactcgcatgggtggagagggactcttaccccagaacgtgggacttctctatgtgggcggctatgaacgcccctttgcacagataaaagtgacaaaggaactgaaacagtacgacaacaagatcattgagtgcaagttcgagaacaattcatgggttttcatgcgccaaagaaccgataaaagctttcctaatgcctacaacaccgccatggccgtctgtaattccattagcaatcctgtgactaaagaaatgttgttcgagttcatagataggtgcacagccgccagtcaggggcagaagcgtaagcatcacttagaccccgatactgaactcatgccaccgcctcctccgaagagaccccggccactgacatag

SEQ ID NO: 133248 - DNA, 1545 bp, synthetic construct
  misc_feature 1..1545: note = Description of Artificial Sequence: Synthetic coding sequence
  source 1..1545: mol_type = other DNA
atgggactgcttgtggacctgaccaacacgtcacgcttctatgaccgcaacgacatagagaaagagggcattaagtacatcaaattgcagtgtaaggggcacggggagtgtccgactaccgagaacacggaaacctttatacgtttatgtgagcgcttcaacgagcgaaacccaccagagctgattggagtccactgtacacatggttttaaccggactgggttccttatttgcgctttcttggtggagaaaatggactggtccattgaggctgccgttgcgacatttgcccaggccagaccaccaggtatttataaaggagactatttgaaggaactcttcagacggtatggggacattgaagaggccccaccgcctccgctgttgccggactggtgctttgaagacgacgaggacgaagacgaagatgaggacggaaagaaggaaagcgagccaggatcaagcgcatcctttggcaaacgcagaaaggagcggttaaagctaggcgccatctttttggagggtgtcactgtgaaaggggttacccaggtcacaactcagccaaaacttggcgaggtgcagcagaaatgccatcagttctgtggttgggagggtagcggctttcctggagcccagcccgtttccatggacaagcaaaatatcaagctgcttgacctgaagccatacaaggtttcctggaaggccgacggcactcgttacatgatgcttattgacggcaccaacgaggtttttatgatcgacagagacaactccgtctttcatgtgtcgaacttagagttcccattcaggaaagaccttaggatgcatctgtctaatacactgcttgatggtgaaatgattattgatcgcgtgaacggccaggctgtacccaggtaccttatatacgacattatcaagtttaattcccaacccgtcggagattgcgacttcaacgtccggctccagtgtattgaacgtgagattatcagtccccgccacgaaaagatgaaaaccggcctcatagataaaacacaggagcctttttccgtacgaaacaaaccgttttttgatatttgtactagtaggaagaagtacaaaccagggcggtgcgatgatatcctgaagtggaagcctcctagtctgaactccgtggacttcagactaaaaattacgcgaatgggaggggagggtcttctcccccagaacgttgggctcttgtacgtgggcggttacgaacggcctttcgcgcagatcaaagttacaaaagagctcaagcagtacgataataaaattattgagtgcaagtttgaaaacaacagctgggtgttcatgcgccaaagaaccgacaaaagtttccccaacgcgtataatactgctatggccgtgtgcaactccatcagcaacccagtgaccaaggagatgcttttcgagttcatcgaccggtgtactgccgcatcgcaggggcaaaaacgcaagcaccacttagatcctgacacagagctcatgcctccacctccccccaaacggccaaggcctctgacctag

SEQ ID NO: 133249 - DNA, 1263 bp, synthetic construct
  misc_feature 1..1263: note = Description of Artificial Sequence: Synthetic coding sequence
  source 1..1263: mol_type = other DNA
atggctgcccttgtccgccccgctaggtttgtggtgaggccactccttcaggttgtccaagcctgggatcttgacgctcgccgctgggttcgggccttgaggaggagccctgtgaaagtcgtgttccctagcggcgaggtagtggaacaaaagcgtgcgcctgggaaacaaccaaggaaggctccttcagaagcctcagctcaggagcaacgtgagaaacagcccctcgaagaatcagcgagtagagctccctccacttgggaggaaagtggcctccgatatgataaagcataccctggggataggcgcctgtcgtcggtcatgactattgtcaagagccgaccattcagggaaaagcaggggaaaattctcctggaggggagaagactgataagtgatgccctaaaggctggggccgtcccaaagatgttcttcttcagcaggctggagtacttgaaggagctccccgtggacaaactgaaaggcgtgtccctcattaaagtgaaattcgaggacatcaaagactggtctgatctcgtgacgccccagggaatcatgggaatcttcgccaaaccagaccacgtaaagatgacttacccaaagactcagcttcaacacagcctccctctcctgttgatttgtgacaatttgcgcgaccccgggaacctgggtacgattctccgaagtgctgcaggcgcggggtgctcaaaagttcttctgaccaaaggctgtgttgacgcctgggagcccaaagtcttacgcgccggcatgggggcccactttcgcatgccaattattaataacctggaatgggagaccgtgcctaattatcttcctccagacaccagagtgtacgtcgccgataattgcggcctttatgctcaggccgagatgtcgaataaggcatcggaccacggctgggtgtgtgatcagcgcgtgatgaaatttcataagtatgaggaggaagaggacgtcgagacaggggcctcgcaggactggctaccgcatgtagaggtgcagagctacgacagcgactggactgaggcgcccgcagctgtggtgataggtggagaaacctatggagtctctcttgaatctctgcagttggctgaatctacaggagggaagagattactgataccagtggtgccaggggttgactctctgaattcggcaatggctgccagtattctactgttcgagggcaaacgacagctacggggtagagccgaagatctcagccgcgatagatcttaccattag

SEQ ID NO: 133250 - DNA, 4182 bp, synthetic construct
  misc_feature 1..4182: note = Description of Artificial Sequence: Synthetic coding sequence
  source 1..4182: mol_type = other DNA
atgctgtcccgacccaagccgggggaaagcgaagtcgacttgctgcatttccagagccagtttttggccgccggcgctgcccccgccgtccaactggtcaaaaagggcaacagaggcgggggggacgccaactccgatagacctcctctccaggaccaccgggatgtagtgatgctcgataacctccccgatctgccccctgctctggtgcccagcccacccaagcgcgcacggccgtctccgggccattgcctgcccgaagacgaggatccggaagaaaggctgaggagacacgaccagcatatcactgctgtgttaaccaaaatcatagagagagatacgagctccgtcgccgttaacctgcctgtcccaagcggtgtcgcctttcccgccgtgttcctgagatctcgtgacactcaaggcaagagcgccacttcagggaagagatctattttcgcccaggagatcgctgccagacggattgcagaagccaaaggacctagcgtgggcgaggttgtgcccaacgtggggcctcccgagggcgccgtgacgtgtgaaactcctaccccaaggaaccaggggtgtcagctccccggctcgagtcattcttttcaaggaccaaacctggtgaccgggaagggactgcgggaccaggaagccgagcaggaagcacagacaattcacgaggagaatattgcacgcctgcaggctatggcccccgaggagattttacaggagcagcagcgacttttagctcagttggatccaagtttggtggccttcctccgcagccactctcatacacaggaacaaaccggcgaaacagcatccgaagagcagaggccaggcggaccaagcgccaatgtcaccaaagaggagccgctgatgtccgctttcgcgagcgagcctcgcaagagggacaaactggaacctgaggctcccgccctagccctgcctgtgacacctcagaaggagtggctgcacatggacactgttgagctggagaaattgcactggacacaggatttgcccccagtccgtcgacagcaaacacaagagcggatgcaggcacgcttttccctgcagggggaactgctggccccggatgtggatctaccaacacaccttggactgcatcatcatggggaagaagctgagcgggctgggtattccttacaggagttgtttcaccttacccggtcccaggtcagccagcagagagctctggcgctgcatgtgctcgcccaggtgatttcccgtgctcaggcgggcgaattcggagaccggctcgcaggaagcgtgctgtccctcctcctggatgcgggcttcctgtttcttctgcgtttttctctcgacgatagggtggatggggtgattgcgactgctattagggccctgcgcgccctcctcgttgcccccggagatgaggagctcctggactctaccttctcctggtaccatggagcactcacattccccctcatgccctctcaggaggacaaggaggatgaggacgaagatgaagagtgccctgcgggaaaggccaaacgcaaatctccagaagaagagagccgcccgcctcctgatctggcgaggcacgacgtgattaagggcctgttagccacctctttgcttcccaggctacgctacgtgctggaggtcacctatcctggacccgcagtggtgctggacatattagccgtgctgattagactcgcccgccattctctggagtctgctacacgggtattagagtgtcccagactcatcgaaacgattgttagagagtttctgcccacatcctggagtccggtgggagccggacctacaccatcactttacaaggtgccatgcgctactgcgatgaagttactgagagtgcttgccagtgccggaaggaacattgccgcgcgcctgttgagctcatttgatttacgaagccgcttgtgccgcataattgccgaggcaccacaggaacttgctttgcccccggaggaggcagaaatgttaagcacggaggctctgaggctgtgggcggtagccgcttcctatggccagggtgggtacctatatagagaactatatccagtcctaatgagagcactgcaggttgtccccagagagctgtccactcacccgcctcagccactctccatgcagagaattgcttctctgctcacactgctgacacaacttacgttggccgccggcagcaccccagctgagactatttccgacagcgctgaggcgtctctctcagcaacacctagcctggtaacctggacacaagtcagtgggctccagccattggttgaaccatgcctgaggcaaacattaaaactgttgtctaggcccgagatgtggcgagcagtgggaccggtgccagtagcatgtctcctgttcttaggggcgtactatcaggcttggagccaacagccttcgagctgccccgaggactggttacaagatatgcaacgcctgagtgaggaactgctgctccctctgctcagccagcctacactgggttcactctgggattcactacggcactgtagcttattgtgtaatcctttgagctgtgtccccgcactggaggccccacctagtctagtaagcctgggctgtagcggcgggtgtcctagactgtctctggccggttccgcctctccattcccttttttgacagcacttctctcactcctcaatacattggcccagatccataaaggactgtgtggacaacttgcagcaatcctggcggcccctggcctgcagaattatttccttcagtgtgttgcaccaggcgcggctccacacctgacccctttctctgcctgggccttgagacatgagtatcatctccagtacctcgctctggctctggctcagaaggctgctgctctgcaacccctgcccgcgactcacgcggcactctaccacggaatggcattggctctactgagtcgcctgctgcctggcagcgaatacctaacccatgaactgctccttagttgcgtttttaggctggaatttctgcccgagaggacatccggcggcccagaagccgccgattttagtgaccagctgagcttgggaagttcccgggtccccagatgcggtcagggcacacttcttgcccaggcgtgccaggacctaccatctattagaaattgttacctgactcactgtagcccagctagagcgtccttactagcgtctcaagccctccatagaggggagttgcagagggtgcctactttgcttctgcccatgccgaccgagccactactgcccacagactggcccttcttgcctctgatccgcctttaccacagggctagcgatactccgagtggcctgtcaccaacggatacgatgggcactgcaatgagagtcttgcagtgggtactcgtactggagtcatggcgtcctcaggccctgtgggccgtgccccctgcggccaggctggcccgcttgatgtgcgtgttcctggtggactccgagctgttcagggagtctcccgtccaacaccttgtcgccgctcttctggcccagctgtgccagccacaagtgcttccgaacttgaacctcgactgccgccttcctgggctgaccagcttccccgatctctacgctaacttcctcgaccacttcgaggccgtttctttcggcgaccacctgtttggggccctggtgcttctgccattgcagagacggttcagcgtcacactgcgcctcgctttattcggagagcacgttggggctctgcgcgccttgagcctaccgttgactcagctgccggtctccttggagtgctacactgtcccccctgaagataatctggcattattgcagctatacttcaggacgctggtgacgggcgccctgcgaccgcgttggtgtcctgtgctttatgcggtggccgtggcgcacgtcaactccttcattttctcgcaagacccacaatcatcagatgaagtaaaggctgccaggcgttccatgctccagaaaacttggctcctcgccgatgagggcttacggcagcacctgcttcactacaagctgccgaactccaccctgccggagggcttcgaactctatagccaactgccgcccctgcggcagcattatctgcagaggctcaccagtacagtgctgcaaaacggggtatccgagacgtag

SEQ ID NO: 133251 - DNA, 1839 bp, synthetic construct
  misc_feature 1..1839: note = Description of Artificial Sequence: Synthetic coding sequence
  source 1..1839: mol_type = other DNA
atggctgatttcgccggaccttcctctgccggtcggaaggccggagcacccagatgttccagaaaggcagccggaactaagcagacatcaaccctcaagcaggaggacgcttctaagcgcaaggccgaactggaagcagcagtgaggaagaaaattgaattcgaaagaaaagcactccatatcgtggagcaactcctggaagaaaacataaccgaagaatttctgatggagtgcggacggtttatcacaccagcacactactcagacgttgtcgacgagcgctccatcgttaaactgtgtgggtacccattgtgccagaagaaattgggcattgtcccaaagcagaagtacaaaatctccaccaaaaccaacaaagtgtatgatatcactgagaggaagtctttttgcagcaacttctgttaccaagccagcaagttctttgaggcccagatcccaaaaacccccgtatgggtccgcgaagaggagcggcacccagatttccaactgttaaaggaagaacagagcggccattcaggagaagaggtgcagctgtgtagcaaagcgataaaaactagcgacatcgacaatccttcccatttcgaaaaacaatatgagagcagttcctcaagcacccactccgatagctccagtgacaatgagcaggatttcgtgagctctatattgccaggcaataggcccaacagcactaacattaggccccagctgcatcagaaatctatcatgaagaaaaaagctggtcacaaagccaacagtaagcataaggacaaggaacagaccgtggtggacgtcaccgagcaattaggggattgtaagctcgatagccaggagaaggacgccacctgtgaactgcccctgcaaaaggtgaacacccagagttcctccaattctaccttgcctgaacggctcaaggcctctgaaaattctgagtctgaatattcccgcagcgagattacactggtgggaattagtaaaaagtccgctgaacattttaagcgcaagtttgccaagtctaaccaagtgagtagaagcgtgtcatccagcgtgcaggtgtgcccagaggtgggtaagaggaacctgcttaaggtcctcaaagaaacgctgatcgaatggaaaacagaggagactctcagattcctgtacggtcaaaattatgcctctgtgtgccttaaaccagaggcttcattagtaaaggaggagctggacgaggacgatattattagtgatcctgatagccacttccctgcctggagggaaagccagaatagcttggacgaatcgctgccattccgaggatccggcacagccattaagcccctcccttcctacgagaatctaaaaaaagagacagagaaactcaacctgagaattagagagttctatcgtgggcggtatgtcctgggcgaggagactactaaaagccaggactccgaggagcatgacagcacattccctctgatcgactcatcaagtcagaaccaaatccggaagaggatcgttctggagaagctatcgaaggtgttgccgggcttactcgttccattgcaaatcacgctgggtgacatctatacccaattgaagaacctggtcagaacatttcgcttgacgaaccgaaatatcatccataaacctgcggagtggactctgatagccatggtgctgctgtctctgctcactcccatccttggcattcagaagcactcacaggaaggcatggtgtttactaggtttctggacacattacttgaggaactccacctgaagaacgaggacttagagtccttgaccattatcttccggacttcctgcctgccagagtag

SEQ ID NO: 133252 - DNA, 1755 bp, synthetic construct
  misc_feature 1..1755: note = Description of Artificial Sequence: Synthetic coding sequence
  source 1..1755: mol_type = other DNA
atggcagattttgctggaccctcatcggctggcagaaaggccggagctccaagatgcagtcgcaaggctgcaggtacaaagcaaacatctactctcaagcaggaggacgcatctaagagaaaggccgagttagaggcggcggtgcgaaaaaaaatcgaattcgaaagaaaagccctgcatatcgtggaacaactgctcgaagagaatatcacggaagagttcctaatggagtgtggacgcttcataacccctgctcactattcagacgtcgtggatgaaagatccatcgtcaagctctgtggttatccactttgtcaaaaaaaactgggaattgtaccaaaacaaaagtataaaatcagcacgaaaacgaacaaggtgtacgacatcacagaaagaaagagtttctgttctaacttctgctatcaggccagcaaattcttcgaggcccagattcccaaaaccccagtgtgggtacgggaagaggaacgtcatcccgattttcagctcctcaaggaagagcagtcaggacactccggggaagaagtccaactgtgttcaaaagcaattaaaactagtgacatagacaatccttcccacttcgagaaacagtatgaaagcagcagtagcagcacacattcagacagcagcagcgataatgaacaggattttgtgtcttccatcctcccgggaaacagacctaactccaccaatataaggccacagctgcaccagaagtccatcatgaagaagaaggctggacataaggctaacagcaaacacaaagacaaggagcagactgttgtagacgtcacggagcaattgggagattgcaagctggacagtcaagagaaggacgctacgtgcgaattgcccctccaaaaagtaaatactcagtcttcttcaaacagcaccctgcccgaaaggctgaaagcctcagagaactcggagtccgagtattctcggtctgagattacactggtaggcattagcaagaaaagtgctgaacactttaagaggaaattcgccaaatccaatcaggtgagtaggagcgtatcctcttccgttcaggtctgccccgaggtaggcaagcggaacctcctaaaggttttgaaggagacgctgatagaatggaaaactgaagaaacattgcggttcctctatggacaaaactatgcaagtgtgtgcctgaagcctgaagcctccctggtaaaagaagaacttgacgaggatgatatcatttccgatccagactctcactttccagcctggcgagaatctcagaactctctggacgagagcctgcccttccgcgggtccgggacagctataaaaccactgcccagttatgaaaatctgaaaaaggagaccgagaagctaaacctgcggatccgggagttttacagagggcgctacgtactaggagaagagactactaagtcacaggattctgaggagcatgatagcacttttccactcattgatagtagcagccagaatcaaatcagaaagcgcatagtgcttgagaaactttcgaaagtgctacccggactgcttgtgccattgcagatcaccctgggtgatatatacacacaactgaagaatttggtacggacattccgactgacgaataggaacataattcacaaacctgccgaatggacactcatcgcgatggtccttttgtccttcctgctgaacgtgaagacacggattaagacattcatgatgatttacttccacctgatgaactcttag

SEQ ID NO: 133253 - DNA, 1998 bp, synthetic construct
  misc_feature 1..1998: note = Description of Artificial Sequence: Synthetic coding sequence
  source 1..1998: mol_type = other DNA
atgactagtgcgaataaagctatagagctccagcttcaggtcaaacagaacgccgaagagctgcaggacttcatgcgcgacctagagaactgggaaaaggacattaaacaaaaggatatggagctcaggaggcagaacggcgtcccagaagagaatctccctcccatacggaacggcaattttaggaaaaaaaaaaagggaaaggcaaaggagtcttccaaaaaaaccagagaggagaataccaaaaaccggatcaaatcatatgactatgaagcttgggcaaaactagatgtagaccggatcctcgatgagctagataaggatgacagtacccacgagtctctgtcacaagaatctgaatcagaggaagatggaattcacgtggatagccagaaggccctggtgttgaaggagaagggaaataaatactttaaacaggggaagtatgatgaggccatcgattgctacaccaaagggatggacgccgacccatataatccggttttgcccacgaatagagcaagcgcatatttcaggctcaagaagtttgcagttgctgagtcggattgcaatctggcagtagcactgaaccggtcttacaccaaagcatactctcggcgtggggctgcacgcttcgctctccagaagcttgaagaggccaagaaagattatgaaagggttttggagcttgagcccaacaatttcgaggctactaacgagctgcgcaagatatctcaggcactcgccagcaaagagaactcttatccaaaggaggccgacatcgtcatcaagtctactgagggagaaaggaagcagattgaggctcaacagaataaacagcaagcgattagcgaaaaggaccgaggcaacggtttttttaaggagggaaaatatgaaagagcaattgagtgttatacacggggtatcgctgctgatggggccaatgctctgttacccgcaaaccgtgcaatggcttacttgaaaattcagaagtacgaagaggcagagaaagattgtactcaggcgatcctcctcgatggctcttatagtaaagcatttgctcgtaggggcacggccagaaccttcctgggaaaactgaatgaggccaaacaagatttcgagacagtgctgctgcttgaacctggcaataagcaggcagtgaccgagctctcaaaaatcaaaaaagaacttatcgagaaaggacactgggatgacgtattcctggacagcacccagaggcagaacgttgtcaagcctatcgacaaccccccccatcccggcagtactaagcccttaaagaaagtgattatagaggagacaggcaatctgatccagaccatcgacgtaccagactccaccacggccgccgcccccgagaataaccccattaacctggcgaacgtgatcgcagccaccggcaccacaagcaagaaaaatagttctcaggatgacttgttcccaacaagcgacacgcctcgggccaaggtcctaaaaattgaagaggtgtccgacactagctcgctgcagccccaggcgagcctgaagcaggatgtttgtcagagctattctgagaaaatgccaattgagattgagcagaaacccgcacagtttgcaaccacagtcctgccacccattccagcaaactctttccaattggaatccgatttccggcagctgaaaagctccccagacatgctgtatcagtatcttaagcagattgagccatcactgtatcctaagttgttccaaaaaaatcttgatcctgatgtgtttaaccaaatcgttaaaattctccacgacttttatattgagaaggagaagcctcttctgatcttcgaaatcttgcagcgcctgtcagagttaaaacgatttgatatggcagtaatgttcatgtcggagactgagaagaagatcgcacgggcactgtttaaccacattgacaaatcgggtctgaaggacagctctgtggaggagctcaaaaagcgttatggcggctag

SEQ ID NO: 133254 - DNA, 1896 bp, synthetic construct
  misc_feature 1..1896: note = Description of Artificial Sequence: Synthetic coding sequence
  source 1..1896: mol_type = other DNA
atgacttcagctaataaggccatagaactgcaacttcaggtaaagcagaacgctgaagagctgcaggattttatgagggacctggagaactgggagaaagatataaagcagaaagatatggagttaaggcgccagaatggagtacccgaggagaacctccctccgattcggaacggcaatttcaggaagaagaagaagggtaaagccaaagaaagtagcaaaaagacacgtgaggagaataccaaaaatcgtattaagtcttacgattatgaggcttgggcaaaactcgatgtggatcgcattctggatgaacttgacaaagacgacagcacccatgaatccctgagccaggaaagcgagagcgaagaagacgggatccacgttgattcacagaaagccctagttctgaaagaaaaaggtaacaaatattttaaacagggcaagtatgacgaggctatcgactgctatacaaaagggatggacgccgatccttacaaccccgttctgccaacaaatcgggcctccgcgtatttcaggttaaagaaatttgctgtcgcagagagtgactgtaacctcgcggttgctttgaatcgcagttacaccaaggcgtatagtcgcaggggggcagctcgtttcgccctccagaagctcgaggaggcaaaaaaagactacgagcgggtgctggagctcgaacccaacaattttgaggctaccaacgaactgcggaagatcagccaggcgctagctagcaaggagaactcatatcctaaagaggccgatatagtgatcaaatctactgaaggcgaacggaaacagattgaggcccagcagaacaagcagcaggccatcagtgaaaaagaccggggcaatggattttttaaggaggggaaatatgagagagcaatcgaatgctataccagaggcatcgctgcagatggcgcaaatgcattgttacccgctaaccgcgcgatggcctatctcaagatccagaagtatgaggaggccgagaaggattgcactcaagcgatccttctggacgggtcctactctaaggctttcgcccggagaggcaccgcccgcactttcctcggcaagctgaacgaagccaagcaagattttgagaccgtccttcttctggaacccggtaacaagcaggccgtgacggaactgagcaagatcaagaagaaacccctcaaaaaggtaatcatagaagagacagggaacctgatccagaccattgacgtgcccgatagtactaccgccgcggcccctgaaaacaaccctataaacctggccaacgtgatcgcagcgacaggtactacaagtaagaaaaactcctctcaggacgacctgttccccacgtccgacacccctagggccaaggttttaaagattgaggaagtgagcgacaccagtagtctgcaacctcaagcgagcctcaagcaagacgtgtgccaatcctacagcgagaagatgcctattgagatcgagcagaaaccagctcagttcgctacaaccgttctgccccccatccccgcaaattcttttcagctcgaatctgactttcgccaattaaagagtagccctgatatgctgtatcagtacctcaaacagatcgagccatcgttgtaccctaaactgttccaaaagaatctggaccctgacgttttcaaccagattgtgaaaattctgcatgacttctacatcgagaaagaaaaacccctcctgatctttgagattttacagagattatcagagttaaagaggtttgacatggccgtgatgttcatgtcagaaacagagaagaagatcgcgcgtgcactttttaatcatatcgacaagtccggtctcaaagattcgagcgtggaggaactgaaaaagaggtatgggggttag

SEQ ID NO: 133255 - DNA, 1521 bp, synthetic construct
  misc_feature 1..1521: note = Description of Artificial Sequence: Synthetic coding sequence
  source 1..1521: mol_type = other DNA
atggacgcagacccttacaatcctgtgctccccaccaatcgggcctccgcttactttcgtctgaaaaagttcgcggttgccgagagcgattgtaacctggctgtagccctgaaccggtcctacaccaaggcatacagcaggcggggggcagcgcggttcgcacttcagaaactggaggaggctaaaaaggattacgaaagggtgcttgagcttgagcctaataactttgaggctaccaatgagctcaggaagatctctcaggccttagccagcaaggaaaacagttatccaaaagaagccgacattgtgattaagtccactgagggggagaggaagcagattgaagcgcagcagaataagcagcaagccattagcgagaaggatcgagggaatggcttttttaaagagggaaagtacgaacgggccatagagtgttatactcgagggatagctgccgacggcgccaacgccctgctgccagccaaccgggccatggcatacttaaagatccaaaaatatgaagaagctgaaaaagactgcactcaagcaatccttttggacggtagctattctaaggctttcgccagacgcgggaccgctaggaccttcctcgggaagttgaatgaagcaaaacaagacttcgagaccgtgttactactcgagccaggtaacaaacaagccgtcactgagctctcaaaaattaagaaagagctcattgaaaagggtcattgggacgatgtgttcctggactccacgcagcggcagaacgtcgtcaaacctatagacaaccccccacacccagggagcacaaagcctttgaagaaggtcattatcgaggagacaggaaatttaatccaaacaatagatgtacccgactcgactacagccgcggcgccagaaaataatccaattaatttggcaaatgtaatcgctgctacaggaacaacctcaaaaaagaactcttctcaggatgatctgtttcctacctcagacaccccccgagcaaaagtgttgaagatcgaagaggtttccgacacctctagtctgcagccacaagcgagcctcaagcaagacgtttgtcagtcatattctgaaaagatgcctatcgaaattgagcaaaaaccagcccagtttgctacgactgtgttaccgcccataccggcaaacagctttcagctagagagtgatttccggcaattaaaaagtagcccagatatgctctaccaatatctgaagcagatcgaaccaagcttgtatccaaagctgttccaaaagaatctagatccggacgttttcaaccagatcgtgaagatcctgcatgatttctacatcgagaaagaaaaacctctacttattttcgagatcctgcagagactttctgagctaaaaagatttgatatggccgtgatgttcatgtcagaaacagagaaaaaaattgctagggccctcttcaatcacattgacaagtccggactgaaagactcgagcgtggaggagttgaaaaaacggtatggggggtag

SEQ ID NO: 133256 - DNA, 4821 bp, synthetic construct
  misc_feature 1..4821: note = Description of Artificial Sequence: Synthetic coding sequence
  source 1..4821: mol_type = other DNA
atgatcgccgagccagcccatttttatctttttggtctgatctgtctctgttcaggctctcgtctccggcaggaggacttccccccacgaatcgtggagcatcccagtgaccttatcgtatcgaaaggtgagcccgctacactcaattgtaaggcagaaggaaggccaacgccaaccatcgagtggtataagggtggggagagagttgagactgataaggatgatccaagaagccaccggatgctgctcccatctggttcactgttttttcttaggattgttcacggtcgaaaatctaggcccgatgaaggagtgtatgtgtgtgttgcacgcaactacctcggagaggccgtaagtcataatgcatctcttgaggttgccatcctccgagacgactttaggcagaatccctcagacgttatggtggctgttggcgagcctgccgtgatggaatgccagccccctcgggggcaccctgagcctaccatttcttggaaaaaggacggaagcccactcgatgacaaggatgagcgaataaccattaggggcggcaagctcatgataacctacacgcggaagagtgacgccggaaaatacgtgtgtgtcgggaccaacatggttggcgaacgcgagagcgaggtggcggaactcaccgtcctggagagaccttcattcgtcaaacgcccgagcaacctggcagtaacagtggacgactcagcggaatttaaatgtgaagccagaggagaccctgttccaactgtaaggtggcgaaaagacgatggggaactccctaaaagtcggtacgaaatcagagacgatcatactcttaagatccgtaaggttaccgccggggacatgggctcctacacttgcgtggccgagaatatggttggcaaagctgaagcgagcgctacacttacagttcaggcgccatccgagccaccgcactttgtcgtaaaaccaagggatcaggtagtggccctggggagaacagtgacattccagtgcgaggccacagggaacccacaaccagctatattctggaggagggagggctcgcaaaacctcctcttctcctaccaaccccctcagtcctcctcccggttctccgtttcacagaccggagatctgacgatcaccaacgttcaacgctctgacgttggatactacatctgccagactctgaatgtggctggttccatcatcaccaaggcctacttagaggttacggatgtcatagccgaccgccccccaccagtgatacggcagggaccagtaaaccaaaccgttgcagttgatgggaccttcgtgctgtcgtgtgtggccacggggagccctgtccctacaatactctggcggaaggacggcgtcctcgtctccacacaggattccagaataaaacagctcgagaacggggtgctgcagataagatacgccaaattgggcgacactggtcggtacacatgcatcgcctccacaccctctggcgaggcgacttggtctgcatatatcgaggtgcaagaatttggagtgcccgtacaaccaccacgcccaactgaccctaacttgataccatccgccccctctaaacccgaggtgaccgacgtgtcccgcaacactgtgactttatcctggcagcctaacctgaactcaggcgcgacccccacatcctacatcatcgaggcattcagccatgcatccggctcctcctggcaaactgtagccgagaacgttaagacagaaacctcagcaatcaagggactgaaacccaatgccatttatctatttttagtccgcgctgcaaatgcctatggcatcagtgatccatctcagattagcgatcccgttaagacccaggacgtcctgccgacatctcaaggggttgaccacaagcaggtgcagcgtgagcttggcaacgcagtgttgcacctccacaaccctaccgttttgtcatcttcttccattgaggttcactggactgtagaccagcaatctcagtacattcagggctacaagatcctgtatcgaccatccggtgccaatcacggagaatctgactggttggtgtttgaagttcgaaccccggccaaaaattcggtcgtgatccctgacttaagaaagggcgtgaattacgagatcaaagctcggccattcttcaacgagtttcagggagccgactctgaaattaaattcgcgaagacattggaagaggccccttctgcccctccccagggcgtgacagtaagtaagaatgatgggaacggtacagcgattcttgtgtcctggcaaccacctcccgaggatacccaaaatgggatggttcaggagtacaaggtgtggtgcctgggaaatgagactagatatcacatcaacaaaaccgtagatggttcaaccttctcagttgtgatcccgttcctggtgccagggatacgctactctgtagaggtcgccgcttcaactggcgcgggaagcggagtgaaatcagaacctcagtttattcagttggacgcccacggcaaccctgtctctcccgaggaccaggtgtcactggcacagcaaattagcgatgtggtgaaacagccagcatttattgcagggattggtgccgcttgttggattatacttatggtgttctccatttggttgtacagacatcggaagaaaaggaatggactaacgtccacttacgctgggattaggaaagtaacatatcagagaggaggcgaagctgtgtcctcaggaggccgccccggccttttgaatattagcgaaccagccgcgcagccctggcttgcggatacatggcccaacaccgggaacaaccacaacgattgcagcatttcatgctgcacagctggcaacggaaactccgacagcaaccttaccacatatagcaggccggctgattgcatcgctaactataacaatcagttagacaataaacaaaccaacctaatgttgccagagtccactgtgtatggcgacgtggatctgagtaacaaaattaacgaaatgaagacctttaactccccaaacttaaaagacggcagattcgtgaatcctagcgggcagccaactccatatgccaccacacaactgatccagagtaatctaagcaataacatgaataacggctccggagactccggagaaaaacattggaaaccattgggccagcagaaacaggaagtggctcctgtccagtacaacatcgtggagcagaataagctgaacaaggattatcgagctaacgatacagtcccacctactattccttacaatcaaagctacgaccagaatactggcgggtcctacaatagtagcgacagaggctcttctaccagtggtagccagggccacaagaaaggagccagaacgcctaaagtgcccaagcagggcggcatgaactgggccgacctcctcccgccaccccccgctcacccaccgcctcactcgaacagcgaagagtacaacatcagcgtggacgagagctatgatcaggaaatgccttgtcctgtgccgccggctagaatgtatctccagcaggatgaactggaggaggaggaggatgaacggggcccaacaccccctgtccgcggagcggcaagctccccagccgctgtgtcctactctcatcagtcaactgcgactctgactccttcacctcaagaagagcttcaacccatgctccaggattgtcctgaggaaactggccacatgcagcatcaacccgatcgtcgcagacagccagtaagtcccccgcctcctcctagaccaataagcccacctcatacctacgggtacataagcgggcctttagtgtccgatatggataccgacgcccctgaggaagaagaagatgaagctgatatggaggttgccaagatgcagactagacgtctcttgctcaggggattggagcagacacccgctagtagtgttggcgatctagaatctagtgtcactggcagcatgattaatgggtggggatcggcaagtgaagaagataatatatcgtccggtcgttctagcgtctcttccagtgatggctcctttttcactgacgccgacttcgcacaagcggtggccgctgccgcggagtatgcggggctcaaggtggccaggcgtcagatgcaagatgctgcgggccgccggcatttccatgcctctcaatgcccccggccaacttcacctgttagcacagactccaatatgtctgcggctgtgatgcaaaagacgcggcctgccaagaagctcaagcaccagccaggccacctcagaagggagacctacactgatgacctgccaccccctcctgtgcctccaccggccatcaagagccccaccgcacaatctaagacacaattagaagtccggcctgtcgtggtgcctaaactgcctagcatggacgcaaggactgacaggagttcagatagaaagggtagcagctataaaggacgggaggtgctggacggcaggcaagtggtagacatgaggaccaatcctggtgacccacgcgaagcccaggaacagcagaacgatgggaaagggcgtggcaacaaggccgcaaaaagggatcttccgccggctaaaactcatctaattcaggaggacatattgccctactgtcgccctacctttccaacatccaacaacccacgcgatccgtcctcgtcatcaagtatgagctcccgcgggtctgggtcacgccagcgggagcaagctaacgtcgggcggagaaacattgcggaaatgcaggtgctagggggctatgaacggggagaggataacaacgaagagctggaagagacagaaagttag

SEQ ID NO: 133257 - DNA, 4968 bp, synthetic construct
  misc_feature 1..4968: note = Description of Artificial Sequence: Synthetic coding sequence
  source 1..4968: mol_type = other DNA
atgaagtggaaacacgtgccgttcttggtaatgatctccctgctaagtctgtccccaaatcacctttttctggcacagctaattcctgaccccgaggacgtagaacggggcaatgaccatggtacacctatacccacaagcgataacgatgacaactcacttggttatactggaagtcgcctccgccaggaagactttcctccacgcattgtagaacacccttcagacctgatcgtgagcaagggcgaaccagctacgttaaattgtaaagccgaggggaggcctaccccaacaatcgagtggtataaaggaggtgagagggtcgaaaccgacaaagacgacccacgttcacacaggatgctgctccccagcggatcactgttctttctgaggattgttcacggcagaaaatccagacctgacgagggggtctatgtgtgcgtggcccgaaactatttgggagaggcagtgagtcataatgcttcattagaagtagccatattacgcgatgattttcgccagaacccatccgacgtaatggtggccgtcggagagccagctgtaatggaatgccagccccctagggggcaccccgaacctactatttcctggaagaaggacggatcgcccctcgatgataaggatgaacggattaccatacgcgggggcaagctcatgataacctacacgcgcaagtcagacgcaggcaaatacgtctgcgtggggaccaacatggtgggggagcgagagtcagaagtggctgaactgaccgtgctcgagagaccctctttcgtgaaaaggccaagcaacctggccgtcaccgtggacgattcagctgaattcaaatgtgaggcacgcggagaccccgttccaaccgtccgatggcgaaaggacgacggcgagctgccgaagagcagatacgaaataagggacgaccataccctgaagatcaggaaagtaactgctggagatatgggatcctacacttgcgtagccgaaaacatggttgggaaagcggaagccagtgcaactcttaccgtgcaagagcctccccacttcgttgtgaagccacgagaccaggtggtggcgctcggcagaaccgtgacattccaatgcgaagccacagggaacccacaaccggccatcttctggagacgcgagggctctcagaatctcctattcagctaccaaccaccccaatccagcagtagattcagcgtgtcccagacaggcgacctgacaatcacgaatgtgcagaggtctgacgtgggatactacatctgccaaacattgaacgtggcaggttctatcattaccaaagcgtacctcgaagtgactgacgtgatagcagatcgccccccacccgtcatccgacagggtcctgtcaatcagacagtggccgtcgacggcacattcgtcttgtcctgtgtagccacaggcagcccagtgccgactatcctgtggaggaaggatggagtgttggttagcactcaggactccagaatcaagcagcttgaaaatggagttcttcagatacgctacgctaagttaggcgacactggcaggtacacatgcatcgcctcaacacctagcggtgaggccacctggagcgcttatattgaagtgcagggaaaggtgaacgaatttggtgtccccgtacagccaccgagacccaccgacccaaatctcatcccatccgcgccctccaagcccgaagtgacagacgtgtcccgcaacactgtaactctgtcatggcagcccaacctgaactcgggcgcaacgcccacttcctatattatcgaggccttcagtcacgcatctggctccagttggcagaccgtcgcagaaaacgtgaagacagagacctcagctatcaaggggctaaaaccaaatgcaatctacctgttcttagtgagggctgccaatgcctatgggatatctgatccatcgcagattagcgatccagtcaaaactcaggatgtgctgccaacctctcagggagtcgaccataagcaggtccagagggagttaggtaacgctgtcctccacttgcacaaccctacggtgctttccagctccagtatcgaagttcattggactgtggatcaacagagtcaatatatccagggatacaaaattctttacaggcctagcggcgctaatcatggagagtcggattggctggtctttgaggtcaggacccccgcgaaaaacagtgtggtcatccctgacttgcgcaagggagtcaactacgagatcaaagctaggcccttttttaacgaatttcaaggcgccgactcagagattaagttcgcaaaaactcttgaggaagccccctccgctccaccccagggagtgacagtaagtaagaatgatggcaacgggacagccatcctggtgtcttggcagccacctccagaggatactcaaaacggcatggtgcaggaatacaaagtctggtgcctcggcaacgaaactcgttaccacattaataaaacggtggatgggagtacattttcagttgtgatccccttccttgtccccggtattaggtattcggtggaagtggcggcatcaactggggcggggagcggcgtgaagagtgagccccaatttatccagctggatgcacatggcaaccccgtgtcgcctgaagaccaggtgtcactggcccagcagatctctgatgtggtgaaacagccagccttcattgcaggcatcggtgccgcttgctggatcatcttgatggtctttagtatctggctatacaggcaccggaagaagaggaatgggctgaccagcacttacgcagggatcaggaaggtgccatccttcacttttacacctactgtcacgtaccagagaggaggggaggcggtgtcatctggggggagaccgggccttctgaacattagtgaacccgccgcccagccctggctcgcagatacttggcccaacactgggaacaaccataacgattgttctatatcctgttgtactgccgggaacggaaattctgacagcaatctgacgacctattcaagacccgctgattgtatcgctaattacaataatcagctggataataagcagacgaatttgatgctgccggaatcgactgtttatggggacgttgacttgagtaacaaaatcaatgaaatgaaaactttcaactctccaaaccttaaagatggtagattcgttaacccctctggccagcccactccatatgccacgacccagctgatccaatcgaacttatccaataacatgaacaatggatctggagacagtggggagaaacactggaaaccgcttggccagcaaaagcaggaggtcgccccagtccaatataacatcgtagagcagaacaaactcaacaaagattacagggcaaatgacactgtgcctcctacaatcccctacaaccagtcctatgatcagaacactggtgggtcatacaactcctccgatcgcggatcatctacctcaggttcacagggacataaaaagggcgcacgaaccccaaaagtaccaaagcagggaggaatgaattgggccgatttgctgccccctccccccgctcaccctccgccacactcaaactcggaagaatacaacatttcagtggacgaaagttacgatcaagagatgccatgtcccgtgccacctgctcgaatgtatttgcagcaggacgagctcgaggaggaagaagacgaaagaggacccactcctcccgtgcgcggtgccgcctccagcccggcagctgtgtcttatagtcaccaatctaccgcgacactaactccctctcctcaggaggagctccagccaatgctccaggactgcccagaggagactggacatatgcaacatcagcccgacaggcggagacagcctgtctctcctccgccgccgccacgacccatcagtccaccccatacttatggctatatctctggccccctagtgtcggatatggatacagatgctccggaggaagaagaggatgaggctgatatggaagtggctaaaatgcaaacacggcggctgctgctcagagggttagagcaaactcccgcaagctctgtgggcgacctcgagagctctgtgaccgggtctatgatcaatgggtgggggagtgcgagtgaggaggataacatctctagcgggcggagttccgtgtcttcatccgatggctcattttttacagatgctgatttcgcacaggctgttgcagcagctgcggagtatgccggcttgaaggtcgcacgaagacaaatgcaagatgcagcagggcggagacacttccatgctagccagtgccccaggcccacctctcccgtctcaactgactccaacatgtctgccgccgtaatgcaaaagacacgacctgcgaaaaaactgaagcaccagccgggccacctccgcagggagacttacactgatgaccttccacctccacccgtgcctcctcctgccatcaagtcacctaccgcgcagagcaaaacgcaactggaagttcgaccggtggttgtgcctaaattacctagcatggatgctcggactgacagaagctccgaccgaaagggcagctcctacaaaggtagggaagtgcttgacggtagacaagtggttgatatgagaacaaaccccggggatcctcgagaggcccaggagcaacagaatgatgggaaaggcagggggaataaggcagctaagcgcgatctccccccagcaaaaacgcacctaattcaggaagacatactcccgtattgcagaccaactttccccacatcaaacaacccccgtgacccaagcagctctagctcaatgagcagtcgaggatctggtagcaggcaacgtgaacaagctaacgtcggccgaagaaatatagctgaaatgcaagtgctcggaggttacgaacggggagaggacaataatgaggaattggaagagccctcctcgtag

SEQ ID NO: 133258 - DNA, 4839 bp, synthetic construct
  misc_feature 1..4839: note = Description of Artificial Sequence: Synthetic coding sequence
  source 1..4839: mol_type = other DNA
atgattgccgaacccgcgcacttttatctgtttggtctaatttgtttgtgtagcggctcccgactgagacaggaagactttccccctcggattgttgagcatccctcggatcttatagtctcaaagggcgagcccgctacacttaattgtaaagccgaaggacggcccacaccaaccattgagtggtacaagggcggggagagggtcgagaccgataaagatgaccctagatcccatcggatgcttcttccgagtggcagcctcttttttctgaggattgtgcatggtcgaaaatccagacccgacgagggggtgtatgtgtgtgtggcaaggaactatttgggtgaggcggttagccataacgctagcttggaagtggccattcttcgagacgactttagacagaaccctagtgatgtgatggtcgccgtgggagaaccagcagtgatggagtgccagccacctagaggtcaccctgaacctacaatctcatggaaaaaagatggaagcccacttgatgacaaggacgagcggatcaccatcagggggggaaagctgatgattacgtacactcgcaaatccgatgcaggcaaatacgtatgtgttggcacaaatatggttggcgagcgcgagagcgaggtcgcggagctgaccgtcctggagaggcctagttttgtcaaaagacccagcaatctcgcagtaacggtggatgacagcgctgaatttaaatgcgaagctcgtggtgacccagtccccaccgtgcgctggaggaaagatgatggcgaattgcccaagtctcgctacgagatcagggacgatcacaccctgaagattcgcaaggtgacggctggagacatggggtcctatacatgcgtcgccgagaacatggtagggaaggctgaggcgtcagccactctgacagtgcaagagcccccacactttgtcgtaaagccacgggaccaggttgtggcactgggtagaactgtgactttccaatgtgaggcaacgggcaacccacagcctgcgattttttggcgcagagaaggctcccagaacctgctgttcagctatcagcccccacagagttcttccagatttagcgtgtctcagactggcgacctcaccattaccaatgtccagaggagcgatgtagggtattacatctgtcagacactcaatgtggcaggctctatcattacaaaagcttatctggaggttaccgatgtgatcgcagaccgccccccacctgtgattagacagggacctgttaaccagaccgttgccgtggacgggacttttgtgctgtcctgtgtggccaccggatcccccgtaccaacaatcctgtggaggaaagatggggtcctggtgtcgacgcaggatagccgcattaagcagttggagaatggggtgttgcagattcgttatgcaaaacttggagatacaggtagatacacctgtattgccagcacaccaagtggcgaggcaacatggtctgcctacatcgaggtgcaggaatttggcgtgcccgtgcagccaccaaggcccactgatccaaatctgataccgtcagcaccctccaagcccgaggtgacagatgtttctcgtaacaccgtgacactctcctggcagcccaatttaaattccggagcgacacctacctcttacataatcgaagccttctcccacgctagcggttccagctggcagacagtggctgagaacgtcaagaccgagacttctgctatcaagggcttgaagcctaacgccatctatctgtttctggtcagagctgcaaacgcttacgggatcagtgacccttcccagatcagtgacccagtgaaaacccaggacgtgcttcccacgtcccagggagtggatcataagcaggtgcagcgagagctcggcaatgccgtgttacatctgcacaacccgaccgttctgtcatcctcatccatagaggtgcactggaccgtggaccagcaatcacagtatatccagggatataaaatcctgtatagaccctcaggtgccaaccacggggaaagtgattggctcgtatttgaagtacggacacctgcgaaaaacagcgtcgtgatccctgatctgaggaaaggggtaaactacgagattaaggctcgcccattcttcaacgaattccaaggagccgattcagagatcaaattcgccaagacactggaagaggctcctagcgcacccccccagggcgtgactgtttcaaaaaacgatggaaatggcacagcgatcttggttagctggcagcctcctcccgaggacacacagaacgggatggtgcaggagtataaggtctggtgtctgggcaacgaaaccagataccacattaataagactgtggatggtagcacattttcagtggtgattcctttcctggtgcctggtataaggtactccgttgaagtggccgcatcgactggcgcaggttcaggagttaagagcgaaccacaattcatccagctggatgcacacgggaatcccgtgtcccctgaggaccaggttagcctcgcacagcagatatcagacgttgtcaagcagcccgcctttattgcaggaataggagccgcatgctggattatcctcatggtattttcgatttggttgtacaggcaccgaaaaaaacgcaacggcctcaccagtacatatgccgggattaggaaggtgccttccttcacttttactcctaccgttacctatcagagaggcggtgaggccgtctctagcggggggcgacctggccttcttaacatcagcgagcctgctgcacagccttggctggccgacacttggcccaatacaggcaataaccacaacgactgcagcatctcatgttgtaccgcaggcaacggaaactcagatagcaacctgactacatacagcaggcccgctgactgcattgcaaattataataaccaactggataacaagcagaccaacctcatgctgcccgagtccactgtttatggcgacgtggatctctctaataagataaacgaaatgaaaacatttaatagtcccaacctgaaagacgggcgttttgtcaaccccagcggccaaccgaccccttatgcgaccactcaactcatccagtctaatctgagcaacaacatgaataacggatctggagatagtggagaaaagcactggaaaccactgggacagcagaaacaggaagtggctcctgtacagtacaatatcgttgagcaaaataagttaaataaggattacagagccaatgatacagtcccaccaacaatcccctacaatcagtcgtacgaccagaatactggcggatcgtataatagtagcgaccgcggctctagcaccagcggatcgcagggacacaagaagggcgcccggacaccgaaagtgcccaagcaaggcggaatgaactgggcggacctcctccctccaccaccagctcacccgccacctcactctaattccgaggaatacaatattagtgttgacgaatcgtacgaccaggagatgccatgccctgtgccccctgcgcgcatgtacctacagcaagatgagctcgaggaggaagaggatgaacgcggcccaacgcctccagttcggggagccgcaagctcgccagccgccgtatcctattcacatcagagcactgccacccttacgccgtccccacaagaggaactgcagcccatgctccaggactgcccggaagagaccggacatatgcagcatcagcccgacagaaggcgccagcccgttagcccccctccacccccacgacccatttcgcctccccatacctatggttacatcagcgggccccttgtgagcgatatggatactgatgccccagaagaggaggaggacgaggctgacatggaggtagccaaaatgcagacacggcgactgctgctgagaggcttagagcaaactcccgcttcatctgttggtgacctggaatccagtgtgacaggttccatgataaacggctgggggtccgccagcgaggaagataatatctcatcgggacggagctcagtaagtagttccgacggctcttttttcaccgatgctgacttcgcccaagccgtcgctgcggccgcggagtatgccggtttaaaggtggcacggaggcagatgcaggacgctgcaggcagacgccactttcacgcgagtcaatgtccgcgtcctacctctccagtgagcacggactccaacatgtctgctgcagtcatgcagaagacgcgaccagcaaaaaagctcaaacaccagccgggccatctccgtcgggagacatatacggacgaccttccgcctcctcccgttccgccccccgcaatcaagtcgcccaccgcacagagcaagacccagttggaggtccgacccgttgtggtgccaaagctccctagcatggatgcgcgcaccgatcgcagctccgatcggaagggttcttcatataaagggagggaagtgctggatgggaggcaggtggttgacatgcggactaaccctggagatcccagagaagctcaggaacagcagaacgacggtaagggccgggggaacaaagccgcgaagagggaccttcctcccgcaaaaacccatttaatccaagaggatatcctgccttattgtagaccaacctttccaaccagtaacaacccccgggaccctagctcctcgtcctccatgagctcccggggttccggatctcgccagagggaacaagccaacgttgggcgcagaaatattgccgagatgcaggtcctcggcggatatgaacgtggtgaggataataatgaagagctggaagagacggagtcgtag

SEQ ID NO: 133259 - DNA, 4956 bp, synthetic construct
  misc_feature 1..4956: note = Description of Artificial Sequence: Synthetic coding sequence
  source 1..4956: mol_type = other DNA
atgaaatggaagcacgtgcctttcctcgtgatgatctcacttctgagcctatcacccaaccatctcttcttagcacagctaattcccgatcctgaggacgttgagagaggaaatgatcacggtacgcctataccaacctcagataatgacgacaattccctgggctacaccggaagtcgcttgagacaggaagacttccctccaaggatcgttgagcacccgtccgatttgattgtttccaagggagagcccgcgaccttgaattgcaaggctgagggccgcccgacccccactatcgagtggtacaagggtggggagcgcgtggagacagataaggacgatccaaggagccataggatgctgttgccatccgggtccctgtttttcctgagaatcgtccatgggcgcaagtcacggccggatgagggcgtatacgtgtgtgttgcacggaattatctgggcgaggcagtgagtcacaatgcctctcttgaagttgccatcttgagggacgatttccgacagaatccttctgatgttatggtggccgttggagagccggcagtcatggagtgccagccacctcgcggacaccccgagccaacgatctcatggaagaaagacggcagcccgctggatgataaggatgagagaattacaattcgggggggcaagttgatgatcacatacacccggaagtcagacgccggaaagtacgtttgcgttgggaccaatatggtcggggagcgagagagtgaggtcgctgagttgacagtgcttgagaggccgagtttcgtcaagcgcccaagcaatctggcagttaccgttgatgactctgctgaatttaagtgcgaggcacggggggacccggtcccaactgtgcggtggcgaaaagatgatggagaacttcccaagtctcgctacgaaatccgagatgatcatacccttaaaatccggaaagtgaccgctggtgacatggggtcatacacgtgtgtggctgagaatatggtgggtaaagcagaagcaagtgcaaccctgactgtacaagaaccaccacacttcgtagttaagccgcgcgaccaggttgtggccctgggacggaccgtgacttttcaatgcgaggccaccggaaaccctcagcccgccattttctggcgcagggagggcagccagaatcttctgttctcttaccagcctcctcaatcttcttcaaggttctcggtgtcccagacgggggatctaaccatcaccaacgtgcagagaagtgacgttggctactatatatgccaaacactcaacgttgccggcagcataataactaaggcctacctggaggtgaccgacgttattgcggaccgcccgcctcccgtgattcgacagggcccagtgaaccaaactgtagccgtggacgggaccttcgtgctaagctgtgtcgcaaccgggagtccggtaccaaccattctgtggcgaaaagacggtgtgctcgtgtctacccaggactccagaatcaagcagctcgaaaatggcgtactgcagatccggtacgcaaaattaggcgatacaggtaggtatacatgcatagcgagcacaccaagtggggaggccacatggtccgcctatattgaagtccaagagttcggggtccctgtgcagccgccaaggcccaccgaccccaatttaataccttccgccccaagtaagccggaggttacggacgtgtctagaaataccgtgactctatcctggcagcccaacttgaattcaggcgctacgccaacttcgtacatcatcgaagcattctcacatgcttctggaagctcttggcaaaccgttgcagaaaacgtgaaaactgagactagtgccatcaaaggcctgaagccaaacgctatctacttgttcttagtccgagccgcaaacgcctacggtatttccgacccctcccagatttccgaccctgtgaaaactcaggatgttctaccaacatcccagggggtagatcataaacaagtgcagagggaattaggaaacgctgtgcttcacctgcataaccccacagtgctgagtagctcttccatcgaggtgcactggactgttgaccagcagagccagtacattcagggctacaaaattctgtatagaccttcgggcgccaaccacggggagagtgactggctggtatttgaggtgcgcactcccgctaagaacagcgtcgtgataccagacctgcggaaaggagttaattatgagattaaggcgcggccttttttcaacgaatttcagggcgccgatagtgagatcaagtttgccaaaacattagaggaggcaccctcggccccacctcagggcgtcaccgtgtccaagaacgatggcaatggcacagctatccttgtgagctggcagcctccgcccgaggacacacagaacggaatggtgcaggagtacaaagtgtggtgtcttgggaacgaaaccagataccacattaataagacagtagacgggtccacattttccgtggtgatccctttccttgtgccaggcattagatacagtgtggaggttgctgcatcaactggagccggctccggtgtgaaatccgaaccgcagttcatccagctggatgcgcatgggaaccctgtgtcccctgaggaccaggtctccttggcccagcagatttcagatgtcgtgaagcaaccagcctttattgccgggattggtgccgcttgctggatcattcttatggtatttagtatctggctgtatcgtcatcggaagaaacgcaacggtctgacatctacgtatgccggtattaggaaagttccctcgttcactttcactccaaccgtgacctaccagagaggaggagaggcggttagcagtggtgggcgtcccggccttctgaacattagtgagcccgccgctcagccatggctcgctgatacatggccaaatacaggaaacaatcacaatgactgttcaatctcttgttgcacagctgggaatggtaacagtgattcaaacctgacaacctattctaggccggccgattgcatagcaaattacaataatcagttggataataaacaaactaacctgatgctccctgaatcaacggtctacggcgatgtggatttgtctaacaagattaatgaaatgaagacgtttaacagcccaaatctgaaggacgggaggtttgtgaatccgtcagggcagccaacaccctatgcaactacacaacttatacagagtaatttgtcgaacaatatgaataatgggagcggcgactccggcgagaaacactggaaaccactgggccagcagaagcaggaagtcgcccctgtccagtacaacattgttgagcagaataagctgaacaaagattatagagcgaatgacactgtccctcccactataccatataaccagagctatgatcaaaataccggcggctcatacaactcttcagatagagggtcatctacgtctggatcccagggacataagaagggtgctcgcacgcctaaagttcccaagcagggtgggatgaattgggccgatcttttaccaccacctccggcacacccccccccccattccaacagcgaggaatataacatcagcgttgatgagtcttacgaccaggagatgccatgccctgtgcccccagctaggatgtacttacaacaagacgaattggaagaggaggaggatgagcggggaccaacccccccagtgcgtggggccgcttcctccccggccgccgtcagctattcccatcaaagcaccgccaccctgactccaagtccgcaggaagagctgcagccaatgctgcaggactgcccagaagaaacagggcatatgcaacaccagccggaccgcagacgccagcccgtgtccccacctccccctccacggccaatctctcctccccacacctacggatacatatccggacctctcgtttccgatatggacaccgacgcccccgaagaagaagaggatgaggctgatatggaagtggccaagatgcagacacgacggttgttactgcgtggtctcgagcaaacccccgcttctagcgtgggagacttagagtcctccgtgacaggctccatgatcaatgggtggggctctgcttccgaggaggataatattagttccggccgctcttccgtgtcaagctccgatggaagcttttttactgatgcggattttgcgcaggctgttgctgccgcggccgaatatgccggccttaaggtggccagaaggcagatgcaggatgctgcaggcagacggcatttccatgccagccagtgtccacggcctacaagccccgtttccactgattcgaacatgtctgctgccgttatgcagaaaaccaggcccgccaagaagttgaagcatcagcctgggcacctgaggagggaaacctacaccgacgatctgcctcccccacccgtaccaccgcccgccataaaaagccccaccgcccaaagcaaaacacaacttgaggtgaggcccgttgtagtgcctaagctgccctctatggatgccaggacggaccgctcttcagaccgcaaaggttcctcttataagggtcgggaagttctcgatgggcggcaggtggtggacatgcggactaaccccggtgaccctagagaagcccaagagcagcaaaatgacgggaagggccgcggaaataaggccgccaaacgggatctccctccagctaaaactcatctgattcaggaggacattctcccctattgccgccctacatttcctaccagcaacaatccgcgcgacccctcaagcagcagcagtatgagttcgcggggcagtggaagccggcagagagagcaggctaatgttgggcgtcgtaatattgctgaaatgcaggtcctaggcggctatgagcggggcgaggacaataacgaggaactggaagaaaccgagtcctag

SEQ ID NO: 133260 - DNA, 4656 bp, synthetic construct
  misc_feature 1..4656: note = Description of Artificial Sequence: Synthetic coding sequence
  source 1..4656: mol_type = other DNA
atgattgccgaaccggctcacttctatttgttcggtctgatctgtttgtgttcagggtccaggctgcggcaggaggactttcctccgcgcatcgtggagcatccatccgacctaatagtaagcaagggggaaccggccaccctcaattgcaaggcagaaggcagacccactccaacaatcgagtggtacaaagggggagaaagggtggagacggataaggacgatcctagatctcatagaatgctgctgccatcagggtcccttttcttcctgcgtatcgtacatggtagaaagtctcggcccgatgaaggcgtatacgtgtgtgtggcccgaaactacctcggcgaggcagtctcccacaatgcctctttggaggttgctatcttacgtgacgattttcggcaaaacccgagcgatgttatggtggccgtaggggagccagccgtgatggagtgccagccacctcggggacatcctgagccaacaattagctggaagaaggacggctcccctctggatgacaaagacgagaggatcacaataagaggggggaagctcatgattacctacacaagaaagagcgacgccgggaaatatgtgtgtgtcgggacaaatatggtgggggaaagggaatctgaggttgcagaactgacagttcttgaacgtccatccttcgtcaagcggcccagcaatctcgcggtgacggtggatgactctgccgaattcaaatgcgaggcaaggggtgatccagtgcctacagtgaggtggaggaaggatgatggcgagcttccaaagagccgctatgagattcgtgatgatcacaccctgaaaattcggaaagttacagctggagatatgggaagctacacttgtgttgctgaaaacatggtgggaaaggcagaagcctccgcaacgctgaccgtgcaggttggctcagaacccccacattttgttgtcaagccccgggaccaggtggtggcacttggaaggaccgtgaccttccagtgtgaggcgaccggcaatcctcagcccgcaatcttctggagaagggaaggttctcagaatctccttttctcttatcagcctcctcaaagttcttctagattctctgtctcacagacgggagacctcaccattactaatgtccaaagaagtgacgtaggctactatatttgccagaccctaaatgttgccggcagcatcattacgaaggcttacctggaagttactgacgtgattgctgacagacctcctcctgtgattaggcagggaccggtcaaccagacggtcgccgtggacggtacttttgttctgtcttgcgtcgccactggaagtccagtccccaccattctgtggcgaaaggacggcgttttagtgtcaacacaggattcgcggatcaagcagctggaaaatggcgtgctacagatccgatatgcgaaattgggagataccggccgatatacatgtatcgcttcaacaccatctggagaagcgacctggagcgcctacatagaagttcaggaattcggagtgcccgtccagccaccacggcccacggatccgaacctgatcccttcggcccctagcaagcctgaagtgaccgatgtgagccggaatactgttaccctatcctggcagcccaacttgaacagtggcgcgacacccacatcgtacatcattgaagcgttctcccacgcatcaggatcctcatggcagacagttgctgaaaatgtgaaaacagagactagcgcgataaaagggcttaagccaaacgccatctacctgtttctcgttcgagctgctaatgcctacggcatttcggacccttcccagattagcgaccctgtcaagactcaggacgtgctgcctacctcccagggtgtggatcacaagcaggtccagcgtgagttgggtaacgccgttctgcatttacacaatccgacagtcctgagttcctcatccattgaagttcattggaccgtggaccagcagtctcagtatatccagggctataagattctctaccggccctcaggcgccaatcacggagagagcgactggcttgtctttgaagtgcgcactcccgctaagaattccgttgtgatccccgatcttcgcaagggtgtaaattacgagatcaaagcacgaccgttcttcaacgagtttcagggagctgatagcgagatcaagtttgccaaaaccctggaagaagctcctagtgctccgccacagggtgtcacagttagcaagaatgacggtaacggaacagctattctagtgtcttggcaacccccacccgaagatacccaaaacggaatggtccaggagtacaaggtatggtgtctcggcaatgagacccgatatcatattaacaaaacagtagacggctccacctttagcgtggtgattccatttctggtccccgggatcagatacagcgtggaggtggcggcaagcactggtgccgggtcaggtgtcaaaagtgagcctcagttcatccagctggatgctcacgggaatccagtgtctccagaggatcaggtgagcctggcccaacagatctccgacgtggtaaaacagcccgcattcatagctggaattggagcggcttgctggattattctgatggtgttttccatctggctgtaccggcatcgaaagaaaagaaatgggttgaccagcacgtacgcaggaatacggaaagtgacctatcaacgcggcggagaggcagttagttccggaggacggccagggctgcttaacatttccgaaccagcagctcagccttggctggcagacacatggcctaataccgggaacaaccataatgattgctccattagctgttgcacggccggtaatggaaattctgactcaaacttgaccacctattctcggcctggccagcccaccccttacgccaccacgcagttgatccagtctaatctctcaaataacatgaacaatgggtccggcgatagcggggagaagcattggaaaccgctgggtcagcagaagcaggaggtcgcccctgtgcagtacaacatcgttgaacaaaataagcttaacaaggactaccgcgcgaacgataccgtcccacctaccataccttataaccagtcatacgaccagaatacaggcgggtcttacaacagttccgaccgaggctccagcacgagcggctcacaaggccacaagaagggagccagaacacccaaagtgccgaaacagggcgggatgaactgggcagacttgttaccccctccccccgcccacccccccccccacagcaactcggaagagtataacatctcagtagacgaatcgtatgaccaggagatgccctgtccagtccctccggctaggatgtacttacaacaggacgaactcgaggaagaggaagatgagcgcggacctactccacccgtgaggggagctgctagtagtcccgccgccgtgagctactcccatcagtccacagcaacactcacgccaagtcctcaggaggagctgcagcctatgctgcaggattgtcccgaggagactggccatatgcagcatcagcctgataggcggcgacagcccgttagccctccacccccaccccgtcctatttccccaccacacacatacggatacatttctggcccactagtcagtgacatggataccgatgcccccgaggaggaggaagacgaggccgatatggaagtggcaaaaatgcagacccgccgcttactactcagaggcctcgagcagacacccgcctcttcagtgggggatcttgagtccagcgtgacaggctccatgattaatggatggggaagcgcatccgaagaggataatatttcgtcgggtaggtcctctgtgtcgtcatccgacggaagctttttcacagatgctgacttcgcccaggctgtagctgctgccgccgaatacgcgggattgaaggtggcccggaggcaaatgcaggatgccgcgggacgacggcattttcatgcatctcagtgcccccggcctacctctcccgtctcgactgatagcaatatgagtgccgccgtgatgcaaaaaacccggccggcaaagaaactgaaacaccaaccaggccacctgagacgggagacttataccgacgatcttcctccgcctcccgtgcccccccccgccataaaatctcctacagctcaaagcaaaactcagttggaagtcaggccagttgtggtgccaaagcttccgagtatggatgcccgcaccgacaggtccagtgataggaagggctcttcttataaggggcgcgaagttctggacggccgtcaggtcgtggacatgagaacaaatcccggcgaccccagagaagctcaggaacagcaaaacgacggcaagggtcggggcaacaaagcagccaagagggacctccctccagctaagacccatctgattcaggaggacatcctgccctactgcagaccaacattccccactagcaacaacccccgggatcccagctcgagcagcagtatgtcatcccgcggatctggttcaaggcagagagagcaggcaaacgtagggcgtaggaacatagctgagatgcaagtactaggcggctatgaaaggggggaggataacaatgaggagcttgaagagacagagtcctag

SEQ ID NO: 133261 - DNA, 4821 bp, synthetic construct
  misc_feature 1..4821: note = Description of Artificial Sequence: Synthetic coding sequence
  source 1..4821: mol_type = other DNA
atgatcgccgaacccgcccatttttatctcttcgggttgatctgcctctgttcgggcagtcggctgagacaagaggactttccgcctcgaatcgtggagcacccgagcgacctcattgtgtctaagggggaaccagcaactttgaattgcaaggccgagggtcgtcctacacctactattgagtggtataagggaggcgaaagagtggaaaccgacaaggacgatccacggagccacagaatgcttcttcccagcgggtccctcttctttctgagaatcgtgcacggccgcaaatccagacctgacgagggcgtctatgtatgcgtcgcacgcaactatctgggagaggctgtatcccataatgccagtttggaagtcgctatactacgggatgattttagacaaaaccccagtgatgtgatggtggccgtcggagagccagctgtgatggaatgtcagccacctcgcggtcaccccgaaccgacaatatcctggaagaaagacggctctcctctggatgacaaggacgagagaataacaattcggggcggcaaactcatgatcacttacacccggaaatcagatgcaggcaagtatgtttgcgtggggacaaacatggtgggagagagagagtccgaagttgcggagttaactgtgctggaaagaccatcattcgtgaagaggcccagtaacctcgctgtcaccgtagacgactctgccgagttcaagtgcgaagctaggggcgatcccgtgcctactgtgcgttggcgcaaggatgacggggagctcccgaaatcccgctacgagatccgggatgaccacaccttgaagatcagaaaggtaacagctggtgatatgggatcctacacctgtgtggcggaaaatatggtcggcaaggctgaggctagcgcaacactgactgtacaggtcggatcagaacctccccatttcgttgtcaagcctagggatcaagtggtggcccttggacgtactgtaactttccaatgcgaagcaaccgggaatccccagcccgcaatcttttggagaagagaggggagccagaacctgctgttctcctaccagccccctcaaagtagttctcggttttctgtctcgcagacaggcgacctaactataaccaacgtccagcgcagcgacgtggggtactatatttgtcaaacactgaatgtggccggcagcataataactaaggcctatctggaggtaaccgacgtgatcgccgatcggccgccacccgtcatcaggcaggggcccgtcaaccagacggtggcagtggatggaaccttcgtactgagttgcgtggccactggaagccccgtgccgacgatcctgtggagaaaggacggcgtcctggtttctacccaggactcgcggatcaaacagctcgagaatggtgttctgcagattcgctacgcaaagctgggcgacaccggccgctatacctgtattgcaagcactccaagcggggaggccacatggagcgcatacattgaagttcaggagtttggagtacctgtgcagcccccccgcccaaccgaccccaaccttattccttccgcgccaagcaagcctgaggtcacagacgtgagtcgcaatacggtgactctgagctggcagcccaacttgaattctggcgctacccccacatcttacataatcgaagccttttcccacgcttccggtagtagctggcagactgtggctgagaatgttaagactgagacatctgccatcaagggactgaagcctaacgcaatatatctgtttttggtgagagctgccaatgcatatgggatctcagatccttcacagatcagcgacccagttaaaactcaggacgtcctgcctacctctcagggagttgaccacaagcaggtccagcgtgaactgggcaacgccgtcttacacctccacaatccgactgtgttgagctcaagctctattgaggtccattggactgttgaccagcaaagccagtacattcaggggtacaagatactttaccggcctagcggagctaaccacggagagtcggactggcttgtctttgaggtcaggaccccagccaagaactcagtcgtgatccctgaccttagaaagggagtgaattatgagatcaaagctcgcccattctttaatgaattccagggcgctgatagtgaaattaaattcgccaaaactttggaggaagccccgtccgcccctcctcagggtgtcaccgtgagtaaaaatgatggcaatgggaccgctatcttggtgagttggcagccacctccggaggatacccagaacggcatggtccaagaatataaggtctggtgcctcgggaacgagacacggtaccacattaataagaccgtggacggtagcacattttcggtggtaattccatttttagtgcccgggatcaggtactcagtcgaagtggctgcgtccacaggcgcaggctcgggtgtcaaatcagaaccgcagtttatccaattggacgcccacgggaacccggtgagccctgaagaccaggtttccctcgcacagcagatcagcgatgtcgtgaagcaacctgcctttatcgccggaatcggcgcagcctgctggatcatcctgatggtcttcagcatctggctatacaggcaccgtaaaaaacgcaacggacttacaagcacctatgccggaatccggaaggtgacctatcagcgcggaggcgaggccgtgtcctccggagggaggccaggcctactgaacatatctgaaccggctgcccagccctggctggccgacacatggccgaataccgggaacaaccataatgactgttccatctcgtgttgcactgccggaaatggcaactccgatagcaatctgaccacttatagccgacctgctgactgtatcgctaactacaataatcagttagacaataaacaaactaatctcatgttgccagaatcgaccgtctacggggatgtggacctctccaacaagataaatgagatgaagaccttcaattccccgaatctgaaggacggacgctttgtgaaccctagcggacagcctacaccatacgctaccacacagctgattcagtccaatttatccaataatatgaataatgggtccggcgacagtggggagaagcattggaagccgctcggacagcagaagcaggaagttgctcccgttcaatacaacatcgttgaacaaaacaaactgaacaaagactacagagcaaatgacacggtgccaccaaccatcccatataatcagtcctatgatcaaaacactggcggatcatataatagctccgacagaggttctagtacttctggatcccagggacataagaaaggagctcggacacccaaagtgccgaagcagggcgggatgaactgggcagacctgttgcctcctccacccgctcaccctcctccacatagtaatagtgaagagtacaatatctcggtcgacgaatcctacgatcaagagatgccgtgcccagtcccaccggccaggatgtatctgcaacaggacgagcttgaagaggaggaagatgagcgcgggcctaccccaccagtaaggggcgctgcaagcagccctgccgctgtgtcctatagtcaccagagcacggctactctcactccctccccgcaggaggaattacaaccgatgctgcaggattgcccggaagaaacaggccacatgcagcaccagccggacaggcggcgccaacccgtctctccccctcctccccctaggcccatttcacccccccatacgtacggatacatctctggcccactggttagtgacatggataccgatgcccccgaggaggaagaagacgaggcagatatggaggtagcgaagatgcagactcgtaggctcttgctgcggggactggagcagacaccagccagcagtgtcggagaccttgagtccagcgtaactggtagcatgatcaacggctggggctctgcgtccgaggaagacaacatctccagcgggcgcagttccgtgtccagtagcgatggatccttcttcacggacgcagatttcgctcaggccgttgccgcagctgctgaatatgcgggcctgaaagtggcgcgtaggcagatgcaggatgcagccgggcgcaggcacttccacgcttcacagtgtccaagacccacctcacccgtcagcactgatagcaacatgagcgcggctgtgatgcagaagactaggcctgccaagaagctaaaacaccagccaggtcacttgcgcagagagacttataccgatgacttgcctccacccccagttccgccaccggctataaagtctcccacggctcaatcaaaaacccaactcgaggtgcggccagttgtggtacctaagctgccctctatggacgccagaaccgaccgctcaagcgatcgcaagggcagttcctataaaggtagggaggttctcgacggaagacaggtggtggacatgcggacaaaccccggcgaccccagggaggcacaagaacagcagaatgacgggaaaggaagggggaacaaagcagcaaagcgcgacttgccgcccgctaagactcatttgattcaagaggatatcttgccctactgtcgccccacgtttccaaccagcaacaacccacgagatccttcatccagctccagcatgtcttcgcggggttctggatctaggcagcgagagcaagctaatgtaggaaggagaaacatcgcagaaatgcaggtgctcggaggctacgagcggggggaggataataatgaggagctcgaagagaccgagtcctag

SEQ ID NO: 133262 - DNA, 3213 bp, synthetic construct
  misc_feature 1..3213: note = Description of Artificial Sequence: Synthetic coding sequence
  source 1..3213: mol_type = other DNA
atggcccgaagacatgagagggtgacccgacggatgtggacatgggcaccagggcttctgatgatgactgtcgtgttttggggccatcaaggtaatggccaggggcaagggtccaggctacgtcaggaggactttccacctagaattgtggaacacccctctgatgtgattgtgtcgaagggcgaaccgacaacactaaattgtaaagcagaggggcgcccgaccccaacaattgagtggtacaaggacggcgagagggtggagactgataaagatgaccccaggtctcaccggatgctgctgccgagcggatcccttttcttcctgcggatagtacatggcagacgtagcaaacccgatgaaggcagctatgtgtgtgtggcgcgaaactatctgggagaggcggtctctaggaatgcttcattggaggtcgctttactgagagacgacttccggcagaaccctaccgatgttgtggtggccgccggagaacctgccatcctagaatgtcagcccccgagaggccatcctgaacccacgatatattggaagaaggacaaggtgaggatagacgacaaagaggagcgtatatccattagaggaggcaaactgatgatcagcaacacccggaagagtgacgccggcatgtacacctgcgtgggtacaaacatggtcggggaacgagatagtgatccagccgagctgaccgtgtttgaaaggcctacctttcttcgccggccaataaatcaggtggtactcgaggaagaagcagtggaattcagatgccaggtgcagggagatccgcaacccaccgtccgctggaagaaggacgacgctgatcttcctagaggcagatatgacattaaggacgattacactttgcgcattaaaaagacgatgtcaacggatgaaggaacgtatatgtgcatcgctgagaacagggtgggcaagatggaagcatccgccactctgactgtccgcggtggcgtcattgctccacctcagttcgttgtgaggccccgcgatcagattgttgcccaaggccgtactgtgaccttcccttgcgaaaccaaaggaaacccacaaccagctgttttctggcagaaagagggatcacagaacctgctgtttcctaaccaacctcagcagcccaacagtcgatgttcagtctcccccacaggagacctcaccataacaaatattcagaggagtgacgccggctactatatttgccaggctctgacggttgctgggagcatactggccaaggctcagctcgaagtcaccgacgtcttgacagatagacctccacctattatactacagggccctgctaaccagaccttagccgtggatggcaccgcccttctaaagtgcaaagctaccggggatccactcccagtgatctcctggttgaaggagggtttcactttccctggcagggatccaagagctacaatccaggaacagggcacactgcaaattaagaatctccggatctccgacaccggcacttacacgtgtgttgccaccagtagcagcggcgaaacctcatggtcggccgtccttgatgtgacagagagtggggccactatatccaagaattatgatctatccgatttacccggaccaccgagcaaacctcaggtgacagatgtgaccaagaacagcgtgacactctcctggcagccagggacaccgggcactttgcctgcgagtgcatacatcatagaagccttttctcaatccgtatcaaactcttggcagacggtggcaaaccatgtgaaaacaactctatacacagtcagagggctacggccgaatacgatttacttgttcatggtgcgcgctatcaatccacagggcctgagcgacccatcccctatgtcagacccggtccgcactcaggacatttcacctcccgcccagggtgttgatcatcggcaggtgcagaaagagttgggggatgtgttggtccgcctccacaacccggtggtcctcactcctactacagttcaggttacatggactgtggaccgccagcctcagttcattcagggctatagggtgatgtataggcagaccagtgggcttcaagcaacatcctcctggcagaatctcgacgccaaagtaccaacagaaagatccgcagtgctggtgaatttgaagaagggagtgacctacgagatcaaagtgcgtccatattttaacgagttccaggggatggactccgaaagcaagaccgtgaggaccacagaggaggctccttccgcgcctcctcagtctgtcaccgtgctaacagtagggagttacaattcaacatcaatctccgtgtcttgggaccccccccctccagaccaccagaatggtatcatccaggaatacaaaatttggtgtttgggtaacgaaactcgattccatatcaacaaaaccgttgatgcagccatcagaagtgttattatcggaggactgttccccgggatacagtatagggtagaggtggccgcgtctacgagcgctggcgtgggtgtgaaatctgagccccaaccaattataattggacgacgaaatgaagtggttattaccgagaataacaactctatcacagagcagattactgacgtagtgaagcagccagcattcattgcagggattggtggggcctgctgggtaatccttatgggattttccatttggctgtactggcggcggaaaaaacgcaaaggactgagtaattacgctgtgactttccaaaggggggacgggggactcatgagtaatggctcaagaccggggctcttaaacgcgggtgaccctagttacccctggctggcggatagttggcccgcaacgagtcttcccgtgaataacagcaatagcggccctaacgagattggaaattttggaagaggcgacgtcctaccacctgtgccagggcagggtgacaagacagcaacaatgctttcagatggcgcgatctattcaagtatcgattttactactaagacctcctataattcctccagccagattacccaagctaccccttacgctacgacgcagatcttacatagtaactcaatccacgaattggctgtggacctgccggacccccaatggaagagctcaatccaacagaagacggatttgatggggtttggttacagcttacccgatcagaacaaggggaataatggagagtccgggagctag

SEQ ID NO: 133263 - DNA, 1713 bp, synthetic construct
  misc_feature 1..1713: note = Description of Artificial Sequence: Synthetic coding sequence
  source 1..1713: mol_type = other DNA
atgagtacagacgagggcacgtacatgtgcattgccgaaaaccgtgtgggaaaaatggaggcatcagctactttgactgtccgcggcggcgttatagccccacctcagtttgtggtccgtcctcgggatcaaatcgtagcacagggcagaaccgtcacctttccgtgcgaaaccaaggggaatccccagcctgccgttttctggcagaaagagggatctcagaacctgttattccccaaccagccccaacaaccaaattctagatgtagtgtgtctcccactggggacttgacgattaccaacattcaaagatccgacgcagggtattacatatgtcaggccctgaccgtcgcaggcagcatccttgctaaagcacagttagaagttacagacgttttgacagaccgaccgccaccgataattctacaggggcctgccaatcagactctggctgtggatggcaccgcattactgaaatgtaaggccacaggcgaccctttgcctgtgatatcttggctcaaagaggggttcacttttcccggccgcgatccgcgggccaccatccaagaacagggaaccctgcagatcaagaatctcaggatctcagacacaggcacatacacctgcgtggccacctcctcgtcaggggagacatcctggagcgcagtcctggatgttaccgaatcgggagctaccatcagtaaaaactacgacctgtctgatctaccaggtcctcctagtaagccccaggtgactgatgtaactaagaactctgtgaccctgtcctggcagccaggcacgccagggaccctccctgctagcgcctatatcattgaggccttttcgcagagcgtttcgaactcttggcaaacagtggccaaccacgttaagactaccctgtatacagtcagaggcttgcggccaaacactatctacctctttatggtgagagcgataaatccccagggacttagtgatccttcacccatgagtgacccagtgcgaacacaggacatctcgccaccggcacagggagtcgatcatcggcaggtgcagaaggaacttggcgatgtcttggtgagacttcataatcccgtggtactcacccctaccaccgttcaggtgacatggacggtagatcgacagccccagttcatccagggctacagagttatgtatagacagacttcaggcctgcaggctactagttcctggcagaatctggatgctaaggttcccacagagcggagcgctgtactggtaaacttaaagaagggggtcacctatgaaattaaagttagaccatacttcaacgaatttcaggggatggatagtgaatctaagacagtcagaacaactgaggaggcgccatcagccccaccccagagtgtaactgtgctcaccgttggaagctataacagcacctctatttcagtgtcctgggatccgcctccccctgaccaccagaacgggataatacaggagtacaagatctggtgtctgggaaatgagacgagatttcacattaataaaacggtggacgcggcaattcggagtgtcatcatcgggggcctgtttcccggcatccagtaccgggttgaagtggcagctagcaccagcgccggagtgggtgttaagagcgaaccacagccaaacaataccggctaccccatatgccacgacactgaccttgcattccagcagcacacctag

SEQ ID NO: 133264 - DNA, 4185 bp, synthetic construct
  misc_feature 1..4185: note = Description of Artificial Sequence: Synthetic coding sequence
  source 1..4185: mol_type = other DNA
atggccaggcgtcacgaacgggttacgcggcgtatgtggacatgggctcccggactcctgatgatgaccgtggtgttttggggacaccaaggaaacgggcaaggacaaggcagcagactcagacaggaagacttcccacctcgcatcgtcgaacacccatcggatgtaatcgtctctaagggcgaacctactactctaaactgcaaagctgagggcaggccgacccccaccattgaatggtacaaggacggagaacgagtggaaacagataaagacgacccgcgatcccaccggatgttgttaccaagcgggtcactgttttttcttagaattgttcatggacggaggtcaaaacccgatgagggtagctacgtctgtgtggctcgcaattaccttggcgaagctgtaagtaggaacgcctcattggaggttgctctgctccgcgacgatttcaggcagaatcctactgacgtggtagtggccgccggcgagccagctatcctagagtgccagcctccccgcggccaccctgaacccacaatctactggaaaaaagataaggtacggatcgacgacaaagaagagcgaatttccatccgcggtggtaagctgatgatctccaatacccgcaagagtgacgctggaatgtatacatgcgtcggcacgaacatggtgggtgaaagggatagcgatcccgcagagctaaccgtgtttgagaggcccacatttctgaggaggccaattaaccaggtcgtcctcgaagaagaggcggtggagttcagatgccaagttcagggcgacccacaaccgactgtgcgttggaagaaggacgacgctgacctaccccgggggcgatatgacataaaagatgattataccctgcgaatcaagaagacaatgtctacagatgaagggacttacatgtgtatcgctgagaatcgggtaggcaaaatggaggcctccgctacactcacggtgcgcgctccccctcagtttgtagttcggcctagggaccagattgtcgcccaaggccggactgtcacttttccgtgtgagacgaagggaaacccgcaacccgcagtgttctggcagaaggaggggagtcagaaccttctctttcccaaccaaccccagcagcccaattcccgatgttccgtatcacccacaggagacctaaccatcaccaacatccaacgcagtgatgcgggttactacatttgtcaagcactgactgtggccggctccattctggctaaggcacagttagaggtgacggacgttctaacagaccgtcctcctccaattatcctccagggacccgccaatcagactctcgccgtggacggcaccgccctgctgaaatgtaaggctactggcgatccattgccagtaataagctggctgaaggagggcttcactttccctggacgagatccacgtgcgactatccaggaacaaggtaccctgcaaatcaagaatctacggatatctgataccggtacctacacctgcgtggccacctcgagctcaggtgagaccagctggagtgcggtgttggacgtaactgagagtggagcaaccataagcaagaactacgacttgagcgatttacccggcccacctagcaaacctcaggtcacggacgtgacaaaaaatagtgtgacactctcctggcagcctgggaccccagggacactaccggcatctgcctatattatcgaggcattttctcaaagcgtgtcaaattcttggcagaccgtcgccaaccacgtgaagacaactctgtacacagtgcgaggcttacgcccaaatactatctacctgtttatggttagggccatcaacccccagggcctgtccgacccctccccaatgtctgatccagtccgaacgcaagacatctctccccccgcacaaggagtggatcatcggcaggtgcaaaaggagctgggcgacgtcctggtgcgcctccacaatccggtggtgcttacccctactacggtgcaggttacttggacagtggatcgacaacctcagttcatccagggctatcgtgtaatgtacagacagacctcaggtctgcaagccacaagcagttggcagaacctcgacgccaaggtgcccaccgaaagatctgctgtgctggtcaatcttaagaaaggtgtaacatacgaaataaaagtacgcccgtactttaacgaattccaaggcatggattcggagtctaaaactgtacgaacaaccgaggaggctccctcagctcctcctcaaagtgttacagtgctcacagtcggaagctataacagtactagtatcagcgtgtcttgggacccacctcctcccgatcaccagaatgggattatacaggagtacaaaatctggtgcctgggcaatgagacacgattccatatcaataagacagtggatgccgccattcgatctgttatcattggaggcctgttcccaggcattcagtacagagtagaagtcgcggcctccacctctgctggagtcggagttaagtctgagccccaacctatcatcattggcagacgcaacgaggtggttattactgagaacaacaactctattacggagcagatcacagatgtggttaagcagccagccttcattgccgggattggcggtgcttgttgggtgatattaatggggtttagcatctggctgtattggcggagaaaaaagaggaagggtctgtctaattacgctgttaccttccagagaggcgacggaggactgatgtccaatggatctcgcccaggactgctgaacgcgggggatccaagctatccttggttggccgattcatggccggctacctcactccccgttaacaactctaattcaggtcctaatgaaattgggaatttcggacgaggcgacgtgctgcccccggtcccgggacagggagacaaaacggctaccatgctgtcagacggagctatctactccagcatcgacttcacaaccaaaacgtcatataactcatcctcacagatcacacaggctactccctacgccacaacccagatcctgcactctaactccatccacgagcttgctgtcgacctgccggaccctcagtggaaaagcagcattcaacaaaagaccgatctgatgggcttcggctactccctgccagatcagaacaaaggcaataacggaggaaagggcggtaagaagaaaaagaacaagaactcatctaagcctcaaaaaaacaatggctccacatgggccaatgtgcctctgcccccccctccagttcaacccctgcccgggaccgagctcgagcactatgctgttgaacagcaggaaaacggttatgactcggatagctggtgtcctccgctccccgtgcagacctatttacaccaaggtctggaagatgaactggaggaggatgacgacagggtgcccacccctcctgtgagaggcgttgcatcatctcccgcgataagtttcggacagcagtcgaccgccacgcttacacctagtcccagggaagaaatgcagccgatgttgcaagcacacctcgacgagctaaccagggcgtatcagttcgatatagccaagcagacttggcacatccaaagcaacaatcagccaccacaaccaccggtacctcctctcggctatgtttcaggtgcccttattagcgacttggagaccgacgtggcggacgatgatgctgatgatgaggaagaagccttagaaatcccgagacctctcagggctcttgaccagactccaggctccagcatggacaacctagactcatctgttacaggaaaagccttcacttcctcgcaacggccccggcccacctcaccctttagcaccgacagcaacacaagcgccgcactgtcgcagtcccagagaccacgcccaaccaaaaaacacaaagggggaagaatggatcagcagcccgctttgccgcatcgacgggaaggcatgactgatgaagaggccttagtgccctattcaaagcctagttttccctctcctggaggccattcttctagcggcacggctagctctaaaggctctaccggaccacgcaagacagaggtgctgagagcaggacaccagaggaacgcctcggatctcctggacataggttacatgggcagcaactctcagggccagttcactggagaactgtag

SEQ ID NO: 133265 - DNA, 4137 bp, synthetic construct
  misc_feature 1..4137: note = Description of Artificial Sequence: Synthetic coding sequence
  source 1..4137: mol_type = other DNA
atgtccctgctgatgttcacgcagctgctgctgtgcggattcctttacgtcagggtggatgggtccagactgagacaggaggattttcccccccggattgttgagcacccctccgacgtcatcgtgtccaaaggggagcccactactttgaactgcaaggctgaaggcaggcccacgccaactattgagtggtataaggatggggaacgagtggaaaccgataaggatgatcccaggtcccatcgaatgttactgcctagcggctccttgttcttcctgcggattgtgcatggaagacggtctaagccggatgagggatcatatgtgtgtgttgcccgcaactacctgggcgaagcagtctcccggaacgcctctttggaggtagctctgcttagggacgatttccgccagaatcctacagacgttgtagtggctgcaggcgagccagccattcttgagtgccaacctcctaggggtcatcccgaaccaactatctactggaagaaagataaagtccgcattgacgataaagaagagcgcattagcattagaggtgggaagctgatgatctccaatactaggaaatccgatgcagggatgtatacttgcgtgggtactaacatggtgggggagagagactctgaccccgctgaactcaccgttttcgaaaggcccacgtttctgcggcgcccgattaaccaggtggttcttgaagaagaagccgtggaattccgctgccaggtccagggcgatccccagccgactgtgagatggaagaaagatgatgccgatttaccccggggacgatacgatatcaaggacgattacacgctgagaattaaaaagacgatgtcaactgacgagggtacttacatgtgtatcgcagagaatagagtggggaagatggaagcatccgctacattaacagttcgcgctcctcctcaatttgtcgtgcgaccaagagaccagatcgtcgcacaaggacgtacagtcactttcccctgtgaaactaagggcaatcctcaacctgcagtgttttggcaaaaggaggggagtcagaatttgctgttcccaaaccagcctcaacagcctaacagtcgttgtagcgtcagtcccacaggtgatctgacaattaccaacatccagaggtctgacgctggctactatatctgccaggctttaacagtggcaggctccatcttggccaaagcccagcttgaagtgaccgacgtgctgactgaccgaccccctccaataatcctacaaggacctgccaaccagactctcgcagtcgatggcaccgccctgctgaagtgcaaggctacaggggatccgctgcctgtgatttcctggcttaaagagggtttcacttttcctgggcgagacccaagggccactattcaggagcaagggactctacagataaagaacttgcgaattagtgacaccggtacctacacttgcgtagcaaccagtagctccggcgagacaagctggtctgctgtgcttgacgtgactgagtctggtgcgaccatcagcaaaaactacgatttatcggatctgccagggcccccatcaaagccacaggtcactgatgttaccaagaactccgtcactctcagttggcagccaggcacaccgggaacgctgcctgccagtgcatatatcatcgaagctttctcccaaagcgtgagcaattcttggcaaacggttgccaaccacgtgaagaccaccctgtatactgtgcggggtctgaggcctaatactatttatctcttcatggtgagggccatcaatccccagggattgtccgacccctctccaatgtcggatcctgtgcggacacaagatatatctccacctgcacaaggcgtggaccaccggcaagtccaaaaggaactaggcgacgttttggtgcgcctgcacaaccctgtggtccttaccccaacgacagtgcaggtgacttggaccgtggaccgccaaccccagtttatacaagggtatcgagtgatgtatcggcagacctcagggcttcaggcaacttcctcttggcagaacctcgacgcaaaggttcctacagagcggagtgcggtgctcgtgaatcttaaaaagggggtgacttacgaaattaaggtacgaccttatttcaacgaattccaaggaatggattcggagtccaaaactgtcagaaccaccgaagaggccccttcagctccaccacagtctgtgacagtgcttactgtgggctcttacaacagcacttcgatttcggtatcctgggatccgcctccccctgatcaccagaatgggataatacaggaatataagatatggtgtctgggcaacgagacaagattccatatcaacaaaacagtggatgcagccatccggagtgttataattggcggccttttccctggcatccagtatcgggtcgaggtcgctgccagtaccagcgctggggtcggggtaaagtccgagcctcagcctatcataataggccgtcgaaatgaggtggtcatcaccgagaacaacaactctatcacagagcagatcaccgacgtagtaaaacagcccgcattcattgccggcattggaggggcctgttgggtgattctgatgggcttcagcatttggctgtattggagacgcaaaaagcgaaaggggctatccaactatgcagtgaccttccagcggggggatggaggcctcatgtctaacggaagccgaccaggtctgcttaatgctggggacccgtcctacccctggcttgccgacagctggccagccacatcccttcctgtgaacaactcaaattcaggccctaacgagatagggaacttcggaagaggtgacgttttaccccccgttcccggccaaggcgacaagaccgcaactatgctatcggacggcgccatctattcatccattgactttaccacaaagacatcctacaactccagctcgcagattacccaggcaactccttacgccactacacagatactccacagcaattctattcatgaattggcagtggacttgcccgatcctcaatggaagtctagtatccagcaaaagacagacctgatggggttcggctacagtctccctgatcagaacaagggaaacaatggcggcaagggcgggaaaaaaaagaagaataagaattccagcaaacctcagaaaaacaacggcagtacttgggcaaatgtgccgctgccacctcctccggtgcagcccttaccaggaaccgagctcgagcattacgccgtggaacagcaggagaatggctacgacagcgactcctggtgtcctccattacccgtgcagacatatttgcatcagggacttgaggacgaacttgaggaagacgatgacagggttcctacccccccagtgcgtggggtggcgtcttccccagctatctctttcggacaacagtccaccgccacactgacaccatctcccagagaggagatgcagccaatgctgcaagcccatctcgacgaactgacaagagcctaccagttcgatatagctaaacaaacatggcacattcagtctaataaccagccacctcagccgcccgttccacccttagggtatgtcagtggggccctaatatcagacctggaaacggatgttgccgacgacgatgccgacgatgaagaagaagccctggagatccctagacctttaagggcccttgatcagacgccaggtagctcgatggacaatctggactcttccgtcactggcaaagcctttacatcaagtcagaggccgaggcctacctcccccttcagcaccgacagcaatacttccgccgctctgtctcagtctcaaagacctaggccgacaaagaagcacaaaggaggcaggatggaccaacagcccgctctgccacatcggcgcgaggggatgaccgatgaagaggctcttgtgccctactcaaaacctagcttcccctcccccggaggtcattcgtcttcgggcacggcttcctcaaaagggagcacgggaccacgcaaaactgaggttttgcgtgccggacatcaacggaacgcgtcagatctgctagatattggttatatggggtcaaattcacaggggcagttcacaggagaactgtag

SEQ ID NO: 133266 - DNA, 4185 bp, synthetic construct
  misc_feature 1..4185: note = Description of Artificial Sequence: Synthetic coding sequence
  source 1..4185: mol_type = other DNA
atggccagaaggcatgagagggtcactcggcggatgtggacctgggcccctggccttctcatgatgactgtcgtgttttggggccatcaggggaatgggcaggggcaggggagtagactgagacaggaggattttccaccacgaattgtagagcatccctcagacgtaatcgtaagcaagggagagccaactactctgaattgtaaggccgagggccggcctacccccacgatcgagtggtataaagatggggaaagggtggagaccgacaaagacgacccgcggtcccaccgaatgcttctgccttctggctccttattcttcctgaggatcgtccacgggcgccgctcgaaacctgacgagggatcttacgtgtgtgtagccaggaattatttgggtgaggcggtttcgcggaacgcaagtctggaggtagcacttctgcgagatgattttaggcagaaccctacagacgtggttgtggctgctggtgaacccgccatattagaatgtcagccacccagaggacacccggagcctacaatctattggaagaaggataaagtcagaatcgacgataaggaggaaagaattagcataagaggtggcaaactgatgatcagtaatacaaggaagagtgacgccggcatgtatacatgcgtgggaacaaatatggtcggggagagagattctgatccagccgagctgactgtcttcgaacggccaacattcctcaggagacccattaatcaggttgtgctggaggaagaggctgttgagtttcggtgtcaggtccaaggagaccctcaaccgacagtgagatggaagaaagacgacgcagacctgccccgcggccgatatgatatcaaagacgactacaccctgcgcattaagaaaaccatgtcaacagatgagggcacgtatatgtgtattgctgagaaccgggttggcaagatggaggcttcagctaccctgactgtccgcgccccaccccaatttgtggtcagaccgcgcgaccaaatcgtcgcccagggacgcacagttaccttcccctgtgaaacaaaagggaacccacagccagcagtgttttggcaaaaagagggctctcagaacctgctctttccgaaccagccgcagcagcccaatagccgctgctccgtgtcccccacgggtgacctgacaattacaaatatccagcggtcggacgccggttattatatttgccaggctctcactgtggctggcagtattttagcaaaagcacagctggaagtcactgatgtgctgaccgatagaccccctcctattatcctgcagggccccgccaatcaaacattggccgtggacgggactgccttgttaaagtgcaaagctacgggagacccacttcctgtgatttcttggctcaaggaggggttcaccttcccgggcagggatcctcgggcaacaattcaggaacaggggactcttcagataaaaaatctccggatctctgacacgggaacatacacctgcgttgccaccagctcctctggggagaccagctggtcagctgtacttgacgtgacagaatctggagccaccatcagcaaaaattatgacctatcggacctccccggtccgccttcaaagccccaggtgaccgatgtgaccaaaaactccgtgactctgagctggcagccaggcacccccggtacactccctgctagcgcttatataatcgaggcattcagccagtcagtcagcaattcttggcaaactgttgccaaccatgttaaaactacactctatacggtgagagggctccggcccaacaccatttacttgttcatggtcagggccattaacccccaggggctcagcgatccttctcctatgagtgaccctgtacgaacccaggatatctcaccgccagcccagggcgtggaccaccggcaagtgcagaaggagctcggagacgtcctcgtacggctgcataatcctgtagtattgactccaacgaccgtgcaggtgacctggactgtggatcgtcaaccacagttcatccagggatatagggttatgtaccgccagacaagtggacttcaggccacaagctcttggcagaacttggatgctaaggttccaaccgagcgctcagctgtcctggtgaatttgaaaaagggcgtgacctacgaaatcaaagtgcggccctattttaacgagttccagggcatggacagtgagtccaagaccgtgcgcaccacagaggaggcaccaagcgcccctcctcagtctgtgacagtgttaacggtaggttcctataacagcacctccatctctgtgtcatgggatccacctcctccagatcatcagaatgggattattcaggaatataaaatttggtgcctcgggaacgaaacccgctttcacatcaacaaaacagtggatgctgccataagatctgtgataatcggtgggctgttccctggcatccagtatagggtagaggtggcggcctccactagtgctggggttggcgtaaaaagtgaacctcagccaattattattggccggcggaacgaagtggtgattactgaaaacaataatagcatcactgagcaaatcacggatgtcgtgaagcagcccgcgttcattgctggtatcggcggagcatgctgggtgattctgatgggcttctctatatggctgtattggcgtagaaaaaagaggaaagggttgagcaattacgcagtgaccttccagcgtggggatgggggactgatgtctaatggctcacggccaggactgctgaatgctggagatccttcatacccctggttggcagactcgtggcctgccactagcctgcccgtaaacaactcaaacagtggaccaaacgaaatcggcaattttggcaggggagacgtccttccaccagtgccaggccagggggacaagacagcaaccatgctcagcgatggcgccatatacagctccatcgatttcacgacaaaaacgagctacaattcaagttcccagataactcaggccactccttacgccactacacagattctccatagcaatagcattcacgagcttgccgtagacctgccggaccctcagtggaaaagctccattcaacagaagacggacctcatgggcttcggatattctctccccgatcagaataaaggaaataatggtggcaagggaggcaagaagaaaaaaaacaagaattcttctaagcctcagaagaataacggcagcacctgggctaacgttcccctccctcctccccctgtgcaaccactgcctggaacagaactggagcactatgctgtggagcagcaggagaatggctatgattcagacagttggtgtccccccctgccggttcagacgtatcttcatcagggcctcgaggatgaacttgaggaagacgacgaccgggtcccaacacccccagtacgaggcgtggccagcagcccagcaattagctttggccaacagagcactgccacacttactccaagcccccgggaggaaatgcaacctatgctgcaggcccaccttgacgagctaacccgagcgtatcaatttgacatcgcgaagcagacctggcacattcagtcgaataatcagccacctcagcctcccgtacctcctctaggatatgtcagcggagctttgatcagtgatctcgagacagacgtggcggacgatgatgccgacgatgaggaagaagcgctggagatccctcgacccctgcgggcacttgatcagacaccgggatcaagcatggacaatcttgactcctcagtgaccggcaaggcatttaccagtagccaacgccccagacccacctcaccattttctactgattcaaatacgtctgcggccctcagtcagtcccagcgccctaggcctacaaagaaacacaaggggggtagaatggatcagcagccagccctcccgcacaggagagaagggatgaccgacgaagaggcacttgtcccctacagcaaaccttcctttccaagcccaggtggccattccagcagcggtaccgccagttctaaagggagcactggcccaaggaagacagaagtgctgcgggcagggcatcagcggaacgcctcagacttgctggacatcggatacatgggatcaaattcccaaggccagtttacaggtgaattatag

SEQ ID NO: 133267 - DNA, 4161 bp, synthetic construct
  misc_feature 1..4161: note = Description of Artificial Sequence: Synthetic coding sequence
  source 1..4161: mol_type = other DNA
atgttacgctacttgctcaaaacactgctgcagatgaatttgttcgccgacagcctcgccggagatatttccaattctagcgaacttctgcttggtttcaacagtagcctggcggctcttaaccacactctgctgccacccggagaccctagcctcaatgggagccgggtcggccccgaagatgcaatgccccgaatagttgagcagcccccagatctgctggtgtctcgcggggaacccgcaacactgccatgcagggctgagggccgcccaagacccaacattgaatggtataagaatggagcccgcgtagcgactgttagagaggatcctagggctcacagactgcttctgccaagcggtgctctgtttttccctaggatcgtacacggccggcgcgctagaccggatgaaggagtgtatacatgcgtggcgaggaactacctcggagctgccgcctccaggaatgctagtttggaggttgccgtattgagggatgacttcagacagagcccaggcaatgttgtggtggccgtgggcgagccggccgtcctggagtgtgtgcccccccgcggacaccccgagccttccgtgtcatggaggaaggacggggccagactgaaggaggaggaaggtcgcattactatacgtggaggaaagttaatgatgtcgcataccctgaagtcagatgccggcatgtatgtgtgtgtcgcctctaacatggccggcgaaagagaaagcgccgccgcggaagttatggtacttgaaaggccatcattcctgcgtcgacccgttaatcaagttgtcctggccgacgcccccgtgactttcctgtgtgaagtaaagggagatccgccacctcggttgaggtggaggaaggaagatggcgaacttcctactggccggtacgagatcaggtcagatcactccctttggatcgggcacgtatcagctgaggatgagggaacgtatacgtgcgttgctgagaattcagttggtcgagccgaggcctcgggctctctgtccgttcatgtccccccccaattggttacacagccccaagatcagatggcagccccgggcgagagcgtggctttccagtgcgagacaaaaggtaaccccccacccgcgattttctggcagaaggaaggttctcaagtcctcttgttcccatcccagagtcttcaacctacaggcagattttctgtgagccctcggggtcagctgaacatcacagccgtgcagcgcggcgacgccgggtattatgtttgtcaggccgtgtccgtagcaggatctatcctcgccaaagctcttctggaaattaagggagcttcactcgacgggctgccgcccgtcattctccagggtccagctaatcagacactggtgctgggctcaagcgtttggttaccatgcagagtgacagggaatccccagccctcggtgagatggaaaaaagatggccagtggttacaaggagatgacctccaatttaagacgatggccaatgggaccctgtacatcgctaatgtgcaggaaatggacatgggattctactcctgtgttgcaaagtcctcaaccggagaggcgacatggtctggctggctcaagatgcgggaggactggggagtttctccagatccccctactgagccgtccagcccacccggagcccccagccaacctgtcgtgacagagataaccaagaatagcatcaccctgacttggaagcccaatccccagacgggggccgccgtgacatcatatgtgatcgaggccttttcgccagctgcagggaacacctggcgcactgtcgccgacggcgtccagctcgaaacccacaccgtttccggcctgcagcccaatacaatttacctctttctggtgcgggcagtcggtgcatggggtctgtcagagccttcacccgtctccgagcctgtgagaactcaagacagctccccatctaggccagtagaggatccctggcgcggccagcagggccttgcagaggtggctgtgcgactccaggagcctatcgtccttggccccaggacgttgcaggtctcttggacagtggatggaccggtccagctggtccagggattccgggtctcctggcgcgtcgccgggcctgagggcggatcctggacaatgctggatctgcagagtcctagccaacagagtaccgtcctacgaggtctccccccagggacacagatacagatcaaggtgcaggctcaggggcaggaagggctaggagctgagtcgctatcagtcacccgatccattcccgaggaagcacccagcggaccgccccagggcgtcgcagtggcgttggggggcgacggcaacagcagcattaccgttagctgggagccccctctgccttctcagcagaacggcgttatcacagaatatcaaatatggtgtttaggtaacgagagtcggttccatctgaatcggagcgcagctggatgggcgcgaagtgcaatgctgcgaggtttagtgcccggcctcctgtacaggactctggtggcggctgccacatcagccggggtaggtgttccatccgcccccgtgcttgtccagcttcctagcccgcccgacctggagccggggctcgaggtgggggcaggcctggccgtgaggttggcgagggtactgagagaaccagcctttttggccggatccggtgcagcatgtggggccttgctcctgggcctgtgcgctgccctgtattggaggagaaaacaaagaaaagaactgtcccattacactgctagctttgcatatactccggctgtgagctttccccattctgaaggcctgagtggtgccagttctcggccacctatggggctgggacccgcaccctactcctggctcgcggatagctggccccacccaagccgatccccatcggcccaggagcccagggggtcttgttgcccgtctaatccggacccggatgacagatattacaacgaagcggggattagtctttacctggcacagacagctagaggtacagccgctcccggtgagggacctgtgtattctactatcgatcccgcaggggaagagcttcaaaccttccatgggggttttccccaacaccctagcggagatcttggaccttggtctcagtatgctccccctgagtggtcccagggggattctggcgcaaaggggggaaaggttaaattgcttggtaagcccgtccagatgccttctctcaactggcccgaggcgcttccgccccctcccccttcatgcgagctgagttgtctcgaggggcccgaagaggagttagagggtagttccgagcccgaggaatggtgcccccctatgccggagcgatctcatttgaccgaaccaagttcctccggaggctgtctggtcacccccagccgccgtgaaaccccatcccctactccttcttatgggcagcagagcactgcgacactgacgccgtcgccccccgacccaccacaaccacccacagatatgcctcatctccaccaaatgcccagaagagttccactgggcccatcttcaccccttagcgtgtcacaacccatgttaggtatccgggaagctaggcccgcagggttgggcgcaggtcccgcggcgtcaccacacctgagcccctcccctgcccccagtactgcctcctcagcgcccggacggacgtggcaggggaatggggagatgaccccaccccttcagggccctcgagccaggtttcggaaaaaacctaaagcgctgccgtaccggagagaaaactcccctggcgatctgccccctcctccactcccacctccagaagaggaggcgagctgggctctggaactcagggcggcaggctctatgtcatcactcgagcgcgagcggagcggcgagcgcaaggccgttcaggcagtgccattggctgcgcaaagagtgctgcacccagatgaagaagcctggctgccttactctcgcccaagctttctgtcacgtggccagggaacatctacctgttccaccgctggttccaattctagtagaggatcttcgagttccagggggtctaggggccccgggagaagtcgtagccggagccagtcacgatcacagagccaaagacccggacagaagagacgtgaggagccccgatag

SEQ ID NO: 133268 - DNA, 4095 bp, synthetic construct
  misc_feature 1..4095: note = Description of Artificial Sequence: Synthetic coding sequence
  source 1..4095: mol_type = other DNA
atggaaagacctgaggacagtctgtctttatggtcactgaatctttctccacagtttccttgtctcaatgcattgcggcacccactgagtcccggcagtagggtcggacctgaagatgctatgcccagaatcgtggagcaaccgcccgacttgctggtgtcacgcggggagccagcaacgcttccctgtcgggccgaggggcgaccccgccccaatattgaatggtataaaaatggagctcgtgtcgccactgtgcgggaggaccctcgggcacatagacttctcctgcccagcggcgcacttttctttccccggatagtgcatggcagaagagcacgaccagatgagggagtgtatacgtgcgtggcccgaaattatctgggagctgctgcttctcggaatgcctcactcgaggtggccgtgctcagggacgactttaggcagagtcctggcaacgttgtggtggcagtgggggaacccgccgtgctcgagtgcgttccaccccgcggccatcctgaaccaagcgtgagttggagaaaagacggtgcaagattgaaggaggaagagggtaggataaccataagggggggcaagctcatgatgtctcataccctgaagagcgatgccgggatgtacgtttgcgtggctagcaatatggctggcgagagggaatccgcagcagccgaggtgatggtcctcgagagaccttctttcctcaggcggccggtgaatcaggtcgtactggccgacgcccctgtgacctttctgtgcgaagttaaaggtgatcccccacccaggctgcgctggcggaaagaggatggcgaactcccaactgggcgctacgagatacgcagcgatcatagtttatggatcggtcatgtgagtgccgaggatgagggaacctatacttgcgttgctgaaaactccgtagggagagcagaggccagtggttcgcttagcgtccatgtgccaccgcagctggtgacacaaccacaggatcaaatggcggcgcccggcgaatcagtagcgttccagtgcgagaccaagggaaatccccctcccgccatcttttggcagaaggaagggtcacaagtgctcctgtttccaagccagtcactgcaaccaactggaagattttctgtttcacctcgtggacagttgaatatcaccgccgtgcagagaggagatgccggctattacgtatgccaggctgttagcgtggcagggtccatcctggccaaggccctattggagatcaaaggcgcctctttggacgggctgccacctgtgattttacagggccctgctaaccagacactggtacttggctccagcgtttggctcccttgtagggtgaccggtaatccccagccctctgtgaggtggaagaaggacggacagtggctgcaaggagacgatctgcagtttaagacaatggccaacggcactctatacatcgccaacgtccaagaaatggacatggggttctattcctgtgttgccaaatccagtactggagaggctacttggtccggctggctgaagatgagagaggactggggagtttctcctgatccacctaccgagcccagctctcctcctggggcaccctcccagcccgtcgttaccgagatcacgaagaattccatcactctgacttggaaacccaacccacagacaggggcggcggtgacgtcctacgtgattgaggccttcagccctgctgctggaaacacttggaggaccgtcgccgatggggtccaacttgagacacacactgtttcaggcctccaaccaaatacaatctacctatttttagtgcgagcagtgggcgcctggggcttgagtgagccctccccggtctcggagccagtcagaacccaagattcttcccccagccgaccagttgaggacccttggcggggacagcagggcctcgccgaggttgccgtcaggctccaggaacctattgttctgggaccacggaccctgcaggtctcctggaccgtggatgggccagtccagttggtccaaggattccgagtctcctggcgtgtcgcaggacccgaaggtggaagttggaccatgctcgacctccagtccccttcccaacaatcgacagtactgaggggtcttccgcccggcacacagattcagattaaggtccaagcccaagggcaggaaggtctcggggccgagtccctttctgtcacccgcagtattcccgaagaagccccttcagggcccccacagggggttgctgtcgcccttggaggggatggcaattccagcattacggtgtcatgggaaccacctctcccctcccagcaaaacggagtaattaccgagtatcagatctggtgcctggggaatgaaagccgtttccacctgaaccgtagtgccgcaggatgggcacggtcagctatgcttagagggctggttccaggcctcctataccggaccctcgtcgctgccgcgactagcgcgggcgttggcgtgcctagcgcacccgttctcgtccagttaccgtctccacctgacttggagccgggcctggaagttggcgccggtctggccgtgcggctggccagagtgctgcgggaacctgcttttcttgccgggagcggtgccgcatgcggtgccctgcttctcgggctgtgcgctgctctgtactggcggaggaaacagaggaaagagctgtcccattatacagcttcctttgcttatacccccgctgtgagctttcctcacagtgaaggcctaagcggggcaagtagtcggcccccaatgggactgggtcctgctccttatagttggctggctgattcttggccccacccttcaaggagcccctcagcccaagaacccagaggctcatgctgcccatcaaatccagaccccgacgataggtattataatgaggcgggaatctccctgtacctggcccagactgcccggggcacagctgcccccggagagggtcctgtgtactctacgatcgatccagcaggagaagagctgcagacattccacggggggtttcctcaacatccctcaggtgacttaggaccttggagccaatacgccccccctgagtggagccagggcgattcaggcgctaagggggggaaggtaaagctgctcggcaaacccgttcagatgccatcacttaactggccagaggccttgcctccgccacctccgtcctgtgagctgagttgtctcgagggcccggaggaagagctggaagggagctcagagcccgaggagtggtgcccacccatgcccgaacggtcacatctgaccgagccctcctcatctgggggatgcctcgtgaccccaagcaggcgcgagacaccttcacctaccccttcttatggccagcagagcacagccactctaactccgtcgcctcctgatcccccacaaccgccaacagatatgccccatctgcaccagatgcctagacgggtgccactcgggccctctagtccactgagtgtttctcaaccgatgctgggcattagagaagccaggccagctggtctgggcgctggcccggccgcttctccgcatctgtctccgtcgcccgctccctccactgcctcttccgccccaggccgtacctggcaggggaatggagaaatgaccccacctctgcagggaccccgcgctcgatttcgtaagaaacccaaggccctgccctatcgccgggaaaatagccctggtgacctgccccctccaccactgccacccccggaagaagaggcttcctgggccctcgagctccgggctgcgggctccatgagtagtttggagagggaaaggagcggcgagaggaaagctgttcaagcggtccctctcgcagcccagcgggtcttgcaccccgatgaggaggcctggttgccttattctcgaccgtcatttctatcccgcggtcagggaacaagcacttgtagtacagctgggtcgaatagctctagaggctcttcatccagccgtggttctagggggcccggacgttctcgtagccggagccagtcccgatcgcaatcccaacggcccggccagaagcgcagagaggagccccggtag

SEQ ID NO: 133269 - DNA, 450 bp, synthetic construct
  misc_feature 1..450: note = Description of Artificial Sequence: Synthetic coding sequence
  source 1..450: mol_type = other DNA
atgactccaccattgcaaggtcctagagcgcgcttccgaaaaaaacccaaagcactgccataccgcagagaaaacagcccaggcgatcttcccccaccacccttgccacccccggaggaggaagctagttgggcgttagaacttcgggccgcaggcagcatgagttctttagagagggaacggagcggggagaggaaggctgtccaagctgtgcctcttgcagcacagagggtgcttcaccccgatgaggaggcctggctcccctactcaaggccatcatttttgtcgcgcggccaagggaccagtacctgtagtacggcagggtctaactccagccgcgggagtagctcgtcccgcggctcccggggtcctggacggagccgcagcagatcgcagtcacgcagccagtcacagcgcccgggacagaagcgccgcgaggaaccccggtag

SEQ ID NO: 133270 - DNA, 3024 bp, synthetic construct
  misc_feature 1..3024: note = Description of Artificial Sequence: Synthetic coding sequence
  source 1..3024: mol_type = other DNA
atgggcagtgggggcgactccctcttgggaggaagggggtctctgcctctgttactgctgctgattatgggaggcatggcccaggacagccccccacagatcctggtgcaccctcaggatcagctgttccaggggcctggtcccgcccggatgtcatgtcaggcttcaggtcagccacccccaaccatcagatggttattgaacggccaaccactgagtatggtgccacctgaccctcatcacctcctgcctgacgggaccctcttactgcttcagccgccggcaagggggcacgcacatgacggccaggccctaagcacagatctaggagtatatacctgcgaggcctctaatcgactaggcaccgccgtcagtaggggggcccgccttagcgtcgccgtcttgcgagaggacttccaaattcagccccgggatatggtggctgtggttggcgaacaatttacgctggaatgtggacctccatggggccatcccgagccaaccgtgtcttggtggaaggacggcaaacctctggctttacaacccggacgccataccgtgagcggtggctcactgctgatggcccgggcggagaagtccgacgaaggcacatatatgtgcgtggccacaaacagcgccggacatcgcgagtctcgggccgcacgcgtgtccatacaggaaccacaggactatactgagcccgtggaattgctggcggtgcggatccagctggaaaacgttactttgttgaacccagatcccgctgaaggtcccaaacctcggccagcagtctggctgagctggaaggtgagcggaccggctgctccagcccagtcatacacagccttgttccgcacccagacagcgcccggaggacagggggctccctgggctgaggaactgctcgctggttggcagtccgctgagctgggcggtctgcactgggggcaggattacgaattcaaggtgcgtccatcaagcgggcgcgcgagaggtcctgattctaacgtgttgctgctgcgcctgcctgaaaaggttcctagcgcaccgccacaggaggtgacgcttaagcctggtaacgggacagttttcgtatcatgggtgcctcctcccgccgagaatcataatggcatcatccgcgggtatcaggtctggtctctcggtaacacctcccttccccctgccaattggactgtggtaggggagcagacccagctggagatcgcaacgcatatgccgggttcctattgcgtccaggttgcagctgttacaggcgctggagccggggagccatccagacccgtgtgtctcctattggagcaggccatggagcgtgccacgcaggaaccctcagagcacggcccgtggaccctcgagcagctcagggccacactgaagagacctgaagttattgccacttgtggcgtggctttgtggcttctcctgctgggcactgcagtatgcattcatcggagacggcgcgcccgcgtccacctcggccccggcctttaccgctacacaagcgaggacgctatattgaaacaccgcatggaccactctgattctcagtggttggcagatacctggagatccactagcgggagcagggatctgtctagcagcagtagtctgagcagtcgcctgggggcagatgctcgggacccactagattgccggcggagtctcctctcgtgggattctagatcgccaggagtccccctgctgccagataccagtacgttttacggcagcctcatcgcggagctccctagcagcacgcctgcacgcccatccccacaggttcctgccgtcaggcgtctcccaccgcagctggcccaactaagctccccatgtagctcatctgattccctttgttctcgccgcggactctctagtccgcgcttgtcgctcgcacccgctgaagcctggaaggccaagaagaagcaggagttgcaacatgcgaatagttcacctctgctgagaggatcacactctctggagctgcgagcctgcgagttaggtaacagagggtcaaagaacctttcccagtcccccggggctgtcccacaggccctcgttgcatggcgagccctcggcccgaagcttctgtcatcgtccaatgagctggtgacgcgccacctgcctccagctcctctcttcccgcacgagaccccacccacacagtctcaacaaactcagccacccgtggcgccacaggccccctcaagcattctcctgcctgcagctcctatcccaatcctgagtccttgctcaccgcctagcccgcaagctagcagcttgtctggtccctctccagcttcaagccgactatcaagtagctctcttagtagccttggcgaggaccaagacagcgtactgactcccgaggaagtcgccctatgcttggagctctctgaaggcgaggaaactcctcgaaattcggtttccccaatgccgagagctcccagccctccaactacctacggctatatcagcgtgcccaccgcgtccgaattcaccgatatgggtcgaaccggaggaggcgtaggcccaaaggggggtgttcttctgtgtccacccagaccttgcctgacgcctactccatcagaagggtctctggccaatggatggggctccgcctccgaggacaatgctgcaagtgcccgcgccagcctggtttctagcagtgacggcagctttctggccgacgcccatttcgcccgcgccttggccgtggctgttgattcgttcggtttcggccttgaacctcgcgaggcggactgtgtctttatagacgcttcatcaccaccaagcccacgagatgaaatttttctcactccaaacctcagcctacccctgtgggagtggcggcctgattggttggaggatatggaggtcagtcacacccagcgtctgggccgcggcatgcccccatggcccccagactcccaaataagtagtcagaggagccaactgcattgtaggatgcccaaagcaggtgcatcaccggttgattacagctag

SEQ ID NO: 133271 - DNA, 2106 bp, synthetic construct
  misc_feature 1..2106: note = Description of Artificial Sequence: Synthetic coding sequence
  source 1..2106: mol_type = other DNA
atgggttccggaggcgacagcctcttgggcggcaggggcagcctccccctgctcctgctgctgatcatggtattaagagaggattttcaaatccaacccagggacatggtggcggtggtgggcgagcagtttactctcgaatgcgggcctccatggggtcaccccgagccaacagtctcttggtggaaggacggcaagcccctggccttgcagcctggaaggcacacggtatctggtgggagcctgctcatggctagggccgagaaaagcgacgagggaacgtacatgtgcgttgccacgaatagcgcggggcacagagagtcccgtgctgcccgggttagtatccaggagcctcaggactatacagagcccgtggagctgttggccgtcaggattcagctggaaaatgtcacgctcctgaacccggatcctgctgagggaccaaagccgagacctgccgtctggttaagctggaaggttagtggccccgccgcgccagcccagagttatacagcattgttccgcacgcagaccgcacctggggggcaaggcgccccatgggctgaggagttgctcgcagggtggcagtcagcggaactcggcggccttcattggggtcaggactatgagttcaaggtgagacctagcagcggcagggcgcgggggccagacagtaatgtgctgttgttacggttacctgagaaggttccatccgccccgcctcaggaagttactctgaaacccggcaacggtaccgtctttgtatcttgggtgcccccccctgccgaaaaccacaacggaatcattagggggtatcaggtgtggagccttgggaataccagcctaccacccgcaaattggacagttgtgggcgagcagacacagctggaaatcgccacgcacatgcccggttcttattgcgtacaggtggcggccgtcacaggtgccggtgcgggagagccctcccggcctgtctgcctcttgctggagcaagcaatggagcgcgctacacaagaaccaagcgagcatgggccctggaccctggagcaacttagagcaacacttaaacggcccgaggtgattgctacctgtggcgtggccttatggttgttactgcttggcaccgctgtctgcattcacaggcggaggagagcaagagtgcacctgggccccggcctgtatcgttacactagtgaagacgccattttaaagcatcgcatggatcattccgatagccagtggcttgccgacacgtggagaagtacctcgggctctagggacttgtcttcgagtagctcgctttcctctagacttggagcagatgctagagacccgcttgactgcagacggagtttactctcatgggactcgaggtcaccaggcgtgccgctgctcccggatacttctaccttttacggaagcctgatagctgagctgccctcatccacaccagctcgtccaagcccgcaggtgccagcagtcagacggctcccgccgcagctggcccagttgtcatccccatgcagcagctcagactctctgtgctccaggaggggtctgagcagtccaaggctgtctttggcccctgcggaagcttggaaggctaaaaagaaacaggagctgcagcatgcgaactccagtccactcctgcggggctctcactctttggaactaagagcatgcgaactgggcaacagaggtagcaagaatttgagccaaagtccaggcgcagttccacaggcattagtcgcgtggcgtgcccttgggcctaagcttctcagttcttccaacgagctcgttaccagacatctaccacctgctcccctctttcctcacgaaacccctccgacccagtctcagcagacgcagcctcctgtggcaccacaggcaccaagcagcatcctgctgcctgcagctcccattccgatcttaagtccgtgttctccaccatcaccacaggcctcatctctgagtgggcccagccccgcctccagcagactctcatcttcctctctcagcagtctcggcgaagatcaggattccgtgctcactccagaggaggtcgctctatgccttgaattgtcagagggagaagagaccccctag

SEQ ID NO: 133272 - DNA, 2589 bp, synthetic construct
  misc_feature 1..2589: note = Description of Artificial Sequence: Synthetic coding sequence
  source 1..2589: mol_type = other DNA
atggttgccgttgttggcgaacagtttactctggagtgcggccccccttggggacaccctgagccgacagtcagttggtggaaagatggcaaacccctggcactccaacccgggcggcatactgtgagcggtggaagcctgctcatggctagggcagagaaatcggacgaaggaacatatatgtgcgtcgcgaccaacagcgctggccatcgcgaaagtagagccgctcgggtttcgatccaggaacctcaggactatacagagcccgtggagctgctggcggtcagaatccagctcgagaatgttaccctgctgaacccagatccagccgaaggtcccaaacctcgccctgcagtgtggctgtcttggaaagtgtccggacctgccgcgcctgcccagagttataccgccctgttcagaacgcaaacagctcccggaggtcaaggtgcaccgtgggccgaagaactgctcgcgggatggcagagtgctgagttagggggcctgcactggggccaagactacgagtttaaagtgcgcccctcctccggtcgggcaagaggccccgacagcaacgtgcttctcctgcgtctccctgagaaggtacccagcgcccctccccaagaggtcactttgaaacccggaaatggtactgtttttgtgagctgggtaccaccccctgccgaaaaccacaatgggattattcgcggttatcaggtatggtccctcggaaacacctctctgccccctgcgaactggaccgtagtaggcgagcaaacacagctcgagattgccactcatatgcctggtagttactgcgtccaggttgcagcagtcaccggtgcaggggcaggtgagccatcccgtcccgtgtgtctgttgttagaacaggctatggagcgcgccacacaggagccttccgagcatggcccatggacactcgagcagctgagggccacactgaagaggcccgaggtgatagcaacttgtggtgtggccctttggttactgctgctcggcactgcggtgtgtattcatcgcagaaggagggctagagtgcatcttggacccggactctaccgctataccagcgaggatgctattctgaagcatagaatggaccacagcgactcacaatggctcgccgacacatggcggtccacttctggcagccgggacctctcttctagctcgagcctgtctagccgacttggggcagacgcccgtgaccccctcgactgtcgcaggtcgttattgtcgtgggactcccgttccccaggggtaccccttttgcctgatacctccacgttctacggttcactcatcgcagaactgccctcttccacgcctgccagaccttccccacaggttcctgccgtgaggaggctccctcctcagctggcacagctgagctctccttgctcctcctccgactccctttgctcaagacgtggccttagttccccaagactgtcgctggccccagctgaggcatggaaagccaagaaaaaacaggagctgcagcacgccaactctagtcccctgctgaggggctcacactcgctggaactcagggcttgcgaattgggcaataggggctcaaagaatctttcccagagccccggagcggtgccacaggcccttgtagcatggagggccctgggcccgaagttgcttagtagtagcaacgaacttgtaacccgccatcttccgcccgccccgttatttccacatgaaactcctccaacacagagtcagcagacacagcccccagtggctccgcaggccccctcaagcatccttctgcccgcggctccgatcccgatcctctcgccttgcagccctcctagcccgcaagctagcagtctttcggggcccagtcccgccagctcccggctcagtagttcatcattatcgtcactcggtgaggatcaggacagtgtgctgaccccagaggaagtggccctctgtttagaattatccgaaggcgaagaaacacccagaaattccgtgtctccaatgccaagggccccttccccccccacaacttacggctacatctcagtgcccacagcaagcgagtttaccgatatggggaggacaggaggcggtgtcggccctaaaggaggtgttctcttgtgtcccccccggccatgtctcacgccaacacctagcgagggcagcctcgcaaacggctggggctccgcctccgaagacaatgcagcatccgcccgggcttcactagtctcttctagtgacggaagcttcctggccgacgcccattttgccagggcactcgcagtggccgtagactcttttggattcggtcttgagccgagagaggcagactgtgtgtttatcgacgcgagttctcctccctcgcctagagatgagattttcctcacccccaacctctcattaccgctgtgggaatggaggccagattggctggaggacatggaagtgtcccacacccagaggctgggacgcggtatgcccccatggccaccagactcccagatcagtagccagcggagccagcttcattgtcgcatgccgaaagcgggagcttcccctgtggactacagttag

SEQ ID NO: 133273 - DNA, 3708 bp, synthetic construct
  misc_feature 1..3708: note = Description of Artificial Sequence: Synthetic coding sequence
  source 1..3708: mol_type = other DNA
atgtctgggccaactgacgagactgccggagatctgccagtgaaggacaccggactaaatttgtttggcatggggggattacaggaaacctctaccacacggacaatgaaatctcggcaggcagtatcccgggtctcgcgcgaggaactcgaagatagattcctgagactgcacgatgaaaatatcctccttaagcagcatgcccgtaaacaggaagacaagatcaagcgaatggcaacaaagctgattcgtcttgtgaatgacaagaagcgctacgaaagagtaggaggaggtccgaagcgtctggggagagatgtggaaatggaggagatgattgagcaacttcaagagaaggtccatgagctggaaaagcagaatgagacactgaagaaccgcctcatctcggctaaacagcagctgcagactcaagggtaccgccagactccttacaataacgtgcagtctagaattaatacaggtcggaggaaggctaacgaaaatgctggtcttcaagagtgcccacggaaagggattaaattccaagacgctgatgtggccgaaactcctcaccccatgttcacaaaatacgggaacagtctcctggaggaggcaagaggcgaaatccgcaacctggagaacgtgatccaatctcagagaggtcaaatcgaagaattggagcatcttgccgaaatactcaagacccagttgcggaggaaggaaaatgaaatagaactgtccctgctacagctaagggaacagcaggcaactgatcaaagatccaacatcagagacaacgtggaaatgatcaaactgcacaagcagctggttgagaagagcaatgcactctccgccatggaggggaagttcatccagctgcaggagaagcaacgaaccttacgaatcagccatgacgcactgatggccaacggtgacgaactcaacatgcagctgaaggagcagaggttgaagtgttgtagtctcgagaagcagctgcactccatgaaatttagcgagcgacgcattgaagaactacaggaccgcatcaacgatctcgagaaggagcgcgagttactcaaagagaactacgacaagttatacgatagcgcgttttcggcagctcacgaggagcagtggaaactgaaggagcagcaacttaaagtgcagatcgcccagctagaaactgccctaaagtctgatctgaccgacaaaacagagattttagatcgcctaaaaaccgagcgcgatcagaatgagaagcttgtccaggagaaccgcgagctgcagctccagtacctggagcagaaacagcagctcgatgagttgaagaaacgtatcaagctgtacaaccaggaaaatgatataaatgcggacgagctcagtgaagccctgctcctgatcaaagcccaaaaggaacagaaaaatggcgacctttctttcttggtgaaagtggattctgaaataaacaaggatcttgaacgatccatgcgagagctacaagcgacacatgccgagacagtccaggaacttgagaaaacccgcaacatgctgatcatgcagcataaaatcaacaaggattaccagatggaagtcgaagctgtaacccgaaagatggaaaacttgcagcaggactatgagttaaaggtagaacagtatgtgcatcttctggatattcgcgcggctcggatccacaagctggaagcccaattgaaggacattgcttacggaaccaagcagtataagttcaagcctgagataatgcctgacgactccgtggacgagtttgacgagactatccatctagagcgcggcgagaacctgttcgaaatccacatcaacaaggtcactttctctagcgaggtgcttcaggcatcaggagacaaggagcccgtgaccttctgcacctacgccttttacgactttgagctgcaaacgactcctgtcgtccggggattgcatccagagtataattttacgtcccagtacctagtgcacgttaatgacttgttcctccagtacattcaaaagaatacaataactctggaggtgcatcaggcttatagtaccgagtacgagactattgccgcttgccaactcaagttccacgagatcttggagaaaagcggccgcattttttgcacagcgtctctaattggcacaaaaggtgatatcccgaatttcgggacggtagagtactggtttcggctgcgggtgcctatggaccaagcaatacgattgtacagagaaagggcaaaggcgctcggatacattacatccaatttcaaaggacccgagcacatgcagtctctgtcccaacaggcccccaagaccgcacagctcagcagtaccgattctaccgatggcaacctgaacgaacttcatatcacaataagatgctgcaatcacttacaatcccgcgcctcacatttgcagccccacccttatgtcgtttataagttctttgatttcgcagatcacgataccgctattataccctccagcaacgatccccagttcgatgaccacatgtacttccctgtccctatgaacatggacttagatagataccttaagagcgagtccctcagcttctacgtgttcgatgactctgacacccaggagaatatatacatcggaaaagtgaatgttcccctgatcagcctggcccacgacaggtgcatttccggaatcttcgagctgaccgatcatcaaaaacacccagctggcacaattcacgtcattctgaagtggaaatttgcctacctcccaccatcaggcagcatcactacagaggacctggggaacttcatcaggtcggaggagcccgaggtggtacaaaggctgcctcctgcgtcatccgtctctactttagtactggccccgaggcccaagccacggcagagactgacccccgttgacaaaaaggtttcttttgttgatatcatgccccaccagagcgatgtatctcaagaggggagcgttgatgaagtgaaagaaaatacggagaagatgcaacaaggaaaggacgatgtgagcctactgtccgaaggacagttggcagagcagagcctggcctcgagtgaggacgaaacagaaataaccgaagacttagagccagaagtggaggaggatatgagtgccagtgattctgacgattgcataatccctgggccgatctcaaagaacattaaacagccttctgaaaaaatcaggatagaaatcattgccctgagcctgaatgactcccaggtaacgatggacgatacaatacaaaggctatttgtggaatgccggttttactctttgcctgccgaagagacacccgtaagtttgcctaagccaaagtcagggcaatgggtgtattataattattccaatgtgatttatgtggataaagagaacaacaaggcaaagcgtgatattctaaaggccatcctgcagaaacaggaaatgcccaacagatctcttcgtttcacggtcgtgagtgacccaccagaggacgagcaggatttggaatgtgaggacatcggagtggcacacgtcgatctcgccgatatgttccaggaaggcagggatctgattgagcaaaacattgatgtgtttgacgcacgcgccgatggtgaagggatcggcaaactgagagttaccgtagaggcactccatgcgctgcagtcagtgtataagcaatatcgggatgatctcgaggcctag

SEQ ID NO: 133274 - DNA, 3948 bp, synthetic construct
  misc_feature 1..3948: note = Description of Artificial Sequence: Synthetic coding sequence
  source 1..3948: mol_type = other DNA
atgtctggcccaacagatgagactgcgggggatctgccagttaaagacaccggtctgaatctttttggaatgggaggtcttcaggaaacttcaaccactagaacgatgaagagccgccaggcggtgagtcgcgtgagccgagaagagttggaggataggttcctgcggctgcacgatgaaaatattttacttaagcagcacgcacggaagcaggaagacaaaatcaagaggatggcaaccaagctgatccggctggtgaatgacaaaaaacggtatgagagggtgggcggcgggcctaagcgcctgggcagggatgtggaaatggaggagatgattgaacagctgcaggagaaggtgcacgaattagaaaaacaaaacgagaccctgaagaaccgactcatctctgcaaagcagcagcttcaaacacaaggttacagacagaccccctacaataatgtgcaatcacggattaacactggacgcagaaaggctaacgagaatgcaggactgcaagaatgtcccaggaagggcattaagtttcaggacgctgatgtggctgaaaccccccaccccatgttcacaaaatacggtaattcattgcttgaagaagctaggggagaaattcgcaacctggaaaatgtgatccagagtcagcgcggacagatagaagagcttgagcacttggcagagatcttaaagacccagttgcggcgtaaggagaatgagatagaactgagcctcttgcaactcagggagcaacaggccaccgaccagcgttctaacattcgggataacgttgagatgataaagcttcacaaacagctggtagagaaatccaatgccttgtcagcaatggagggaaagtttattcagctgcaggaaaagcagagaacgcttaggatatcacacgatgctctgatggctaatggagacgaactcaatatgcagcttaaagaacagcgactcaagtgttgcagtctcgagaaacagctgcattctatgaagttttccgaaagacgaattgaggagctgcaggatcgaataaacgatctggaaaaagagcgggagctcctcaaagaaaattacgacaaactctacgatagtgcattcagtgccgctcatgaagagcagtggaagctcaaggagcagcaacttaaagtacagatcgcccagctcgaaaccgctttgaagagcgatctgaccgacaagacagagattctagaccggctgaaaactgaaagggatcagaacgaaaagcttgtccaggagaacagagaactccagttacagtacctggaacagaagcaacagcttgacgagctgaaaaagaggattaaactttataatcaggaaaacgatattaacgcagacgaactgagtgaggccctcctactaataaaagctcaaaaagagcagaaaaacggcgacctgtccttcttggtcaaggtcgattccgaaatcaacaaggatctggaacggagtatgcgcgaactccaggcaacacatgctgaaacggtgcaagagctggagaagacaaggaatatgttaattatgcagcacaagatcaacaaggattaccaaatggaggttgaagccgtgacccgcaagatggagaacctgcagcaggattatgagttgaaagtggagcaatacgtgcacttgttggatatcagagctgctcgcatacataaactggaggcacagcttaaggatatcgcatatggtactaaacagtacaaattcaaaccagagattatgcctgacgatagtgtggacgaatttgatgagactatccaccttgaaagaggggagaatctgtttgagatacacatcaataaagtgaccttcagctccgaggtactgcaggctagtggagacaaagagccagtaaccttttgtacatacgctttttacgatttcgagctccagacaactcccgtggtgaggggcctacatcccgagtacaacttcacatcgcagtacttagttcacgtgaacgacctctttctgcaatacatccaaaaaaatactataaccctggaggtccatcaggcctatagcactgagtacgaaaccatcgcagcttgccaactgaaatttcatgagattttagaaaaatccggacggattttttgtactgcctcgctgatcggcacaaaaggcgacatcccaaacttcggcaccgttgaatattggttccggctgcgggtccctatggatcaagccattcggttatatagggagcgagcaaaagctctcggctatattaccagcaactttaagggccccgagcacatgcaatcactatctcaacaggcacccaagacagcccagctgtcatcaaccgactccactgacggtaacttgaacgaactgcacattacaatccgctgctgtaatcaccttcagagccgagcaagtcatcttcagccacatccttacgtcgtgtacaagttcttcgattttgccgaccatgataccgcaattatcccctcatctaacgacccccagtttgatgaccacatgtactttcccgtgccgatgaacatggacctcgatcgttatctcaaatctgagtcactgtcgttttacgtttttgatgattctgatacccaggagaatatttatattggaaaggtcaacgtgccattgatctccttggcacatgataggtgtataagcggcatatttgaactcacagaccaccagaagcatcccgcagggacaatccatgttatcctgaagtggaagttcgcctatctgcctccatccgggtcgataactactgaagatctgggaaatttcattagaagcgaggagcccgaggtggtacagcggctcccccccgcgtcaagcgtaagcacactggtcttagctcctaggccaaagcctagacagagactgacgccggtcgacaagaaggtatcatttgtggatattatgccacatcaatcagacgaaacttccccaccccccgaggatagaaaggagataagtcccgaggttgagcacatccctgaaattgagattaacatgctgactgtaccacatgtgcctaaggtcagccaggagggcagcgtggacgaggttaaagagaatacggaaaaaatgcagcaaggtaaggatgacgtgtcccttctctcagaaggtcagctcgcggaacaatctctggcctctagcgaggacgaaaccgagatcacagaggatctggagccagaagttgaagaggacatgtccgcttctgacagtgacgattgtataatccccggcccaatttccaaaaatatcaagcaaagcttggccctctctccggggttgggctgctctagtgctatctctgcacattgtaacttcagactccccgggtcatcagacttccccgcaagtgcgagtcaggttgatgggatcaccggcgcctgccaccatacacagccatctgaaaaaattcggatcgagatcatcgcgctatccctcaacgactctcaagtgaccatggatgatacaatccagagattattcgtagaatgtcgattttattctctgcctgcggaagagaccccggtcagcctgccgaagccgaaatccggacaatgggtgtactataactattcgaacgtcatttatgttgacaaggaaaataataaggctaagcgagatatcctaaaagccattttgcaaaagcaggagatgcctaaccggagtttgcgctttacggtcgttagtgacccgcccgaggacgaacaggatttggagtgtgaggacataggcgtggctcatgttgatctggccgacatgtttcaagaaggaagggatttgatagagcagaacatagatgtgtttgacgcccgcgctgacggagaaggcatcggcaagctgcgggtgaccgttgaagcccttcatgcccttcaaagtgtgtataaacaatatcgcgatgatctggaagcatag

SEQ ID NO: 133275 - DNA, 1956 bp, synthetic construct
  misc_feature 1..1956: note = Description of Artificial Sequence: Synthetic coding sequence
  source 1..1956: mol_type = other DNA
atggcagcccctctcctacatacacgactgcctggcgacgccgccgcgagctcttcagctgtaaaaaaacttggggcctctcgcaccggtatttcaaacatgagggccctagagaacgatttttttaattctccccccaggaagaccgtgcggttcggcggaaccgtaacagaagtgctgctcaagtacaagaagggcgaaactaacgattttgaactattgaagaaccaacttttagatccagatataaaggatgatcagattatcaactggcttctcgagtttagatcctcgattatgtatctgactaaagattttgagcagctcatatcaatcatcttgagattaccatggcttaaccggtcccaaacagtggttgaggaatatctcgctttcctgggcaatttggtgtcagctcagacagtattcctgcgcccctgtctgagtatgatcgcaagccactttgtgcccccgagagtgataattaaggagggggacgttgacgtgagcgactccgacgatgaggacgataaccttccagcaaacttcgacacctgtcatcgagcgctacaaatcatcgcacggtatgtgccctcaacaccctggttcctgatgcctatattagtagagaagtttcctttcgtgcgaaaatccgagagaacccttgagtgctacgttcacaatcttctcaggatatcagtttatttcccgacactacgtcatgagatattggagctaattatcgagaaactgctgaagttggacgttaacgcaagcagacagggtatcgaagacgccgaagaaactgcaactcaaacgtgcggtggcacagactcgaccgagggattattcaatatggatgaagacgaggaaacagagcacgagacaaaggcaggacccgaaaggctggaccagatggtgcacccagttgcggagcgccttgacattttaatgtcccttgtgttatcttacatgaaagatgtctgctatgtcgacgggaaagtcgataacggcaagaccaaggatttgtatcgcgaccttatcaatatctttgacaaactcctgctgccgactcatgctagctgccacgttcagttcttcatgttttatctatgttcgttcaaactagggtttgcagaagcttttcttgagcacctgtggaaaaaactgcaagatccctcaaaccccgcgatcatcaggcaggccgccggaaattatataggctcattcctggccagggcaaaattcattcctctgatcacggtaaagagctgcctggatctgttggtgaactggctgcacatctacctgaacaatcaggactctgggacgaaggcattttgcgacgtagccctccatggtcccttctattctgcttgtcaagccgtgttctacacattcgtgtttcgccacaaacaactgctatctggtaacctgaaagaaggcctccagtacctgcagagcttaaactttgagcgtatagtcatgagccaactgaacccactgaaaatttgcctcccatccgtggtgaacttttttgccgctataacaaataagtaccagctcgtgttctgctacaccattattgagaggaataacagacagatgcttccagttatcagaagcacagctggaggtgattctgtgcagatatgcacaaaccccctggatacctttttcccttttgatccatgcgtgcttaagagatccaagaagtttatcgatccaatataccaggtctgggaagacatgtctgccgaagagctgcaggagttcaaaaagcccatgaagaaggacatcgtggaggacgaggatgatgatttcctgaaaggcgaagtgcctcaaaacgacaccgtgattgggataaccccgagctcgttcgatactcactttcgctccccatcctccagcgtggggtcacctccagttctatatatgcagccctctcccctatag

SEQ ID NO: 133276 - DNA, 1857 bp, synthetic construct
  misc_feature 1..1857: note = Description of Artificial Sequence: Synthetic coding sequence
  source 1..1857: mol_type = other DNA
atgagagccctggaaaacgatttcttcaactcccctccaagaaagaccgtgcgctttggcggtacagtgactgaggtcctgctgaaatataagaagggcgaaactaacgatttcgaactgctgaaaaatcagttactcgaccctgacattaaagatgatcagattatcaattggcttctcgaatttagaagcagcattatgtaccttacaaaggacttcgaacaactgattagtatcattctacgacttccttggctaaaccggtctcagacagtggttgaggagtacctggcgttccttggcaatctggtctccgcccagacagtgtttttaaggccttgtctgtctatgatagcttcacattttgtgcccccacgagtaataatcaaagaaggggacgtggatgttagtgacagtgacgacgaggatgataatcttcccgcaaatttcgatacgtgccacagagcactgcagattatcgcacgctatgtccctagcactccctggtttctgatgccgattctggtggaaaaatttccttttgtgcggaagtctgagcggacactggagtgctatgtgcataatctactgcgaatttccgtctattttcctactctgcgacacgagatcctggagctcatcatcgaaaagttgctcaaactagatgtaaatgcttcccggcagggaattgaggacgccgaggaaaccgccacccagacctgcggcggaaccgactcaaccgaagggctgttcaatatggatgaggacgaagaaacagagcatgaaactaaggctggtcctgaacgcttggatcagatggtgcacccggtggcggagagactcgatatactcatgagtttggtgctgagctacatgaaagacgtttgctacgtggacggaaaggtggataatggcaagactaaggatctgtatcgcgacctgattaatatctttgacaaacttctgctacctacgcatgcgtcttgtcacgttcagttctttatgttttatctctgcagcttcaagctcggcttcgctgaggcgtttcttgagcacctgtggaaaaagctgcaggaccctagtaatccagcaatcatccgacaggctgccggaaattacatcggctctttcttggctagggcaaaatttatccccctgataaccgttaaatcgtgtcttgatttgctcgtgaactggctacatatatacttaaacaatcaagacagcgggactaaggccttctgtgacgtggccctgcatggcccattttactcagcctgccaggcagttttttacacttttgtctttcgtcataaacagctgctctctggtaacttgaaggaaggtcttcagtatttgcagagtcttaactttgaaaggatagtgatgtctcagcttaatcctctgaagatatgcttgcctagcgtggtgaatttctttgctgcgattacaaataagtaccagctggtgttctgctacaccatcatcgaaaggaataaccgccagatgctgcctgtaataaggtccaccgcagggggggattccgtgcagatctgcactaacccactggacactttttttccattcgacccctgcgttctaaaaaggtcgaagaaatttatcgaccccatctaccaggtgtgggaagacatgtctgccgaggaactccaggagttcaaaaagccgatgaaaaaagatatcgttgaggatgaggatgatgactttttgaaaggagaagtcccccagaacgacaccgtaataggcatcacgccatcttcttttgacacccactttaggagcccttcttcttcagtgggctcaccgccagttctttatatgcagccctcccctctttag

SEQ ID NO: 133277 - DNA, 1866 bp, synthetic construct
  misc_feature 1..1866: note = Description of Artificial Sequence: Synthetic coding sequence
  source 1..1866: mol_type = other DNA
atggcggcaccactgctacacactcggctccccggcgacgccgcggctagctcttccgccgtcaagaagctgggagcatctaggaccggcataagtaatatgagagctctagaaaacgattttttcaatagccccccccgtaaaaccgtgaggtttggaggaaccgtcaccgaagtcctccttaagtacaagaaaggcgaaactaatgatttcgaactccttaaaaaccagctcttggaccctgatattaaacgactcccatggctcaataggagtcagaccgtagtcgaggagtaccttgcctttctggggaacctcgtgagtgcgcagaccgtgtttctgcgcccgtgtctgagcatgattgcctcccactttgtcccacccagagtgataattaaagaaggtgatgtggatgtgtctgacagtgacgacgaggatgacaatctgccagccaatttcgatacctgtcaccgcgccctgcagatcatcgccagatatgtcccttctactccatggttcctgatgccaatcttagtcgagaagtttccttttgtacggaaatcagagcgcactctggagtgctacgtgcataatctactacgtatcagcgtgtattttccaacgctccgacacgaaatattggaacttatcatagaaaaactgctcaagttggatgtgaacgcctcccggcaggggattgaggatgctgaagaaacggccacccagacatgtggaggcacagactctacagaggggctgtttaatatggacgaggatgaagagaccgagcacgaaaccaaggcaggccccgaaaggctcgatcaaatggtccatccagttgccgaacggctagacattcttatgagtctcgtgctgtcctacatgaaggatgtctgttacgtggacgggaaggtggataatggtaagacaaaagacttatatagagacctcataaacatctttgacaaacttttattacctacacatgcgagttgtcacgtgcagttcttcatgttttatctttgttctttcaaattaggcttcgccgaggcattcctcgagcacctgtggaaaaagctccaagaccctagtaatcctgcaatcattcgccaggcagctggcaactacatagggtcctttctggctagagccaaattcattccactgataaccgttaaaagctgcctcgatttgctggtgaattggctgcatatttatctgaataaccaagactctggcacaaaagctttctgtgacgtggctttacacggacccttctattccgcctgccaagctgtcttttacaccttcgtgtttcgccataagcagctgctatcagggaatctgaaggagggcctgcagtacttacagtctctgaattttgagagaatcgtgatgagtcagctgaatcctctcaaaatatgcttaccctccgtggtgaactttttcgccgcgatcaccaacaagtatcagctggtgttttgctatacgatcattgaacgcaataatcgccagatgttgccggttatcaggtctacagccggcggggattcagtgcagatttgcacaaaccctctagatacatttttcccttttgatccttgtgtactcaagcggagcaaaaagtttatcgatccgatctatcaggtttgggaagacatgagtgctgaagagctgcaggaatttaaaaaacctatgaaaaaggacatagttgaggacgaggatgacgattttctgaagggagaggtgccccagaacgacactgttattggcattaccccatcatcgttcgatacgcacttcaggagcccctcctcctcagttggttcacccccagtgctgtacatgcagcccagccctttgtag

SEQ ID NO: 133278 - DNA, 1410 bp, synthetic construct
  misc_feature 1..1410: note = Description of Artificial Sequence: Synthetic coding sequence
  source 1..1410: mol_type = other DNA
atgattgcatctcatttcgttccccctcgagtgatcatcaaggagggcgacgtggatgttagtgactccgatgatgaggacgacaacctcccagccaatttcgacacctgtcacagagcattacagatcattgccaggtacgttccttccaccccatggttcttgatgccaattttagtggagaaatttccttttgtgagaaagagcgagaggacccttgtgaatgcttctcggcagggcattgaggatgctgaggaaaccgcaacgcaaacgtgcggcggcaccgattctaccgaggggctgtttaatatggatgaggatgaggagaccgagcacgagactaaggccggtccggaaaggctcgatcaaatggtccatcccgtagctgagaggctcgacatactcatgagtctggtattgtcctacatgaaggatgtgtgctatgttgatggcaaagtcgataatgggaagaccaaggatctgtaccgcgacttgattaatatcttcgataagcttttattaccaactcatgcctcctgtcatgtacaattctttatgttttatctgtgcagcttcaagctcggctttgccgaggcctttttggagcacttatggaaaaagttacaggatccatccaatcccgccattattcgccaggcggccggcaactacattgggtctttccttgcaagagccaagtttattccactcatcacagtgaagtcatgtctggacctactagtcaactggctgcacatatatcttaacaaccaggattccggaacaaaggctttttgcgatgtggccttgcatggccccttttattctgcatgccaggctgtgttttacacttttgtctttcgccataaacagctcctgtctgggaatctgaaagaggggctgcagtatctgcagtcccttaattttgaacgcatcgtcatgtctcagttaaatccactcaaaatctgcctgcccagcgtagtgaactttttcgccgccataacaaacaagtaccagctggtgttttgttacactatcatagaacgaaataacaggcaaatgcttcccgtcattcgcagcaccgcaggcggcgactccgtacagatatgcaccaatcctctcgacacatttttcccatttgatccatgtgtgctcaagagatccaagaagtttatcgatcctatttatcaagtgtgggaggacatgtctgccgaagaactgcaggagtttaaaaagccgatgaagaaagacattgtggaagatgaagatgacgacttcctgaaaggcgaggtaccccaaaacgacaccgtgatcggaattaccccctcctccttcgatactcatttcagatccccttcaagttccgtgggaagccctcccgtgctttacatgcagccctcccccctgtag

SEQ ID NO: 133279 - DNA, 792 bp, synthetic construct
  misc_feature 1..792: note = Description of Artificial Sequence: Synthetic coding sequence
  source 1..792: mol_type = other DNA
atgcggctgggcctctgcgtcgtggcactggtcctcagctggacccatctgaccatttcctcacgcggcattaaggggaaaaggcagcgcagaatatccgcagagggatctcaggcctgtgccaaggggtgcgagctgtgttccgaggtgaatggatgccttaagtgtagccctaagctgtttatcctcctcgaaagaaacgatattagacaggtgggggtgtgcctgcccagctgcccacccggctatttcgacgctagaaatcccgatatgaataaatgcatcaagtgtaaaatcgagcactgtgaagcctgcttttcacacaacttttgcactaagtgtaaggaaggcttgtatttacacaaaggccggtgttacccggcctgcccggagggcagctcagccgccaatggcactatggaatgttcaagcccagcccagtgtgaaatgtccgaatggtcaccttggggtccatgctccaaaaagcaacagctctgtggatttaggcgaggatccgaggagcgaacacgtcgcgttcttcacgcacctgttggggaccatgctgcatgtagcgatacgaaggaaacccgaagatgtaccgtgcgccgcgtaccctgcccagagggtcaaaaaagaagaaaaggtggacagggtcgacgtgagaatgcaaataggaatctggcccgcaaggaatcgaaggaagcaggcgccggctctagacgccgaaaaggacagcagcagcagcagcagcagggtaccgtggggccactcacatccgccggacctgcttag

SEQ ID NO: 133280 - DNA, 792 bp, synthetic construct
  misc_feature 1..792: note = Description of Artificial Sequence: Synthetic coding sequence
  source 1..792: mol_type = other DNA
atgcgactgggtctatgcgtggtagcgctggttctcagctggacacatctcacaatatctagccgcggcattaaagggaagcgccagagacggatcagtgcagaaggcagtcaggcctgcgccaaaggctgcgagctctgttcagaggtgaacggctgcctgaaatgcagccccaagctgtttatcctgctggagcggaacgatatccggcaggtcggggtttgtctgccttcctgtcctcctggatactttgatgcaaggaatccagacatgaacaaatgcatcaagtgtaaaatcgaacactgcgaagcctgtttttcccacaacttttgtaccaaatgtaaagagggactgtacctccacaagggcagatgctatccagcctgccccgaggggagcagcgccgcaaacggcaccatggagtgcagctcaccagcgcagtgcgaaatgtctgagtggtcaccctggggtccgtgctccaagaaacaacagctctgcggatttaggcggggttccgaagagcggacaaggcgcgtattacatgcccccgtcggcgaccacgccgcctgtagcgacacaaaggaaacccggaggtgtaccgtacgcagagtgccgtgtcctgaggggcagaaacggaggaagggtggtcaggggagacgtgagaatgctaatcgaaatctcgctagaaaggaaagcaaagaagccggtgcaggcagtcgacgcaggaaaggtcagcagcagcaacagcaacagggcactgttgggcccctgacctcagcagggcctgcctag

SEQ ID NO: 133281 - DNA, 792 bp, synthetic construct
  misc_feature 1..792: note = Description of Artificial Sequence: Synthetic coding sequence
  source 1..792: mol_type = other DNA
atgaggctgggcctctgtgtcgtcgcactcgtgctcagttggactcacctgacgattagtagtcgagggatcaaaggaaaacgccagcgccgcattagtgctgaaggttcccaagcgtgcgccaaaggatgtgagttatgcagtgaggttaatggatgtttgaagtgttcccctaagctgttcatcctgctggagcgtaacgatatccgccaagtgggtgtttgcctgccaagttgtccccctggctattttgatgcccggaacccggatatgaacaagtgtattaaatgcaagattgagcactgcgaagcctgctttagccacaacttctgtaccaagtgtaaggaaggattatacctgcataagggccgctgttacccagcatgccccgaaggctccagtgccgcaaatgggacaatggagtgctcatcccctgcacaatgtgagatgagcgagtggtccccctggggcccttgctctaagaagcagcaactttgcgggttccggagggggagtgaggaacggacacggcgcgtcctgcacgccccagtaggggaccacgctgcatgctccgacacgaaggagactaggagatgtactgtgagaagagtaccctgtcctgaaggacaaaaaagaagaaaaggtggccaaggcagacgtgaaaacgcaaatcgcaacctggctcggaaggaatcaaaggaagcaggcgccgggtctcgacgccggaaggggcagcagcaacagcagcagcagggcacagtcggacctctgacctccgccggcccagcctag

SEQ ID NO: 133282 - DNA, 603 bp, synthetic construct
  misc_feature 1..603: note = Description of Artificial Sequence: Synthetic coding sequence
  source 1..603: mol_type = other DNA
atgaggctcggcctctgtgtagtggcattggtcctttcttggacccacctgactatctcctctagaggcattaagggtaaacgtcagaggaggatctctgctgaggggtcccaggcatgtgcaaagggatgcgagttgtgctcagaagtaaatggatgtctgaagtgttcgccgaagctgttcattctgctggaaaggaacgacattcggcaggtcggagtctgcctaccgagctgtcctcccggttacttcgatgcccgcaacccagacatgaacaaatgcatcaagtgtaagatcgaacactgcgaagcatgtttcagccacaacttttgcactaagtgcaaagaaggtctctacttacacaaaggtcgctgctatccagcctgcccagaagggtcctccgctgctaacggaaccatggagtgctctagccccggacagaaacggaggaaagggggccagggacgacgggaaaatgccaacaggaaccttgctcggaaagagtcgaaggaagccggcgccgggtctaggcgacgtaagggccagcaacagcagcaacagcagggtactgtcgggcccctcacctctgccggccctgcttag

SEQ ID NO: 133283 - DNA, 711 bp, synthetic construct
  misc_feature 1..711: note = Description of Artificial Sequence: Synthetic coding sequence
  source 1..711: mol_type = other DNA
atgatcttcagggtgtctgctgaggggagccaagcctgcgccaagggctgcgaactgtgctcagaggttaacgggtgcctgaagtgcagtcccaagctgttcatcctgctcgagagaaacgatataagacaggtgggggtgtgtctccctagttgcccgcccgggtactttgacgcacgtaatccagacatgaataaatgcatcaagtgcaaaatagagcactgtgaggcttgctttagtcataatttttgtacaaagtgcaaggaagggctctacttacataaagggagatgctacccagcctgccctgaaggatccagcgcggccaatggaacaatggaatgcagtagtccggctcaatgcgaaatgtctgagtggtctccatggggcccctgctctaaaaaacagcaactgtgtgggttcagaaggggatccgaggaaagaacgagacgcgtgctgcacgcccctgtgggtgaccatgctgcttgcagcgacaccaaggagactagaaggtgcaccgtgcgccgcgtgccttgccctgagggacaaaagaggagaaagggtggacaaggtcggcgggagaacgccaataggaatttggccagaaaggagtccaaagaggctggagccgggtctcgcagaagaaagggtcaacagcaacagcaacaacagggcactgtaggtcccctgacctctgcgggccctgcatag

SEQ ID NO: 133284 - DNA, 732 bp, synthetic construct
  misc_feature 1..732: note = Description of Artificial Sequence: Synthetic coding sequence
  source 1..732: mol_type = other DNA
atgcagttccggctcttttcttttgctttaattattctaaactgcatggattactcgcactgccagggcaacagatggagacggtccaagagagcctcttacgttagcaacccaatatgtaagggatgtttgagttgttctaaggacaacgggtgctcaaggtgccaacagaagctatttttctttttgcgtagagaggggatgcgacagtacggtgaatgtctgcacagctgcccaagtgggtactacggccaccgcgcaccagacatgaatcgctgcgctaggtgtagaatcgagaattgtgatagctgcttcagtaaagacttttgcacaaagtgtaaagtgggcttctacctacacagaggacggtgttttgatgaatgtcccgacggcttcgccccgctggaagagaccatggagtgcgtggagggctgtgaggtggggcattggagtgagtggggcacatgctctcggaacaacagaacatgtggattcaaatggggactagaaacccggaccagacagattgtgaaaaaaccagttaaagataccattctgtgcccaacgattgctgaaagccgacgttgcaagatgaccatgcgccactgccccggcggaaagcggacaccaaaggccaaggaaaagagaaataaaaaaaagaagcgcaaacttatcgaacgggcccaagagcagcatagcgtgtttctagcgactgatagggctaatcagtag

SEQ ID NO: 133285 - DNA, 540 bp, synthetic construct
  misc_feature 1..540: note = Description of Artificial Sequence: Synthetic coding sequence
  source 1..540: mol_type = other DNA
atgcagtttcgtctgttttcatttgccctgataatcctcaactgtatggactacagccattgtcaggggaacagatggcgccggagtaaaagggggtgccggatagagaactgcgatagctgttttagcaaggatttttgcactaaatgcaaagtaggattttatctgcacagaggaagatgtttcgatgaatgcccggatggctttgcccctctggaggaaaccatggaatgtgtggggtgcgaagttggacactggtctgagtggggcacatgcagcagaaacaaccgcacctgtggctttaagtggggcctcgaaacaagaacaagacagatcgtgaaaaaacccgtgaaggataccatcttatgccccacgatcgcagaatctcgtagatgtaaaatgaccatgcgccattgtcccggcggaaagcggacacccaaagcgaaggagaagcgaaacaaaaaaaagaaacggaagttaattgagcgggcccaggagcaacactccgtgttcctggctacagatagggcaaaccagtag

SEQ ID NO: 133286 - DNA, 540 bp, synthetic construct
  misc_feature 1..540: note = Description of Artificial Sequence: Synthetic coding sequence
  source 1..540: mol_type = other DNA
atgcagttccggttgttcagcttcgccttaatcatcctgaattgcatggattattctcactgccagggcaatcgctggcgtcggagtaagcgcggttgcaggatagagaactgcgacagctgcttttcaaaagacttttgtacaaagtgcaaagttgggttctatctccatagaggcaggtgctttgatgaatgcccagatggcttcgcacccttagaagaaacaatggaatgtgtggggtgtgaagtcgggcattggtccgagtgggggacttgttcgaggaataaccgcacctgcgggttcaaatggggtctggaaacccgaactagacaaatcgtcaagaagccggtcaaagatacaatcctgtgccccacaattgctgagtcccgaagatgcaaaatgacaatgaggcattgtcccggcggtaagagaacgcccaaggccaaggaaaaacgaaacaaaaagaagaagagaaagcttattgaacgagcccaggagcaacacagcgtgtttttagccaccgatcgagccaatcagtag

SEQ ID NO: 133287 - DNA, 531 bp, synthetic construct
  misc_feature 1..531: note = Description of Artificial Sequence: Synthetic coding sequence
  source 1..531: mol_type = other DNA
atgagacagtatggcgaatgtttacattcttgtccttccggatattatggacacagagcgcccgatatgaatcgatgtgcaagatgtcggatcgagaactgcgattcctgtttcagcaaagacttctgcacaaaatgcaaggtcggcttctatttgcaccgggggaggtgtttcgatgagtgtcctgatggttttgctcccctggaggagacaatggaatgtgtcgagggatgtgaagtcggtcactggagcgagtgggggacatgtagcaggaacaatagaacctgtggcttcaagtgggggttggagaccaggacccgtcagattgtgaagaagcctgtgaaggataccattctctgtccgaccatagcagaatctagacgatgcaagatgaccatgcgacactgcccagggggcaaacgaacccccaaagctaaggaaaaacgaaacaaaaaaaagaagaggaagctgatagagcgcgctcaggagcaacactctgtatttctggctaccgaccgggctaatcaatag

SEQ ID NO: 133288 - DNA, 507 bp, synthetic construct
  misc_feature 1..507: note = Description of Artificial Sequence: Synthetic coding sequence
  source 1..507: mol_type = other DNA
atgcgccagtacggggaatgtcttcatagttgcccatccgggtattatggccatagagccccagatatgaacaggtgtgctcggtgccgaatcgaaaattgtgattcgtgtttctctaaggacttttgcacaaagtgcaaggtgggattctacctgcacagaggcaggtgcttcgacgagtgccctgacggctttgcacccctagaagaaaccatggaatgcgtcgaaggctgtgaggtgggccactggtctgaatggggcacatgcagtaggaacaataggacatgtgggtttaagtgggggctcgagactaggacccgccagatcgtgaaaaaacctgtgaaggacaccattctctgccccactattgctgagtccagacgctgcaagatgacgatgcggcactgccccgggggcaagagaacacccaaagccaaggaaaagcgcaataagaagaaaaaaaggaaacttatcgaaagggcccaggaacagcattcagtattttag

SEQ ID NO: 133289 - DNA, 270 bp, synthetic construct
  misc_feature 1..270: note = Description of Artificial Sequence: Synthetic coding sequence
  source 1..270: mol_type = other DNA
atgaggcagtacggcgagtgcctccactcatgtccgtccggctactatggtcaccgcgcacctgacatgaataggtgtgctaggtgccggatcgaaaattgtgacagctgcttcagcaaggacttctgtacaaaatgcaaggtagggttctacctgcacaggggcagatgttttgacgaatgtccagacgggttcgcccctttggaggagacgatggaatgtgtggagggatgtgaggtgggtcattggtcagagtgggggacgtgttag

SEQ ID NO: 133290 - DNA, 366 bp, synthetic construct
  misc_feature 1..366: note = Description of Artificial Sequence: Synthetic coding sequence
  source 1..366: mol_type = other DNA
atgcaattcaggttgttctcattcgccctgatcatactcaattgcatggattactctcactgccagggtaatcgctggcggcgttcaaaaagggcgtcatacgtaagcaaccctatctgcaagggttgtctgtcgtgttctaaggacaacggttgctctcgctgtcagcagaagctttttttctttcttaggagggaaggcatgcgtcagtacggggagtgcctccactcatgtccttcagggtactatggacaccgggcccctgacatgaaccgatgcgctcgttgccgaattgagaattgtgactcttgcttctccaaggatttttgtacaaagtgcaaagtcggattttacctgcaccggtag

SEQ ID NO: 133291 - DNA, 234 bp, synthetic construct
  misc_feature 1..234: note = Description of Artificial Sequence: Synthetic coding sequence
  source 1..234: mol_type = other DNA
atgcaatttcgccttttttcgtttgcccttattattcttaattgtatggactattcccattgtcagggtaaccgctggagaaggagcaagagagcttcatacgtgagcaaccccatctgtaaaggatgtcttagctgtagtaaggataatggttgctcacgctgtcagcagaaattatttttttttctaaggcgcgaagggatgaggcagtacggtgagtgtctgcatagctag

SEQ ID NO: 133292 - DNA, 1410 bp, synthetic construct
  misc_feature 1..1410: note = Description of Artificial Sequence: Synthetic coding sequence
  source 1..1410: mol_type = other DNA
atggcctttcttatgcatctgctggtgtgtgtcttcgggatgggctcttgggtcacaattaacggcttgtgggtcgagctccccctgctggtaatggaactgcccgagggttggtatctcccctcatatctgaccgtggtgatccagttagcgaacatcgggccattattggtcacgctgctgcatcactttcgtccgtcctgtttgtccgaggttccaatcatttttacactgctcggagtgggcacagtcacatgtattattttcgcgttcctgtggaatatgacatcttgggtactggacggtcaccattccattgcctttttagtcttgaccttcttcctagccttagtggattgcacgagcagtgttaccttcctcccctttatgagccgtcttcctacttattacctcacgacattctttgtcggagaaggcctttccggcttgctgcctgctctcgtagctctggcgcagggttccggcctcaccacttgtgtgaatgtcaccgaaataagcgactccgtgccttcgcccgttcctacaagagagacggatattgctcagggtgtccccagagccctcgtttctgctctgcctggaatggaggcaccgctatcacatttagaatccagatatttgcctgcacactttagtccacttgtgttttttttactgttgagcataatgatggcctgttgcctggtcgcgttcttcgtgctgcagaggcagccccggtgttgggaggcctcagtggaagatctgctcaacgatcaggttacgttacactccatacgaccacgtgaggaaaatgatttaggacccgctggcactgtggatagtagtcaagggcaggggtacctcgaagaaaaggccgccccttgctgtcctgctcacctggcattcatttataccctggtggcctttgtcaatgccctcacaaacggtatgctgccaagcgttcagacctactcttgcctgagttacggccccgtggcttatcatctggccgccacactgtccatcgtcgctaatcctttggcttctctcgtcagtatgtttctccccaaccggtccttactgttcctgggggtactgagcgtcttaggcacctgtttcgggggctataacatggccatggcagtaatgtcaccttgtccactcctccagggccactggggcggcgaagtcctcatcgtggcatcttgggtgctgttttccgggtgtctgtcctacgtgaaagtcatgctgggggtggtcctccgcgacctgtctcgctcagccctgctatggtgtggggcagccgtgcagctgggctcgctgctgggggccctgctcatgtttccactcgtgaacgtgctgagactcttcagtagcgccgacttttgtaaccttcactgccccgcctag

SEQ ID NO: 133293 - DNA, 519 bp, synthetic construct
  misc_feature 1..519: note = Description of Artificial Sequence: Synthetic coding sequence
  source 1..519: mol_type = other DNA
atgcgagcccctctatgtctgttattattggtggcccacgccgtggacatgttggcccttaatagacgaaagaagcaggtggggacagggctgggcggaaactgtactggatgtatcatctgcagcgaggaaaatggctgttcgacatgccaacagcggctgttcttgttcatcaggagagaagggatacggcagtatggcaagtgcctgcacgactgtccccccgggtatttcggtattaggggccaggaagtgaatcgctgcaagaaatgtggcgccacttgtgaatcctgcttttctcaagatttctgtatcagatgtaagcggcagttttacctgtataagggcaagtgcctaccaacgtgccccccaggcaccttagcccaccagaacacacgggaatgccaggaacgtagtcccggtcagaagaagggcagaaaagacagacgcccacggaaagatcgcaaactggatagaagattagacgtcaggcctcgccaacctggcctccaaccttag

SEQ ID NO: 133294 - DNA, 2133 bp, synthetic construct
  misc_feature 1..2133: note = Description of Artificial Sequence: Synthetic coding sequence
  source 1..2133: mol_type = other DNA
atgaggggacgcttatgcgtgggcagggccgccgctgcggcagctgctgtagccgtgcccctcgccggcgggcaggagggcagtcccgggggcgggagaaggggctctagaggaaccaccatggtcaaaaaaaggaagggacgtgtggttatagacagcgatacagaggactctggtagcgacgaaaatctagaccaagagttgctgagcctggcaaagcgtaagcgttccgatagtgaggagaaggagcctcctgtatcccagcccgctgcttcttctgatagtgaaacctccgactccgacgacgagtggacctttggaagcaataagaacaaaaagaagggcaaagcccgaaaaatcgagaagaaaggcacaatgaaaaaacaggccaacaaaaccgcctcctccgggagttctgataaagacagtagtgccgaaagctccgctcccgaagagggtgaggtgtctgattcagactccaacagtagcagtagcagctccgatagcgattcatccagcgaagatgaagagttccatgatgggtatggagaagatttgatgggggacgaggaggatagagcacgattagaacagatgactgaaaaagaacgagagcaggagctattcaatagaatagaaaagcgggaggttctgaagcgcagattcgagattaagaaaaaacttaaaaccgccaagaagaaggaaaagaaggagaaaaaaaagaaacaggaggaagagcaggaaaaaaagaagctcacccagatccaggaaagccaagtaactagccataataaagagaggcgctcaaagcgggatgaaaagcttgataagaagtcacaggccatggaggaattaaaagctgagcgcgagaagagaaagaaccgaacagctgaactgctggctaaaaagcaacctcttaaaacaagtgaggtatactctgatgatgaggaagaggaggaggatgacaagtcttccgagaaatctgacaggagctctaggaccagctcctctgatgaagaggaggaaaaggaggaaattccccctaagagtcagcccgtcagtttgcccgaggaactaaaccgggtaaggctgtctaggcacaaactcgaaaggtggtgccacatgcccttctttgctaaaactgtcaccggctgtttcgtgaggatcggcataggcaaccacaactccaagccagtgtacagggtagctgagattaccggagtggttgagacagcgaaggtgtaccagctgggcggtacgagaaccaacaagggcttgcagttgcgccacggcaacgaccaacgggttttcaggctcgagtttgtctccaaccaggaattcaccgagtctgagtttatgaaatggaaagaggcaatgttcagcgcaggcatgcaattgccaacactggacgaaattaacaagaaggaactctccattaaggaggcactgaattacaaattcaacgatcaagatatcgaggagatcgtgaaggagaaagagcgttttaggaaagcacccccaaactacgcgatgaagaaaacacaacttctcaaggaaaaagccatggccgaggatcttggagatcaggataaagctaaacagatccaagaccagctgaacgagctcgaggagagagctgaagctttagataggcagcgaacaaagaatatctcagctatttcttacattaatcagaggaatagagaatggaatattgtagagagtgaaaaggctctggtagccgaatcccataatatgaagaaccaacaaatggatccattcacaaggcgtcagtgtaaaccaactatcgtttctaactctcgcgaccccgctgtgcaggctgccattctcgcccagcttaacgcaaaatacgggtctggagtgcttccagacgcaccaaaagagatgtctaaggggcagggtaaggacaaagatctcaacagcaagtccgccagcgatctctcagaggacctgtttaaggtgcatgattttgatgtgaagatcgacctacaagtgccaagttccgagtccaaagcactggcaatcacttcgaaagctcctccagctaaggacggcgccccccggcggtctctcaacttagaggattataaaaagcgtcgggggcttatttag

SEQ ID NO: 133295 - DNA, 4551 bp, synthetic construct
  misc_feature 1..4551: note = Description of Artificial Sequence: Synthetic coding sequence
  source 1..4551: mol_type = other DNA
atggatagtccccctaagctcacaggagagacactcatcgttcaccacatcccactagtgcattgccaggttcccgacagacagtgctgtggcggcgccggcgggggaggagggtcaaccagacctaatccgttctgcccaccagagctgggtattactcagcccgaccaggatctcggccaggcagattctctgctcttttcaagcctccacagtacccctggcgggactgctcggagtatcgattcaaccaagtccaggtccagagatggaaggggccccggggcgcccaaaagacacaaccctttcctcttgcaagagggagtgggggaacccgggctgggggacttgtacgatgactcgattggagatagcgccactcagcagtcattccatctgcacggcaccggtcagcccaacttccatctatccagctttcagttgcctccatccggcccccgggtggggagaccttggggcactacccgatccagggccggcgttgtcgaaggccaggagcaggaacccgtgatgacactggatactcaacagtgtggcactagtcattgctgtcgacccgagctagaagccgaaactatggaactggatgagtgcggcggcccgggaggtagcggatctggtggtggtgcttctgacactagtggcttctctttcgatcaggaatggaagctgtccagcgatgagtccccaagaaatccaggctgctctggatctggggaccaacactgccggtgtagtagcacctcgagccagtccgaagcggcagaccagagtatggggtatgttagtgattcaagttgcaacagcagcgatggcgtgttagttacattctctactctatacaacaaaatgcatggtacaccccgagccaatctgaactcggcaccacagtcttgctcagactccagtttctgtagtcactcggaccctggggccttctatctagatctgcagcctagcccatttgagagcaaaatgtcctatgagtcccatcaccctgagtccggtgggagggaaggcggctacggctgcccgcacgctagctcgcctgagctggacgccaattgtaacagctacaggccacactgtgagccgtgtcctgccgtagcggacctaaccgcgtgttttcagtcacaggctaggttagtggtagctacccagaattattataagcttgtgacatgcgacttgagttcccaaagttctccatcacctgcagggtcctcaattacctcatgcagtgaggaacacaccaagatttcaccccctcctgggcccggtcccgatccagggccttcacagccttctgagtactacttgtttcagaagcctgaagtacagcctgaagagcaggaagccgtatcgtcctcaacacaagctgcagcagcagtcggtcccaccgtgcttgagggacaggtgtatacaaacacaagtcccccaaatctgtctaccggtagacagagatcccgctcatacgatcggagcttacagcgtagcccacctgttcgcctcgggagcttagaacgtatgctgtcctgtcctgtgaggctgtcagagggcccagcagcgatggctggacccggatcccctccccgtcgggtaacctcgttcgcagagctggccaaaggacggaagaagactggcggctctggctctccacccctgcgggtttctgtgggcgactcttctcaggaattctctccaatccaggaagctcagcaggatagaggcgcgcccctggatgaggggacgtgttgttcccactctctgcctccgatgcccttgggtcccggtatggacttgctcggccctgatccctctccaccctggagcacccaggtatgtcaggggccccactcaagtgagatgccccctgccggtcttagagccacaggtcaggggcctctggcacagctgatggaccctgggcccgcgctgcccggatccccagccaatagtcatacccagcgggacgctagagcaagagccgatggaggtgggacagaatcccgccccgtgctccggtactctaaagaacaaaggcccacgactctgcctattcaaccatttgtgttccaacaccatttccctaaacaactggccaaagccagagcattgcactctctgagccagctgtatagcctgtctggctgttccagaacccagcagcccgccccactcgcagcccccgccgcacaagtctccgtcccggctcctagtggcgagcctcaggcatctaccccccgggccacagggaggggggccagaaaagctggctctgagcctgagaccagccgacccagtcccctcggctcttacagccccatcaggagcgttggacctttcgggccaagcactgacagcagcgcgtccacgtcgtgctcccccccacccgagcaacctactgctaccgagagcctccccccatggtcccattcctgcccatctgccgtgcggccagctacatcccagcagccccagaaggaggatcagaagatccttacgctcaccgaataccgcctgcatggaaccgggtccctgccccccctgggatcctggcgcagcgggctgtctagggccgaaagcttggctcggggtggaggcgaggggtccatggcaacaaggcccagtaatgcaaatcatctcagtccacaggcacttaaatggcgggagtaccgccggaagaatcccctgggtccccctggcctgagcgggagtctggatcggcggtcccaggaggcacggctggcccgtaggaatcccattttcgagtttcctggctctttgagtgctgcttcccatctcaactgtaggctcaatggtcaagcagttaagccgctgcctctcacctgtcccgattttcaggatccctttagtcttaccgaaaagcctccagcggagttttgccttagcccagacggtagtagcgaggccatcagcatcgatcttctgcagaaaaagggtctggtgaaagcagtcaacatagccgtagaccttattgtggcacattttggtaccagccgggatccaggtgttaaggccaagctcgggaatagctctgtgagcccgaatgtggggcaccttgtgctcaagtacctctgtccggctgtgcgggccgtcttggaggatggtcttaaggctttcgtacttgatgtgattatcggacaaagaaaaaacatgccctggtcagtggttgaagcttctacgcagctgggtccttctaccaaggtactccacggactgtataataaagtgtctcaattccctgagctgacctcgcatacaatgcgatttaacgccttcatccttggactgctgaacattcgtagtctcgagttttggtttaaccacctttacaatcatgaagacatcatccagacacactatcagccatggggcttcctatcagctgcgcatacagtctgcccgggcctgttcgaagaactcctcctgctgcttcagccgcttgcattattgcccttctccctcgacttattatttcaacaccgcctgctccagtctggacagcagcagagacaacataaagagctcctgcgggtgtcgcaagacctgctgctgagcgctcactccacactgcagctagccagggcaaggggacaagagggccctggggacgtggatagggccgcgcagggagagcgggttaagggggtgggagcttccgagggaggtgaagaggaggaggaagaagaagagacggaggaggtggcggaagccgcgggggggtccgggagggcccggtgggccagggggggccaggccgggtggtggtatcagctgatgcagagttctcaggtgtatattgacggcagcattgaggggtcacggttcccccgagggtcctctaacagcagctccgaaaagaaaaaaggtgcagggggtggtggtccaccccaagctccccctcctagggaaggggtggtagagggcgcggaagcctgccccgcgtcggaagaggctctgggcagggagaggggctggccattctggatgggctctcccccggactcagtactggccgagctgagacgtagcagggagagagagggcccagctgcgtcccctgctgagaatgaggagggggccagtgaacccagccctggtgggattaagtggggccacctcttcggatcccgcaaggcgcagcgcgaggcgcgaccgaccaatcgccttcctagcgattggttatcactggacaaatcaatgttccagctcgtggcccagacagtgggaagtcgcagggaaccagaaccgaaagagtctttgcaagaaccacactcccctgccttgcccagtagcccaccctgtgaggtccaggcgctatgtcaccacctcgccacgggacctggtcaacttagttttcacaaaggagatatcctacgtgtgctaggaagggctggcggtgattggctgcgctgctcgcgaggccccgacagtggcctggtgcccctggcttacgtcacgctgacaccgacaccatctccaaccccaggttcatctcagaattag

SEQ ID NO: 133296 - DNA, 4551 bp, synthetic construct
  misc_feature 1..4551: note = Description of Artificial Sequence: Synthetic coding sequence
  source 1..4551: mol_type = other DNA
atggattccccaccaaagctaaccggggagacccttatcgtccaccacatacccctagtccattgtcaggtgcccgatcgtcagtgttgtggaggagctggtgggggagggggaagtacccgccccaaccccttttgtcctcccgaattggggattactcaacccgaccaggacctgggacaagccgattccctgctgttttcatccttacactccacaccaggaggtacagcacgctctatcgatagtacgaagtcccgatctagggacggccgggggcctggagccccaaagagacataatcctttcctgctgcaagagggcgtgggtgagcctggcctcggggacctctacgacgacagcataggagactctgccacccagcagtcctttcacctacacggtacgggacagcccaacttccatctttcctcttttcaactgcccccttccggaccaagggtgggcagaccatgggggaccacccgtagccgagctggggtggtagaggggcaggagcaagaaccagtgatgactctcgacacgcagcaatgcgggaccagccattgctgtaggcccgaactggaggctgagaccatggaattggacgaatgcggggggccaggaggctcgggtagtgggggcggcgctagcgacacttccgggttttcctttgatcaagaatggaaactgtcttcagatgaatcgcctagaaacccgggttgttcaggatctggagaccagcactgtcggtgttcatctacatcaagccaatctgaagctgctgaccagtccatgggatacgtcagcgatagttcgtgcaacagcagcgatggcgttctggtgactttttccaccttgtacaacaagatgcatggcacgccgcgcgctaacctaaatagcgctccccagtcctgctctgactccagtttctgctctcactccgaccctggtgctttctacctggacctgcagcctagcccatttgaaagcaagatgtcttatgagtctcaccaccctgaatcgggcggtcgcgaaggcggttatggctgccctcacgcctcctcccctgaactcgatgcgaactgtaactcttacaggccgcactgcgaaccttgcccagccgtggcggaccttacagcctgcttccagagtcaggcccgcttggtagtcgctacccagaattattacaaactggtcacttgcgatttatctagtcaatctagtcctagcccagctggcagttctataacttcatgttccgaagagcatactaaaatctctcctcccccaggccctggcccggaccctggcccaagccagcctagcgagtactatttgttccagaagcccgaggtgcagccagaagaacaggaagcagtgtcaagttctacacaagcagccgcagcagttggcccaaccgtcctggaagggcaggtatatacgaataccagtccgcccaatctgagtacaggacggcagaggtctaggtcatacgaccgcagcctgcagcgaagtcctcctgtaaggttgggctctctggagaggatgctgtcctgccccgtgaggctgagtgaagggccggccgctatggcagggcccgggtctccccctaggagagtgacaagtttcgcggagctagctaagggccgcaaaaaaacgggggggagcggcagcccacctctgagggtgtctgtcggggactctagccaggagttctcgccgatccaggaggctcaacaggaccgcggcgcccctcttgatgaaggcacgtgctgcagccacagcctcccacctatgccccttggtcccggcatggatcttcttggtccagacccgtcgcccccctggtctacacaggtctgccaaggcccacattcatcagagatgcctcctgctggtctacgcgcgacgggacagggcccactcgcccaacttatggacccagggcccgcgctgccagggtccccagccaacagccacacacagagggacgctagggcccgcgccgacggcggcggcaccgagtcaagaccagtgttgcgatactcgaaagagcagcgaccgaccactctgccaattcagcctttcgtttttcagcaccacttccccaaacaactcgccaaggctcgggcgctccacagcctgagccaactctattctctgagtggctgctcccgtacgcagcagcccgcgcctctggcagcccctgctgctcaggtttcagttcctgcaccatcaggtgaaccccaggcaagcacaccgagggccacaggacgaggcgcgcggaaagccgggtccgagccagaaacatcccggcctagccctcttggttcttattcccctattcggtctgtcggaccctttggcccttctacagacagctccgcaagcaccagctgttccccgccccctgagcaacctactgccacggagtcgctgccaccctggtcccactcctgccctagcgccgtcagacccgccacctctcagcagccccagaaggaggatcagaagatcctgactttgaccgaatacagactccatggcacaggctcactcccacccctaggctcttggcgctctggtcttagccgtgccgagagcctagcaagaggaggcggtgaggggtcgatggccacacgccctagcaacgccaatcacctgagtcctcaggccttaaagtggagggagtatcgaagaaagaatccactaggaccccctgggctgagcggatccctggatcgcaggtcgcaagaggccaggctggcccgccgcaaccccatttttgaattccccggcagtctgtcagcagctagccatctgaactgtaggttaaacgggcaggccgtgaaaccattacctctgacctgtccggatttccaagatcccttcagcctaaccgaaaagccaccagccgagttttgcctctctccagacggatctagcgaagctatatccatcgatctgctccagaagaaaggcctcgtaaaggcagtgaacattgcggtcgacttgatcgtggctcatttcggcacaagtcgcgacccgggcgttaaagcaaaactcggcaacagctccgtatcaccaaacgtggggcacctggtgctgaagtatctgtgtccagcggttagagccgttttggaggacgggctgaaggcctttgttctggacgtcattatcggccagaggaaaaacatgccttggtctgttgtggaggccagcacccaacttggcccaagcaccaaggtgttgcacggcctctataacaaagtctctcaattccccgaactgacttcccataccatgagattcaacgcgtttatcctgggactcctcaacatcagatctttagaattctggttcaaccacctgtacaatcatgaagacattattcaaacgcactaccagccttggggctttcttagtgcagcccacaccgtatgcccggggttgtttgaggagcttctgctgctattgcaaccgcttgcgttactcccattctccctggacctgctttttcagcacagactccttcaatctggtcagcaacaacgccagcacaaggagttgttgagggtgtctcaggatctgctcctcagtgcacactctacgcttcagctggcccgagcacggggacaagaaggaccaggcgatgtcgatcgggcggcccagggagagagagtgaaaggggtgggagcctctgaggggggcgaagaggaggaagaagaggaagaaactgaggaagtggcggaggccgctggaggctccggcagagcacgatgggctagaggcggccaagctggttggtggtaccagctgatgcagagtagccaagtgtatatcgacggttcaatcgaaggcagcagattcccccgtgggtcttccaactctagtagcgagaagaagaaaggagctggcgggggggggccaccacaggctccaccgcctcgtgagggagtagtggaaggggccgaggcctgccccgccagcgaagaggcactaggtcgcgaaaggggctggcccttctggatgggttcccccccagactccgttctcgccgaactacggagatctcgggagcgtgagggacctgcagcctcaccagccgaaaatgaagaaggcgcttccgagcccagccccggaggaatcaaatgggggcatctctttggaagtagaaaggcacagcgcgaagctagacccacaaatcggctgccctcagactggctctctctggataaaagcatgttccagctagtagcccagacggtgggatctaggcgggagccagaacctaaagaaagcttacaggagccgcactctcctgctttgccttcgtctcccccatgtgaggtgcaagccctctgccaccacctcgccacagggccgggacaactgagtttccacaagggtgatatcctgcgcgttttagggcgggccggaggcgactggctcaggtgttcccgcggccctgattcaggccttgtccctttggcctacgtcacgctcaccccaaccccatcacccacgcctgggtcgagccaaaattag

SEQ ID NO: 133297 - DNA, 2775 bp, synthetic construct
  misc_feature 1..2775: note = Description of Artificial Sequence: Synthetic coding sequence
  source 1..2775: mol_type = other DNA
atggatagtcccccaaaattgacaggtgaaactttgatcgttcatcatataccactcgtgcattgccaggtacctgataggcagtgctgtggcggcgccgggggcggagggggtagtaccagacccaacccattctgcccgccagaacttggcattacccagccagatcaagatctgggtcaggccgatagcctcttgttctcttcattacacagcacccctggtggaaccgctcgatctatagacagtacgaaatcccggtctcgagacggcagagggcccggagcacccaaaagacataaccctttcttgctgcaggagggggtcggtgaacccggactaggggatctgtacgacgattcaataggcgatagcgcaacccagcaaagttttcatctgcacggcacaggtcagcccaactttcatctttcctctttccagttgcccccaagtgggccccgggtcgggaggccctgggggacgacccggtctagagctggagtggtggaggggcaggagcaggagcccgttatgacccttgacacgcagcagtgcgggacttcacactgctgtcgtcctgagctcgaggccgaaaccatggagctggacgaatgtgggggccctggggggagcgggagcggggggggggctagcgatacttcaggcttctcctttgaccaggaatggaagctctcgtctgatgaatcccccagaaatcctggctgtagcggtagcggcgaccagcactgccgctgttccagtacctcatcacagagcgaagccgccgaccagagcatgggttacgtcagcgattctagttgcaactcctccgacggtgtgctagtgacattctctacattgtacaacaagatgcacggaactccgcgcgcaaacctgaattccgcaccacaatcctgttctgactcatccttctgttcacactcagacccaggagccttttacctggatttacagccaagcccgtttgagagcaaaatgtcctatgagtcacaccaccccgagtccgggggtcgggagggcggctacgggtgtcctcatgcaagctcacccgagttggatgctaattgcaactcctacaggccacactgcgaaccttgccccgccgtggccgatcttaccgcgtgtttccagagccaggccaggttggtggttgcaacccagaactattacaaacttgtgacatgcgatctcagcagccagtctagccccagccccgccggctctagtatcacatcctgctcagaggagcacacaaagatctctccccccccgggacccggccccgacccagggccctctcagcctagtgagtactatttgtttcagaagccagaagtgcaaccagaggagcaagaagccgtcagctctagcacacaggcagccgcggccgtaggtcccaccgtgctggagggtcaagtgtatactaacacaagcccccctaatctatctaccggaagacagaggtcacgtagttacgaccgcagcctccaacggtcgccccccgtgaggttaggtagtcttgaacgcatgttgtcctgccctgttcggctaagcgagggccccgccgccatggccgggcccggttcccctccccggcgagtcacctcttttgcagagttggcaaagggacgtaagaagaccgggggttctggaagtccacccctcagggtttcagtgggagacagtagtcaggagttctcccccattcaggaagcccagcaagataggggggcaccgctcgatgagggaacttgctgttcccactccttacctccgatgccgttgggccctggcatggacctgctgggaccagatccgagccccccatggtcaactcaggtgtgtcaagggccccatagcagtgaaatgccgcctgccgggctcagggctactgggcagggccccctcgctcaattgatggaccctgggcccgccttacccggtagcccagctaatagtcacacccagcgggacgcgagggcaagggcggacggcggaggtactgaatcaagacccgtcctcagatacagcaaagagcagaggcctaccaccctgcctatccagcccttcgtgttccagcatcatttcccaaagcagctggccaaagcaagggcgctgcacagcctttctcagctgtattcactctcgggctgctcacggacacagcagccagctcctttagcagctcctgccgcccaggtcagtgtgccggcccctagtggcgaaccccaggctagcacaccccgcgcaactggcagaggggccaggaaggctggatcagagccagagacctcccggcccagcccgctcgggagttatagcccgatacggagcgtcgggccattcggccccagcacagattcctccgcatccacgagctgctctcccccgcccgaacagccaacggccacagagtctttacccccctggagtcacagctgtccttcggccgtgaggccggctacatcgcagcagccacaaaaagaagaccaaaaaatcctaactctgactgagtatcggctacatgggactgggtcactaccaccgttggggtcctggagaagtggcctatctcgggccgaatctctcgcacgcggcgggggagagggatccatggcaactaggccatccaacgccaatcatctttcaccccaggcgctcaaatggagagagtatcgtagaaagaatcctttgggacctccaggtctcagcggttcactggataggcgatcccaagaggctcgcactgggtag

SEQ ID NO: 133298 - DNA, 591 bp, synthetic construct
  misc_feature 1..591: note = Description of Artificial Sequence: Synthetic coding sequence
  source 1..591: mol_type = other DNA
atgtccatgctcaggttgcaaaaacgcctggcttctagcgtgcttaggtgcggcaagaaaaaggtttggctcgatcctaacgaaacaaatgaaattgcaaacgcaaattcccgccagcagattcgcaagcttatcaaagatgggctcataattcggaagcctgtgactgtgcacagtcgcgctcgctgcaggaaaaatacactggcacgtaggaagggaaggcacatgggaataggtaagagaaagggtactgccaatgcccgaatgcctgagaaagtcacttggatgcgtagaatgcgcattctgagacggcttctgcgtagatacagggagtcaaagaaaatcgaccgccacatgtaccattctctgtatttgaaagtgaaagggaacgtttttaaaaacaaacgcatcctcatggagcatatacacaagcttaaagctgacaaagctcgaaaaaaactcttggcagaccaagctgaggctagacggtccaagacaaaggaggctcgcaaaaggagagaggagcggctgcaagctaaaaaggaagagatcataaaaaccctgagcaaggaggaggaaactaagaaatag

SEQ ID NO: 133299 - DNA, 1341 bp, synthetic construct
  misc_feature 1..1341: note = Description of Artificial Sequence: Synthetic coding sequence
  source 1..1341: mol_type = other DNA
atggaggccagcttcgtgcagactaccatggctctcggcctgtcctcaaaaaaggccagcagtaggaacgtggccgtggagaggaagaacctaattacagtgtgtaggttctcagtcaagacgctgctggaaaagtataccgcggaaccgatcgacgactcttcagaggagttcgttaattttgccgcgattcttgaacaaattcttagtcacagatttaaggcatgtgctcccgcaggccctgtgagctggtttagttcagatggacagcggggcttttgggattacatcagactcgcttgctcaaaagtaccaaacaattgtgtgtcttccatcgaaaatatggagaacatttcaactgcccgcgcaaaggggcgcgcctggatccgggtggctctgatggagaagaggatgagcgaatatatcaccactgccctgagggacacacgaaccacacggagattttatgactctggcgccattatgttgagggatgaggcgaccattctgacaggaatgttaatcggactcagcgccatcgacttttcattttgtttgaagggcgaggttctggatggaaagacacccgtggtgatcgactacaccccttatcttaaattcacccaatcttatgactacctgaccgacgaggaagaacgacactcagcagaatccagcacttcagaggataacagccccgaacacccatacctcccccttgtgaccgacgaggactcatggtacagcaagtggcataagatggagcagaaatttaggatcgtgtacgcccaaaaaggatacctggaggagttagtgcggctcagagagagccaactgaaagaccttgaggccgaaaatagaaggctacagctgcaactggaagaagcggcagctcaaaatcaaagggagaaacgagagcttgaaggagtgattctggaattacaggagcagctgaccggactgatcccatcggatcacgcacccctggcccagggctctaaggaactgaccaccccccttgttaatcagtggcctagcctgggcacactgaacggtgccgagggcgcaagcaatagtaagctttacaggagacattcatttatgtccacagaaccattgagcgccgaggcctcattgtctagcgattctcaaaggctgggggagggtacacgagacgaagagccttggggtccaattggtaaggatcctacgcccagcatgcttgggttgtgcggttcgctggccagcattccatcatgcaagtccctggcttcttttaaatcgaacgagtgcctcgtctctgacagccctgagggcagccctgctctttcccccagttag

SEQ ID NO: 133300 - DNA, 1371 bp, synthetic construct
  misc_feature 1..1371: note = Description of Artificial Sequence: Synthetic coding sequence
  source 1..1371: mol_type = other DNA
atgaaaatcgaggaagtgaagtcaacaacaaagacacaacggattgcttcccattcgcacgtcaagggcctgggattggacgaaagtggtcttgccaagcaggcagctagcggacttgtgggccaggagaatgcccgtgaagcttgcggggtgatcgtcgagctcatcaagtccaagaaaatggcaggcagggccgtactgttggccgggccccccggcactggtaagacagcactggcgctcgccattgcccaagagctgggaagcaaggtccccttttgccctatggtgggaagtgaggtgtactccacagagatcaaaaagacagaggtcctgatggagaacttcagaagagctatcggtctgcgcatcaaggaaacgaaagaggtgtacgagggagaagtgaccgagctgactccctgtgaaactgagaacccaatgggcggttacggaaaaaccatctcacatgtgatcatcgggcttaaaactgccaaagggaccaagcagctcaaattagatccgtctatcttcgagtccctgcagaaggagcgggttgaggctggcgacgtaatctatatcgaggctaacagtggtgcggtgaaaagacaaggccggtgcgatacctatgctaccgaatttgacctggaagcagaagagtacgttccactgccgaagggcgacgttcataagaaaaaagagatcatccaggatgtgaccttacatgaccttgacgtggctaacgccaggccgcagggtgggcaggacattctctcaatgatggggcagttgatgaaacccaagaagaccgaaataactgacaagctgcgtggcgaaatcaataaggtcgttaataagtacatcgaccagggcatcgcggagctcgttcccggtgtcctcttcgttgatgaggtccacatgttagatatcgaatgctttacttaccttcacagggcactggaatcatccatcgcgcctattgtgatcttcgcaagcaatcgagggaattgtgtgatccgaggcaccgaggatatcacctccccccatggcatccctctggatctgctcgacagagtgatgattatacgaaccatgttgtataccccgcaagagatgaagcaaattataaaaatccgagctcagaccgaagggattaacatttccgaggaagcgctcaaccacctgggggagattgggactaagaccaccctgagatattcagtgcaactactgactcctgccaacttgctggccaagatcaacgggaaggacagcatcgaaaaggagcatgttgaggagataagcgagctgttttatgacgcaaaatcctccgctaagattttagccgaccaacaagacaaatatatgaagtag

SEQ ID NO: 133301 - DNA, 1161 bp, synthetic construct
  misc_feature 1..1161: note = Description of Artificial Sequence: Synthetic coding sequence
  source 1..1161: mol_type = other DNA
atgaaaatcgaagaggtcaaatctactactaagacccaacggatcgcatcacactctcacgtcaaaggcctgggactggacgaatccggtctggccaagcaagctgccagcggtctagtgggacaggagaatgcgagagaagcatgtggagtcattgtggagctcatcaagtccaaaaagatggctggtagagcagtcctgctggccggcccccccggaaccgggaagacagctctcgcacttgcaatcgctcaggaactgggctctaaggtgcccttctgccccatggtcggaagcgaggtgtatagcacggaaatcaaaaagaccgaggtgctgatggagaattttagaagggctattgggctgcggataaaagagaccaaagaggtatatgagggggaagtgacggagctaacaccttgtgagacggagaaccccatggggggctacggcaagacaatctcccacgtcatcatcggtttgaagacagccaaaggcacgaaacagcttaagttagatccctcaatcttcgaatccctgcagaaggagagagtggaggccggcgatgtgatatacattgaggccaacagtggggccgtgaaacgacaggggaggtgcgacacatatgcaacggaattcgatttggaggccgaggaatatgtgccattgccaaaaggggacgtgcacaaaaaaaaggaaatcatccaggatgtcacattgcatgacctcgatgtcgcgaacgcacgccctcagggaggacaagacatccttagcatgatgggtcagctgatgaagccgaaaaaaacagaaatcaccgacaagctccggggtgagataaacaaggttgtgaataagtatattgaccagggtattgcagaactggtgcccggagtactcttcgtcgatgaagtacatatgctcgacatcgagtgtttcacctacttgcaccgcgcccttgagagcagcatcgctcctattgtgatctttgccagcaaccgagggaattgtgttatcagggggaccgaggacatcactagccctcacggtataccattggatttactggaccgggtcatgattatcaggaccatgctatatacaccacaagagatgaaacaagtcctctctgccgcggcggacccaggacagctagcttgttag

SEQ ID NO: 133302 - DNA, 2502 bp, synthetic construct
  misc_feature 1..2502: note = Description of Artificial Sequence: Synthetic coding sequence
  source 1..2502: mol_type = other DNA
atggacgttgtagatcctgacatttttaatagagacccgcgagaccattacgaccttttgcagagactgggcggaggcacttacggagaggtctttaaagccagagacaaggtgtcaggagatctggtggctctcaagatggtgaaaatggagcccgatgatgatgtgtcgacactgcagaaggagattctaattttaaagacctgccggcacgcaaacatcgtcgcttatcatggctcttatctttggctgcagaagctttggatctgcatggagttttgcggagccggaagcctgcaagacatctatcaggttacgggatccttaagtgagttgcagatctcctatgtctgccgggaggtgctgcaaggtctggcgtatctgcattctcagaagaagatccaccgggatatcaaaggcgctaacattttaattaatgacgctggtgaggtgaggctggccgactttggaatcagtgctcagataggggccacccttgcacgccgcctgtcctttatcgggacaccatattggatggccccagaggtggcggctgttgcccttaagggtgggtacaatgaactgtgcgatatatggagtttgggcatcactgccatagagctggcggaactccaaccccctctgtttgatgtgcatcctctccgggtgctgtttcttatgactaaaagcggctaccaacctcctcgacttaaagaaaagggtaagtggagcgccgctttccataactttattaaagtaactttgaccaaatctccaaaaaagagaccgtctgctacgaaaatgcttagtcatcagctggtgtcacagcccggcctcaatcgcgggttgattttggaccttctggacaaactgaaaaatccgggcaaaggaccttcaattggcgatatagaggatgaggaaccggagctgccccctgctatacccagaaggattaggagcactcaccggtccagtagcctaggaataccagacgctgactgctgcaggaggcacatggaatttaggaaattgcgcggcatggagaccaggcctcctgctaataccgctcgcctgcaacctcctagagatctgcgaagctcatccccacgtaaacaattatctgaatcctcggatgacgactacgatgacgtggatatccctacccccgcggaagacacaccaccacctctgcctcctaagcccaaattccgatctcctagcgatgagggtcccggaagcatgggggatgacggccaacttagccccggggtgcttgtgagatgtgccagtggtcccccacctaattctccacgccctgggcctcctcccagtacctcctccccccatctgactgcacatagcgagccttccctgtggaacccaccaagtcgggagctcgataaaccacccctgttgccgcctaaaaaggagaagatgaagcgcaaaggctgcgccctcttggtgaaattgttcaacggatgtccactcagaatccattccacagcagcgtggacccatccaagcactaaggaccagcatctgcttttgggggcagaagaggggatcttcattctgaatcgaaatgaccaagaagcaacccttgaaatgttatttccctcaagaaccacctgggtctattctattaataacgtcctgatgagtctgtcagggaagaccccccacctgtacagtcacagcattttgggcctgctggaacgcaaggaaacaagagcaggaaaccctatcgcacacattagcccccatcgcctcctggccaggaagaacatggtaagcaccaaaattcaagatacgaaaggatgtagggcttgctgtgttgcggagggcgcttcctctggcggccctttcttatgtggggctttagaaacatcggtcgtgttgctgcagtggtaccagcctatgaacaagttcctattagttcgtcaggtcctcttcccacttccgacacctctgagtgtgttcgccttgctaactgggcccggaagcgaactgcccgctgtgtgtatcggcgtgtcacctggtcgtccaggcaaatccgtgctgttccacacagtgaggttcggggccctttcttgctggctgggcgagatgtcaacggaacaccgcggacccgtgcaggtgactcaggttgaggaagatatggttatggtcctgatggatggttctgttaagctcgttacccccgagggctccccagtgcgcggactgcggacacccgaaatccccatgaccgaggccgtggaagccgtcgccatggtgggaggacaactacaggccttctggaaacacggcgttcaggtgtgggccctagggagcgaccagctgttacaggagctacgagaccccacgctgacgtttcggctcttaggatcgccaaggctcgagtgctctgggacgatcagccctcattgcaatcttctgctccctgggtcttctaattctcctgcctcagcaagccgggtagccgggatcaccggcctgtag

SEQ ID NO: 133303 - DNA, 1257 bp, synthetic construct
  misc_feature 1..1257: note = Description of Artificial Sequence: Synthetic coding sequence
  source 1..1257: mol_type = other DNA
atggtagggcagttggcagcacggcgggctgccggcgttgtgctggagatgataagagaagggaaaatagcaggccgagccgtactgattgccggtcaacccggcacagggaaaaccgcgattgccatgggcatggcccaggccctaggcccagacacccctttcacggcgattgccggttccgagatcttttccctggagatgagcaagacagaagctctgactcaggcattcaggcggagcattggcgtgaggataaaagaagagaccgaaattattgaaggtgaggtcgtggaaatccaaattgacaggcctgccacggggactggctcaaaggtcgggaagctgactctgaaaaccaccgaaatggaaacaatttacgatctgggaactaagatgattgagagtttgaccaaggataaagtgcaagcgggcgatgttatcaccattgataaggcgactggcaaaattagtaaactggggagaagcttcactcgagctcgggattatgatgctatgggctcccagacaaagtttgtgcagtgccccgatggcgaactgcaaaagcgcaaggaagttgtgcacactgtgagcctccatgagattgatgtgattaacagccggacacaggggtttttagccttattttctggagatacaggagaaataaagagcgaagtgagagaacagatcaacgccaaggttgctgagtggcgtgaggagggaaaagctgaaatcatacccggcgttttgtttattgacgaggtgcacatgctcgacatagagagtttttcattcctgaatagggccttagaatccgacatggcccctgtgctgatcatggccaccaaccgagggattactcggatcagaggcacatcataccagtcaccgcatggcatcccaatagatttgctggatcggctgctgatagtcagcacgactccatactcagagaaagataccaagcagattctccgtattcgttgcgaagaggaggacgtcgagatgtccgaggacgcatacaccgttcttacccgtataggcttagaaacaagcttgaggtatgcgattcagcttatcaccgccgcctcactcgtctgcaggaagagaaaaggtacagaggtccaggttgatgatatcaagagggtgtattccctgttcctcgatgagtcacgttccacccaatatatgaaagaatatcaggatgctttcctcttcaacgaattaaaaggagaaactatggatacgtcgtag

SEQ ID NO: 133304 - DNA, 1392 bp, synthetic construct
  misc_feature 1..1392: note = Description of Artificial Sequence: Synthetic coding sequence
  source 1..1392: mol_type = other DNA
atggctacggtcacggccacaaccaaagtccctgaaattagggatgtaacgcggatcgagcgtatcggcgcccattcgcatataaggggcctcgggcttgacgacgcgctggaaccacggcaagcttcgcagggcatggtcgggcagcttgcagcccgtcgggcggcaggagttgttctggagatgatccgtgaaggtaagatcgctgggagagccgttctaattgcaggtcagcccggcacaggcaagaccgccattgctatgggaatggcccaggcactgggacccgatacgcccttcaccgctatagcggggagcgagatattcagtctggagatgtcaaagacagaggccctcactcaggcatttcggaggagcatcggggtgcgtatcaaggaagaaaccgaaatcatcgaaggcgaggtggttgagatccagatcgatagacctgccaccgggacggggtcgaaggttggcaaacttactctgaaaactactgaaatggaaacaatctacgatctgggtactaaaatgattgagagcctgacgaaggataaggttcaagcaggagatgtgattaccatcgataaagccaccggcaagatttctaagctgggtcggtcattcacaagggcaagggactatgatgccatgggatctcaaaccaaattcgtccagtgccctgacggagagttacagaaacgaaaagaggttgtgcacactgttagcttgcacgaaattgacgtgattaatagtcgtacgcaaggcttcctagcccttttctctggagacacaggggaaattaaatccgaggtgagagaacaaatcaacgccaaagtggccgaatggcgtgaagaggggaaagctgaaatcattccgggggttctgttcatagacgaagtgcacatgcttgatatcgaatccttttcttttctgaaccgagccctcgaaagcgatatggcacctgtcctgatcatggctactaaccggggcatcactcgaatccggggcaccagctaccagagtccccacgggatccctattgatctccttgaccggttgctgattgtaagtaccactccctattctgagaaggataccaagcagattctgcgcatccgctgcgaggaggaagacgtcgaaatgagcgaagacgcctacactgttctcacccgtattgggcttgagacgtcactcagatatgcaattcagctgataaccgcagcctcattggtctgcagaaaaaggaaggggaccgaggttcaggttgatgacatcaagagagtctattcactgttcctggatgagtctaggtccacccaatacatgaaagaataccaggacgctttcttgttcaacgagctgaagggagagaccatggatacaagctag

SEQ ID NO: 133305 - DNA, 15102 bp, synthetic construct
  misc_feature 1..15102: note = Description of Artificial Sequence: Synthetic coding sequence
  source 1..15102: mol_type = other DNA
atgggagatgctgagggagaagatgaggtccagtttctgcgaaccgatgatgaggttgtgctacagtgctcagccacagtgctaaaggagcagctaaagctctgcttggcagcagaggggtttggcaatcgcttgtgttttctggagccaacaagcaatgcccagaacgtgcccccggacctcgctatctgctgcttcgttcttgagcagtcattgtccgtcagggcattgcaggaaatgctggccaatactgtggaagcaggggtggaaagttcccagggcggagggcataggactctgttgtacgggcatgctatcctgctgaggcatgctcactcccggatgtatcttagttgcctcactacatcccgaagcatgactgataaactggcttttgacgttgggttgcaggaggacgccactggagaggcatgttggtggactatgcatccggcatctaagcaacgcagcgagggagagaaggtgagggtgggggacgacattattttggtcagtgtatcatccgagcggtatcttcacctgagcacagcatccggcgaacttcaggtggacgcatcattcatgcaaaccttgtggaacatgaatcccatttgctcccggtgcgaagagggcttcgtcaccggcggccacgtgttgcgactttttcatggacatatggacgaatgtctcacaatttccccagccgactccgacgaccaaaggcgtctggtatattatgaggggggagctgtgtgcactcacgcccgaagtctgtggagactggagcccctcaggatcagctggagtggaagccaccttcgatgggggcagcctctgcgagttcgccacgtgactacaggtcagtacctggccctgacggaggaccagggcctggttgtggtagacgcgtcaaaggcacataccaaagccaccagcttctgcttccggatttctaaggaaaagctcgatgtagccccaaagcgggatgtggagggcatgggacctccagaaattaagtacggcgagagcctatgtttcgtacagcacgttgcgtctggcctgtggctgacatatgctgcccccgaccctaaggcattaaggctgggcgtgcttaagaaaaaagcgatgttacaccaggaagggcatatggatgatgccctgagtctaacacggtgtcagcaagaagagtcacaagctgcccgtatgattcattctacaaatggactgtacaatcagttcataaagtctctcgattctttctccggtaaacctagggggtctggaccacctgccggtactgccctccctatcgaaggtgtcatcctatctctccaggatcttatcatttactttgagcccccttctgaagacctacaacatgaggagaagcagtccaaacttagatctcttagaaatcggcaatcgttgtttcaagaggaggggatgctttccatggtcctgaattgcatagacaggcttaatgtgtacaccaccgccgctcattttgcagagtttgctggagaggaagctgcggaatcttggaaagaaattgtgaatctgctgtacgaactccttgctagtctgattcgagggaaccgcagcaactgcgcgttattctctactaacctcgactggctggtctccaagctggaccgcctggaggcttcaagcggcatcctggaggttctgtactgcgtgctgattgaatctccggaggtcctgaacattatccaagaaaatcatattaagagtataattagccttctcgacaaacacgggagaaatcacaaagtcttggacgtcctgtgctccctctgcgtgtgtaatggagtcgccgtcaggtcaaaccaagacttaattaccgagaaccttttacctggccgcgaacttttgctccaaaccaacttgatcaattacgtcactagcattcgcccaaatatctttgtagggagggccgaaggcacgactcaatattcgaaatggtacttcgaggttatggtagacgaggtcacaccatttttgactgcacaggcgacccatctgagggtcggatgggcccttacagagggctacacaccttaccctggcgccggtgaaggctggggaggaaacggcgttggcgacgatctgtacagctatggtttcgacggcctccatttatggactggacatgtcgccaggcccgtaactagcccaggacagcacctgctggcgccagaagacgtgatctcatgttgtctcgatctttccgtgccttctatttccttcagaatcaacggatgcccagtgcagggtgtttttgaatctttcaatctggatggtctcttctttcctgtagtgtcgttcagcgctggcgtcaaagtacggttcctactgggagggcggcatggtgaattcaaatttctacctcctccagggtatgcgccttgccacgaggctgttttgccccgcgagagactgcacttggagcctatcaaggagtacaggagggaaggccctcggggaccacacctggtcgggccatctcgctgtttgtctcacaccgatttcgtgccgtgccctgttgatacggtgcagattgtactgccgccacatctcgaacgtattagagagaagctggcggaaaatattcacgagctgtgggccctcaccaggatagagcaggggtggacctacgggccagtgcgggacgacaacaaacggctgcacccctgtctggtagatttccattccctaccagaacccgaaaggaattacaacctgcaaatgagtggagaaactcttaagacactcttagcactaggttgtcacgtgggcatggctgatgagaaggcagaggacaacctgaagaaaactaaactgccaaagacctatatgatgtccaatggctataaaccagcaccgctggacttgtcccatgttcgtcttaccccagcacaaactaccttggtggaccgccttgctgaaaatggacacaatgtatgggcgagagatcgagtgggccagggttggtcctatagtgcggttcaggatattcccgccaggcggaatcctaggcttgtaccctatcgccttctggacgaggcaacgaagagatccaatagggatagcctctgccaagccgttcgaactctgctggggtacggctataacatcgaaccccccgaccaggaaccttcccaggtggaaaatcaatcccgttgcgaccgtgtgcgtatcttccgagctgagaaatcatatacagttcagagcggcagatggtatttcgagttcgaagccgtgacgacgggggagatgagagttggatgggccaggcccgagctgcggccagatgtggagctgggggctgatgagctggcttatgtctttaatgggcaccggggccaacgttggcatctgggctccgagccttttggacggccatggcagccgggggacgtggtgggttgcatgattgacctgacagagaatactattatattcacattaaacggagaagtactcatgtctgactccgggtccgagaccgcatttcgggaaatcgagataggtgatgggttcctgcccgtgtgttcactgggacctggccaggtaggccatctgaacctgggccaggatgtgtcttctttgcggtttttcgccatatgcggactgcaagagggtttcgagccatttgcaattaatatgcagcggccggttaccacatggttttccaagggtctgcctcagtttgagcccgtcccgctagaacatcctcactatgaagtctcccgtgtggatggaacagtggacacacccccttgtttgaggctgactcacagaacctgggggagccagaattcccttgtggaaatgctgtttctcagactgagtctccctgtgcagttccatcagcactttcgctgcacagccggagcaacccccctggcgccacccggattgcagccgcccgccgaagacgaagcccgggcagccgagcccgaccccgactacgaaaatctgagaagatctgccgggggctggagcgaagccgagaatgggaaagagggcaccgccaaggagggcgccccaggcgggaccccgcaggccgggggagaagctcagcctgcccgcgcagagaacgagaaggacgccaccactgaaaagaacaaaaaaagagggttccttttcaaggccaagaaggtcgcaatgatgacacagcctcctgcaaccccgaccttgccacgacttccacatgacgtggtgcctgccgataatagagacgatccagagattattctaaacacgaccacatattattactctgtaagagtgttcgcagggcaggagcctagctgtgtttgggctgggtgggttacgcctgattaccatcagcacgatatgtcttttgacctctcgaaagttcgcgtcgtcacagtaaccatgggtgatgagcaaggaaacgtgcattctagcctgaaatgtagcaactgctacatggtttgggggggtgactttgtcagcccaggtcagcaaggtcggatctcccacaccgatctagttatcggatgccttgtggacctggccactgggctgatgacctttactgccaatgggaaagagtctaatacattctttcaggtcgagcctaacacgaaactgttccctgctgttttcgttctgccaactcatcagaacgttattcaatttgagctgggtaagcaaaaaaatatcatgcccctaagcgccgccatgttccagagtgagcgcaagaatcccgcaccacagtgcccgccccggctagagatgcaaatgctcatgcccgtgagctggtctcgtatgccgaatcattttctgcaggtggaaactagacgagccggcgagcgactggggtgggccgtgcaatgtcaggaacctttgactatgatggctctccatatccctgaggagaacagatgtatggatattctggagcttagcgagcggctggatttacagcgattccactctcataccctccgtctttacagagccgtgtgtgctctcggtaacaatcgtgtcgcgcacgcactgtgttctcacgtggaccaggcccagttgttgcacgccttggaggatgcccacctccctgggcctctacgggcaggctactatgatctgctcatcagtattcaccttgagagcgcatgcaggtctcgacggagtatgcttagtgagtatatagtgccattgacaccggagacaagggctatcacgctctttccccccggaagatccaccgaaaacgggcacccccgacacgggctcccaggagttggtgtgacgaccagtctgaggcccccccaccattttagccccccctgctttgtcgcagccctgcccgcagcgggagcggccgaagcaccggcaagactcagccctgccatcccgctggaagctttgagagacaaggccttgcgcatgctgggcgaggcagtcagggatggaggacagcatgcccgagacccagtgggggggagcgtggaatttcagtttgtaccggtgctgaaactggtcagcaccctactggtaatgggtatctttggagacgaggacgtgaagcagatcttgaagatgattgagccagaagttttcaccgaggaggaggaggaggaggacgaggaagaagagggagaagaggaagacgaggaggagaaggaggaagatgaagaggaaaccgcccaggagaaggaggatgaggagaaggaagaggaggaagcagcggagggcgagaaggaggaggggctggaggagggcctgctccagatgaagttacctgaaagcgtcaaactgcagatgtgccacctcctggaatacttttgcgaccaggagttacagcatagggtggagagcttagctgccttcgccgagagatatgtcgataagctgcaggctaaccaaaggtccaggtatggtctgttgatcaaggcgttctcgatgaccgccgcggagaccgcccgccggacgagagagttcagaagccctcctcaggaacagatcaatatgctcttacagttcaaagacggcactgatgaagaggattgtcctctgcccgaggaaatccgccaggacctgttagactttcaccaggatctcctggcccactgcggcattcaacttgatggcgaagaggaggaacccgaagaggagacaaccttgggctcacgccttatgagtctcctggaaaaggtgcggctggtgaaaaagaaggaggaaaagcccgaggaagaaagaagtgccgaggaaagcaaaccccggtccctgcaagagttagtgtctcacatggtagtgagatgggcccaggaagatttcgtgcagagccctgaactcgtacgcgccatgtttagtttgctgcaccgccagtatgacggcctgggggaactgctgagggccctcccccgcgcctatacaatctccccttcttccgtggaggataccatgtccctgttggaatgcttgggacaaattcgctcattactgatcgtccagatggggcctcaggaggaaaatctcatgatacaatctatcggcaacattatgaacaacaaagtgttttaccaacatccaaacctgatgcgcgccctgggaatgcacgagactgttatggaggtgatggtgaacgtcctcggcggcggggaaagcaaggaaatcagattcccaaagatggttacttcttgttgtaggttcctctgctacttctgccggatcagtcgccaaaaccagagatctatgttcgatcacctgtcttacttactggagaatagcggcatcggactgggcatgcagggatccaccccactggatgtggcagcggccagcgtgattgacaataacgaattggccctggcacttcaggagcaggacctggagaaagttgtgagttacctggccgggtgtgggctgcagtcctgcccaatgctggtcgcaaagggatatccagacataggttggaacccatgcggaggagaacgctatttggattttctccggtttgcggtctttgtgaacggagagtccgtagaagagaacgctaatgtggtggtaaggctactcatccgcaagcccgagtgtttcgggcccgcgctccgcggggaggggggaagcggcctgctggctgctatcgaagaggctatcagaatttccgaagatccagcacgtgatggtccgggtattcgtagggacaggagaagggagcactttggagaagagcctcccgaggaaaacagagttcacctaggccacgcaatcatgagcttctacgctgctctgattgatctgttaggtcgctgtgcccctgaaatgcacctgattcaggctggcaagggtgaagcccttcgaatcagggcaatcctcaggagtctggttccactggaagacctggtgggaatcatctcactgcctctgcaaatccccacgctgggaaaagacggcgctctagtccagccgaagatgagcgcgtcatttgtccccgatcataaggcctccatggtcctgttcctggatcgcgtgtatggcattgagaaccaggacttccttctgcacgttctggatgtcgggtttctaccggacatgcgcgcggctgcttctctagacacagcgacattcagcacgaccgagatggcgctggccctcaaccggtatctatgcctggcggtactaccactcatcaccaaatgtgcccccttgttcgcaggaaccgaacaccgggcaatcatggtggatagtatgctccacactgtgtaccgcctatctcggggtagatccctgacaaaagctcagcgggacgtgattgaggactgtttgatgagtctgtgtagatatattcggcctagcatgcttcagcacctacttcgcagactggtgttcgatgtgccaatcctcaacgagtttgcaaagatgccacttaaactactcactaatcactacgagagatgctggaagtattattgtctaccaacaggctgggccaactttggtgtgacatctgaggaggaactccatttgacccgtaaactcttttggggtattttcgatagcctggctcacaaaaaatatgacccagaattgtatagaatggccatgccttgcctgtgcgcaatagctggcgcactgcccccagattacgtcgacgcttcctattccagcaaggccgagaagaaagcaacagtcgacgctgaaggaaatttcgaccctcgcccagtggagaccctgaatgttataattcccgagaagctggattcattcattaacaagtttgctgaatacactcacgagaaatgggctttcgataaaatccagaataactggagttatggtgagaatatcgacgaggaacttaaaactcatcctatgttgcgaccttacaagaccttttccgaaaaggacaaggagatctatcggtggcctattaaagagtctctgaaggcaatgattgcttgggaatggacgattgagaaagcaagggaaggcgaagaagaaaagacagagaagaaaaagacccggaagatttcccagtctgctcagacatatgacccaagggaggggtataaccctcaaccaccggatctgagcgccgtgactctcagccgcgagctgcaagccatggcggaacagctggccgaaaattaccacaacacctggggacggaaaaagaagcaggaattagaggcaaagggaggtgggacacatccactgctcgtcccctacgatacgctgaccgccaaagaaaaggcgcgcgaccgagaaaaagcgcaagaactcttaaaattcctacaaatgaacgggtatgcagtgacccggggccttaaagatatggagctcgactcctcaagcatcgaaaagcgctttgccttcggattcttgcagcagctcctgcgatggatggacataagccaggagttcatcgcacacctcgaagctgtcgtgtcttctggccgcgtcgagaagtctccgcacgagcaagaaatcaaattctttgcaaagatactgctaccactcattaaccagtatttcacaaaccactgcctttactttctttcaaccccggcgaaggtacttgggagcggggggcatgctagtaacaaagagaaggagatgatcaccagcctgttctgtaagttagcggctctggtaaggcatcgggtgtcccttttcgggacagatgcccctgcagttgtgaactgtctgcatattctggcaaggtcactggatgccagaactgttatgaaaagcgggccagaaattgttaaagccggactacgcagcttcttcgaatccgccagtgaagatatcgagaagatggtggagaaccttagactcggcaaagtcagccaggcccggacccaggttaaaggcgtgggacagaacttgacatacaccaccgttgcgctcctaccggtcctcaccactcttttccagcacatcgctcagcaccagtttggtgatgatgttattctggatgacgtccaggtgtcctgttatagaacactttgttctatctacagtctgggtaccaccaaaaatacttacgtggagaagctgaggcccgctctcggggagtgtctcgcacgcctggcagcggctatgccagtggctttcttggagcctcagctaaacgaatacaatgcatgttccgtttacactacaaagtcaccccgcgagagggctatcctcggcttgcctaacagcgtggaggagatgtgccccgacattcccgtgttggaaaggctgatggctgatattgggggactcgccgagtccggcgcccgctataccgagatgcctcatgtaattgaaataaccctccctatgctctgttcctatctgccaaggtggtgggaaagagggccggaggcgccgcccagcgcacttccggctggtgctccaccaccctgtaccgcagtcacgagtgatcatctcaactccttgctcggcaacatcttgaggattattgtcaacaatctaggcattgacgaagctagctggatgaagcggttggctgtgttcgcccagccaattgtttcacgggccaggccagaacttttgcagagccatttcatccctactatcggccggctcaggaaacgcgctggtaaagttgtgtccgaggaggagcagttgcggttggaggccaaagccgaggcgcaggaaggggagctgctggtgcgcgatgaatttagcgtcttgtgccgagatctgtatgctctgtaccccctcctcatacgttatgtagataacaatagagctcagtggctcactgagccgaatccctccgcagaagaactcttcaggatggtcggtgagattttcatctattggtcaaagagtcataacttcaaaagagaggagcaaaacttcgtcgtgcagaatgagattaacaatatgtcctttttgaccgccgacaataaatctaaaatggctaaatccggcggcagtgaccaggagcggacaaaaaagaaaagacggggcgaccggtactccgtgcagacatccctaatagttgccacactgaaaaagatgttgcccatagggctgaatatgtgcgctcctaccgatcaagaccttattaccctggcaaagacacgatacgccctgaaagacacggatgaagaggtccgagagtttctgcataataatctgcacctccagggaaaagtggaaggctcaccgtcgctccgatggcaaatggctctgtataggggtgttccaggccgcgaggaagacgcggatgatcccgagaaaattgtgagaagggtgcaggaagtttcggcagtgctgtattatctggaccaaacggaacatccgtacaaaagtaaaaaagctgtgtggcataagttgctttctaaacaacgaagaagagctgtggttgcctgtttccggatgacacctctgtacaatctgcctactcaccgggcctgtaatatgtttcttgagtcttataaggccgcttggatattgactgaagaccactcgtttgaagatcgcatgattgatgacctaagtaaggccggcgagcaagaagaggaggaggaagaggtcgaagagaaaaagcccgacccgctgcatcagttagtgcttcatttcagtcggacggccttgacagagaagtctaagttggacgaggactatctctacatggcctatgccgatatcatggccaaaagctgccacctcgaggagggcggcgaaaacggagaagccgaggaagaggtggaagtctccttcgaggaaaagcagatggagaagcagaggttgctctaccagcaggccagactgcacacaaggggtgcagcagaaatggtgcttcagatgatcagcgcttgcaaaggtgagaccggagcaatggtatcgagcacactaaaactcggcatatctattttgaacgggggtaatgccgaagtccagcagaaaatgctggattatttgaaagataagaaagaggtaggcttcttccaaagcatccaggccctcatgcagacgtgttcagtcttggatctgaacgcctttgaacggcaaaataaggccgagggtctaggaatggttaacgaggatggcaccgtgatcaacagacaaaatggggagaaagtgatggctgacgacgaatttacccaggatctgttcagattcctgcagctgctatgtgaaggtcacaataacgacttccagaattacctgcgaacccaaactggaaacactactactatcaatattatcatctgcaccgttgattatctactcagattacaggagtcaatatccgatttttattggtattatagcggcaaagacgtaatagaagagcaagggaaaagaaattttagcaaagcaatgagtgtggccaagcaggtgttcaactcgctgactgaatatatccaggggccctgcactggcaaccagcagagccttgcacacagccggctctgggacgctgtggtgggttttttgcatgtgtttgctcacatgatgatgaaactggctcaggatagctctcaaatcgagctcctgaaggagctgttagatctccaaaaggatatggtcgttatgctcctttccttgctagagggtaacgtcgtcaacggtatgatagcccgccaaatggtggacatgctggtcgaatcttcttccaacgtagaaatgattttgaaattttttgatatgtttctgaaattaaaagacatcgtaggcagcgaggcttttcaagactatgttaccgatcctaggggactcatctcaaagaaagacttccagaaggccatggactcacagaagcagttcagtggtccagaaattcagttcttgctgtcatgttccgaagctgatgagaacgaaatgattaattgcgaggagttcgctaatcgctttcaagagcccgcaagagacattggttttaatgttgcagtgttattgactaacctgtcagagcatgtcccccatgatccacggttacacaatttcctcgagctcgctgagagtatactggagtactttagaccgtacctgggacgaatagaaatcatgggggcaagccggagaatcgagcgaatctacttcgagatttcagagacaaacagggctcagtgggagatgccccaggttaaggagagtaagagacagttcatctttgatgtggtgaatgaaggtggagaggccgagaagatggaactgtttgtttcgttttgcgaagataccatcttcgaaatgcagatcgctgctcagatcagcgagcccgaaggggagccagaaactgatgaggacgagggggcgggggcagcggaagctggagccgagggggcggaggagggagctgcagggctcgagggaactgccgctacagctgccgcaggtgcgacggcccgggtagtggccgcggccgggagagctctgagagggttaagttacagatctcttcgcaggagagtccgccggctccgccgtctgactgcacgggaggccgcaacggctgtcgctgccctgctctgggctgctgtcactagggctggcgctgcgggcgccggcgcagcagccggcgctcttggtctgttgtgggggagcttattcggtgggggtctggtggagggcgccaagaaggtgacggtaacagagctgctggcagggatgccggaccccacatcagacgaggttcacggtgagcagcctgccggacctggcggagacgctgatggcgagggagcaagtgaaggagccggggatgcagcagagggcgccggagatgaggaagaagcagtccacgaagctggcccagggggcgccgatggagctgtggcagttaccgatggcggacccttccggccagaaggcgctggaggcctgggcgacatgggggataccactccagccgagccacccaccccagagggctccccaatcctgaaaagaaagctgggagtcgatggcgtcgaagaggagcttcccccagaaccagagcctgagccagagcccgaattagaacctgaaaaagcagacgcagagaacggcgaaaaggaggaagtcccggaacccacccctgaaccacctaaaaagcaggcacctcctagccccccacctaaaaaggaggaagctggcggcgaattctggggcgagcttgaggtgcagagggtgaagtttctgaactatctgagcaggaacttttacactctgcggtttctagcactcttcctggcattcgccattaacttcatattgctgttctacaaagtcagcgactctccccctggcgaggacgacatggagggatcggctgctggagatgtcagtggcgccggtagcggaggcagttctggatggggactgggggctggagaagaggctgagggcgacgaggacgagaacatggtctattattttctggaggagtccacaggttatatggagccagctctgcggtgtctaagcctactccatacactggtggccttcttgtgcatcattggttataactgccttaaagtcccccttgtgatcttcaagcgagaaaaagagctggctcggaaattggagtttgatggactgtacatcaccgaacaacccgaagacgatgacgtgaaagggcaatgggatcggctggtcctgaacactccatccttcccaagcaactactgggacaaatttgtaaagcgcaaggttctggacaaacacggcgacatttacggccgcgagcggatcgccgagctgctggggatggatctcgccacgcttgaaatcacggcccacaacgagcggaaacccaatcctccgcctggtctgctcacttggctgatgagtatcgatgtgaagtaccaaatctggaagttcggagtaatatttactgacaactcatttctttatctaggctggtatatggttatgagcctgcttggccactacaacaatttcttcttcgcagcacaccttctggatattgcgatgggagtaaagactctgaggacgattttatcctccgtgacacacaacggtaaacagctggtaatgacagtcggcctcctggccgtcgttgtatacctgtatacagtggtcgcttttaacttttttcgcaagttctataataagagcgaagatgaggacgaacctgacatgaaatgtgatgatatgatgacgtgttacctattccatatgtatgtcggggtacgtgccggaggtgggatcggcgacgagattgaggatccggcaggagatgagtacgaactttatcgcgtggtctttgacattacatttttttttttcgtcatagttatattgctggccatcatacaaggtcttatcatcgacgctttcggggagttgcgagatcaacaggagcaggtcaaggaggatatggagacgaaatgcttcatttgtggtatcgggtctgactacttcgataccacgcctcatggttttgagacccacacgctcgaagagcacaacttagcaaactatatgttttttttgatgtatctgattaacaaagatgagaccgagcatacaggacaggaaagctatgtatggaagatgtaccaggagaggtgttgggacttctttcctgccggggattgttttaggaaacagtatgaggatcagctgagctag

SEQ ID NO: 133306 - DNA, 15117 bp, synthetic construct
  misc_feature 1..15117: note = Description of Artificial Sequence: Synthetic coding sequence
  source 1..15117: mol_type = other DNA
atgggtgacgctgaaggcgaggacgaagtgcaatttctgagaactgacgacgaggtggtccttcaatgcagcgctacagtgttaaaagaacagcttaaactgtgcctcgctgccgaaggtttcggaaatagactgtgcttcttggagcctacaagcaacgctcagaatgtcccacctgatctcgctatatgttgcttcgtgttagaacagagtttgagcgtgcgggccctccaggagatgttagcaaatactgtagaggctggggttgaatcctcacagggaggcgggcatagaacgttgttgtacgggcacgccatccttctgcggcatgcacatagccgcatgtacttgagttgtctgacaacaagtagatctatgaccgacaagctcgccttcgatgtcggattacaggaagacgcaacaggtgaagcttgctggtggacaatgcatcctgcgtctaagcagaggtctgagggtgaaaaagtacgggtgggcgacgacatcattctcgtgagcgtgagttccgagagatacctgcacctttccaccgcttccggggagttacaggtggatgcgtctttcatgcagacgctgtggaatatgaaccccatctgttcacgatgtgaggagggcttcgtgacaggcggccatgtgcttaggctattccacggccatatggacgaatgcctgacgataagtcctgctgactcagatgaccagcgccgacttgtctactatgagggcggcgcggtttgtacccacgcccgaagtctctggcgtcttgagcctctgcggatatcttggtccggctcgcatctgagatggggacagccgctacgggttaggcacgtgacaactggacagtacctcgctctgaccgaagaccagggactggttgtcgtggacgcttccaaagcccacacaaaagccacatcattctgcttccggatatccaaggagaaactcgatgtggctcccaagcgtgacgttgaggggatgggaccccccgagatcaaatacggggagtccctttgtttcgtccagcacgtagcaagcgggctctggctgacatatgccgccccggaccctaaagccttgaggctcggggttctcaagaagaaggcaatgttacaccaggagggacacatggatgacgctctcagtcttacgaggtgtcagcaagaggagtcccaggctgcaaggatgatccacagcactaacggcctgtataatcagttcattaaaagtctggatagctttagtggaaagccccgaggaagcggtccaccagcgggtaccgctttgccaatcgagggcgtgattctatccctccaggacctcattatatatttcgagccaccttccgaagatctgcagcacgaagagaagcagtcaaagcttaggtctctgcgaaacaggcagtcactgttccaggaggagggtatgctctcaatggtgctgaactgcatcgaccggctcaatgtgtacacaacagccgcacactttgctgaattcgccggagaagaagccgccgaatcctggaaagaaattgttaacctcctgtatgaactgctggcctccctcatcagaggcaataggagtaattgcgccctgttcagcactaatctggattggctcgtttctaagctcgatcgtttagaagcaagctcaggcatcctagaggtcctgtattgtgtcctgatcgagtctccagaggttctcaacatcatacaggaaaatcatatcaaatccatcatcagcctattggataagcacggacgcaaccacaaagttctcgacgtgttatgctcactgtgcgtatgtaatggcgtcgcagttcgctccaaccaggatctgatcacagagaatctgttacccgggagagagctgctgctgcaaaccaatttgataaactatgtgacatccatccgcccgaacatcttcgtcggcagggcagagggtacaactcagtattccaaatggtatttcgaggtgatggtggatgaagtaactccattcctaacagctcaggcaacccatctgagagtgggatgggcccttacggaagggtatactccatatcccggagctggagagggatggggtggcaatggggtgggggatgacctgtattcctacggatttgacgggctgcacctgtggacagggcacgtggctagacccgtgacgagtccaggacagcatctcctggcgcctgaggatgtgatttcatgctgcctcgacctgtccgtaccttcgataagtttcaggatcaacggatgtcctgtgcagggggtgtttgagtcctttaacctcgatgggctgttcttccccgtggtcagcttcagtgctggagttaaggtaaggtttctcctcggcggtcgacacggagaattcaagttccttccaccgccagggtacgccccatgccacgaggccgtgctgccccgagaacggctccacctggaacctatcaaggagtatcgtagggaaggcccccgcgggccacacttagttggtccatccaggtgtttgtctcacacagacttcgtcccctgccctgttgatacagtacaaatcgtgcttccaccacatctggagcggatccgggaaaagctggccgagaatatccacgagctgtgggccctgacgaggattgaacagggatggacctacggccccgtgagagatgataataagcgattacatccatgtcttgtggacttccactccctgccagaacccgaacgaaattacaacctgcagatgagcggagagaccctgaaaacactgttggccttgggctgccatgtcggcatggctgatgagaaggctgaggacaatctgaaaaagaccaaactccctaagacctacatgatgtcaaacggatacaaaccagccccccttgatttatctcatgttcgactgacaccagcccaaactaccctggtagatcgactggctgagaatggacacaacgtatgggcccgggacagggtgggccagggttggtcatactctgcagtgcaagacattccggcccggcgtaacccacgcctggttccatatcgactcctcgacgaagccacaaagagaagcaaccgtgacagcttgtgtcaggctgtccgaactcttctggggtacggttataatatcgaacccccagaccaggagccaagtcaggtcgagaatcaatcccggtgtgacagggtgcgcatattccgcgccgagaaaagttataccgtgcaatccggtaggtggtactttgagttcgaagccgtgacaacaggcgagatgcgggtggggtgggcacggcctgagctgcggcctgacgtggagctgggggccgatgaactggcctacgtgttcaacggccaccgcggccagcgctggcacctggggagcgaaccttttggaagaccttggcagcccggcgatgtggtagggtgcatgattgacctgactgagaataccattatatttaccctgaacggcgaagttcttatgagtgacagcgggagcgaaaccgccttcagggaaatcgaaatcggggatgggtttctgccagtgtgcagcctgggtccaggccaggttggccatctcaacctggggcaagacgtgagctctctgaggttttttgcaatctgcggcctccaggaggggttcgaaccattcgccatcaacatgcaaagacccgtcaccacctggttcagcaagggcttgcctcagttcgaacctgtgccgctggagcaccctcactacgaagtaagccgagtggatggcacagtggacactcccccatgtctccgcctcacccatcggacatggggctcacagaactctctggtagaaatgcttttcctaagactatccctgcccgtgcagtttcaccagcacttccggtgcaccgcaggagcaactccgcttgctccccccggactccagcctccggctgaggacgaggccagggccgccgaaccagaccccgattatgaaaacttaaggaggtccgctggtggttggagcgaggctgagaacggcaaagaggggactgctaaagaaggcgctccggggggcacacctcaggccgggggagaagcacaacccgccagggcggagaatgaaaaagatgcaactaccgagaagaataagaagcgcggattcctgttcaaagcaaaaaaggtggcaatgatgactcaaccccccgctactcctaccctgccccgcctgccgcacgacgtcgtgcctgccgacaatcgggatgaccccgagataattctaaacactacgacctactattacagcgtgagagtttttgccggacaggagcctagctgcgtctgggctgggtgggttactccagattatcaccaacacgacatgtcttttgatctgagcaaagttagagtggtgacagttactatgggagacgagcagggcaatgttcactcatccctgaaatgctcaaattgctatatggtctggggtggcgattttgtctcaccgggacagcaggggagaatctcccacacagacctggttatagggtgtctcgtggacctggctacaggcctcatgaccttcacagcgaatgggaaagagagcaatacgttttttcaggtcgaacccaacaccaagctgtttcctgctgtgtttgtactgcctacacatcagaatgttatacagttcgagctgggaaagcagaaaaacattatgcctctgtctgccgcaatgttccagtcagagcggaaaaaccccgcaccccagtgtccccccagacttgaaatgcagatgttaatgccggtgagttggtcccggatgccaaaccatttcttgcaggtggagaccagacgagccggcgagcggcttggatgggccgtgcagtgtcaagaaccacttaccatgatggccctgcacatccccgaggaaaaccgctgcatggatattctggagcttagcgagagattggaccttcagcgcttccacagtcacaccctgcgcctctaccgagctgtttgcgctctcgggaataacagggtggcccacgccctgtgttctcacgtggatcaggcccagctgctgcatgccctcgaagacgcccacttgccagggccattgagagccggatattatgaccttctgatttcaattcaccttgaatctgcctgtagatcacggaggagcatgctctcagagtatatcgttcccttaaccccagagactagggccattacgctgttccccccaggaagatccaccgaaaacggacatcccaggcacgggctcccaggggtcggcgtaacaacctcccttcgccctccccatcatttttccccgccctgttttgtggctgcccttcccgctgctggtgccgctgaggcccctgcgcgtctctctccggctatccccctcgaggcactgagagataaagcattgcggatgctaggggaggccgtgcgggacggagggcaacacgctcgagacccagtgggtggatccgtggagttccagttcgtccctgttctgaaactggtttccacactgctggtcatggggattttcggcgatgaagatgtgaaacaaatcctgaaaatgattgagcctgaggtgttcacagaggaagaggaggaggaagacgaagaagaagagggcgaagaggaggacgaggaagagaaggaagaagacgaagaggagacagcacaggagaaggaggatgaagaaaaggaggaggaggaagctgccgagggtgagaaggaagagggcctagaagaaggcctgttacagatgaagttgcccgaaagcgtaaaactgcagatgtgccacctgctggaatatttttgcgaccaggagctgcagcaccgcgtagaaagtctggctgcctttgccgaaaggtatgtcgacaagctgcaggccaatcagcgcagtcggtacggcctcctgatcaaagcattcagtatgacagccgcagaaaccgcacggaggacacgtgagttccgaagccctccccaggaacagatcaacatgctgttgcagtttaaagatggtacggatgaggaagattgcccgcttcccgaggagattcgccaggatctgttggattttcaccaggacctgctcgcccattgcggtatacaacttgacggcgaggaggaggagcccgaggaggaaacgacattgggttctcgtctgatgagtctcttggagaaggttagactcgtcaaaaagaaggaggaaaaacctgaggaagagcggagcgcggaggagagtaagcctagaagcctccaggaactcgtatcccacatggtcgtacggtgggcccaagaagactttgtccagagtcctgaattggtgcgcgccatgttttctctcctgcaccggcagtacgacgggctgggcgaactcctgcgggcgttaccccgagcgtatactatcagcccctcctcagtcgaagatacaatgagtctgctggagtgcctgggacagattagaagtctactcatcgttcagatgggaccacaggaagagaacctgatgattcagtcaatcggaaacatcatgaacaataaggtattttaccagcatccgaacctcatgcgagccctggggatgcatgagacagtgatggaggtgatggtgaatgtattgggcgggggggagtctaaagagatacggttcccaaaaatggttacatcctgctgtcgatttttgtgttatttctgcaggatctcacggcagaaccagcggtcaatgttcgaccatctgagttacctgttagaaaactccggcataggcttggggatgcaagggtctacccctctcgacgtagcagccgcttccgtcatagataataacgagctcgcactcgctctgcaggaacaggacctagaaaaggtcgtctcttacctggcaggctgcgggcttcagtcttgtccaatgctggtggccaaaggataccctgacatcggctggaatccctgcggcggagagaggtatctggactttctgcggtttgccgttttcgttaacggggagtctgttgaggaaaacgctaacgtggtcgtgcgactgctgatccgtaagcccgaatgtttcggacctgccctgaggggagaaggcgggtcaggactgctggctgcaattgaagaggctatccgcatcagtgaggaccccgccagggatggccctggtattcggcgagacagacgaagagagcattttggggaggagcctcccgaagagaaccgagttcacctgggacatgctatcatgtcattttacgctgccctgatcgacctgctcggccggtgcgcccctgagatgcatttgatacaggccggcaaaggcgaagccctcaggattcgcgcgatcctgcgtagtcttgtcccactagaggacctagtgggcatcatttctcttcccctgcagataccgactctggggaaggatggagccctagtgcagcctaagatgagtgcttcctttgtcccagaccacaaagccagcatggtgttgttcctcgatcgcgtctatgggattgaaaatcaggattttctcctgcacgtgctggacgttggatttcttcccgacatgagagcagcggccagcctggatactgccaccttcagtactaccgagatggctcttgccctgaatcggtatctctgtcttgccgtcctgcctctgatcaccaaatgtgccccactattcgcaggcaccgaacatagggcaatcatggttgactcaatgcttcatacagtgtaccgtttatctcggggcaggagcctcaccaaagctcaacgagatgtgatcgaagattgcctgatgtctttgtgtcgatacatccgaccatctatgcttcaacacctgcttcggaggttagttttcgacgtacctatacttaacgaatttgcaaagatgcccctgaaattactcacaaaccattacgagaggtgctggaaatactactgtcttcccaccggttgggctaatttcggcgtcacctctgaggaggagctgcacctcacccgaaaactgttttgggggatatttgactccttagctcataagaagtacgatcccgagctttacagaatggctatgccctgcctgtgtgcgatcgccggggcactgccgccagactacgtggacgcttcatacagttcgaaagccgaaaagaaagcaaccgtggatgctgaagggaacttcgatccaaggcctgtggagaccctcaacgtgatcataccagagaagctggatagctttatcaacaagttcgctgagtacacccatgagaagtgggccttcgacaaaatacagaataactggtcttacggtgagaatattgacgaggagttgaaaacccatccaatgctcaggccctacaaaacattttccgagaaggacaaagaaatctataggtggcccattaaggagtctttaaaagcgatgatagcttgggaatggacaatcgagaaggctcgcgaaggcgaagaggaaaagacggagaagaagaaaacgaggaaaataagtcagtctgcacaaacttatgatccccgcgaggggtataacccccagccccccgacctcagcgcagtgacactgtcccgggagctacaggcaatggcggagcagctggccgagaactaccacaatacctggggtcggaaaaagaagcaggaactagaggccaaaggcggaggcacccatccattactcgtcccatatgatactctgaccgcaaaagagaaggcaagagaccgagaaaaggcgcaagagttactgaagttcttacaaatgaacggctacgccgtgacaaggggattgaaggacatggagctggattcatccagtattgaaaaacgttttgctttcgggtttctgcagcagctcctaaggtggatggatataagccaggagttcatcgctcacctcgaagccgtagtgtcgagtgggcgggtcgaaaaatctcctcacgagcaggagatcaagtttttcgctaagatcctgcttcctttgatcaatcagtattttaccaaccattgcctgtactttctttctactcctgctaaggtcctcgggtccggaggacatgcttccaacaaagagaaggagatgattactagccttttctgtaagctagccgctctggtgaggcatcgggtgagcttattcgggacggacgctcccgctgtagttaattgtctgcatatccttgcgcgcagtctcgatgcacggacagtgatgaagagcggccccgagatagttaaagccggactacggagcttttttgaatctgcctctgaagacatagaaaaaatggtggaaaacctacgactcgggaaagtgtcccaggcacgaacccaggtaaaaggcgtgggacagaatctcacttacaccactgtggcgctgctacctgtgctaacaacgctgttccagcacatcgcccagcaccaattcggcgacgatgtaatcctggatgatgtccaggtgagctgctatcgtaccctgtgctctatctactctttgggcaccactaagaacacgtacgtggagaaactgagacccgccctgggcgaatgcctcgcccggctcgcggccgcaatgccagtggccttcctggaacctcaacttaatgaatataacgcatgttcagtgtacaccacgaagagtcccagggaacgtgccattctgggtttacctaattccgttgaggaaatgtgtccagatattcccgtgctcgagaggcttatggcagacattgggggtctcgccgagtcgggagcgcgttacaccgaaatgccccatgtcattgagatcactctccctatgctgtgtagctatctcccgaggtggtgggagagagggccggaagcccccccgtccgccctgcctgcaggcgccccccccccctgcacagcagtgacatccgatcacctaaacagcctgcttggcaacatacttagaattattgtgaacaacttgggtatcgatgaagcgagctggatgaagcgcctagctgtctttgcccagccgatcgtgagccgcgccagacccgagctgttgcagtcacattttatcccaacaataggacggctccgcaaaagagcaggaaaggtcgtgtctgaagaggaacagctcagactcgaagcaaaagccgaagctcaagaaggagagcttcttgttcgggatgagttttctgttttgtgtcgtgacctgtacgcactgtatcctctgcttataagatacgtggacaataacagagctcaatggctcaccgaacccaaccctagcgctgaggagttatttcgaatggtcggcgaaatattcatttattggtccaagagccacaatttcaaaagggaggagcaaaactttgtagttcagaacgagatcaataacatgtcttttttgaccgccgacaataagtcaaagatggcaaaagctggcgatatacagagcggtggaagcgatcaagaacgcacgaaaaaaaagcggcggggagacagatactctgtacagacaagtttaattgtcgccaccttgaagaaaatgttgcccatcggattgaacatgtgcgcaccaaccgatcaagacctgattaccctggcgaaaacaagatatgcgctgaaagataccgacgaagaggttcgagagtttctgcacaacaacttgcacctgcagggaaaggttgaagggtcacccagcttgcgttggcagatggctctatatcggggggttccaggacgtgaggaggatgctgatgatcccgaaaaaatcgtaaggcgggtgcaggaagtgagcgccgttctctattacctcgatcagaccgagcacccctacaagtccaaaaaagcagtttggcacaagctgttaagcaaacaacgaaggagggccgtggtggcatgttttcgtatgacccctctatacaacctgcctacccacagggcctgcaacatgtttctggaatcttataaggccgcctggatactaacagaagaccactccttcgaggaccgtatgatcgacgatctctcaaaagccggcgagcaggaggaagaagaagaagaggtggaggagaaaaagcccgatcctttgcatcagttggtacttcacttttccagaacagctctcacggagaaatcaaagctggatgaggattatctgtatatggcttacgctgacatcatggccaaaagttgccatctagaggaggggggcgaaaatggtgaggcggaggaggaggtcgaggtaagcttcgaggagaagcagatggaaaaacaacggctgctataccagcaggctcggctccatacaaggggagcagccgagatggtgctgcaaatgatctctgcatgcaaaggggaaactggggccatggtgtcctctaccctgaaactcggcatctctattctcaatggcggaaacgccgaggttcagcagaagatgctagactatctaaaggataagaaagaagtggggtttttccagagcatacaagccctcatgcaaacctgttcagtgttggacctgaacgcttttgagagacagaacaaggccgagggacttggcatggttaatgaggatggaactgttatcaacagacagaacggtgagaaggtgatggccgacgacgagttcacacaggacttgttccgatttctccaacttttgtgtgaagggcataacaacgactttcagaactatctccgtacccagactggaaatacaactacaattaacattataatctgtacagtggattacctgttgaggctccaggaaagtatttcagatttctattggtattactctgggaaggacgtgattgaggagcagggaaaacggaatttttcaaaggcaatgtctgtggcaaagcaagtcttcaactcactgacagagtatatacaaggtccctgtaccggcaaccagcagtccttagcacactcgagactttgggacgcagtggtcggatttctgcacgtcttcgcccatatgatgatgaaactcgcccaggattcctctcagatcgagctgctcaaagagttattggatctgcagaaggacatggtcgtcatgctgctgtcattactggagggcaatgttgtgaacggcatgatagctcgacagatggtcgatatgcttgtggaatcatcgtccaacgtggagatgatactcaagttcttcgacatgttcctaaaattgaaagacatagtagggtctgaagcattccaagactacgtgaccgaccccagagggcttatttctaagaaagacttccaaaaggcaatggactcccagaaacaattctccgggcctgagattcagttcttgctctcatgtagcgaggctgatgagaatgagatgattaactgtgaggaattcgctaatcgctttcaggagcctgcaagggatatcggtttcaatgtggccgtgctgctgactaacctctcggaacacgtgccacatgacccccgcctgcacaacttccttgaattggccgaatccatcctggaatactttaggccttatctcggtcggatcgagataatgggcgcctctaggagaatagagaggatatactttgagataagtgagaccaatagagcccagtgggaaatgcctcaagtgaaggaatctaagcggcagttcatcttcgacgtcgtgaatgaaggaggtgaggcagagaaaatggagcttttcgtttcattctgtgaagatacaattttcgagatgcagattgcagcacagatttccgagcctgaaggggagccagaaaccgatgaggacgagggcgcgggcgctgctgaggctggagcagaaggggcagaagagggagcggctggattagagggcactgccgctacagcagctgcaggagcgactgctagagtggtggccgccgccggccgagcactcagaggtctctcctaccgcagtctgagaaggagagtcagacgcttgcgtaggctaacggccagggaggcagcaacagccgttgctgcactgctgtgggccgctgtgactagagcaggggccgccggagccggagcagccgccggggccctgggacttctgtggggtagcttgttcgggggtggcctggttgagggggccaaaaaggtgaccgtgacagagttgctggctggcatgccagaccccacttctgatgaggttcatggcgaacagccggctgggcctggcggcgacgcagatggtgagggagcctcagagggggcgggcgatgccgctgaaggagccggtgatgaagaagaggctgtccacgaggcggggcccggcggagccgacggggcagttgccgtgacagacggtggcccttttagacctgagggcgcgggtggactgggcgacatgggcgataccactccagccgaacctcctaccccggagggatccccaattttaaagaggaaactgggcgtcgatggagtcgaagaagagttgccgccagaacctgaacccgaacccgaacccgagctcgagcccgagaaagctgatgcagagaacggcgaaaaggaggaggtgcctgagcctacaccagagccgccgaagaagcaagccccaccaagccctcccccaaagaaggaggaggcagggggcgagttctggggagagctcgaggtgcagagggtgaaatttctgaactatctgtcacgtaacttctacactctgcggtttttggccctcttcctggctttcgcaattaattttatcctgctgttctataaggtttctgacagcccccccggtgaggacgacatggaaggctctgctgctggtgacgtaagcggggcaggttcagggggatcttcaggctggggactgggcgctggggaggaagccgaaggtgacgaagacgagaacatggtgtactactttctggaagaaagtaccggatacatggaacccgccctgcgatgtcttagtctgctgcataccttagtagcattcttgtgcatcattggatacaattgccttaaagtgccactggttatttttaaacgtgagaaagagctcgctcgaaagctagaattcgacggtctgtacatcactgagcagcccgaggacgatgatgtcaaaggccagtgggaccggctggtgctgaacactccaagctttccaagcaattactgggacaagtttgtgaaaaggaaagtgttagacaagcacggtgacatttacggccgtgaacgtatcgcagagctgttgggcatggatctcgcaaccttggagatcaccgctcacaacgaacggaagcctaaccctccaccaggccttttgacctggttaatgtccatcgacgtcaagtaccaaatttggaagttcggggtaattttcactgataatagtttcctgtatctgggctggtatatggtgatgagcctgttaggtcactacaacaatttcttctttgcggctcacctgctggatatcgccatgggcgtcaagaccctccgcacaatactgagtagcgtgactcataatgggaagcagttggtgatgacagtggggctccttgcggtagtcgtgtatctctacacagtggttgcttttaatttcttccgcaaattctataataagtcagaggatgaggacgagcctgatatgaagtgcgacgatatgatgacgtgttatcttttccacatgtatgtgggggtgagggctgggggcgggattggagatgagatagaggaccccgctggagatgaatacgagctttatagggtggtcttcgatatcaccttttttttcttcgtgatcgtgatcttactcgcaatcattcagggcctcatcatcgatgcttttggggaactgagggaccaacaggaacaggtgaaggaagatatggagactaagtgtttcatatgtggaatcgggtctgactactttgacaccacaccacacggcttcgaaacgcacactctcgaggaacacaatctcgcaaactatatgtttttcctaatgtacctgattaacaaagacgagaccgaacacactggccaagagtcttacgtgtggaaaatgtatcaagagagatgctgggacttctttcccgccggcgactgctttcgcaagcagtacgaggaccagctgagctag

SEQ ID NO: 133307 - DNA, 15102 bp, synthetic construct
  misc_feature 1..15102: note = Description of Artificial Sequence: Synthetic coding sequence
  source 1..15102: mol_type = other DNA
atgggggacgccgagggagaggatgaggtgcagttcctgcgcacagatgacgaggtagtgctgcagtgttcggctactgtgctgaaggagcagctcaaactctgtcttgctgccgaaggtttcgggaaccggctgtgtttccttgaaccaactagcaatgcccagaatgtccctcccgatctagcaatctgctgttttgtcctggaacagagcctttcggttcgagccctgcaggaaatgctcgccaacaccgtagaagccggggtcgaatctagtcagggcggagggcaccggacactcttgtacgggcacgccatcctcctgcggcacgcccattcgagaatgtatcttagttgtctgacgacctcgaggagcatgacagacaagctggcctttgatgtgggattgcaggaagatgccacaggtgaggcctgctggtggactatgcatccggccagcaaacagcggagcgagggagagaaggtcagagtaggagatgacataatcttagtgtctgtgagctccgagcgctacctgcacctgtccaccgcctccggcgaactgcaagtggacgcctcattcatgcagaccctctggaatatgaaccctatctgcagccgctgcgaggaggggttcgtgacaggaggccatgtcctacggcttttccacggccatatggatgagtgcttgaccatttctcccgccgatagcgatgaccagcggcggttggtgtattacgaaggtggcgccgtctgcactcatgctcgatccttatggcgtctggaaccattgaggatctcatggagtggaagtcatctccgatggggacaaccgcttagggtcaggcacgtgaccactggccagtatctcgcccttacagaggaccagggactggtggtagtcgacgccagcaaagcacacacgaaggcgacctctttctgcttcagaattagcaaggagaaactggacgtggctccaaagcgtgacgttgaaggtatgggacctcccgagatcaaatacggggagagtctgtgtttcgtgcagcatgtcgcatctggattgtggctgacctatgctgctcccgatccgaaggccctgagactgggggtgttaaaaaaaaaggcgatgctgcaccaggaggggcacatggatgatgctctgtctttgactcgttgccaacaggaagaatctcaggcagcacgcatgatccactccacgaacggactgtataatcaattcatcaagagcctcgactcgttttccggtaagcctcgaggaagtgggcccccagcgggaacagccttgcctattgagggagtaatcctcagcttgcaggaccttattatctactttgaacccccaagcgaagatttacaacacgaggagaaacagtcgaaactgcgatcactgcgtaaccgtcagagtctgttccaggaagagggcatgctgtccatggtgctcaattgtattgaccgcctgaatgtctacactacggcagcacacttcgccgaattcgcaggcgaagaggcagctgagtcctggaaagagatcgtcaatctgctatatgaactcttagcctcactcattagagggaatcggtccaactgtgccctgtttagtacaaacctggactggctggtgagcaaactagaccgtctggaagcatcatccgggattctggaggtactttactgcgtgctgatagagtcccctgaggtgttgaatatcatccaagaaaatcatataaaaagtatcatctccctgctggacaagcatggccggaaccataaggtattggacgtgctgtgcagcctctgcgtttgtaacggtgttgccgtgagatccaatcaggacctgattaccgaaaacctgttacccggacgggagctattactccagaccaacttgatcaattacgttacatctattcgacccaatatatttgtcggacgagccgagggtaccactcagtattcgaagtggtacttcgaagtgatggtggacgaagtgacaccctttctgaccgcccaagcaactcacctgcgtgtgggatgggccctgactgaggggtacacaccttatcctggggccggggagggatggggcggcaacggagtgggagatgatctttattcttatggctttgacgggctccacttatggacaggacatgtggcccgcccagtgacttctcctggtcagcacctgctggcaccagaggatgtaataagctgctgcctggatctcagcgttccctcaatcagttttaggattaatggttgccccgttcagggcgtgttcgagtccttcaacttggatggtctgttctttccagtggtaagctttagcgcgggcgtcaaagtccgctttctgcttggagggaggcacggcgagtttaagtttctgccccctcctggctacgccccatgccacgaggccgtgctcccgagggagaggctgcacctcgaacctattaaagagtatcgcagagaggggccccgcggcccccaccttgtgggcccctccaggtgtctgagtcacacggattttgttccctgcccagtggataccgttcagatcgtgctgcccccccatctggaacgtatccgcgagaaattagccgagaacattcatgaactgtgggcgctgactaggattgagcaggggtggacatacgggcccgtgagggacgataataaacgcctgcacccttgtcttgtggacttccacagtttgcctgagccggagcggaattacaacttgcagatgtctggcgaaacactcaagacattactagcactaggatgtcacgtgggaatggcggacgaaaaggcggaagacaatctgaaaaagacaaaattgcctaagacttatatgatgagcaacggctacaagcccgcaccactggatttatctcacgtaaggctgacacctgcccagaccactctcgtggatcggctcgccgagaacggacacaatgtgtgggcaagggatcgagttggtcagggctggtcatacagcgccgtgcaggatattcctgctaggaggaatccgcggctcgttccgtatcgccttctggatgaggcaacgaagaggtccaaccgggactccttatgccaggcggtgagaacactgctgggctatggctacaatattgagccaccagaccaagagccttctcaggtagaaaatcagtctcgctgtgatcgcgtcaggatatttcgtgctgagaagtcgtataccgtgcagtctggcaggtggtatttcgagtttgaagccgtgactacaggagaaatgcgcgtcggctgggctcgccctgaactgcgccctgatgtcgagctaggcgccgatgagttggcatatgtgtttaatgggcatcgtggccagaggtggcatctgggatcagaaccttttgggaggccttggcagcccggggacgtggtggggtgtatgatcgacttaaccgagaatactattattttcacactgaacggcgaggtgctcatgagcgacagcgggtctgagaccgccttcagggaaattgaaataggagacggatttctgcctgtgtgctccctgggccctggccaggtcgggcatctgaatctggggcaggatgtcagctctctgagattttttgcaatatgcggcttgcaggaaggcttcgagccgtttgccatcaacatgcagcggcctgtcacaacatggttctcaaaagggctcccgcagttcgagcctgtccctttagaacacccccactacgaagttagcagagttgacggaaccgtagataccccgccctgcctacgattgacccatagaacctggggatcacagaactctctggtcgagatgctgttcctgaggctctcactgcccgtccaattccatcagcacttccggtgcaccgcgggagctacacccttggctccaccgggactgcaaccccctgccgaagacgaggccagagccgcagaacctgatccagactatgagaacctgcggagaagtgctggcggatggtcagaagctgaaaacggcaaagaagggacagctaaggaaggggcacccggggggaccccccaggcgggaggtgaagcccagcccgctagagccgaaaatgaaaaagacgctaccacggagaagaataagaagcgtggcttcttgtttaaggctaagaaggtggcaatgatgacacaaccacctgcaaccccgactctgccccgactaccgcacgatgtagtccccgcagataaccgggacgatcccgaaatcattttgaatacaacaacctattactactcagtgagagtgttcgctggccaagaacctagctgcgtgtgggctggctgggttaccccagactatcatcagcatgatatgtcttttgatctcagcaaagtccgggtcgttacggtaactatgggcgacgaacagggaaatgtgcactccagcctgaagtgtagcaactgttacatggtttggggcggagacttcgtttcaccagggcagcaggggcgtatctcacataccgaccttgtaatcggatgcctggtggatcttgcaactggtctgatgacattcaccgctaatggaaaggagagtaatacattcttccaggttgagcccaacactaagctctttccggcggtttttgtgctcccgacacatcaaaacgtgattcagttcgagttaggcaagcagaagaatattatgcccttgtctgcagccatgttccagtccgaacgcaaaaatccagcgccccagtgccctcctaggctggagatgcagatgctgatgcctgttagctggtctaggatgcctaaccattttctgcaggtagagactcggagggccggggaacggctcggatgggccgtgcagtgccaagaaccactaacgatgatggccctgcatatcccagaggaaaataggtgcatggacatcctggagctcagtgaacggcttgatctgcagagatttcactcacacacccttcgcctgtatcgggctgtttgcgccctcggaaataacagagtggcccacgccttatgctcccacgtcgaccaggctcaactgttgcatgctctggaagatgctcatctccctgggccactgagagccggttactatgatctgttaatcagcatccacctcgagtccgcttgtcggtcccgccgcagcatgctatcagagtacatcgtcccactcacacccgagacgcgggccataacactgtttccacccggtcgctcaaccgaaaacggccaccctcgccacggactgcccggtgtgggagttaccacgtccctccgaccccctcatcatttttctcctccctgcttcgtggccgccctcccagccgccggcgcggctgaagcaccggcgcggttgagccctgcaattcctctggaggcgttaagagacaaagcacttcgcatgctgggggaggccgtacgagacggcggacaacacgctcgagaccctgtgggtggctccgtcgagtttcagttcgtgccggtgttaaaacttgtgtcaactcttttggtgatggggatatttggcgacgaagacgtgaagcagattctcaagatgattgagcctgaggtgttcacagaagaggaagaagaagaagacgaagaggaggagggggaagaggaggatgaagaggagaaggaagaagatgaagaggagactgctcaagaaaaggaagatgaagagaaagaggaggaggaggcggctgagggggagaaggaggaaggtctcgaggagggcctcctgcagatgaagttgcccgaatcagtcaagctgcagatgtgccatcttctggagtacttttgtgatcaagaactgcagcaccgggtggagtccctggccgcttttgctgagcgatacgtagataagctgcaggcaaaccagaggagccggtatggcttgttgataaaagccttctcaatgaccgcagccgagacggctagacggactagagagttcagaagtccccctcaggaacagattaacatgttgctccagttcaaggatgggacagacgaagaggactgcccgctgccagaggaaatccggcaggatctgctcgatttccaccaggacttgctggctcactgcggaatccagttggacggggaagaggaggaacctgaggaagagacgaccctggggagcaggctcatgtccctgctcgagaaggtccgccttgtcaaaaaaaaagaagagaaacctgaagaagaaagatccgcagaagaatcaaaaccacggagtttgcaggagttagtttctcacatggtggtaaggtgggcacaggaggactttgtgcagtctccagagctcgtgcgggcaatgttctcactgctgcataggcagtacgacggtctcggtgagctgcttcgggccctgccccgggcctatacgatcagtcccagcagtgtagaggacacaatgagcctgctagagtgccttggtcaaatacgatcacttctgattgttcagatgggtcctcaggaagaaaatctcatgattcagtctatcggaaatattatgaataacaaggtgttctaccaacaccccaatctgatgcgggctttaggcatgcatgaaactgtgatggaggttatggttaatgtgcttgggggcggcgagtcaaaagaaattcggttcccaaagatggtaacctcttgctgtcgcttcctttgctatttctgtcgcatcagccggcagaatcagagatcaatgttcgaccacctttcatatctgctggaaaactccgggatcggactcggtatgcagggttcaacacccctggacgtggcggccgcctctgtgatcgacaacaatgagctggcgctggctttgcaggagcaggacttagaaaaagtggtgtcctatctggcaggctgcggattgcaatcatgtcctatgctggttgccaaaggctatcctgatatcggatggaatccttgtggcggggaacggtatttagatttcctccgcttcgcagtgttcgtgaatggggagtcagttgaagaaaacgcaaatgtggtcgtgagactgctcatacgaaagcctgagtgcttcggtccagccctgaggggggaaggagggtcgggcctcctcgccgccatcgaggaagcgatcaggatctcggaggaccctgctcgggatggcccaggcattcgtagggaccggaggagggagcatttcggagaagaaccgccagaagagaacagggtgcatctcggccatgccattatgtccttttatgctgccttgattgacctgttaggcaggtgtgcgccagagatgcaccttattcaagcagggaaaggagaggcattaaggatacgtgctattctccgttcactggtccccctggaagacctagtgggtatcatttcgcttcctctgcaaataccaactctcggcaaggatggggctctcgtgcagcctaaaatgtccgcttcttttgtgcctgaccataaggcatctatggttctcttcctggacagggtgtatggcatcgaaaaccaggatttcctgcttcacgttctggatgttggatttctccccgacatgcgagcagccgccagccttgacacggccaccttttcaactaccgaaatggcactagctctgaatcgatatctgtgcctggctgtgttaccgctgatcacgaaatgtgcccccctcttcgccggcaccgagcaccgtgccatcatggtggactccatgcttcatactgtctacagactgtcacgcggtcgtagcctgacaaaggctcaacgggacgtgatagaagattgcctcatgtcgttgtgtcggtacatacggccttctatgctgcagcatctcttgcggcgtctggtttttgacgtacccattcttaacgaattcgctaagatgccactcaaactcttaactaatcattatgaaagatgctggaaatattactgcctccctactggctgggctaacttcggcgtgactagtgaagaggagctccacctgacaagaaagctgttctgggggattttcgacagcctggcccataaaaagtatgaccccgagctgtaccgaatggccatgccttgtctgtgcgccattgccggagccctgcctcctgactatgtggacgctagctattcctctaaggcagagaaaaaggccacagtcgacgcagaaggcaactttgacccaagacccgttgagacccttaatgtgataattcctgaaaagctggacagtttcataaataagtttgcagagtatactcacgagaagtgggcatttgataagattcagaataattggtcgtatggcgaaaatatagacgaggagttgaagacccaccctatgctgaggccttacaaaacttttagcgagaaggataaggaaatttaccgatggcctattaaagaaagcctcaaagctatgatcgcctgggagtggactattgaaaaagcacgcgaaggagaagaggagaagaccgaaaaaaagaagactaggaagatctcccagagcgcccagacatacgacccaagagagggatacaatccacaaccccccgacctttccgccgtaacactctccagggagctgcaggctatggcagagcagctcgccgagaattaccataacacgtgggggcgcaagaaaaagcaggagctggaagccaaaggaggtggaactcatcctctgctcgttccttacgatacactcactgcaaaagaaaaagctagagacagagagaaagcccaggaactgttgaaattcctgcaaatgaatgggtatgcggtaacccggggactgaaggacatggagcttgacagcagcagtatagagaaaaggttcgccttcggtttcctccaacagcttttaagatggatggatatcagtcaagaatttatcgctcacttagaggccgtcgtcagttcagggcgcgtggagaagagtccacatgagcaggaaatcaagttcttcgctaaaatactgctgcctctgatcaatcagtactttactaaccactgcctatactttctgtccacccctgctaaagtcctcggctccggcgggcacgcctcgaacaaagagaaggagatgataacgagcctgttttgcaagttagccgccctggtccgtcaccgtgtgagtttatttgggaccgacgcaccagctgtcgtaaattgcctccatatactggccagaagtttggatgcccgaaccgtgatgaagtccgggccagagatcgtgaaggccgggctacgctcattctttgaaagcgccagcgaagatattgaaaaaatggttgagaacctgaggttaggtaaggtgtcccaagcaagaacacaagtgaagggagtgggacaaaacctcacttacaccacggtcgctctccttcctgtcctgactacactgttccagcatattgcccaacaccagtttggcgatgatgtaattctggacgacgtccaggtgagttgttatagaacactgtgtagtatttattcactcggaacaacaaaaaatacgtatgtagaaaaattgcgtcctgcgctgggggaatgtctcgcaaggctcgcagccgccatgccagttgcttttcttgaaccacagctgaatgaatataatgcttgctcggtgtataccactaagtccccaagggagcgagcaatcctggggttgcctaattccgttgaggagatgtgccccgatatccctgtgctggagcgcctcatggcagatattggcggcctggctgaaagtggcgcccggtacacagagatgccacatgtgatcgagattactctgcccatgttgtgctcctatctgccaaggtggtgggaaaggggaccggaggctcctccctctgctctgcccgccggcgcacccccgccctgtacagcggtgacatcagaccacctgaactccttacttggtaacattctgcggattatcgtgaataatcttggcatcgacgaggcgagctggatgaagcggcttgctgtctttgcccagcctatcgtgagcagggcccggcccgaattgctgcagtcccactttatacctaccattggccgcctgcggaagcgcgcagggaaggtggtgagcgaggaagaacagctccgtctcgaagccaaagcagaagctcaggaaggagagctgctggttagggacgaattctcagttctgtgtagggacttatacgccctgtacccactattgatacgctacgtggacaataatcgggctcagtggctgaccgagcccaatccttccgctgaggaactcttccgaatggtgggcgagatcttcatctactggagcaagtcacacaatttcaagcgcgaggaacaaaatttcgtcgtgcagaatgagattaataatatgtctttcctgaccgctgataacaaatccaaaatggctaaagccggggacatccagtccggcggatctgatcaggagaggacgaagaagaagaggagaggggatagatactcagtgcagaccagcctgattgtggccacccttaagaaaatgctgcccattgggcttaatatgtgcgccccaactgaccaggacctgattacattagccaaaacaagatacgccctgaaggataccgacgaagaggtacgggagtttctccacaataacctgcatttgcaaggcaaagtcgaggggtctccatcgcttagatggcaaatggcattgtaccgaggcgtgcccggtcgcgaggaggacgcggatgatcctgagaagattgtaagaagggtgcaggaggtgtccgccgttctgtactatctggatcagaccgagcacccatacaagtccaagaaagctgtgtggcacaagctgctatctaaacagaggcgccgggccgttgtcgcatgtttcagaatgacgcccttatacaacctgcccacacatcgcgcttgtaacatgttccttgagtcatataaagccgcttggatcctgactgaggatcactcttttgaggacaggatgattgatgacctgtccaaggcaggagagcaagaggaggaagaagaagaggtcgaggaaaaaaagccagaccccttgcatcaactggttctgcatttttcaagaactgccctgacagaaaaatctaaactggacgaagactatctgtacatggcctatgcggatattatggcgaagagttgtcatctggaagagggtggcgaaaatggcgaggctgaggaggaggtagaggtgtcctttgaggagaagcagatggaaaaacaacggctgctatatcagcaggcccgcctccacacacgcggtgccgctgaaatggtcctgcagatgattagtgcctgcaaaggcgaaacaggagccatggtatcttccaccttaaaattgggtataagtattctcaatggtggaaacgctgaagtgcaacaaaagatgctagattatcttaaggataagaaggaggtaggattctttcagagtatccaggccttgatgcagacttgcagcgtattagacttaaacgctttcgagcgccagaataaagctgaagggctgggaatggtcaatgaggatggcaccgtgggcgagaaagtgatggcggacgatgagttcacccaggacctgttccggtttctccagctgctatgcgagggccataacaacgactttcagaactacctgcgcacccaaaccgggaatacaacaaccatcaacatcattatctgcaccgtcgattatctcctcaggctgcaagagtcaatttcagatttctactggtactattcaggtaaggacgtcatcgaagagcagggcaaaaggaacttcagtaaagcgatgagtgtcgctaagcaagtttttaactctttaaccgagtatattcaaggcccgtgtacagggaaccagcagtccctggcacactcgcgactctgggatgccgtggtgggtttcctgcacgtgtttgctcacatgatgatgaagctcgcccaagactcttcacagatcgagttgttgaaagagttgttggacctccagaaggacatggtggtgatgctcctgtccttgttagaaggtaatgttgtcaatggcatgattgcacgccagatggttgatatgctggtggaaagtagtagtaacgtggagatgattctgaagttcttcgatatgtttcttaaacttaaagacattgtagggagtgaggcgtttcaggactacgtgactgatccgcgggggctcatcagtaaaaaggacttccagaaagccatggatagccaaaaacagttttcggggcccgaaattcagttcttgctgtcctgctcagaagccgacgagaatgagatgattaattgtgaagaattcgccaacagattccaggagccggcgcgggatataggctttaacgtcgcggtactactgacaaacctgagtgagcatgtacctcatgatcccagacttcacaactttctagagctcgccgaaagcatccttgaatacttccgcccttatttgggacggatcgaaatcatgggggcatctcgacggattgaaagaatttactttgagatttccgagaccaaccgggcccagtgggaaatgcctcaggtaaaagaatccaagcggcagtttatcttcgacgtggttaatgagggcggggaggccgaaaaaatggaactcttcgtcagtttttgcgaggacaccatattcgagatgcagatcgctgcgcagatatctgagcctgaaggagaacccgagaccgacgaggacgagggtgccggcgctgctgaggccggagctgaaggtgcagaggaaggagccgcaggcctggaggggacagccgccacagctgccgcaggagccacagcccgcgtggtcgctgctgccgggcgcgctctgcgggggctctcataccggagcctgaggcggcgggtccgcagactgcgcaggcttaccgccagagaggctgccaccgctgttgctgccttgctttgggctgctgtcacccgcgcaggagctgctggtgccggtgcagcggccggcgctttgggattactgtgggggtcactcttcggaggaggactggtagaaggtgccaaaaaggttaccgtcaccgagctgctcgccggcatgcccgatcccactagcgatgaagtgcatggcgaacagcccgcaggacccggtggggacgccgacggggaaggagcctctgagggagctggggatgctgctgagggagctggcgacgaagaggaggccgtgcatgaggcagggcctggcggggccgatggggcggtcgccgttaccgacggaggcccatttcggccagaaggagctggcgggctcggcgatatgggcgatactacgcctgccgagccgcctacaccagaaggcagtcccattcttaagcgtaaacttggcgtagacggggtggaagaggagcttcccccggagccagagccagagccagaacccgagctggagccagaaaaggcggacgctgagaacggcgagaaagaggaagttcccgagccaacacctgaacctcccaagaagcaagccccgcccagtccccctccaaagaaggaggaagctggaggtgagttttggggcgaacttgaggtgcagagggttaagtttctgaattatttgtcaagaaacttttacacacttcgatttctggccctatttctggccttcgccatcaacttcatcttgctattttacaaagtgagcgactcaccacccggcgaggacgacatggagggctccgccgcaggcgacgtgagtggtgcaggatcaggtggatcatcagggtgggggttgggcgccggcgaggaggctgagggggacgaggacgaaaacatggtttattattttctggaggagtcaactggttacatggaacctgcactgagatgcctgtccctgctccatactttggttgcttttctctgcataataggctataactgtctcaaggtgcctctcgtgattttcaagcgcgaaaaagagttggctagaaaactggagttcgatggactgtacatcaccgagcaacccgaggacgatgatgtgaagggccagtgggatcgactggtgcttaacaccccttctttcccgagcaactactgggacaagttcgtgaagaggaaggtgcttgataagcatggagacatttatggacgcgagcgcattgctgaattattgggcatggacctcgctacgctggagattaccgcacacaacgagcggaaacccaaccccccacctggcctgctcacctggctgatgtccatcgatgtcaaataccagatctggaagttcggcgtaattttcacagataactcatttctgtatctcggctggtacatggtgatgtccctgttgggacactataataattttttcttcgccgcacatctgttggatatcgcgatgggcgtcaagacactgcgcacaatccttagctctgtgacccataacggcaagcagctggttatgacggtggggctgcttgcagtggtggtgtacctttataccgtggtggctttcaacttctttagaaaattttacaataaaagtgaggatgaggatgagcccgacatgaaatgtgacgatatgatgacctgctacctgtttcacatgtatgttggggttcgcgccggcggtgggattggtgatgagattgaggatcccgccggagatgaatacgagctgtatagagtcgtatttgacatcacattctttttcttcgtcatcgtgatcctgctcgccatcatccaggggctcattatagatgcatttggggagctgagagatcagcaggaacaggtgaaagaggatatggagaccaagtgtttcatctgtggcatcgggtctgactatttcgatactactccccacggattcgaaacccatacactggaggaacacaacctggctaactacatgttcttcctaatgtacctgattaacaaagatgaaaccgaacatactggccaagaatcttacgtatggaagatgtaccaggaacgttgctgggacttttttcccgcaggggattgcttcagaaaacaatacgaagatcagctgtcttag

SEQ ID NO: 133308 - DNA, 2031 bp, synthetic construct
  misc_feature 1..2031: note = Description of Artificial Sequence: Synthetic coding sequence
  source 1..2031: mol_type = other DNA
atgaaatcaggcccggagattgtaaaggccggccttaggtctttctttgagagtgcatccgaggacatcgagaagatggtcgagaacctgcgcttgggaaaggtctcccaggcccggacccaggttaaaggagtgggtcaaaatctgacgtatactacagtcgcacttttgccggtcctcaccacactcttccagcacattgcgcagcatcagttcggtgacgacgtaatcttggacgacgtgcaagtgagctgctacaggacactgtgttctatatacagtctgggaaccaccaagaacacctatgtggagaagctgagaccagcgctcggagagtgcctcgcccgcctggcagccgccatgcctgtagccttcctggagccccagctgaacgagtacaacgcctgttcagtttatacgacaaagagtcctagggaaagggccatactggggcttcccaactctgttgaggagatgtgcccagacattcctgttctcgagagactaatggccgatatagggggactggctgagtccggcgctaggtacaccgaaatgccccatgtgatcgagataaccctgcctatgctgtgtagttacctgcctagatggtgggagcgcgggccagaggcacctccctccgccctgcccgccggtgcgccccctccatgtacggctgtgacgagcgatcatctgaatagtttactcggaaacattctgaggattattgtcaataacttgggtatcgacgaagcgtcatggatgaagcggctggccgtgttcgcccagccgatcgtgtcgcgtgcccggcctgaattgctccagtctcacttcattcccactatcggaaggttgaggaagcgagcaggtaaggttgtgtcagaagaagagcaactgagactcgaggctaaggccgaggctcaggaaggcgagttgctggtgcgcgacgagtttagcgtgctgtgccgagacctatatgccttgtatcctcttctgatccgctatgtcgataataaccgcgctcagtggttgacagagccaaatccgagtgccgaagaactgttccgcatggtcggcgagattttcatttattggtctaaatctcataattttaaacgggaagagcagaatttcgtggtacaaaatgaaatcaataatatgtcctttctcacggctgacaataagtctaagatggccaaagcaggcgacatacagagcggagggtccgaccaagaacgaactaaaaaaaagaggcgcggtgatagatacagtgtccagacttcattgattgtcgccacgcttaagaaaatgttacccattgggttgaacatgtgtgccccaacggaccaagacttgatcacattagcaaaaacccgttacgcactgaaggacactgatgaggaggtgcgggagttcctgcataacaacctgcacctgcagggcaaagttgagggcagtccttctttacgctggcaaatggccctgtacagaggggtgcccggaagagaagaggacgcagatgatccagaaaaaatcgttcggcgggtgcaggaggtgtccgcagtcctatactacctcgaccagaccgaacatccgtacaagtctaagaaggccgtctggcataagctattatcgaaacagaggagacgggccgtggtggcctgcttccgtatgacgcctctgtacaatctccccactcaccgggcatgtaatatgtttctggaaagctataaggcggcatggattctgactgaagaccatagttttgaggacagaatgatagacgatctaagtaaagctggagagcaagaggaagaagaagaggaagtggaagagaaaaagcccgatcctctgcatcaacttgtgttgcacttctccaggactgccctgacagagaaatccaaactggacgaggactacttatacatggcgtatgccgacatcatggccaagtcatgccacctggaggagggtggggagaacggggaagcagaagaggaagtcgaggtgagttttgaggaaaagcaatag

SEQ ID NO: 133309 - DNA, 14922 bp, synthetic construct
  misc_feature 1..14922: note = Description of Artificial Sequence: Synthetic coding sequence
  source 1..14922: mol_type = other DNA
ctgggcccaagaagcagtagcaataagctgtcaaataagaaaatgatgaaatggttctgctcagctccccagccttcgactaaaaataaccgatcttatgcctggcaacagaaggacctcgctaccgactttgtgtcatggtctcctctacctattccaaggatgtgtcctcagacaagcccatcagcaccgttatgttggtcctcgccgtctctgtcaggaagatgtcgtaggtgttggctgacgccatggcggaatcagaagggccagttggatatcattaagtggagttttggactaaagaccgctcagggcggtgggcatcgcactctcctctacgggcatgccattctcctacggcatagctactcgggaatgtacctgtgctgtctttccacaagcaggtcttctaccgacaagctcgcattcgacgtggggttgcaggaagacacaaccggcgaagcatgctggtggacaatccacccggctagcaagcaaagatcagagggtgagaaggtgagggtgggagacgatctcattttagtgagtgtatccagcgagagatacctgcatctgtcttatggaaacggttccctccacgttgacgccgcattccaacaaacactctggagcgtggccccaattagttcaggctcggaggcagcccagggctacttaatcggtggagatgtgctgcgactgctgcacggacatatggacgaatgcttgaccgtgccatcaggagagcacggcgaggagcagcgtcgaacggttcactacgaggggggggcagtgtcagttcacgctcggtctctctggcggctggagactcttcgcgtagcgtggtctggtagtcacataaggtgggggcaacccttccgacttcggcacgtgacaactgggaagtacctaagtctgatggaagataaaaaccttttgttgatggacaaggaaaaggctgatgtcaaatctacagcttttacgtttaggagttctaaggagaaattggacgtcggtgttcggaaggaagtggacggaatggggacaagtgaaattaagtatggagacagcgtttgctacatacagcatgttgacaccggactttggctgacctatcagtccgtcgatgtgaaatccgtgcgaatgggcagcattcagcgcaaggctatcatgcaccacgaaggccacatggatgatggcatttcactgtctagaagtcaacacgaggagtcccggaccgccagggtcattaggagcactgtattccttttcaatagattcatcaggggcttggatgctctgtccaagaaggctaaggcctcaacagttgatctccccattgagtcagtgtcgttgtcgctacaggatctgataggctatttccaccctccggacgagcatctggagcatgaggacaagcagaatcggctccgcgcccttaaaaacaggcagaacctattccaggaagagggaatgataaatttggtcctggaatgcatcgatcgtctgcacgtctactccagcgccgctcattttgctgatgttgccggccgcgaggccggcgaatcatggaaaagcattctcaatagcttatatgagcttctggcagctttaattcgtggtaatcgcaagaattgtgcccaatttagcggatctcttgattggctgattagtagactagagaggctggaagcatctagtggtattctcgaagtgctccattgcgtgctggtggagtcacctgaagcacttaatatcatcaaagaaggccacattaaatctattattagccttttggacaagcacggtcgaaaccataaggttcttgacgtcctttgttctctgtgcgtctgccatggagttgccgtgcggagtaatcaacaccttatctgcgataatttattaccaggtcgggatctgctactgcagactagactagttaaccacgtgtcgagcatgagaccgaacatttttctgggtgtgagtgaaggctccgcacagtacaaaaaatggtattatgagcttatggttgaccatacggagcccttcgtaaccgccgaggccactcatcttcgtgtcggctgggcgagcactgaggggtatagcccctaccctggagggggagaggaatggggcgggaatggcgtaggagatgacctgttttcatacggcttcgacggattgcacctctggtccggctgcatcgcccgtacagtctcgagtcctaatcagcatctccttaggactgacgacgtcatttcttgttgcttggatcttagtgcaccaagcattagtttccgaatcaatggccagcctgtccagggtatgttcgagaatttcaacattgatggtctttttttcccagtggtgtccttctctgctgggattaaggtgaggtttttgctggggggccgacacggcgaattcaaatttctcccccccccgggttacgcaccctgctatgaagccgtcctccccaaggagaaactcaaagtggaacacagccgcgaatacaagcaggagagaacatacactagagatctgttgggccccactgttagtttaacccaggccgccttcactccaatcccagtggacacatcacagatcgtgttgcctccacacctggaacgaatccgggaaaagttggccgagaacattcatgaactgtgggtgatgaacaagatcgaactgggatggcagtatggccccgtacgggacgacaacaaaagacagcacccctgtctggtggaattctccaagcttcccgaacaggaaagaaactataatcttcaaatgtcattggagactctgaagacactgctggccctcggttgtcacgttgggatctccgacgagcacgcagaggacaaggtgaaaaaaatgaaactcccaaaaaattatcagcttacgagcgggtacaaacccgccccaatggacctgtctttcatcaagttgacacctagccaggaggccatggttgataagcttgccgaaaatgcccacaatgtctgggcccgagacagaataaggcagggatggacttacggaatccagcaagatgtaaagaatcgaaggaatccaaggttggtcccctatacactgctcgacgacagaaccaagaagtcaaacaaagattccttgcgggaggccgtgcgcacactgctgggatacgggtataatcttgaggcccctgatcaggaccacgctgctagagcggaggtgtgttcaggtacaggagagcggtttcggattttccgtgctgaaaagacctatgcagtcaaggccggccgatggtactttgagttcgaaacagttacggctggcgacatgcgcgtgggctggtctcgtcctggatgccaacctgaccaggagcttggttctgatgagcgcgcattcgccttcgacggctttaaggctcaacgctggcatcaggggaatgagcactatgggcgaagttggcaagctggagacgtggtggggtgcatggtggacatgaacgaacataccatgatgttcacgttgaacggagaaattctccttgatgacagcggttccgagctggcctttaaggattttgatgtaggcgatggtttcatccctgtatgtagcctgggggtcgctcaggtgggacgaatgaattttggaaaggacgtgtccacattgaaatatttcacaatctgtggattgcaagagggttacgagccatttgccgttaacactaacagagacatcacaatgtggctctctaagaggctgccccaatttctgcaagttccctctaaccacgagcatatagaggtgaccaggatcgacggaactattgactctagtccctgcctcaaagtaacccagaaatcattcggcagtcagaacagcaataccgatattatgttttatcggctctcaatgcctatcgagtgcgctgaggtgttcagcaaaacggtggccggaggactgccgggcgcaggcttgttcggccccaaaaatgacctggaagactatgatgctgactcagatttcgaagttctgatgaaaaccgcacacggacatttggttcccgaccgagtggacaaagacaaagaagcaaccaaaccagaattcaacaaccacaaggactatgcccaagagaagccatctagactaaaacaacgatttctcctgagaagaactaagcctgactacagcacgtcacattccgccagactaacggaggacgtgctcgctgacgacagggatgattacgatttccttatgcagacatccacgtactactatagcgtgcggatctttcctggccaggaacccgccaacgtttgggtgggttggatcacttcggatttccaccagtatgatactggatttgatctcgacagggtccgcacggttaccgtcacactaggagacgaaaaaggcaaggtgcacgagagcataaagcgatcaaattgttacatggtttgtgcgggagaaagcatgtccccaggtcaaggcaggaacaacaatgggctagaaattggatgtgtcgtggacgccgccagcgggctgctaacctttatcgccaatggaaaggaactgtccacatattatcaagtggagccgtcaaccaagctgttcccagccgtgttcgcccaagctacatcacccaacgtgttccagttcgaattaggcagaatcaaaaatgtgatgcctctctccgccggcctgttcaaaagcgaacacaaaaaccccgtgccgcagtgtcccccccgcctccacgtccagttcctgagccatgtgctttggtcacgaatgcccaaccagtttctcaaagttgacgtgtctcgcatctccgaacgccaggggtggctggttcaatgccttgaccccctgcagttcatgtcattacatatccccgaggagaatcgaagcgtggacattctggagctcactgaacaggaggaactcctgaaattccattaccatacgcttaggctttactccgcagtgtgtgcactaggtaatcaccgggttgcacacgccttgtgcagccacgtggatgaaccccagttgctgtatgcgattgaaaataaatatatgcctggcctgctgcgggctggctattatgacttacttattgacatacatctgtctagctatgccactgctagacttatgatgaacaatgagtatatcgtccccatgacagaggagacaaagtccattactctttttcctgacgaaaacaagaagcacgggctccccggaattggtttgtctacctctcttcgacctcgcatgcaatttagcagcccttccttcgtctcaattagtaacgagtgctaccaatattctcctgagtttcccctggacatcttaaaatccaaaactatccagatgttgaccgaggcagtgaaagaaggcagcctgcacgcacgtgaccccgttggcggaacaacagagttcctattcgtgcccctgatcaagctgttctatactctgttgatcatggggatcttccataacgaagacttaaaacacattttgcaactcatagagccttccgtgtttaaagaagccgctactcctgaggaggagtctgacacattggaaaaggaactgtctgtggatgacgccaaactacaaggcgctggcgaagaggaagctaagggagggaagagacctaaggaggggctgctccaaatgaagctgcccgaacctgtgaagctgcagatgtgcctgctactgcagtatctttgtgactgccaagttaggcatcggattgaggctatagtcgctttttccgacgacttcgtggcgaagctccaggataatcagaggtttaggtacaacgaagttatgcaggccttaaatatgtctgctgctctcactgcaaggaagactaaagaattcagatctcccccccaggagcagatcaacatgctgctgaacttcaaagatgacaagagtgaatgtccatgcccggaagagatccgggaccagctattggatttccacgaggatctcatgacacattgtggaattgagctggatgaggacggaagcctggatgggaactcagatctcactattagggggaggcttctgtctttggtggagaaggtgacctatctcaagaagaagcaggcagaaaagccggtggaatcagacagcaaaaagtcatccaccttgcaacagctgattagcgagacaatggtcaggtgggcacaagaaagtgtgattgaggaccccgaactcgttcgtgcaatgtttgtgctgttacacaggcagtatgatgggataggcggcctggtgcgcgctttaccaaaaacttatactatcaatggggtttctgtggaggataccataaaccttctggccagtctggggcagataagaagcctgctgtcagtgagaatgggaaaggaggaggaaaagttgatgataaggggactgggcgacataatgaataacaaggtgttctatcaacatcccaatcttatgcgagcgctgggtatgcatgaaactgtgatggaggtgatggtcaatgtgttggggggaggagagtctaaggagattaccttcccaaagatggtagcaaattgctgtcgttttctgtgctacttttgtagaatctctcgacagaatcagaaagcgatgttcgatcacctgtcctatctgctggaaaatagttccgtgggcctggctagtccagcgatgcgcggctcaaccccactggacgttgccgccgcgagcgtgatggataacaatgagctggccctggcgctgagggaacccgaccttgagaaggtggtgcgatatctcgccggctgcgggcttcagagctgtcaaatgctggtgagtaaaggttaccccgatattgggtggaacccagttgaaggagagcgatatctagatttcttgcgcttcgccgtgttctgtaacggggagagcgtggaagagaacgctaacgtcgtagtgagactgctgattcgaagaccagagtgtttcggccctgcattaagaggtgaggggggaaacggtctgctcgcagccatggaagaagcaattaagatagcagaggacccgagcagagatggaccctctcctaactcagggagcagcaagactttagataccgaggaggaagaggatgacacaatacacatgggtaacgccattatgactttttactctgctttaattgacctgcttggccgatgcgcacccgagatgcatctcattcatgctggcaagggggaggctataaggatcaggagtatcctgcgctcactgattccactgggagatctcgtgggtgtcatctcgatagcctttcagatgcccacaattgccaaggacggcaacgtggtcgaacccgatatgtccgccggcttctgcccagaccacaaggcagccatggtgctattcctggacagagtgtatggaattgaggttcaggacttcttactgcacttgctcgaagtggggttcttgcccgatttgcgcgccgccgctagcttagataccgccgcactgtctgcaactgacatggcactagcccttaataggtacctctgtaccgcagtgctgcccctccttacacggtgtgcccctctattcgccggtacagaacaccatgcatcactcatcgacagcttgctccatacagtctaccgcctaagcaagggctgcagcctcactaaagcccaaagagactccattgaagtctgtctgctgtcaatttgcggtcagttgaggccatcaatgatgcagcacttgttaagaaggctcgtctttgatgtgcctcttctaaacgagcacgccaagatgcctctgaaactgcttactaaccactacgagagatgttggaaatactactgtctcccaggcgggtggggcaacttcggagccgcatccgaggaagagctgcacttgtcgaggaaacttttttgggggattttcgatgcgctcagccagaagaaatatgagcaagaactgtttaagctagctcttccatgtttgtccgcagtagccggtgccctgccccctgactatatggagagcaactacgtctccatgatggagaaacagtctagtatggatagcgaaggcaactttaatcctcagcccgtggatactagtaatatcacaatccccgaaaaactggaatactttataaataagtatgccgagcactcccacgataagtggtccatggataagctggccaacggttggatttacggcgagatctattccgactcctcaaaggtccagcctctcatgaagccctataagctgttgtcagagaaggagaaggaaatctataggtggccaattaaggaatccttaaagaccatgctggcatggggatggcgaatcgagcgtacgagggagggggactccatggctctgtataataggactcgtcgcatctcccagacctctcaggtgtcagtggatgccgctcacggctacagtcccagggcaatcgatatgtcgaacgtcaccctatcacgggacctccacgctatggcggaaatgatggcggaaaattaccataacatatgggctaagaaaaaaaaaatggagctggaaagtaaggggggtggtaatcaccccctcctggtcccatacgataccttgactgccaaggaaaaggctaaggatagagagaaagcacaggatatactaaagttcctgcagattaatggttacgctgtgtcccggggctttaaagacttggagcttgacacgccttctattgaaaagcgctttgcctattcgttcctacaacagctgatcagatacgttgacgaggcccaccagtatatacttgagttcgacggagggtccagagggaagggagaacattttccctacgaacaggaaatcaagttcttcgccaaggtcgtacttccactcatcgaccaatacttcaagaatcatcgcctgtattttctgtctgcggccagcagacccctgtgttccggcggtcacgccagcaacaaggaaaaagaaatggttacctcattgttttgcaaattaggcgtgctagtgaggcacagaatctccttgttcggcaacgatgccacctccatcgtgaattgcttacatatcttaggacagaccctggacgcgaggactgtgatgaagacaggtcttgaaagtgttaaatccgccctgcgcgcgtttctggacaatgcagccgaggatctcgagaaaaccatggagaatctgaaacagggacagttcacgcacactaggaatcagccgaagggagtaactcaaatcattaattacaccactgttgccctgttgcctatgctctccagtttgttcgagcacattgggcagcaccagtttggcgaggacttaatattggaagatgtgcaggtcagttgttacagaattttaacctcactttacgcattgggcactagcaaatctatatacgtggaaaggcagagatcggccctaggagagtgcctggcagcattcgcaggcgcttttccagtggcctttctggagactcacctggacaagcacaacatctattccatttacaataccaagtcaagtagagagcgggcagcgctctccctccccaccaatgtcgaggatgtgtgtccaaatattcccagcttggaaaagctcatggaggaaattgtggagctggccgagtcaggcattcggtacacccagatgcctcatgtgatggaagtcatcctgccaatgctttgtagctacatgtcccggtggtgggaacacggaccggagaacaatccagagagagctgaaatgtgttgtaccgccctgaatagcgagcacatgaacacattgttagggaacattctcaagataatttataataatctgggcatcgacgagggggcctggatgaagagacttgctgtgttctcccagcccataattaacaaggtcaagccacagttgcttaaaactcactttttgcccctcatggagaagcttaagaagaaggcagccacggtcgtttctgaggaggaccacttgaaagccgaggcgcgcggagatatgagcgaagctgagctgttgatcctcgacgagttcacaacccttgctagagacttgtatgcgttctacccattgctgattcgtttcgtcgactataaccgcgccaaatggcttaaggagccaaaccccgaagctgaggagctattcagaatggtggccgaggtatttatttactggtctaagtcacacaactttaagagagaagagcagaattttgtggtccagaatgagatcaataatatgtcatttcttataactgacactaagtcaaagatgtccaaggccgctgtgtccgatcaagaaagaaaaaaaatgaagcggaaaggcgaccggtacagcatgcagacctccctgatcgtggctgcactgaaacggttgcttcctatcgggcttaacatttgcgcccccggcgaccaggagttaatcgctttggctaagaacaggttttccctgaaagacactgaggacgaggtcagagatatcattcgctctaacatccacctgcaggggaagctcgaagacccggctatcagatggcagatggcgctgtataaagatttgcctaacagaaccgacgatacatccgatcccgagaagactgtggaaagagtcctggacatcgccaacgtcctgtttcacttagagcagaagtcgaagcgggtggggaggcgccattattgcctcgtcgaacacccacagcgatcgaagaaggcggtgtggcataagttactatcgaagcagcgcaagagagcagtggttgcctgttttcgcatggcacccctgtataacctcccaagacacagggcagtaaatctgtttctccaggggtatgagaagtcttggatcgagacagaagagcactacttcgaagataagctcatcgaagaccttgccaagccaggcgccgagccaccagaggaagatgagggaacgaaacgtgtcgaccccctgcatcagttgattctgttattttcacgcacagcattgacggagaagtgcaagctggaagaggacttcctgtacatggcatatgccgacatcatggctaagtcatgccatgatgaagaggacgacgacggcgaggaggaagtgaagagctttgaagtcacaggctctcagcggagcaaggaaaaggaaatggagaagcagaaactgctgtaccagcaggcaagactgcacgaccgaggggcagccgagatggtgctgcaaaccatctctgcctccaaaggggagaccggccctatggttgccgccacattaaagctgggaatcgctatacttaatggaggaaactctacagtacagcagaagatgctggactatctcaaggagaaaaaggacgtcggattcttccagagcctggccggtctaatgcagtcatgttcggtgctcgacttgaatgcatttgagcgacagaataaggctgaaggactgggcatggtcacggaggagggaagcggggaaaaagtgttgcaagatgacgagtttacatgcgatctgtttagatttctgcagcttctctgcgaagggcacaactcggactttcagaactaccttcgcactcagaccgggaataacacaacggtcaacatcattatctcaaccgtcgactacttattaagggtgcaggagtcgataagtgacttttattggtactattccggtaaagatgtgatcgacgaacagggccaacgcaacttttcaaaagcaatccaggttgctaaacaggtgttcaacactttaactgaatacattcagggaccatgcacaggtaaccagcaaagcctggcacattcaaggctatgggacgcggtggtaggattcttgcatgtgttcgcccacatgcagatgaaactctcccaagactcttcccagatcgaactcttaaaagaactgatggacctgcagaaggacatggtggtaatgctcttgtccatgctcgagggtaatgtagtcaacgggacaatcggcaagcagatggtcgatatgctggtggagtcatccaacaacgtggaaatgattcttaagttttttgacatgttcttgaagctcaaggatctgacatcctctgacacctttaaggaatacgatcccgacggtaaaggagtcatcagtaagcgtgattttcataaggccatggaatctcacaaacattacacccagagcgagacagaatttctcctgtcctgtgcagaaacggacgaaaacgagacactggactacgaggagttcgtgaagcgcttccacgagccggcgaaggatatcggatttaacgtggccgtgttactcaccaacttgagcgaacatatgcccaatgatacgcggttacagactttcctggagcttgctgagagcgtgctgaattacttccagccattcctggggaggattgaaattatgggctctgcaaagagaatcgagcgggtatatttcgaaataagtgagtcctcacgcacacagtgggagaagcctcaggttaaggaatctaaacgacagtttatcttcgacgtggtcaacgaagggggagaaaaggagaagatggaactgttcgtgaacttttgtgaagacacgatttttgagatgcaactggcagcccagattagcgagtctgatttgaatgaaagatctgccaacaaagaagagtcagagaaggaaagaccagaagagcagggaccgcgtatggccttcttcagtattctaaccgtcaggtctgccctgtttgcgctgagatacaacatccttacactgatgaggatgctgtctctgaagtccctcaaaaagcaaatgaagaaggtgaagaagatgacggtaaaagatatggtgactgctttcttctcatcttattggtccatcttcatgacacttctccacttcgtcgcttctgtgtttaggggctttttccgcatcatttgctctctgttgttaggaggctctctggtggagggtgcaaagaaaataaaggtggcggaactccttgccaacatgcccgatccaacacaggacgaggtgagaggcgatggggaagagggagaaagaaagcctcttgaggccgctctaccttcagaagacttgacggatctgaaagaactgactgaggagagtgacttgcttagcgacatcttcggactcgacttgaaacgggagggggggcaatataagttaatcccccataatccaaacgccgggctctctgacctcatgtctaatcccgtgccaatgcctgaagtgcaggagaaattccaggaacagaaggccaaggaggaggagaaggaggaaaaagaggaaacgaaatccgagcctgagaaagcagagggcgaggacggcgagaaggaagaaaaggccaaagaagacaagggcaaacagaagttgcgccagcttcacacccatcggtacggggaacctgaggtccccgagtccgcattctggaaaaagattatcgcataccaacagaagctgctgaattacttcgcccgtaacttctacaacatgcgtatgttagctctgttcgtggcgttcgcaatcaacttcatcttgctattttacaaggtctcaacaagttcagtagttgaaggtaaggaactccctaccagaagctcctctgagaacgccaaagtaacaagcctagattccagcagccatagaatcattgccgttcactatgtgctggaggaaagctcgggctatatggagccaacactaaggattctggccattttacacactgtgatatcttttttctgcatcattggctattactgccttaaggtcccactagtcatcttcaagcgggagaaagaggtggcgcgcaagctcgagtttgatggactgtacataaccgagcaacccagtgaagacgacattaagggacaatgggacaggttggtgatcaacacacagagtttccccaataattattgggacaaattcgttaagcgcaaggtgatggacaagtacggggaattctacggccgagaccgcatatccgaattactaggaatggataaggcagcactcgacttttctgacgcccgcgaaaaaaaaaaacccaagaaggactctagcttgtcagcagtactgaactcgattgacgtaaagtatcaaatgtggaaactcggagttgtgttcacggataactcgttcctgtatctggcatggtatatgaccatgtctgtgctgggccattacaacaactttttttttgccgctcatctgctagatattgcgatgggctttaaaaccctgcgcaccatactaagttcagtgacccacaacggcaagcagctggttctgacggttggcttgctcgccgtcgttgtgtacctctatacagtggtggcctttaatttctttcggaagttctacaacaaatcggaagatggagacaccccagacatgaagtgtgacgacatgcttacgtgttacatgttccatatgtacgtgggagtgcgcgccggcggtggcatcggcgacgaaattgaagacccagccggagacgaatacgagatctacagaatcatcttcgatataacatttttcttcttcgtgatcgttattctgctggccatcatccaaggtctgataatcgacgcattcggagaacttcgggaccaacaggagcaggttaaagaggacatggagacaaaatgctttatctgcgggattgggaatgactacttcgatactgtccctcacggatttgaaacccacaccctgcaagaacacaatctggcaaattacctctttttcttaatgtatctgatcaataaagacgaaacagaacatactggacaggagtcctatgtgtggaagatgtatcaagaacgctgttgggagttctttccggctggcgattgcttccgcaagcaatacgaggaccaactgaattag

SEQ ID NO: 133310 - DNA, 14904 bp, synthetic construct
  misc_feature 1..14904: note = Description of Artificial Sequence: Synthetic coding sequence
  source 1..14904: mol_type = other DNA
atggccgatggaggggagggcgaggacgagattcaatttttgagaacagatgacgaagtggtgttgcagtgcacagccactattcataaagagcagcagaagctatgcctagccgccgaaggcttcggcaatcggctgtgttttctagagtctacttcaaacagcaaaaatgtgccgcccgatctgtccatatgtactttcgtgctcgagcaatctctctccgttcgggctttgcaggaaatgttggcaaatactgtagaaaaatctgaaggacaggttgatgtagaaaaatggaaatttatgatgaaaacagcacaaggcggaggacatagaacactgttatatggacacgcaatcttgctgcgacattcctactctggcatgtatctttgctgcttatccaccagccggtcttctactgacaaactggcctttgacgttgggctacaggaggataccaccggggaggcatgctggtggacgatacatcccgcttccaagcagagatctgaaggcgaaaaagtgcgagtaggtgatgacctcattttggtcagtgtgagtagtgagcggtatctccacctctcgtacggtaatggatccctccacgtcgacgccgccttccagcagacactctggagtgtggcaccaatcagcagtggttctgaagcagctcagggctatctgatcggcggagacgtcctccggctgcttcacggacacatggatgagtgcctcactgtgccctccggcgaacacggggaggagcagcgccggacagtgcactatgaggggggcgctgtgtcagtgcacgcaagatcactttggcgcctagagactctcagggtggcatggtcaggatcgcatattaggtgggggcagccgttcagacttcgccatgtcacgacaggaaaatacctctccctgatggaggataaaaacttattgttaatggataaagaaaaagccgacgtcaagtcgacggcttttacctttcggtctagtaaagagaagctggacgtgggtgtgcgaaaggaagttgacggtatggggacctctgagattaagtacggggattcagtgtgttacatccagcatgttgatacgggtctctggctgacctaccagtccgttgacgttaagtccgtgcgaatgggctcaattcagcgaaaggcaatcatgcaccatgaaggccacatggacgacggcatctcactgagcagatcacaacacgaggagagcaggacagctcgcgtgatcaggagcactgtctttctctttaatagattcattcgcggtctagatgcactgagcaagaaagctaaggcaagcaccgtggaccttccaatcgagtctgtgagcctcagcttgcaagacctgattggatacttccatcctccagacgaacacttggaacacgaagacaagcagaatcgccttagagcccttaaaaaccgacagaacctctttcaggaggagggcatgataaaccttgtattggaatgtatagatcgcctgcatgtctacagctccgcagcacatttcgcagatgttgccggccgagaagctggcgagtcttggaaaagcatattgaattcgctgtacgaactcctggctgccctgattcgggggaaccgtaaaaactgtgcacagttcagcggatcccttgattggcttataagccgcctcgagcgcctggaggcttcatcagggattctggaagttctgcattgcgtgctcgtcgaatcccccgaagccttaaacatcatcaaggaaggacatatcaagtctataatttcactgctagataagcacggaaggaatcacaaggtcctcgatgttctttgtagcttgtgcgtgtgtcacggtgtggctgttcgctcaaaccagcatctgatatgcgataatctccttcctggcagggacctcctattgcagactagactcgttaaccacgtgtctagcatgcgtcccaacatttttctcggcgtgtccgaagggtcggcccaatacaagaagtggtattacgaacttatggtagaccacaccgaaccgtttgtaacagcagaggctactcatctcagagtgggctgggcaagcactgaggggtacagtccttatccaggcgggggagaggagtggggaggaaatggagttggcgacgacctgtttagctatggctttgatggcctccatttatggagcggctgtattgcccgcactgtgtcttctccaaaccagcaccttctgcggacagatgatgtgataagctgttgcctggatctcagtgcaccaagtatctcctttaggataaacgggcagcccgtccagggaatgtttgaaaacttcaatattgatggcctgttctttcccgtggtaagcttcagcgccggtatcaaagttcggtttcttctcgggggtagacacggggaatttaaattcttaccaccacctgggtacgctccctgctacgaagctgtccttccaaaggagaagctgaaggtggaacactcccgtgagtacaagcaggaacgcacgtacactagggatcttctggggccaacagtgagcttaacccaggcagccttcacacctatacctgtagatacgagtcagattgttctaccaccccacctcgagaggattcgcgagaaacttgccgagaacattcacgaactgtgggtcatgaataagatagagctggggtggcagtacggacccgtgcgggatgataataaacgacagcatccatgtctggtggagttcagtaaattgcccgaacaagaaaggaactataatttgcagatgtctctggaaaccctgaagacgctgttggccttggggtgccatgtgggcattagcgatgagcacgctgaagacaaagtaaagaagatgaagctgcctaagaattatcaattgacaagcggttataagccggccccaatggatctgagctttattaaactcacgccgagtcaggaggccatggtggacaaactcgcggagaatgcccacaatgtttgggcccgggaccggatccgccagggttggacttacggtatccagcaagacgtgaaaaaccggcgaaatccccgtctggttccttacacactactggatgatcgaacgaaaaaaagcaataaggattctctgcgtgaagccgttcgcactctcctgggttacggatacaacctcgaggctccagatcaagatcatgctgctcgtgcggaagtgtgttccgggaccggcgaacggttcaggatcttcagagctgagaaaacttacgccgttaaggccggcagatggtacttcgagttcgaaactgtcactgccggcgatatgcgcgtgggctggtcccgacccggctgccagcccgaccaggaactggggagcgatgaaagagcatttgcatttgacggctttaaagcccagcggtggcatcagggcaacgagcactatggcaggtcatggcaggctggcgatgtagtaggatgcatggtggacatgaacgagcatactatgatgttcacactgaatggtgagatcctgctggatgacagtgggtctgagttagcgtttaaggattttgatgtgggcgatggattcatccccgtatgctcccttggggtggcccaggtcggcagaatgaactttggaaaggatgtcagcactctgaagtactttaccatctgtgggctccaggaggggtatgagccttttgctgtgaataccaatcgcgacatcactatgtggctgtccaaacggttgccccagtttttgcaagttccaagtaatcatgaacatatagaggtgacgcgcatcgatggaactatcgattcctccccgtgtttgaaggtgacccagaagagctttggctcgcagaactcgaatacggatataatgttttacaggctgtctatgcccattgagtgtgcggaggtgttctctaaaacagtcgctgggggcctgcctggggctggattgttcggccctaaaaacgacctggaagattatgacgcggacagcgacttcgaagttttgatgaaaacggcccacggccatctagtgcccgatagggtagataaggacaaggaagctactaaacctgaattcaacaaccacaaggattatgcacaggaaaagccctctcgtctgaagcagcgtttccttctgagacggacaaaacccgattattcaacaagccactcggcacgcttgaccgaggacgttctggctgatgaccgagacgattacgatttcctgatgcagacctcaacttactattacagtgtcagaatatttcccgggcaagaaccagctaacgtgtgggtggggtggattacctctgacttccaccagtacgataccggttttgatttggatcgtgtgcggacagtgaccgtgaccctcggagatgagaaaggcaaagtgcatgaatccattaaacggtccaattgctacatggtgtgtgcaggcgagagtatgtccccaggtcagggcagaaataacaatgggttggagatcgggtgtgtggtcgacgcagcatccgggctgttaacgttcatcgcgaatgggaaggaattaagcacctattatcaggtggaacctagcaccaagctttttcccgctgtgtttgcacaagctacctctccaaacgtgttccagtttgagcttggaagaatcaagaacgttatgcctctctcggcgggactcttcaagagcgaacacaaaaatcctgtcccgcaatgccctccacgactacacgtacagtttttgagccacgtcctgtggagccgcatgcctaaccagtttttgaaagtggatgtaagtagaatttcggagaggcaaggatggctggtgcagtgtctcgatccattgcaattcatgtccctccacattccagaggagaaccggtctgtggacatcctcgaattgacggagcaggaggagctgcttaagttccactaccatacgcttaggttgtactccgccgtgtgtgctctaggaaaccacagggttgctcacgccctgtgtagtcacgttgacgagcctcagctactctatgcaattgagaacaaatatatgcccggactcctacgagccggctattacgatctcctgattgatattcacctctcctcttacgcaacagcacggctaatgatgaataacgagtatattgttccaatgaccgaggaaaccaagtccattactttattccctgatgagaataagaaacatggcctcccaggcatcggcctgtcaacttccctgcgtccaaggatgcagttctcttccccttcttttgtgagtatatcaaatgaatgctaccaatatagccccgagtttccattagacatcctcaagtcgaaaacaattcagatgctgacagaggcagtgaaggagggtagcctgcacgcgcgcgatcctgtaggaggaacaacagagtttttattcgtgccccttattaagctcttctacaccctgctcatcatgggcattttccataacgaggatctgaaacacatccttcagttgattgagccttctgtgttcaaagaagctgctacccctgaggaagaatctgatacattggagaaggaactgtctgtggatgacgcaaaattacaaggagccggagaagaggaggctaagggaggcaagcgcccaaaggaagggttgctccaaatgaagctgccagaacctgtgaagctgcaaatgtgcctgctcttgcagtacctgtgcgactgtcaggtgaggcaccgcatcgaggccatcgtggctttcagtgacgatttcgttgctaagctccaggacaaccagagattccgctacaacgaggtgatgcaagctctcaatatgtcagctgcgttgactgcccgtaagacaaaggaattcagaagcccaccccaggaacagataaatatgcttctgaattttaaggacgataagtcggagtgtccttgcccagaagaaatcagagaccagctcttggactttcacgaagacctgatgacgcactgcgggatcgaactcgacgaggacggatctctggacgggaattcagacctgaccattcgcggaagactcctgagcttagtggagaaggtcacgtatctcaaaaagaagcaagccgagaagcccgtggagagcgattcaaagaaaagctccacgctacaacagctcatatcggagacaatggtccgatgggcacaggaaagcgtcatcgaggacccagagcttgtgcgggctatgttcgtcttgctacacaggcagtatgacggcattgggggcttggtccgtgccctcccgaaaacgtataccatcaacggtgtatcagttgaggatactatcaatctcttggcctccctgggacagatcaggtcgctgctgtccgtgcgcatgggaaaggaagaagagaagctaatgatcagaggcctgggagacattatgaataataaagtgttctatcaacacccaaaccttatgagggctctcggcatgcatgaaaccgtgatggaggtaatggtgaatgtgttgggcggaggggagtccaaagaaatcacttttcccaagatggtggcaaattgttgcagattcctgtgttatttttgcaggatttctaggcagaaccagaaggcaatgttcgaccatctgtcatacctattggaaaatagctctgtgggcctcgccagccctgcaatgcgaggctctacccctcttgatgtcgccgctgcttctgtgatggacaacaatgagctcgctctggcactgcgcgagcccgacctggaaaaggtggtccgctatcttgcaggttgtgggttacagagctgtcagatgctggtatcaaaggggtatcccgacatcggctggaaccccgtagaaggggaacgttacctggattttttgcgttttgctgtcttctgcaatggagagtcagtcgaggagaatgcaaatgtggtcgtgcgcttactaatcagacgtcctgagtgctttgggcccgcgttgaggggcgaaggggggaacgggctcctggctgccatggaggaagccatcaagattgcggaggatccttcccgggacgggccaagtcccaacagcggctccagcaagactttagacacagaggaggaagaagacgacacaattcacatgggcaacgccattatgacattctacagcgccttaattgacctgctcgggaggtgcgctcctgagatgcacctgattcatgctggcaagggagaagccatccgaatccgaagcatcctcagaagcctcatccccctgggtgatttggtcggtgtgatatccatcgcttttcagatgcccactatcgccaaagatggaaacgtggttgagcctgacatgtctgcaggcttctgtcctgatcataaggccgctatggttctgtttttggaccgggtatatggtattgaggttcaggatttcctgctgcatctcctcgaggtagggttcctgcctgatctgcgagcagcagcctctctcgacacagccgcactatccgcaactgatatggcgttggccctcaatagatacctttgtactgccgtgctgccccttttgactaggtgcgcaccactgtttgctgggaccgaacaccatgcctccctaattgattccctcctgcacactgtgtacagattgtcgaagggctgttctctcaccaaggcacagagggattcaatcgaagtgtgtttattgtctatctgcggacagttgagaccaagtatgatgcagcacctgcttcgtcgtctcgtattcgatgttccgcttctgaacgaacacgcgaagatgcccctgaagctgctgacgaaccattatgagaggtgctggaagtactactgcctgcccggcggctggggcaacttcggggctgcctccgaagaagagctacacctcagtcgcaagctgttttgggggatctttgatgcactgagtcagaagaaatacgaacaggagctttttaaactcgctctgccatgcctttccgcagttgccggagccctgccccctgactatatggaatcaaactacgtgagcatgatggagaagcagagcagcatggactctgaagggaattttaatccccagcccgttgatacatcaaacatcaccattccagagaagttagaatactttatcaacaaatatgccgagcactctcacgataagtggtccatggacaaactggctaacgggtggatctacggcgaaatctactctgacagcagcaaggtgcagccactcatgaagccttacaaactgttgtcagagaaagaaaaggagatctatcgatggcccatcaaggagagcctgaagactatgctggcctggggttggaggattgagcgaaccagggaaggtgatagtatggcactgtataaccgaacacgtagaatcagtcagacttcccaggtgagtgtggacgcagcgcatggatatagtcctcgagcaatcgatatgtccaatgtcacgctctctcgagacctccatgccatggccgagatgatggccgagaactatcacaacatctgggcaaaaaagaaaaagatggaacttgagtccaaggggggcggtaatcaccccttgcttgtgccttacgacacgctgactgccaaggaaaaggccaaagacagggagaaggctcaggatattctcaagttcctgcagataaatggctacgccgtttccagaggcttcaaagaccttgaactcgatacgccgtctattgagaagcgctttgcttactccttccttcagcaattgattcggtacgtcgacgaagcacaccaatacattctggagtttgacggtggcagccgagggaagggtgaacactttccgtacgagcaagagatcaagttctttgcaaaggtggtgcttccacttatcgatcagtacttcaagaatcaccgactgtatttcctcagtgccgccagtaggccactctgcagcggcgggcatgcatccaataaagagaaggagatggtaacctccctcttttgtaagctcggagtcctggtgaggcatcgtatctccctgttcggcaacgatgctacaagcatcgttaactgtttgcatatcctaggccagacccttgacgcaagaaccgttatgaagaccggcttagagagcgttaagagtgcacttagagcatttctcgacaatgcagccgaggatctcgaaaagacaatggagaatctgaagcaggggcagttcacccatacgaggaaccaacccaagggcgtgactcaaatcatcaattatactactgtggcactgctccccatgctgagtagcctgttcgagcacattgggcaacatcagttcggcgaggaccttattctggaggacgttcaggtcagttgctacaggatattgacctccctctacgccctagggaccagtaagtccatctatgtggaacgtcagcgttcagctctgggtgagtgcctggcggcttttgcaggagcctttccggtcgcattcctggagacacatctcgacaagcacaacatttactcaatctataacacgaagtcaagcagggagcgcgctgctttatcactacccaccaacgtcgaggacgtatgccctaatatcccatcactggagaaattaatggaagagattgtagagttagctgagtcaggcattaggtacactcaaatgccccatgtcatggaggtgattctgcccatgctgtgttcatacatgagccgctggtgggagcatggccctgagaataatccagaaagagcggaaatgtgttgcaccgcattaaattctgaacacatgaataccctgctggggaacattctgaagattatctataacaatctggggattgatgagggggcgtggatgaagagactggctgtgttttcccaaccaattatcaacaaggtgaagccacagctcctaaaaacacacttcctcccccttatggaaaaactgaagaagaaagcggccactgttgtatccgaagaagaccatctaaaggctgaggcaaggggggacatgagcgaagctgagctgctgattctcgacgagtttacaaccctcgctagggatttgtacgcattctatcccctgctgatcaggtttgtggactacaatcgcgctaagtggctgaaagaacccaaccccgaggcagaagagctgtttagaatggtggccgaagtgttcatttactggagcaagagtcataacttcaagagggaagaacagaacttcgtggtgcagaacgagatcaacaatatgagcttcctgatcactgataccaagtcaaagatgtccaaagccgcagtatcggaccaagaacggaagaaaatgaaacggaagggtgaccgctattctatgcaaacatctttgattgttgccgccctgaagaggctcctgcctatcggactaaatatttgtgctcctggggaccaggagcttatagctttagcaaagaataggttttcactcaaggacacagaggatgaggttagggatatcattagatcaaatatccatctgcaggggaagctcgaggatccggctattagatggcagatggctctgtataaggacctgcctaacagaacagacgatacttctgaccccgaaaaaaccgtggaaagagtcttggatatcgcaaacgtgctgttccaccttgagcagaaaagtaagcgggtgggtcgacgccactactgcctcgtggaacatccacaacgtagcaagaaggcggtgtggcacaaactgctctccaagcaaaggaaacgggctgtcgtcgcttgttttcgaatggcaccgttatacaatttacccagacatcgggccgtgaacttattcctgcagggctatgagaagtcctggatcgagacagaggagcactacttcgaagacaagctaattgaggatctggccaaacctggggccgaaccaccagaggaggatgagggtacaaagcgcgtggaccctctgcaccaactcatactgctgttttctcgcactgccctgacagaaaaatgtaagcttgaggaagactttctgtatatggcctacgccgatattatggccaagtcatgccacgatgaagaagatgatgatggcgaagaggaggtgaaaagtttcgaggaaaaagaaatggaaaagcaaaaactgttataccagcaggcacgcctgcacgatcgcggcgcagccgagatggtgttgcagacgattagcgccagtaagggcgagacgggccctatggtagccgccacactaaagttggggatcgcaatactaaatggcggtaattcaactgtgcaacaaaagatgctggattacttgaaggagaagaaagacgtaggtttttttcagtccctcgccgggcttatgcagtcttgctccgtgctagacctcaatgcattcgagaggcaaaacaaggccgaaggcctgggcatggtcacagaggaaggctccggcgagaaagttttgcaggacgacgagtttacttgcgacctgtttcggttcctgcagttgctttgcgaaggccataactccgatttccagaactaccttcggacccagacaggcaataataccactgttaacattattatttcaacagtggattatctcctacgcgttcaggaatccatttcagatttttactggtattattccggtaaagatgtaatagacgaacaggggcagcgtaatttcagtaaggctatccaagtggcaaagcaggtgtttaatacactgacagagtatatccaagggccatgcactggtaatcagcaatcgcttgctcactcaagactgtgggacgccgttgtcggtttccttcacgtgttcgcacacatgcagatgaaactgtctcaggactcgtcgcagatagaactgctgaaagaattaatggatctgcagaaagatatggtggtgatgttgctgagtatgctcgagggaaatgtggtgaatggaacaatcggcaaacagatggtagatatgcttgttgagtccagcaacaatgttgagatgattttgaaattcttcgatatgttcctcaaactgaaggatttgacaagcagtgacactttcaaggagtatgatccagatggcaagggagtcattagcaagagagattttcacaaggccatggagtcccacaaacactatacccaatccgagaccgaattcctcctctcgtgcgctgaaacggatgaaaatgagacattggactatgaagaatttgtgaaacgattccacgagccggccaaggatatcggttttaatgtggccgtactgttaaccaacctttctgaacacatgccaaatgatacacgcctgcagaccttcctcgagttggctgaaagtgtactgaactacttccagccttttctgggccggattgagatcatgggcagcgctaagcggattgagcgcgtatacttcgaaatttccgaaagcagcagaacgcaatgggaaaagccccaagtcaaggagtctaagaggcaatttatattcgatgttgtcaatgaggggggggagaaggagaaaatggaacttttcgttaatttttgtgaagatacaatcttcgaaatgcagcttgccgctcagatatcagagtcggacttgaatgagagaagcgccaataaggaggagtctgaaaaggaacgccccgaggagcaaggaccacgtatggccttcttctctatactcacagtgaggtcagcactcttcgccttgaggtacaacattcttacactcatgaggatgctgtctctgaaatctttgaaaaagcagatgaagaaagttaagaagatgaccgtcaaggacatggtaacagcctttttttccagctattggtccattttcatgactcttctacactttgtggccagtgtattccgaggatttttcaggatcatctgctcactgctgctgggtggctccctcgtcgagggcgccaaaaaaatcaaggttgccgagctgctggcaaacatgcccgatcccacccaggatgaggtccggggcgacggcgaggagggagagcgaaaaccactggaggcggcactcccttctgaggatcttaccgatctcaaggagttaacagaggaatctgacttactttccgacatatttggcctggacctgaagcgagagggcgggcagtacaagctgataccacacaacccgaatgccggcctgagcgacctcatgtctaatcctgttcccatgccggaagtacaggagaagtttcaggagcagaaggctaaagaggaagagaaagaagaaaaagaagagaccaagagtgaacccgagaaggcggaaggtgaggacggcgagaaggaggagaaagctaaagaggataaagggaaacagaaactgagacagctgcatactcatcgctacggagaaccggaagttcccgaatccgccttctggaagaagattatcgcgtaccaacaaaagctcctgaactactttgctcgcaatttctacaacatgagaatgttggctctctttgttgccttcgccattaacttcattctattattctacaaagtgagcacctcaagtgtggtcgagggcaaagaactgccaactcgtagttctagcgaaaacgcaaaggtcactagtcttgattccagtagccatcggatcattgccgttcattatgtgctggaagagagttcaggctatatggagccaacccttcgcattctcgcaatcctgcacaccgtcatttccttcttttgcatcataggatactattgcctaaaagtccccctggtgatctttaagcgggagaaagaggtcgcgcgtaaactagaattcgatgggctgtacatcacagaacaaccctctgaagatgatattaagggacagtgggataggctggtcattaacacccagagttttccaaataactactgggataagtttgtcaaaaggaaggttatggacaagtacggtgaattttacggccgcgataggatttcagaactgctgggcatggataaagccgcgctggacttttctgacgccagggagaaaaaaaagccaaaaaaggattctagcctgagcgccgtgctcaatagcattgacgtgaagtaccaaatgtggaagctgggagtggttttcactgataattcgttcctctatttggcctggtacatgaccatgtcagtgcttgggcattacaataacttcttctttgccgcccacctccttgacattgccatgggctttaagactctgaggacgattttaagctctgtgacccataacggcaagcagctggtgctcacagtgggacttctcgcagtggtggtgtacttgtacacagtcgtggcttttaatttcttccgtaagttttacaacaagtccgaggatggtgacactcctgatatgaaatgtgatgacatgttaacgtgctatatgttccacatgtacgtgggcgtgagagccggcgggggcattggagatgagatcgaagacccagcgggggatgaatacgagatttaccgcattattttcgacatcacattttttttcttcgtgatcgtgattctactagcaattatccaagggctaattattgatgcctttggggagttgagggatcagcaggagcaagtcaaggaagatatggaaaccaagtgtttcatatgcggaattggcaatgactatttcgataccgtgccacatggatttgagacccataccctgcaagaacataacctggcaaactacctatttttcttaatgtacttgattaataaggacgaaacagagcatacagggcaggagtcttacgtttggaagatgtatcaagaaagatgttgggagttttttcccgcaggcgactgtttcaggaaacaatatgaagaccagttgaactag

SEQ ID NO: 133311 - DNA, 987 bp, synthetic construct
  misc_feature 1..987: note = Description of Artificial Sequence: Synthetic coding sequence
  source 1..987: mol_type = other DNA
atggaacccacactgcggattctggcaatattacacaccgtgatttctttcttttgcataatcggatactattgcctcaaggttcctcttgtgattttcaaacgggagaaagaggtggcaaggaagctcgaatttgacggactgtacatcaccgagcagccctccgaggatgatataaaagggcagtgggacaggctggtcatcaatactcaatcgttccccaataactattgggacaagttcgttaagcgtaaggtaatggataagtacggcgaattttacggccgggacagaatctcagagctcctgggtatggataaggccgcactggatttctctgacgcccgtgagaagaaaaaacctaagaaggactccagcctgtctgcagtgcttaatagtatcgatgtgaagtatcagatgtggaagttgggagtcgtttttaccgacaattcattcttgtacctagcctggtatatgacaatgagcgtgttgggtcattacaacaactttttctttgctgctcacctcttggacatagccatgggctttaaaacactcaggacaatcctaagttcagtgacccacaatggcaaacagctggtgctgaccgtgggactgttggccgtagtcgtttacctgtacacagtggttgcctttaacttttttaggaaattctacaacaaatccgaagacggtgacactccggacatgaagtgcgatgatatgcttacctgttacatgtttcacatgtatgtgggcgtcagggcggggggcggcatcggagatgagatcgaggaccctgctggcgatgaatacgagatctataggataatcttcgatatcacatttttcttctttgtgatcgtcatactgctcgccataattcaggggctgattatcgatgcttttggggaattgcgggatcaacaggagcaggtgaaggaggacatggaggtgttttctgatgtgtcatataagcagaggtag

SEQ ID NO: 133312 - DNA, 645 bp, synthetic construct
  misc_feature 1..645: note = Description of Artificial Sequence: Synthetic coding sequence
  source 1..645: mol_type = other DNA
agtctgttttgtaagctgggggttctcgttcgtcacagaatttccctgtttggaaacgacgcgacatccatcgtcaattgtctgcacattctcgggcaaactctggatgctaggaccgtgatgaagaccggcctggagagtgtcaaatcagcactgagggcgtttctcgataatgctgccgaggatctggaaaagacgatggaaaacctgaaacaaggccagttcacccacacaaggaaccaacccaaaggtgtgacccagatcatcaattatacgaccgttgcccttctgcccatgctgagctctttgtttgaacacatcggacagcaccagtttggagaggatctgatccttgaggatgtgcaagtgtcgtgttataggattctgacatctctgtacgctctgggaactagtaagtctatctacgtggaaaggcagaggtccgccctcggcgaatgcctggccgccttcgcaggggccttcccggtggctttcctcgagacccaccttgacaagcacaacatctactccatttacaatacgaagtctagccgggagcgagccgccctaagcctgcccaccaacgtcgaggatgtttgtcccaacatccctagtctcgaaaagttgatggaggaaatagtgtag

SEQ ID NO: 133313 - DNA, 4266 bp, synthetic construct
  misc_feature 1..4266: note = Description of Artificial Sequence: Synthetic coding sequence
  source 1..4266: mol_type = other DNA
atgaagaccgggctggaatccgtgaaaagtgctctgcgggcctttctggataacgctgccgaagatctagagaagaccatggaaaacctgaagcaggggcagttcacacatacccgtaaccagcctaaaggagtaacgcagatcatcaattacacgacagtggccctcctcccaatgttaagtagtctctttgagcatatcgggcagcatcaattcggagaagacctcatccttgaggacgtacaggtgtcttgctatagaatcctcacaagcctctacgctctaggcacgtctaagtccatctatgtcgagagacagcggagtgcacttggggaatgtcttgcagcctttgccggagcctttcccgttgctttcttggagacacacctcgacaagcataacatctattccatctataatacaaagagtagcagggagagggcagctcttagcctgcccaccaatgtggaagacgtgtgcccaaacattccctcactggagaagctgatggaagagattgtggagttggccgaaagcgggataagatatacccagatgccacacgtcatggaagtgatattgccaatgctttgcagttatatgagcaggtggtgggagcatggacctgagaacaaccctgagagggcggaaatgtgctgtaccgccctgaacagcgagcatatgaacacattactcgggaatatcctcaaaatcatctacaataacctcggcatcgatgagggcgcctggatgaaaagattagcagtgtttagtcaacctattatcaataaggtaaagccgcagctcctgaagacccatttcctcccactgatggaaaagctgaagaaaaaggctgcaaccgtcgtgagtgaggaggatcaccttaaggctgaggccagaggtgacatgtccgaggctgagctgctgatcctggacgagttcaccaccctcgctagagatttatacgctttctatcctctgctgataaggttcgtggactataaccgcgccaagtggttaaaagagcccaaccccgaagccgaagagttattcagaatggtggcggaggtctttatatattggagtaagagccacaacttcaaaagagaagagcagaattttgtggtacagaatgaaatcaataacatgtcattcctcattacagatacgaaaagtaaaatgagcaaggccgccgtgtcagatcaggagcggaaaaaaatgaaacgaaaaggcgatcgatattcaatgcagacctccttgattgtggccgctctgaaacggctcctgccaataggcctgaatatctgtgcccccggagatcaagagctgattgccctggccaagaacaggttctcgttgaaagataccgaggatgaggtccgggacatcatccgcagcaacatccacttgcaggggaagctggaggatcctgcaattcgctggcagatggcgctctataaagatctgccgaatcggaccgacgatacaagtgaccccgaaaagaccgtggagcgagttctggacattgctaatgttttgttccatctggaacaaaaaagtaaaagagtaggtaggagacactactgcctcgtggaacacccccagaggtcgaaaaaggccgtctggcataagctgctgtctaagcagaggaagcgggctgtggtcgcttgtttccggatggcccccttgtacaacttgccacgccaccgtgccgtgaacctgttcctccagggctatgagaagtcttggatcgaaaccgaggagcactactttgaggataaattgattgaggacctcgccaagcccggtgccgagcctccagaagaagatgaaggcaccaagagagtggatcccctccatcaactcattctgctcttcagccggacagccctgactgagaagtgcaaactagaagaggactttctttatatggcctacgcagatatcatggccaaatcctgtcatgatgaggaggatgatgatggggaggaggaagtgaagtccttcgagcatgatatcatcaaggatctcaggaacaaattcgcatctctgggggaaaattcactggagaaggagatggagaaacagaagctattgtaccaacaggcccgcctgcacgatagaggcgcggctgagatggtgctgcagacaatctcagcatccaaaggggaaacaggacccatggtggctgcgaccctgaaactagggatcgccatccttaacggaggcaactcaaccgtgcagcaaaaaatgttggactacttaaaggaaaagaaggacgtgggatttttccagtctctcgcgggcctgatgcaatcatgcagcgtactcgatctgaatgcttttgaacgtcagaacaaagcagagggactgggaatggttaccgaggaaggctcaggcgagaaggttttacaggacgacgagtttacctgtgatctcttcaggttcctgcagctactctgtgaaggacataacagtgactttcaaaattacctgaggacccagacagggaacaataccacggtaaacatcatcatctcaactgtagattacttacttcgagttcaggaatctataagcgatttttactggtactatagcggcaaagatgtcatcgatgaacaggggcagagaaactttagtaaagctattcaggtggccaagcaggtgttcaacacccttactgagtacattcagggaccatgtacaggcaaccagcagtcactggcccacagcaggctgtgggatgctgtcgttggcttcctgcatgttttcgctcacatgcagatgaagctgagccaggacagctcacaaattgaactgcttaaggaattgatggacttgcaaaaggacatggtggtgatgcttttgtcgatgctggaaggcaacgttgttaatggcactattggaaaacaaatggtggacatgttagttgaatcatcaaataacgtggagatgatactcaagttcttcgacatgtttttgaaactgaaggatctgacaagctcagacacattcaaggaatacgaccccgatggtaagggagtgattagcaagagagattttcacaaagctatggaatctcataagcactacacacaatcggagaccgagttcttgttgagttgcgctgagactgatgagaatgagaccctggattatgaggaatttgtcaagaggtttcacgagcctgccaaggacattggattcaatgtggctgtgctgttgacgaacttgtctgaacatatgcccaacgatactcgcctacaaactttcctcgagttagctgagagcgtcttgaactacttccaaccatttctaggccgaatcgagatcatggggtccgctaaaagaatcgaaagggtgtattttgaaatctcagaaagctccaggacgcaatgggagaagccccaggtgaaggagagtaaacggcagttcatctttgatgtggtgaacgaaggaggcgagaaggaaaaaatggagctgttcgtgaacttttgtgaggataccatttttgaaatgcagctggccgcacagattagcgagagcgacctgaacgaaaggtctgccaataaggaagagtcagagaaggagcgaccagaggagcaggggccaaggatggcctttttctccatcctcacagtgagaagtgcacttttcgctctgaggtacaatatcctgacactcatgcggatgctcagtctgaagagtctcaagaagcagatgaaaaaggtgaagaagatgacagtgaaagacatggttaccgcttttttttcttcgtactggtcaatttttatgactttactccattttgtagccagtgtttttaggggcttcttccgaatcatttgctcgctcctgctggggggttccctggtggagggagctaagaaaattaaggtagccgaattgttagccaacatgcccgaccccacccaggacgaagtccggggagatggagaagagggtgaaagaaagcctctcgaggctgctcttcccagcgaagatttgactgacttgaaggagttaaccgaagagtccgatttgcttagcgatatttttggactcgacctgaaaagagagggcggtcaatacaaactcattccacacaaccccaatgctgggctgtccgatctgatgagtaacccagtgccaatgcccgaggtacaggaaaagtttcaggaacagaaggctaaagaggaagaaaaggaagagaaagaagaaactaaatcagaacccgagaaggcagagggtgaggatggatag

SEQ ID NO: 133314 - DNA, 14856 bp, synthetic construct
  misc_feature 1..14856: note = Description of Artificial Sequence: Synthetic coding sequence
  source 1..14856: mol_type = other DNA
gacgatgaggtagtgttgcagtgcactgcaacgatccacaaagagcaacagaagctgtgtctggccgctgagggcttcggaaatcggctctgtttcctcgagtccacctccaatagcaaaaatgtaccgccagacttaagtatttgcacattcgtactggaacaatcgctgtccgttcgagccctacaggagatgttagcaaatactgtcgagaaaagtgaggggcaggtggacgtggagaagtggaagtttatgatgaaaacggcccagggaggtggccaccgtaccctcttatacggacacgccatactgctgaggcatagctattcaggcatgtacctgtgttgtctcagcacaagccgttcctcgacagacaagctggcttttgacgttgggctgcaagaagacacaactggggaggcttgttggtggacaatacatcccgcatccaagcagagatctgagggggaaaaggttcgcgtgggagatgacttaattctcgtctctgtgtcttccgagagatacctccatctgtcatatgggaacggctctctccatgtggatgcggcatttcaacagactttatggtccgttgcccctatctctagcggttccgaggcagcgcaaggctacctgattggaggagacgttctgagactgctgcatggccacatggacgaatgccttaccgtgccatccggcgaacacggggaagaacaaagaaggaccgttcactacgaggggggtgcggttagcgttcatgcgcgttcactatggcgtctggagactcttcgcgtcgcttggagtgggagtcacatcaggtggggacaaccttttagactacggcatgtgacaaccggcaagtatctctccttaatggaagataaaaacctcctcctgatggataaggagaaggctgatgtgaagtccaccgcctttaccttccgctctagcaaagagaagcttgacgtgggagtcaggaaagaggttgacggcatgggaacctccgaaatcaagtacggagatagtgtttgttatatacagcacgtcgatacgggattatggctcacttaccagtcggtggacgtgaaaagcgtacgtatgggcagcatccagagaaaagctattatgcatcacgaaggacatatggacgatggaattagcctgtccagatcccagcacgaagaatccagaactgccagggttatccgctctactgtgtttctgtttaatcgattcatccgaggactcgatgccctgtccaaaaaggccaaggcatccacagtcgatctccctatcgaatctgtttcacttagcctgcaggacttgattgggtacttccacccccccgatgagcacctcgaacacgaagacaagcagaaccggctgcgcgccttaaagaaccgacagaacctgttccaggaggaaggtatgattaacctggtcctcgagtgcattgatcgacttcacgtgtatagctccgccgcccatttcgccgacgtggcgggcagggaagcaggcgaatcctggaagagcatcttgaactccctgtatgaattactggcggctctcatcagaggaaacagaaagaattgtgcccagttttcaggttccctcgactggctgatttcccggctggaaagattggaggcctcttcggggatcctcgaagtgctccactgcgtcctcgttgagagtcccgaagcccttaatatcataaaagaagggcacatcaaaagcatcatttccctgcttgataagcatgggagaaaccataaagtattggatgtgctgtgttctctctgtgtctgccatggcgttgctgtgagatccaatcagcatctgatttgcgacaacttgctgcctgggcgcgacctgttgctgcagacaagattggtgaatcacgtatcgtccatgcgccccaatatctttctcggagtatcagagggaagtgctcagtataaaaaatggtactacgagctcatggtcgatcatacagaaccctttgtaacagccgaagcaacccatctgcgcgtgggctgggccagtacagaaggatatagtccctatccaggaggcggggaggagtggggagggaacggcgttggagacgacctgttctcctatgggttcgatggacttcacctctggagtggctgcatcgcacgcacggtcagttcgcctaaccagcacttgctccgcactgatgacgtaatcagctgttgtttggatctgagcgcccccagcatctccttccggattaacggacagcctgtgcagggcatgtttgagaatttcaatatcgatggtctattcttcccggtcgtcagcttcagcgcagggatcaaagtccggtttttacttgggggccggcacggcgagttcaagttcctcccccctcctggctacgccccctgctatgaagcggtactgcccaaggaaaaactgaaggtcgagcatagcagagagtacaagcaagaacgaacctatacccgagacctgctaggtcctaccgtttctcttacacaggcggcattcacacctattccagtggatacgtctcaaatcgtcctaccgcctcatctcgaacggattagagaaaagttagctgagaacattcacgaactgtgggtaatgaacaagattgaactcggttggcaatatgggccggtgcgcgacgataataaacgacagcatccatgtttagtagaattcagcaaactgcctgagcaagaaagaaattataacctacagatgtctctggaaaccttgaaaaccctgctggctctgggctgtcatgttggcatatcggatgagcatgcagaagataaggtgaaaaaaatgaaactgcccaagaattaccagctgacaagcggctacaaacccgctcctatggacctttccttcataaaattgaccccatctcaggaggcaatggttgataagctcgctgagaatgcacacaatgtatgggcccgggatcgaatccgccaaggctggacttacgggattcagcaagatgtgaagaaccgtcgcaacccccggctcgtgccctacaccttattggacgaccgcaccaaaaaatctaacaaggactctctccgggaggcagttcgcacgctgctgggttacgggtacaatctggaagcgcccgaccaagatcacgccgcccgggccgaggtttgcagcggaacaggagagcgcttccgcatttttagagccgaaaagacatatgcagtgaaagctgggagatggtacttcgaatttgaaacagtcaccgctggcgatatgcgtgtcggatggtccagacccgggtgtcagccggatcaggaattgggttccgatgagcgggccttcgcttttgacggatttaaagcccaacgctggcatcaaggtaacgagcattacggacgtagctggcaggccggtgacgtggtaggttgcatggtcgatatgaacgagcacactatgatgttcaccctgaacggcgaaattctgttagatgacagtggaagtgaactggccttcaaagacttcgatgtcggcgatggctttatcccggtgtgctcattgggggttgcccaggtgggcaggatgaacttcgggaaggacgttagtactctgaagtattttaccatatgcggactgcaagaaggctacgagccgttcgccgtcaacaccaatcgggacataacaatgtggctgagcaaaaggctcccgcaattcttgcaggtgccaagcaaccatgagcacatcgaagttactaggatcgatgggaccattgatagctctccctgcctgaaggtgactcagaaatccttcggatcgcaaaacagcaataccgacattatgttttacagactctccatgcccatagagtgtgcagaagttttctccaaaactgtggccggaggactccccggcgccggcttgttcggccctaagaatgatctggaggactatgacgctgacagcgacttcgaagtcctgatgaagaccgcacacggccaccttgtgcccgatcgggtcgataaagataaagaagcaaccaagccagaatttaataaccataaagattacgcccaggagaagcctagccggctcaaacagagatttctcttgcggcggacaaaaccagattacagcacttcacatagtgcccgtctgactgaggacgtgttggccgatgatcgtgacgactatgacttcctgatgcagacctctacatactattactctgtgcggatcttccctggccaggaacctgctaatgtgtgggtgggttggatcacgagcgacttccaccagtacgatactgggttcgacctggaccgtgtgagaaccgtgaccgtgacgctgggcgatgaaaaggggaaagtgcacgagtccattaagaggagtaactgctacatggtgtgcgctggcgagtccatgtctcccggccagggacgcaacaataacggactggaaattggctgcgtagtggatgcagcctctggactgttaacctttatagcaaacggtaaggaactgtcaacctactatcaggtagagccttccactaagctgttccccgccgtcttcgcgcaggcaacatcccccaacgtgtttcaatttgagctgggacggattaagaatgttatgcccctgagcgccggactgtttaaaagtgagcataagaatcccgtaccgcagtgtcctcccaggctgcatgtgcagttcctctcccatgtactgtggtctaggatgccaaaccagttcctcaaggtggacgtcagtagaatctcagaacgccagggatggctggtgcaatgtttggatccgcttcagtttatgtccctccatatccccgaggagaacagatcagtggatattctggagctcaccgagcaggaggagctactcaagtttcactatcataccctgcgcctttatagcgccgtctgtgcactgggaaaccaccgcgtggcccacgctctgtgttctcatgtcgacgagcctcaactgttgtatgctatcgagaacaagtacatgcctggtctcctcagagccggctactacgatctcttaattgatatacacctgtcctcctatgccacagctcgtctgatgatgaacaatgaatatattgtcccgatgaccgaagaaaccaaaagtatcacactgtttcctgacgagaataagaaacatggtttgcctgggatcgggctgtccactagcctgcggccccgtatgcagttctcatcacctagcttcgtgagcatcagcaatgaatgctaccagtactccccagaattccctctcgatattctgaaatcaaagaccatccagatgctgaccgaagcagtgaaggagggctccctgcacgccagggatcctgttggagggaccacagagttcctgttcgtccccttgatcaaactgttctacacgctgctgatcatgggaatctttcacaatgaggatctcaaacatattctacagctcattgagccctctgtgtttaaggaggccgccaccccagaagaggagagcgataccttggaaaaggagctcagcgtcgacgacgccaagttgcagggcgccggagaggaggaggccaaggggggtaagagacccaaggaggggctgttgcaaatgaagctgcccgaaccagtcaaactccaaatgtgcctcctgctgcagtacctctgcgattgccaggtgcggcatcgaatcgaagctatcgttgctttctctgacgactttgtcgcaaagttgcaggacaatcagcggttccggtataatgaggttatgcaagccctgaatatgtccgccgcactgaccgcccgcaaaacaaaggagttcaggagcccacctcaggaacagatcaatatgctattgaattttaaagatgataagagcgagtgcccctgtcccgaagagattcgggaccagcttctggatttccatgaggatctgatgacacactgcggaatagaactggatgaagacgggagcctggacgggaactcagatcttacaattcggggtcgcctattgagtctggtggagaaagtaacgtatttaaaaaaaaagcaggccgaaaagcccgtagagtcagattctaaaaagagctccactttgcagcagttgatcagcgagacaatggtgcgctgggcccaggaatctgtgatagaagaccctgaactggttcgcgcaatgttcgtgctactccataggcagtatgacgggattgggggcctggtacgtgctctgccgaagacatacacaataaacggtgtttcggtggaagacacgatcaatttgctggccagcctgggtcagattagatccctgctgtccgtgcggatggggaaagaagaggagaagctgatgatacggggactcggagacattatgaataacaaggtgttttatcagcatccaaaccttatgagagcccttggtatgcacgaaactgtgatggaggtgatggtgaatgtacttgggggcggagagtccaaagagattacatttccaaagatggtggctaattgttgtcggttcctgtgttatttctgccgaataagcaggcagaatcagaaagccatgtttgaccacctgagctatctcctcgagaatagtagtgtgggtctcgcatctccagccatgcgaggttcaacaccacttgatgttgctgcagcatccgttatggacaacaatgagcttgccctggcacttagggagcctgatctcgaaaaggtggtgcgctatctggctggatgcggacttcaaagttgccagatgctggtttcaaagggataccctgacataggatggaacccagttgagggggagcgttacctggacttcttgcgcttcgctgtgttctgtaacggagaatcggtggaagagaatgcaaatgtggtcgtccgacttctgatcaggcgccccgaatgtttcgggccggcactgaggggcgagggcggcaacggtctgcttgcagccatggaggaagcaattaaaatcgcagaggatccgagcagggatggaccatcacccaactctgggagctctaaaaccctagacactgaagaagaagaagacgacaccattcacatgggcaatgctattatgactttctatagcgccctaatcgacctcctggggcgatgcgctcccgaaatgcacctgatacacgccgggaaaggggaggcaatcagaattcggagcatactgagaagcctaatcccacttggcgacctagtgggggtcatcagcatcgcctttcaaatgcctacgatagcgaaagacggcaacgtagttgaacccgatatgagtgcgggattctgcccggatcacaaagcagccatggtgttgttcctcgatcgggtctacggcatcgaggtgcaggactttctactgcacctgctcgaagtcggatttttacctgatcttagagcagcggccagcctggacacagccgctttgtctgcgaccgacatggcccttgcattgaacaggtacctgtgcaccgccgtgttgcccttactaacacgctgtgccccgctgtttgctggtacagagcaccacgcttcactgatcgactctctgctccataccgtctatagactttctaagggctgctctctgacaaaagcccagagagacagcatagaggtctgcctcctatcaatttgtggccagctgaggcctagtatgatgcagcatctgctccgccgtttagtgttcgatgtgcccctgcttaacgagcacgctaaaatgccactcaagctactgacgaaccattacgagagatgttggaagtattactgcctccccggcggatgggggaactttggagctgccagtgaggaagagctgcacctgtcacgtaagctattctggggcatattcgatgctttaagccagaaaaagtatgagcaggagctgtttaaactggcattaccatgtctgtccgcagtcgccggggccctgcccccagattacatggagtcaaattatgttagtatgatggagaagcagagtagtatggatagtgaaggaaacttcaaccctcagccagtggatacctccaacattaccatccccgagaagctagagtatttcattaataaatatgcagaacatagccatgacaagtggagtatggacaaattggccaatgggtggatctatggagagatctactcggattcctccaaagttcaacccctgatgaagccttacaaactcctgagcgaaaaggagaaggaaatctatcgttggccaatcaaagagagcctcaaaactatgctggcctggggatggaggattgaaaggacacgggaaggagacagtatggcgctgtacaacagaacacgcaggatttctcagacctcccaggtatcggtagacgccgcacacgggtattcacccagggcaatcgacatgtccaacgtaacattgtctagggacctccacgcaatggcagaaatgatggcggagaattaccacaacatttgggccaagaagaagaagatggaattggagtcaaaaggggggggtaaccacccactcctcgtcccatatgacactttaacagccaaagagaaggcgaaggatagggaaaaggctcaagacatcctaaagttcctgcagattaacggctatgctgtaagtagggggtttaaggacttggagctggacacaccaagcatcgagaaacgattcgcctattcttttttgcagcagctgatcagatacgtcgatgaagcccaccagtacatcctggagtttgacggggggagccgtgggaagggcgagcattttccatacgaacaagaaataaagttttttgctaaggtcgtgctgcccctaatcgaccaatacttcaagaatcacaggctctatttcctgtctgcggcctccaggcccctgtgttccggcggacatgcaagcaataaagagaaggaaatggtcacatctctgttctgcaaactgggagtgctcgtccgccaccgcataagcctattcgggaacgacgcaactagcattgtcaactgcctgcacatcctcggccagacattggatgcgcgcacggtcatgaaaacgggcttggagtccgtgaaatccgcgttgcgcgcctttctggacaatgcggcggaggacctggagaagaccatggagaacctgaaacaggggcagtttacacatactaggaatcaaccaaagggcgtgacccagatcattaattataccacggtcgcactcctgcctatgctgagtagtctgtttgagcatattggacagcaccagttcggagaggatctgattttggaggacgtccaggtaagctgttatagaattctaacatcactctacgccctaggcacatctaaatctatttacgtcgagaggcaacggagtgccctgggcgagtgcctcgcggcattcgccggcgctttcccagtcgcattcttggaaacacacttggataagcacaacatctatagcatttacaacaccaaaagctcccgagagcgagctgctctgtccctgcctaccaacgtggaggacgtctgccctaacatccctagcttggaaaagttaatggaggaaatcgtcgagttggcagagtcaggcattcggtacacccagatgccccacgtgatggaggtcatcttgcctatgctgtgtagctacatgagccgctggtgggagcacggcccagaaaataaccccgagcgcgccgagatgtgttgcactgctctaaacagcgagcatatgaatactctgcttgggaacattctcaaaatcatctataacaacctgggtattgacgaaggagcttggatgaagagactggcagtctttagccagcccatcattaataaagtgaagccacaactgctgaagacacattttctgcccctcatggagaaactgaaaaaaaaggctgccacggttgtgtccgaggaggaccacctcaaggccgaagcccgcggcgatatgtctgaggcagagttgctcatcctggacgaatttacgacactggctcgtgacctctatgccttctatcctctgctgatcagatttgtggattacaatagggcaaaatggctcaaagagcctaatcctgaagccgaagagctcttccgcatggttgctgaggtattcatatactggtcaaagagccataatttcaaacgcgaggagcaaaacttcgtggtgcagaatgagatcaacaacatgtcctttcttatcacggataccaagtctaagatgagcaaggccgctgtatcagaccaagagcgaaagaaaatgaagcgaaagggcgacaggtattcaatgcaaacttcactgatcgttgctgcccttaaaagactgctccctatcggactaaacatctgcgctcccggggatcaggagttgatcgctctagccaaaaatagattctcgcttaaggataccgaggatgaggtccgagacattattaggagcaacattcacctgcagggaaaactggaggaccccgctattagatggcaaatggcgttgtataaggacctcccgaaccggacagacgatacttctgatcccgagaaaaccgtagagcgcgtgctggacattgccaatgtactgttccatctggaacagaaatcaaagcgcgtgggcagaaggcattactgcctggtggagcatccacagcgctcgaaaaaggccgtatggcataaacttctctccaagcagaggaagagagcagtcgttgcctgcttcaggatggctccactgtataacctgccacgccatagagctgtgaatctgtttctgcagggttacgagaaaagctggatagagacggaagagcattatttcgaggataagctgattgaagatctcgccaaacccggagccgaaccaccagaagaggacgaaggtacaaaacgggtcgaccccctgcaccagctgatcttgctattttccagaactgcactcactgaaaaatgcaaactcgaggaagacttcttgtacatggcttatgccgatattatggccaagtcttgtcatgacgaggaggatgacgatggggaagaagaggtgaaatcctttgaagagaaagagatggagaagcagaaacttctgtaccagcaggcccgtttgcatgacagaggcgccgccgagatggtgttacagacgatcagcgcctctaagggcgagactgggccaatggtggctgccactctgaagttagggattgccatcctgaacggcggcaattcaaccgtgcagcagaaaatgctggattatctgaaagagaagaaggacgtgggcttctttcagagtctggcaggcctgatgcagagttgttctgttttggatctcaacgcatttgagcgtcaaaacaaggccgaaggcctgggaatggttaccgaagagggctccggcgagaaggttctgcaagacgatgagttcacatgcgatctgtttcggtttctgcagctgctgtgcgaagggcataactccgacttccaaaactatttaaggacacaaaccggaaacaacacaaccgtgaacattataattagcaccgtggattatcttttgcgcgtgcaggaatccataagcgacttctactggtactacagcggcaaggacgtcatcgacgagcaggggcaacgcaacttcagcaaggctattcaggtagccaaacaggtattcaatacccttactgagtatatccaggggccgtgtacaggcaaccagcagtctctggctcatagcaggctttgggatgccgtggtcgggtttttacatgttttcgcacacatgcaaatgaaactaagccaggattcttcccaaatcgaacttctcaaggagctcatggatctgcagaaggacatggtggtcatgttgctgtcaatgctcgagggcaacgtcgtgaatggaaccataggcaagcaaatggtcgacatgctggtggagtcctccaacaatgtcgagatgattctgaagttcttcgatatgtttttgaaactcaaagacctgacctcctctgacacatttaaggaatacgatcctgacggaaagggcgtgatctctaaacgcgatttccataaggcaatggaaagccataagcattacacacaaagtgaaacagaattcctcctcagctgtgccgagactgatgaaaatgaaaccctggactacgaagagtttgtgaagcggttccacgaacctgctaaggacatcggcttcaatgtagcggttttgcttaccaacctaagcgagcatatgccaaacgataccagattacagacctttcttgaacttgctgaaagtgtgctgaactactttcagccatttctgggcagaattgaaataatgggaagcgcaaagcggatagagagggtgtatttcgaaatatccgagtccagtcgtacccagtgggaaaaaccacaggttaaggaatccaagcgacagtttatcttcgacgtggtgaatgagggcggcgaaaaagaaaaaatggagctgttcgtgaacttttgtgaggataccatcttcgagatgcagctggccgcacaaatctcagaaagcgacctgaatgagaggagtgcaaataaagaagagtcggaaaaggaacgcccggaggagcaaggccctaggatggctttcttctccattctgaccgtgcggtccgccctttttgctctgcggtataacattctgactttgatgcgcatgctgagcctgaagtcattgaaaaaacaaatgaaaaaagttaaaaagatgaccgtgaaagatatggtcacggctttctttagcagctactggtccatcttcatgaccctgcttcatttcgtagcttccgtgtttaggggcttctttagaataatctgtagcctcctactggggggatccctcgttgaaggtgccaagaagattaaagttgcagaactcctcgctaatatgcccgacccaactcaggatgaagtgaggggagatggcgaagagggcgagcgcaagcccctcgaggccgccttgcccagcgaagatctcacagaccttaaagaacttaccgaagagtcagacctgttgtccgatatttttggtctggatctgaaaagggagggcggtcagtacaagttaattccccacaatcctaacgcaggtctgtctgatctgatgagtaatccggttccgatgccagaggtccaggagaagtttcaggaacagaaagctaaagaagaagagaaggaagagaaggaagaaacaaaaagtgagccagagaaggcggagggcgaagacggcgaaaaggaggaaaaagctaaagaagacaaaggtaaacaaaagctacgccagctccatacccaccgctacggcgagccagaggtgccagaatcagcattctggaagaagattatcgcctatcagcaaaaactgcttaattacttcgccaggaatttttacaatatgcggatgctagcccttttcgtagcctttgccattaactttatattattgttttacaaggtgtccacaagctccgtggtggaggggaaagagctacccacaaggagctcttccgaaaacgccaaggtcacttccttggactctagctctcacaggattattgcggtgcattacgtcctagaagagtcttctggctacatggagcctactctgcgaatcctggcaattttacacaccgtgatctcttttttttgcatcatcggctactattgccttaaggttcctctggttatcttcaagcgggaaaaagaagtcgctcgcaagttagagtttgatggattgtatattactgagcagccaagtgaagatgatattaaggggcaatgggatcggctggtgatcaatacccagtcctttccgaataattactgggataagtttgtcaagcgtaaggtaatggataaatacggggagttctacggtagggaccgcatcagtgaactgctgggcatggacaaggcggctctggatttttcggacgctcgggaaaagaaaaagcccaaaaaagatagctccctgtctgccgttttgaacagcattgatgtgaaatatcagatgtggaaactgggagttgtattcaccgataatagcttcctgtacctagcttggtatatgaccatgagcgttctgggtcattataacaactttttttttgctgcccatctacttgatatcgcgatgggtttcaagacgctgcgtacaatcctgagcagcgtgacacacaatggcaaacagctggtcctgaccgttggcctgctggcagtggtggtttacctgtataccgtggtggctttcaactttttccgtaaattctataataagtctgaggacggggatacacctgacatgaagtgcgatgacatgctgacctgttatatgttccacatgtatgtcggagtacgcgccggcgggggcatcggggatgagatcgaggatccagccggagacgagtacgaaatctacagaattatatttgatattacattcttcttttttgtgattgttatcctcctggcgattatccagggcctaataatcgacgcatttggcgagcttcgggaccagcaagagcaggttaaggaggatatggaaaccaagtgctttatatgtggaattggcaatgactactttgataccgtccctcatggcttcgaaacccatactctacaagagcacaacttggcaaactacctcttcttcctgatgtacctgatcaataaagacgagactgaacatactggccaagagtcttacgtatggaaaatgtatcaggagcggtgctgggagttttttcctgcgggcgactgctttagaaagcagtatgaagaccaacttaactag

SEQ ID NO: 133315 - DNA, 14601 bp, synthetic construct
  misc_feature 1..14601: note = Description of Artificial Sequence: Synthetic coding sequence
  source 1..14601: mol_type = other DNA
atggctgagctcggggggggtggggaggaagacgctagatggtatcgcaaggaagacgaagttgttcttcagtgtatcgctaccattcacaaggaacaaaggaagttctgcctggccgccgaaggattaggcaataggttatgctttctcgagcccacttccgaggccaagtacatcccacccgatttgtgcgtgtgcaacttcgtactggaacagtctctctctgtgcgcgccctgcaggaaatgctggcaaatactggggagaatggaggagagggcgctgctcagggaggcggccatagaactctgctttatgggcatgccgtgctcctgaggcactccttctccggaatgtacttaacctgtctcaccacctcacggtcccagacagataaattggcctttgacgtcggattgagggagcacgcaactggcgaagcctgttggtggacaatccaccccgcgagcaaacagagatccgaaggcgagaaagtccggattggagacgacctgatcttagtatcggtgtctagcgagaggtatctgcacctgagtgtctccaatggaaacatccaagttgacgcctcttttatgcagactttgtggaatgtccaccccacatgttctgggagtagcatagaggaaggatatctgctcggaggccacgtggtgcgccttttccatgggcacgatgagtgcttgactatcccaagcaccgatcaaaacgactctcagcatcgtcgtatattttatgaggccggcggagctggaactcgagcgagaagtctctggagggtagagcccctgcggatttcctggagcggttccaatatacggtggggacaggctttccgcctgaggcatctgaccaccggccactaccttgccctcacagaggatcagggtctgatccttcaggatcgtgctaagtcagacaccaaatccaccgccttctcttttcgtgcctccaaagagttaaaggaaaagctcgactcatcccataagcgggacatcgagggcatgggggtcccggagatcaaatacggtgacagtgtctgtttcgttcagcatatcgcctccggtttgtgggtaacctacaaggctcaagacgccaaaacatcgaggctggggcctctgaaacggaaggtgatcttgcaccaggaagggcacatggatgatggactgacactgcagagatgccaacgcgaggaaagccaggcggcacgcattatcaggaacactaccgctttattcagtcaatttgtgagcggaaacaaccgcacagccgcccccataactctgccaatcgaggaggtgttacagactcttcaggacctgatcgcctactttcaacctccggaggaggagatgcgtcatgaggacaaacagaacaagttgagaagccttaagaataggcaaaatttatttaaggaagaggggatgctagccctagtgttgaattgcatcgaccgattgaacgtgtataattcagtcgcccatttcgcaggtatcgcccgggaagaatcgggcatggcttggaaggaaattctgaacctcctgtacaaactgttggccgcccttatacggggaaatcgtaataactgtgcacagttctccaacaacctggactggcttatcagcaagctggacaggctggagagctcctctgggattctcgaggtgcttcattgcattctcactgagagccctgaagcactgaaccttattgccgagggccatatcaaatcaatcatttcgctactcgacaagcacggccgcaaccataaggtgcttgatatactgtgtagcttgtgtctgtgcaatggtgtggcagtcagggccaatcaaaatctcatctgtgataacctcctcccacggcgcaaccttctgctgcagactagactaattaatgatgtgacatccataagacctaacattttcctgggggtcgcagagggctccgcacagtataagaaatggtacttcgagttgattattgaccaggtggacccatttctcacagctgagcccacccatctgcgggtcggctgggcgtccagctccggttatgctccgtatcccggaggcggcgagggctggggcggcaacggagttggcgatgatctttattcttacggattcgacggcttgcacctgtggagcggcaggatcccaagggccgtcgcgtctattaatcaacacttgctgcggtccgatgacgtcgtgagctgttgtctcgatcttggggtgccaagcatcagctttcggatcaacggacagccagtgcagggaatgtttgaaaacttcaacacagacgggctgttctttcctgtgatgagcttctccgccggagtcaaggtgcgctttctgatgggtggaagacacggggaatttaagttcctgccaccatccggctacgcgccttgttacgaagccctgttacctaaagaaaagatgcgcctggagccggttaaggagtacaagcgtgacgctgatgggatcagggacctcctggggaccacccagtttctctcacaggcctcctttatcccctgccccgtagacacaagccaggtcatcctgccgccccacctcgagaaaattcgcgataggctcgcggaaaacatccatgaactttggggcatgaacaaaattgagctgggttggacatttggcaagattcgtgatgataataagagacagcacccatgcctcgttgagtttagtaaattgcctgagacggaaaaaaattacaatctccagatgtctactgaaacattgaaaacactcctcgcactgggatgtcacatcgcccacgtcaatcccgcggccgaagaggatctgaagaaagtaaagctgcctaagaactatatgatgtccaatgggtataagcccgcaccactggacctgtctgatgtgaaactgctgccccctcaggagatcttggtggacaaactggccgagaacgcccataatgtatgggccaaagataggatcaagcagggctggacatacgggatccagcaggatcttaaaaacaagcgcaacccaagactggtgccctatgcactactggatgagagaactaagaagagtaatcgtgacagtctgcgagaagccgtccgcacgttcgttggatatggctataacatcgaaccaagcgatcaggagttagctgactctgctgttgagaaagtttccatcgataaaatcagattctttagggtggagcgttcctacgcagtacgcagcggaaaatggtactttgaatttgaggtggtcactggaggagacatgcgagtgggctgggcccgccctggctgcagacccgatgtcgaactgggtgccgacgaccaggcatttgtatttgagggcaaccgcgggcagaggtggcatcagggatcaggctattttggaaggacgtggcaaccgggcgacgttgtgggatgcatgatcaacctggatgacgcatctatgatattcactttaaatggtgaactcctcattaccaacaagggatccgaactggcgtttgcggattacgagattgagaatggtttcgttcccatctgttgtctcggactctcccagattgggcggatgaacctcggaacagatgcatcaacctttaagttctacacgatgtgcggcttgcaagaaggcttcgaacccttcgccgtgaatatgaatcgagatgttgctatgtggttcagtaaaagactgcccacctttgttaatgtgcctaaggaccaccctcacatagaggtaatgaggatagatggcacaatggacagccctccatgtcttaaggtgacccacaaaactttcgggacacagaactcaaatgcagacatgatctattgccgtctgtctatgcccgtcgaatgccacagcagcttttctcacagtccctgccttgatagcgaagccttccagaagaggaaacagatgcaggagatcctgagccacacaacaacacagtgctattacgcgatcaggatctttgcaggccaggatccctcctgcgtttgggtggggtgggtgactccagattaccacctctatagtgagaagttcgatcttaacaaaaactgcaccgtcacggttacactcggggatgagcgggggcgcgtgcatgagtcagtgaaacgaagtaactgctatatggtatggggaggggatatcgtagctagctcccagagaagcaatagaagcaacgtggacctagaaatcggctgcctggtggatttggcgatgggcatgctctctttttcagcaaacgggaaagagctcggaacatgttaccaggtcgaacctaatacaaaggtgttcccggcagtctttctacagccaacctcgacttctttatttcagttcgaactgggaaaattgaaaaatgccatgccactctccgctgctatatttaggtcagaagaaaagaacccagttccacagtgtcccccaaggctggacgtgcagacaatccagccagtgctttggtcaaggatgcccaactcctttctgaaggtggaaaccgagagggtctctgaacggcacggatgggtggttcagtgcctggagccacttcagatgatggccctgcatatccctgaggagaatcggtgcgtggacatcctcgaattgtgcgagcaggaggacttaatgcggtttcactatcacactctgaggctttattcagccgtgtgcgcgttaggcaacagtagagtggcctacgctttgtgctcacatgtggatttgtcacaactgttttacgccatcgataataaatacctgccaggactgcttcgctctggattttacgaccttcttatctcaattcatctcgcatcagccaaggagagaaaattaatgatgaagaacgaatatattattcctatcacatctaccactagaaacatacggctgttccccgacgagagcaaacgacatgggttacctggagtcggtctgagaacatgtctaaaacctggcttcagattctctacgccttgtttcgtggtgacaggggaagaccatcagaaacagtcccctgagatacctctcgagtccttacgcactaaggcgcttagcatgctgactgaagccgttcagtgttcgggcgcgcacattagggatcctgtgggaggaagtgtggagtttcaattcgtccctgtcttgaaactgatcgggacactgttggtgatgggcgtgttcgacgacgatgatgtgaggcagatcctactcctcatagaccccagtgtattcggggagcacagtgctgggaccgaggagggggcagagaaggaggaagtgacgcaagtcgaggaaaaggctgtggaagcaggagagaaggcagggaaggaagctcctgtgaaaggtctcttgcagactcgcttgcctgagtctgttaagcttcaaatgtgtgagctactgtcctatctgtgcgattgtgaattgcagcatcgggttgaagcaattgtcgccttcggtgacatctacgttagcaaactgcaggctaatcagaaattccggtataacgagctgatgcaggccctgaatatgtcagccgccctgacagcaaggaagacgaaggagtttagaagccctcctcaagaacaaattaatatgctgttgaactttcagctgggggagaactgtccttgccccgaagaaatccgagaggaattatatgatttccacgaggacctgcttttacattgcggcgtgccgctcgaggaggaggaggaggaggaagaagatactagttggacaggaaagctgtgcgcactcgtgtacaaaatcaagggaccacccaaaccagagaaagaacagccgaccgaggaggaggaacgttgtccaactacacttaaagaattgatttctcagacaatgatctgctgggctcaggaagaccaaatacaggatagcgagcttgtacggatgatgtttaatctgctgagaaggcaatatgattcaattggggagctgttgcaggctctgaggaagacctatacaatcagccacacctccgtgtccgatacaattaatctattagcggctcttggtcaaattagaagcttgctctccgtcagaatgggtaaggaggaagaacttctaatgatcaacggactgggtgacatcatgaataacaaagtcttttaccaacaccccaacctaatgagagttttagggatgcatgagaccgttatggaagtgatggtgaatgtcctaggaacggagaagtctcaaatcgcatttcccaagatggttgccagctgttgccgatttctgtgctacttctgtcggatttctcgacagaaccagaaggccatgtttgagcatctatcttatcttctcgaaaactctagcgttggactggctagtccttcaatgaggggaagcacccccctcgacgtggcagcaagctcagttatggacaacaatgagctggcacttagcctggaagagcctgacctggagaaggtagtcacttacctcgccggatgcggccttcagtcctgtcctatgttgttggcgaagggatacccggatgtcggatggaatcctatcgagggcgagcgatacttaagcttccttcggtttgcagtcttcgtcaactcggaaagcgtcgaagagaatgcgagcgttgtagtgaagctgctgattcgccggccggagtgcttcgggcccgctctccgcggggaggggggtaacggcctcctggccgccatgcagggtgcaattaagatcagtgagaatccagccctagaccttcccagtcagggctacaagcgggaagtgagcacaggagatgatgaggaggaagaggagattgtgcacatgggtaatgccatcatgtctttttattctgccttgatcgacctgttgggcagatgcgcgcccgaaatgcatcttatccagaccgggaaaggagaagcgatcaggataagaagcatacttaggagtttggtacctacagaagacttggtcggcatcatttccataccactgaagctcccctcgctgaacaaggatgggagcgtatccgagccagatatggccgccaacttttgccctgaccataaagccccaatggtgctctttctcgatcgagtgtatggaatcaaagaccagacattcctgcttcacctgcttgaagtaggctttctgcccgacctgcgagcctcagcctccctggatacggttagtctgtccaccacagaggccgccttagccctgaatagatacatatgtagcgcggtgttgccattgctgacacgatgtgcaccgttgtttgctggcactgaacactgcacttctctgattgacagtactctgcagaccatctaccgcctgagcaaagggcgatcacttactaaagctcagagggacactatcgaagagtgcctgctggcaatttgcaaccacctgaggccttcaatgctgcagcagctcctgagaagactggtgtttgatgtgcctcagctgaatgaatactgcaagatgcctcttaagctgctcacaaatcactacgaacagtgctggaagtattattgtctgccaagcgggtggggaagttacggtctcgccgtggaagaagagctccacctcaccgagaagcttttctggggcatctttgactcgttgtcacacaaaaagtatgatcctgatttgttccggatggctctgccctgcctgagcgccattgcaggggctcttcctccagattacctggatacgaggattaccgcaactctggaaaagcagatcagcgtggacgcagatggcaacttcgatccaaaacctataaatacaatgaacttcagtttgccagagaagctcgagtacatcgtgaccaagtatgctgagcatagtcacgacaaatgggcatgcgacaagtcacagtctggatggaaatatggcattagccttgacgagaacgtcaagacgcatcctctgataagaccttttaagacactgactgagaaggagaaggagatttacagatggccagcccgggaaagtctcaagacaatgttagctgtgggatggacagtcgagcgcaccaaagaaggagaggctctagtgcagcagcgcgagaatgagaagttacggagtgtcagccaagctaaccaggggaattcctatagccctgccccccttgacctcagcaatgtggttctctccagagagctccaggggatggtggaagtcgtcgccgagaattaccacaacatttgggcaaagaagaagaaacttgagcttgaatctaagggagggggctcccatcctctgctcgtcccatatgacacattgacagctaaggaaaagtttaaggacagagagaaggcacaggacctattcaagtttcttcaggtgaatgggattatcgtcagccggggcatgaaggacatggagctcgacgcgtccagcatggagaaacggttcgcctataagtttctgaagaagattttgaagtacgtggacagcgctcaagagttcattgcacatctggaggctattgttagttctgggaaaacggagaaatctccacgtgaccaggagataaagtttttcgctaaggtgcttcttccactcgtcgatcagtattttacttcccattgtctgtacttcttgtctagcccactgaaacctctttcttccagcggctacgcgagtcataaagaaaaagagatggtggccggactcttctgtaagttggcagctctcgttagacaccggatcagcctattcggttccgatagcactaccatggtcagctgtctgcatatcctcgcccaaaccctggacacacgcacagtaatgaaaagcggctcggaactggtgaaagccggtctgagggccttttttgagaatgctgccgaggatttggagaaaacgtccgaaaatctcaagctggggaagttcacacactcacgcactcagattaagggggtcagccagaatataaattatactactgtcgcccttctgccgattctaacgagtatcttcgagcacgtcacacaacatcagttcgggatggatctgctgttaggagatgtacaaatcagttgctaccacatattgtgttccctgtactccctgggcaccgggaaaaacatctacgtggaacggcagagacccgccctcggtgagtgtctagcttctctcgccgctgccattccagtggcgttcctggaacccaccttgaaccgctataatccactgtctgtcttcaatacaaaaacaccccgagagaggtctatcttggggatgcctgacaccgtcgaagatatgtgccctgatatcccacagttggaaggcctgatgaaggaaatcaatgacctggcagaaagcggggctagatacacggagatgccacatgttattgaagtgatacttccaatgctgtgtaactacctttcatactggtgggagcgggggccagagaatctgccaccctcaaccgggccctgttgtaccaaggtgacctctgagcacctgagcctaatcctaggaaacattctgaagattatcaacaataacctggggatcgacgaagctagctggatgaagcggatagcagtgtatgctcaaccgattatctccaaggctcggcctgacctgttacgaagtcacttcataccaactctcgaaaaactcaaaaagaaagcggtgaagactgtccaggaagaagagcaattaaaagccgacggcaagggcgacacccaggaggctgagttgctgatcctggacgagtttgcagtcttatgccgggatctctatgccttctatcctatgctgatccggtacgtcgataataacaggagtaattggctcaagtctcctgacgcggacagtgatcaactctttcgaatggtcgccgaggtctttatactgtggtgtaagtcacataattttaagagagaagaacaaaactttgtaatccagaacgagattaataacttagcatttctgacaggcgactccaagtccaagatgagcaaaagcggtggccaggatcaggagcgcaagaaaacgaagaggaggggagatttgtatagtatacaaacttctctcatcgtcgcagcactcaaaaagatgctgccaatagggcttaacatgtgcacacctggggaccaagagctaatctctctagccaagagccggtactcccaccgtgacaccgatgaagaggttagagaacacctgagaaataaccttcacttgcaggagaaaagcgacgacccggcagtgaaatggcagttaaatctgtacaaagacgtgctgaagtctgaagagcccttcaaccctgaaaagaccgtcgagcgggtgcagcgaattagcgctgctgtctttcaccttgagcaggtggagcagcctctaaggtccaagaaggcagtttggcacaagcttttgtcaaaacagcgaaagagggcagttgtagcttgttttcgcatggcccctctgtataacctgccacgccatcgctcaattaacctcttcttgcatgggtatcagcgcttctggatcgagacagaagagtactcgtttgaggaaaagcttgtccaggatcttgcaaaatcccccaaggttgaggaagaagaggaagaagaaacagaaaagcagcccgaccctctccaccagattatcctgtatttcagccgcaatgcactcactgaaaggtcaaaactggaagacgacccactctatacaagctattcctctatgatggctaagtcatgccaaagtggcgaggatgaagaggaagatgaggacaaggagaaaacctttgaggaaaaggagatggaaaagcaaaaaaccctgtaccagcaggcacggctgcatgagaggggtgccgccgagatggtactccagatgatttccgcctccaaaggcgaaatgagtcctatggttgtcgagaccctaaagctgggcatagccatactcaatggaggcaacgctggcgtgcagcagaaaatgctcgactatctcaaggagaagaaggacgcaggattcttccagagcttgtctggactgatgcagtcctgtcggagtgtgcttgacctaaatgctttcgaacggcagaacaaggccgaggggctggggatggttacagaagaaggaaccctgatcgtgcgggaacgcggagagaaggtgctacagaatgatgagttcactcgggacctttttagattccttcagctgctgtgcgagggccataactccgatttccagaacttcctgcgcacccagatggggaatactacgacagtgaacgtgattatcagcactgtcgactatctcctgcgattgcaagagtctatatcggatttctactggtactatagtgggaaagacattattgacgaatctggccaacacaattttagtaaggcactggcagtgaccaagcagatcttcaatagcctgacggagtatatccagggcccatgcattggcaaccagcagtcactggctcatagccgcctctgggacgcggtcgtcggtttcctccatgttttcgctaatatgcaaatgaaactgagtcaagactccagtcagatcgagctgctgaaagaactgttagatctactccaggacatggtggtaatgttactaagccttctggagggtaacgtggtgaatggaacaattggcaagcagatggtagacaccctggtggagtccagcaccaacgtggaaatgatcctcaaattctttgacatgttccttaagttaaaggaccttacgtcatccgatacctttaaggagtacgatcctgatggtaagggaatcatatccaagaaagagttccagaaagccatggagggccagaagcagtacacccagagcgagattgactttttgcttagttgtgctgaagctgacgaaaacgatatgtttaactacgttgactttgttgacaggttccacgaaccagcgaaagatatcgggtttaatgtcgcagtgttgctcaccaacctttcagaacacatgccgaatgacagtcgcctgaaatgccttcttgatcctgccgagtccgtccttaattactttgagccttacctcggccgaatagagatcatgggaggagccaagaaaatcgaacgggtgtactttgagatttctgaaagctcacgaacccagtgggaaaagccgcaggtcaaggagtcaaaacgccagttcatttttgatgtggtgaacgaaggtggtgagcaggaaaagatggaactatttgtcaacttttgtgaggacactatcttcgaaatgcaactagcttcccaaatttctgagtccgattcagcggatagaccagaggaagaggaagaagacgaagatagttcgtacgtcctggaaattgccggagaagaggaagaagatggatcgttggagccggcatcagctttcgccatggcctgcgctagtgtgaaaaggaacgtgaccgattttctgaaacgcgctactcttaagaatctccggaaacagtatcgtaatgttaaaaagatgaccgctaaagagctggtgaaggttctgttctcgttcttctggatgctgttcgtcggtttattccagttgctatttactattttgggcggtatcttccagatcttatggtctacagtgttcggtgggggtttggtggagggcgcaaaaaacattagagtcacaaaaatattaggtgacatgcccgaccccacgcagtttggcatccatgacgataccatggaggccgagcgtgcagaggtgatggaacccggtataaccacagaactggtccatttcattaaaggagagaagggcgacacggatattatgtcagaccttttcggtctgcaccccaaaaaagaaggcagtcttaagcacggacctgaggtgggcctaggcgatctctcagagatcatcggcaaggacgaacccccaacgcttgaaagcacagtacagaaaaagcgaaaggcccaggctgccgaaatgaaggcggccaacgaagcggagggaaaggtcgagtcagagaaagcagacatggaagatggcgagaaagaggataaagataaggaagaggagcaggcagagtacctgtggactgaagtgactaagaaaaaaaagcgaaggtgcggacaaaaagtcgagaaacctgaggccttcaccgccaactttttcaaaggtctcgagatctatcaaacaaaactacttcattatcttgcaaggaatttttataatctgcgatttttggcgctattcgtggctttcgcaattaattttatattactgttttataaagtgactgaggaacccctcgaagaagaaaccgaggatgttgccaatctgtggaattcctttaatgacgaggaggaggaggaagccatggtttttttcgtgttgcaagagtctacaggctacatggcccctactctccgggccctcgccattatccacacgataatctctctcgtttgtgtcgtggggtattattgtctgaaggtccctctcgtggtcttcaagagagaaaaagaaatcgcacgcaagctggagtttgacgggctgtatattacagagcagccatccgaagacgacatcaagggccagtgggatagactggtgataaacaccccttcatttcctaacaactactgggacaagtttgtgaagcgcaaagtgatcaacaaatacggcgacctctacggcgccgaacggattgcagaactgttaggcttggataaaaatgcgcttgatttctcccctgtggaggaaactaaggccgaagcggcgtcattagtatcatggctgtcttcgattgacatgaaatatcatatctggaagctcggcgttgtgttcacagacaactcttttttgtacctggcctggtacaccacaatgtctgttctggggcattataataatttcttcttcgccgcccatctgctggatatagccatgggattcaagacattgcgcacaatcctgagctctgtgactcataatgggaaacagctggtcctgaccgtcgggctcctggcagtggtcgtgtatctgtacaccgttgtcgcattcaacttcttccgcaagttttataataagtcagaagatgatgatgagcccgatatgaaatgcgatgacatgatgacctgctatcttttccatatgtacgtcggcgttagagcgggtggcggcataggagatgaaattgaggacccagcgggcgacccttatgaaatgtacagaatcgtgttcgatatcacattcttcttttttgtgatcgtcatcctcctcgccatcatccagggacttatcatcgatgccttcggcgagctaagggatcagcaggagcaggtgagggaagatatggaaaccaaatgcttcatctgtggaataggtaatgattactttgatacgaccccccacggcttcgaaacgcatacgctgcaggagcacaacctcgctaactacctgtttttcttaatgtatctgatcaacaaagatgaaacagaacacaccgggcaagaaagctacgtgtggaaaatgtaccaagaaagatgctgggatttttttcccgctggagattgctttcgaaaacagtacgaagatcaactcggatag

SEQ ID NO: 133316 - DNA, 14613 bp, synthetic construct
  misc_feature 1..14613: note = Description of Artificial Sequence: Synthetic coding sequence
  source 1..14613: mol_type = other DNA
atggccgaaggaggggaagggggggaggacgagatacaattcttaaggacagaagatgaagtggttttgcagtgtatagcgactatccacaaggaacagaggaagttttgtctcgcggcagagggtttgggtaatcgcttgtgctttcttgaacctactagcgaggctaagtacataccccctgatttatgcgtgtgtaatttcgtcctcgagcagtcactgtcggttagagctctacaggagatgttggcaaatacaggcgaaaatgggggcgagggtgcagcccagggtggagggcaccgcactctgctgtacggacatgccgttctgctgcgacactcatttagtggaatgtatttgacgtgcctgaccacatcccggtcccagacggacaagcttgccttcgatgtggggttacgggaacacgccaccggggaggcttgctggtggaccattcatcccgcatcaaaacagcgatcagaaggcgagaaagttcgcataggagacgatctgattctggtgtcagtgtcttctgagagatatcttcacttaagcgtgtccaacggaaatatccaggtggacgcctcatttatgcagactttatggaacgtgcaccccacgtgtagcggctcctctatcgaggagggctacctgttagggggacacgtggtcaggctcttccatggccatgacgagtgtttgaccatcccgtccacagatcagaacgactctcagcataggaggattttttatgaagcgggaggagcaggcacccgggctcgcagtctgtggagggtcgagcctcttcggatctcctggtccgggtcgaacattcgctggggccaggcgttccgcctgagacatctgaccactggtcactacttggcccttacagaggaccagggtttaatcctgcaggaccgggcaaagtccgacacaaaaagtaccgcgttcagcttcagggcttctaaagaattgaaagagaaacttgacagcagccataaacgggatatcgaaggaatgggcgtacctgagatcaaatatggggattcggtatgcttcgttcagcacattgcctcagggctgtgggtgacgtacaaggcgcaggacgctaagacgagccgcctgggacccctgaaacgcaaggtcatcttgcatcaggagggacatatggacgatgggctcacattgcagcgatgccagcgagaagaatcacaggccgcccgaatcatcaggaataccactgcactttttagccagtttgtgagcggtaacaaccgaacagccgctccaattaccctgcccattgaagaggtgctgcagaccctacaggatttgattgcctacttccagccacccgaagaggaaatgcgtcacgaggataaacaaaacaaactccgtagtctgaagaacagacagaacctgtttaaggaagagggaatgctggccctggtacttaattgcatagatcggctgaatgtgtataattcagtggcccactttgccgggatagcccgggaagagagcggtatggcgtggaaggagattcttaacctactgtacaaactgctggcggcactgatacggggaaatagaaataattgtgcccaattctccaataacctggattggcttattagcaagttggaccgactggaaagctccagcggaatcctggaagtgctccattgtatcctcacagagagcccggaggctttgaacttaattgctgagggacacataaagtcaatcatctccctattagacaaacacggaaggaaccataaggtgttggatattctgtgctctttgtgcctttgcaatggcgttgcagtcagggctaaccagaatctgatctgtgataatctgctgcccaggagaaatctgctgctccaaacgaggcttattaacgacgtgacaagtattcgccctaatatttttctcggcgtggcagaagggtcagcacaatacaagaagtggtacttcgaactgattatagaccaagtggaccccttcctgactgctgaacccactcatctgagggttggttgggcgtcgtcctctggctacgccccatacccgggcggaggagaagggtggggggggaacggcgtgggcgatgatctttattcatatggctttgacggactgcacctttggagtggacggattccacgcgccgttgcctctatcaatcagcacctgttgagatccgatgatgttgtgtcctgctgcctggacctgggggttccatccatcagctttcgaatcaacggacaaccggtacagggaatgtttgagaacttcaataccgacggcttatttttccccgtcatgagcttcagcgctggcgtgaaggtgcgctttcttatggggggccgacatggtgagtttaagtttctgcctccctccggctacgctccatgctatgaagcactgttaccaaaagagaagatgcgactcgagccagtcaaggagtataagcgggatgctgatggcatccgcgatctgctcggaaccacccagttcctgagtcaggcttcttttatcccctgtcctgtggatacctcccaggttattttacccccacatttggagaagattcgggaccgcctggccgagaacattcacgaattatggggaatgaataagatagaactcggatggacttttggcaagattcgggatgacaacaagcggcaacatccctgcctggttgaattttcgaagctgccagagacagagaaaaactataacctacagatgtctacagaaactcttaaaacactactcgccctcggttgccacatcgctcacgttaaccctgccgccgaggaggaccttaaaaaggtgaagctgcctaaaaactacatgatgtcgaatggatacaaacccgcgccactggatctgagcgatgtgaagctgctgccccctcaggaaatcctagtcgataagctagctgagaacgcccacaacgtctgggccaaggaccgcatcaagcaggggtggacatacggcatccaacaggacttaaaaaacaagagaaaccctaggctggtgccttacgctcttctggatgagcgtaccaagaaatcaaacagggattccctgcgtgaagccgtcagaacttttgtggggtacggatataacattgaaccgtctgatcaggagttagccgacagtgccgtggagaaagttagcatcgacaagattcggttctttagggtggaacgatcctacgcagtgcggtctggaaaatggtactttgagttcgaagttgttacggggggagatatgcgcgtaggctgggcacggccaggctgtagacctgatgtcgaattgggggctgacgatcaggcgtttgtcttcgaaggcaatcgcggacagcgctggcatcagggctcaggatatttcggcagaacttggcagcccggcgacgtggttggctgcatgattaacctcgatgacgcgtcaatgatcttcaccctcaatggggagctgcttattaccaacaagggctccgagttagcctttgccgactacgagatcgagaacgggtttgttccaatttgctgccttggtttaagtcagatcggaaggatgaacctgggcactgacgcctctacatttaagttctacacaatgtgtgggctgcaggagggtttcgagccatttgccgtcaacatgaatcgggatgtggccatgtggtttagcaaacgcctgccgacttttgttaatgttcccaaagaccacccccacattgaggtgatgcggatcgacggtactatggattccccaccctgccttaaggtcacccacaaaacgtttggcacacagaacagcaacgctgacatgatctactgcagactctccatgcccgtcgagtgtcattcaagtttctctcacagtccttgtttggacagcgaagcctttcagaaaagaaagcagatgcaggagatcctgtcgcataccacgacacagtgttactatgctataaggatcttcgcaggccaggatccctcgtgtgtctgggtcgggtgggtcacgcccgactaccacctgtatagcgagaagtttgaccttaacaaaaactgtacggtaaccgtgacattgggcgatgaacgcgggagggtgcacgagagcgtgaagcgctctaattgctacatggtatggggcggcgatatcgttgcctcaagccaaaggagcaacaggtctaacgtcgatctcgagatagggtgtctcgtagatttggccatgggcatgctgtcgttttcagccaacggaaaagaactggggacctgctatcaggtggagccgaataccaaagtgtttccggccgtgtttctgcaacctaccagtacttctctgtttcagttcgaactgggcaagctgaaaaatgctatgcccctttcggctgctattttccgctccgaagagaagaatccagttccacagtgtccgccaaggcttgatgtccagactatacagccagtgctgtggagccgaatgccaaactccttcttgaaggtggaaacagagagggtgagtgaaaggcatgggtgggttgtgcagtgtctggagccgctacagatgatggcactgcacattcctgaggaaaacagatgtgtcgatatcctcgagctgtgcgaacaggaggacctgatgagattccactatcacaccctgaggctatactctgccgtctgtgctctcggtaattcaagggtggcttatgccctgtgttctcacgttgacctctcccagctgttttacgctatagacaacaaatatctccccggtttactcagaagcggcttctatgacctgttgatatctatccatttagctagcgcgaaagagagaaaactgatgatgaagaacgagtatataattcctatcacttccactacgcggaacatcaggctgtttcctgacgagtccaagcggcacggacttcctggtgtggggttgaggacttgtctgaaacccggatttcggttcagcactccttgctttgtggtcacaggtgaagatcaccagaagcagtcacccgagatccctcttgaatctctcaggacaaaagccctttccatgctcacagaagcggtccagtgtagcggagcccacatccgcgaccctgtcggcggcagcgtagaatttcagttcgttcccgtgcttaagttaatcggcaccctcttggtgatgggtgtttttgacgacgatgatgttcggcaaatcctgctgctgatcgacccaagcgtgtttggtgagcatagcgccggcacggaggagggggcagaaaaagaggaggtcacacaggtggaagagaaagctgtggaggcaggcgaaaaagccggaaaggaagcccctgtgaaagggctgctccagactaggctaccagaatctgtcaagctccagatgtgtgaactgctgagttatctgtgtgactgcgagttgcagcaccgggtagaagccatcgtcgcattcggagacatctacgtcagcaagctgcaagccaatcagaagtttagatacaatgagctgatgcaagcactcaacatgagcgccgctcttaccgcaagaaaaaccaaggagttccggagtcctccccaagaacaaattaatatgctcttgaattttcagctgggtgaaaactgtccctgccctgaagagattcgggaggaactgtatgacttccacgaggacctgctgctgcactgcggagtgccgcttgaggaagaggaggaagaggaagaagatacttcttggactgggaaactgtgtgcactggtgtacaaaatcaaggggccgcctaaacctgagaaggagcagcccaccgaagaggaagaaagatgtccaacgacactgaaggagttaatttcgcagacaatgatctgctgggcccaggaggatcagatccaggacagcgagctggtgaggatgatgtttaacctattgcgccgacagtatgattccattggtgaactgctacaagccctacggaaaacctacaccatttcccacacgtccgtttctgacacaatcaacctcctagcggcactgggacagatccgctctctgctgtcagtgaggatggggaaggaggaagaattactcatgattaatgggctgggggacatcatgaacaacaaggtgttctatcagcaccctaaccttatgcgagtcctggggatgcacgagaccgtgatggaggtgatggtcaacgtactggggactgaaaaatctcagatagccttcccgaagatggtagcttcctgctgcaggttcctgtgctacttctgcaggatatccaggcagaaccagaaggcaatgttcgagcatctgtcgtatctccttgaaaacagttccgtaggtttagcctcaccatctatgcgaggatcaacacccctggacgtggcagcctcgagcgtgatggataacaatgagctggctctttctctcgaggagccagatcttgaaaaggtagtgacctacttagctggatgcgggctccagagttgtcccatgctgctggccaaaggctatcctgacgttggctggaatccaattgagggggagcgttacctcagctttctgcggtttgccgtgttcgtgaactcggagtcagtggaagaaaacgccagcgtggtggtcaaacttctgattcggcggccagaatgtttcggcccagccctgagaggcgaagggggaaacggactgctggccgccatgcagggtgccattaagatttctgaaaatccagcactggatctcccatcacagggctataaacgcgaggtctcaaccggggatgacgaggaagaagaggaaatcgtgcacatgggaaacgccattatgtcattctacagcgctcttatagatctcttgggccgatgtgccccagaaatgcacctgattcaaaccggcaaaggtgaggccatcagaataaggtccatactgcgatccctcgttcctactgaggatctagtcggcatcatcagcattcctttgaaactgccttcactgaataaagatggaagcgtgagtgaaccagacatggctgctaacttctgtcccgatcacaaggccccgatggtgctgtttcttgaccgcgtgtatggcattaaagaccagacatttctcctgcatctcctggaggtgggcttcctgcccgacctgagagctagcgccagtttggacacagtctcattatcaaccacagaggccgctcttgccctcaatcggtacatctgctccgctgtgctgccgttgttaaccaggtgtgctccccttttcgcaggcactgagcactgtacatctctgatcgactcaacccttcagactatctacagattaagcaagggaagatctctgacaaaggctcagcgcgatactattgaagagtgcttgcttgccatctgtaatcacctcagaccttctatgctgcagcaactgctgagacgtttagttttcgatgtccctcagctgaatgaatactgtaaaatgccactgaagctcctcacaaatcactacgaacagtgttggaagtattactgtttgcccagcggctggggtagctacggcctggcagtggaagaggaactccaccttactgagaaactcttctggggcatctttgactccctgtctcataagaagtacgaccccgacttattcagaatggctttgccttgcctgtctgccatcgcaggtgcgcttccgcccgactatttagatactcgcatcaccgccactctcgagaaacaaatctccgtagacgcagacggaaacttcgatccaaagcctattaacaccatgaacttttccctaccagagaagcttgagtacatagtgaccaagtacgctgaacacagtcacgataagtgggcttgcgataaaagtcagagcgggtggaagtacggcatatctctggacgagaatgtgaaaacacatcccttgattaggcccttcaaaacacttacggaaaaggaaaaagaaatctatcgctggcctgcccgcgaatccctcaagaccatgctggctgtgggctggactgtcgagcggacaaaagaaggtgaggctctggttcagcagcgcgagaatgagaagctgcggtcagtgagccaagctaatcagggaaactcctactcccctgcccctctggacttatccaacgtcgtgctctctagggagttacaggggatggtggaagttgtggccgagaattatcacaatatttgggcaaagaagaagaaactggaattagagtccaagggtgggggcagtcacccacttcttgtaccgtatgacacactgacggccaaggagaaatttaaggatagagagaaggcccaagacctgtttaaattcctgcaagtgaacggcattatcgtaagcagggggatgaaggacatggaactcgacgcgagctcaatggagaagagatttgcttacaaattcctcaaaaaaattctgaagtacgttgattctgctcaagaatttattgctcacctggaggcaatcgtttctagtggaaagactgaaaaaagtcctcgggaccaggagataaaattttttgccaaagttttgctccccctggtggaccagtattttacttcccactgtctgtatttcctgtcatccccccttaaaccgttgtccagcagcggctacgccagccacaaggaaaaggagatggtggccggcttattttgtaaactggccgctttagtcagacacaggatatccctttttggaagcgacagcacaacaatggtatcctgcttacacatcctggcccaaaccctcgataccaggacagtcatgaaatcaggctctgaattggtcaaggctggcctcagagcatttttcgaaaatgctgcagaggatctggagaagacctccgagaatctgaagctcgggaaatttacacactcgcggactcagattaagggagtaagccagaacataaactacactacggtggcactgttgcctattttaacctcgattttcgagcacgtgacacagcatcagtttggaatggacctcctcttgggtgacgtccagatttcatgctaccacatcctttgttctctgtacagtttagggaccggtaagaatatctatgttgaacgtcagagaccagctctgggagaatgcttggccagtctagcagcagccattcccgtggccttccttgagcccacactcaaccggtataaccctctgtctgtatttaatacaaagaccccccgcgagcgaagtatcctcgggatgcctgacaccgttgaagacatgtgtcccgacattccacagttagaaggtctcatgaaggagatcaatgacctggccgaatccggtgcccgctataccgagatgcctcacgtcatcgaggtcatcctgcctatgttatgcaactacttatcatactggtgggagcgcgggccggaaaatctgcctccgagcacgggaccttgttgtaccaaggtcaccagtgagcacctctccctaatcctgggtaacatcctgaagattatcaataacaacctaggcattgatgaggcatcctggatgaaaagaattgccgtctacgcccagccaatcattagtaaggctcgtcccgacctcttgagaagtcactttattcccaccctggaaaaactgaaaaagaaggcagtgaaaaccgtgcaagaggaggaacaactgaaggccgacggcaagggcgacacccaggaagctgaactgctgatcctggatgagttcgccgtactgtgcagagacttgtatgctttctatccaatgctcatcagatacgtggacaacaaccgctcaaattggctgaaaagcccggacgccgatagtgatcagctgttcagaatggttgcagaagtgtttattctgtggtgcaagtcacataatttcaaacgcgaggaacagaatttcgttatccagaacgagatcaacaatctcgctttcctgacaggcgattcgaaatcaaagatgagcaaggctatgcaggttaaatccggcggccaggatcaggaaagaaaaaagacaaaaaggagaggggacctgtattccattcagacctctctgatcgtggccgctttgaagaaaatgcttccaattggcctgaacatgtgtacacccggtgaccaagagctgatctccttggcaaaatctaggtattcccatcgggatactgatgaggaggttagagaacatcttcgcaacaacctccacctgcaagaaaagtccgacgatcctgcggtgaaatggcagttgaatttatacaaggatgttctgaagtcagaggagccatttaatccagagaagacggtggagcgggtgcagcggatatcagccgctgtgttccacctcgagcaggtggagcagcccttgagaagtaagaaagccgtgtggcataaactgctctccaaacagcgcaagcgagccgtggtcgcatgctttcgcatggcgcctctatataatctgcctcgtcaccgttctattaatctttttctgcatggctaccagagattttggatcgaaactgaggagtatagttttgaagagaagctggtgcaggatctcgccaagagtcctaaagtggaggaagaagaggaggaggagaccgaaaagcaacccgatcctttgcaccagatcattctttactttagtcgaaatgccctgacagaaagatcaaagttagaggatgaccctctgtatacatcatattctagcatgatggcaaaatcatgccagagcggagaggatgaagaggaggacgaagacaaagagaagacgttcgaagaaaaagagatggagaaacagaagacactctaccaacaggcacgactccacgagaggggagcagctgagatggtgctgcagatgatctctgctagtaagggcgagatgagtccaatggttgtggaaaccttgaagctgggcatcgcaattctaaatggtggaaacgctggcgtacagcagaagatgttggactacctgaaggagaagaaagatgctggtttcttccaatccttatcaggactgatgcagagttgctctgtcctggacttgaatgcttttgagcgtcagaataaggccgaaggacttggtatggtgacagaggaagggactttgatcgtgcgcgagcgcggagagaaggtgttacagaacgatgagttcaccagggacctgtttcggttcctgcagctactgtgcgaaggacacaactctgatttccaaaattttttaagaacacagatggggaatactacaactgtcaacgtaattatctccactgtggattatttgctgcggctgcaggagagcatcagcgacttttattggtattattccgggaaagatatcatcgatgagtcgggccagcataacttttccaaggcactggcggtgaccaagcagatcttcaactcacttaccgaatacatccaggggccttgcattggaaaccagcagtcactcgctcactcaagactgtgggatgcagtggtaggcttcctgcatgtctttgctaacatgcagatgaaactgagtcaggattccagtcagatcgagttgctgaaggagcttcttgacctgctgcaggacatggtagttatgctcttgtcactgttagagggcaacgtggtcaatggtacaattggcaagcaaatggttgatactctagtcgagagctcaaccaacgtggagatgatcctcaagtttttcgatatgtttcttaagcttaaggatctcactagctcggatacttttaaagaatacgacccagatggtaaaggaatcattagcaagaaggagttccagaaggctatggagggacagaagcaatatacacagagcgagatagacttcctgctgagctgcgctgaggctgacgagaatgatatgtttaactatgtggactttgtcgatcgatttcatgagcctgctaaagatatcggatttaatgttgctgtgctgctgactaatctgtcagaacacatgccgaatgattcccggttgaaatgtcttctggatcctgcagaaagtgtactgaattactttgaaccctatttaggcaggatcgagatcatgggcggcgcaaagaagattgaacgagtgtactttgaaataagtgagagttccagaacacagtgggagaaaccccaggttaaagaaagcaaacgccagttcatattcgacgtcgttaatgagggaggtgagcaagaaaaaatggagttgttcgtaaacttttgtgaagacaccatattcgaaatgcagttagccagccagatctccgagagtgattccgcagaccgaccggaggaagaagaagaagatgaggactcctcgtatgtgttggaaattgccggcgaggaggaggaagacggcagcctagagcccgccagcgcctttgctatggcctgcgcttcagtaaaaagaaatgtgaccgattttttaaagagagccactctaaaaaatctcaggaagcaatacagaaatgtcaaaaaaatgaccgccaaggagttggtgaaggtcctgttttcattcttttggatgctgttcgtcggcctgttccaactcctgtttactattcttgggggaattttccagattctctggtcgactgtctttggcggtggcctcgtagagggagccaagaacatccgagttacaaaaatccttggagacatgcctgatccgacccagtttggaatccatgacgacacaatggaagcagagcgtgccgaggtcatggagccgggcatcactactgaacttgtacactttatcaaaggagagaagggggacacagatatcatgagcgacctgttcggattgcaccccaagaaggagggctctttaaagcacggcccggaggtaggtctaggcgacttgtctgaaattatcgggaaagacgaacctccaactcttgagagcacagttcagaagaaaagaaaagctcaggccgccgagatgaaagctgcgaatgaggccgaaggtaaggtcgagagcgaaaaagccgacatggaggatggggagaaagaagacaaagacaaagaggaggagcaggctgaatatttgtggaccgaggtgaccaagaaaaaaaagagaagatgtggacagaaagtcgaaaagccagaagcctttaccgctaacttcttcaaaggtctggaaatctaccagactaaattactgcattatcttgctcggaatttctacaatttacgtttcttggcattattcgtcgctttcgccataaattttatccttttgttctacaaagtgacagaggagcctctggaagaggaaacagaagacgtggccaacctgtggaactcatttaatgacgaagaagaggaggaggcaatggtgttcttcgtgctgcaggagtccacgggatatatggctccaactcttcgggcgttggctattatacacaccatcatctccctggtatgtgttgttgggtactactgcttgaaagttcccctagtggtgtttaagcgggaaaaggagattgctcgcaagttagagttcgacggactgtacatcaccgagcaaccaagcgaggacgatatcaagggccagtgggatagactggttattaacacaccctcatttcccaacaattactgggataagttcgtcaagagaaaggtgattaacaagtacggggacctgtacggcgctgagcgaattgcagaactcctgggcctggacaagaacgcgctggatttcagccctgtggaagaaaccaaggccgaagcagcctccttggtcagctggctttcctctattgatatgaaataccacatctggaagctaggtgtggtgttcacagataacagttttctttatctggcatggtataccaccatgtcagttttgggacattataataatttcttcttcgccgcgcacctattagacatcgcaatgggtttcaagaccttgaggacaattctcagttctgtaactcataatggaaaacagcttgtgctcaccgttggactgttagccgtcgtcgtttacctctacacagtagtcgccttcaactttttcaggaagttctataataagagtgaagacgatgacgaacccgatatgaagtgtgatgacatgatgacgtgctatctgttccacatgtatgtgggagtaagggctggaggcggcataggagacgaaatcgaagaccccgcgggagacccttatgaaatgtaccggatagtgttcgatattactttctttttctttgtgatcgtgatcctgctggctattattcaaggccttattatcgatgcattcggggaactgcgcgaccagcaggaacaggtgagggaggatatggaaaccaagtgctttatttgcggaattggtaatgactacttcgataccaccccacatggctttgagactcacaccttgcaagagcacaacctggcaaattacctcttctttctgatgtacctgattaataaagatgaaaccgagcacacgggccaggagtcctacgtgtggaaaatgtaccaagaacgctgctgggattttttcccagccggagactgctttcgcaagcaatacgaggatcaactggggtag

SEQ ID NO: 133317 - DNA, 14598 bp, synthetic construct
  misc_feature 1..14598: note = Description of Artificial Sequence: Synthetic coding sequence
  source 1..14598: mol_type = other DNA
atggccgaaggaggggaggggggtgaagacgaaatacagtttctgaggaccgaggacgaagtcgtactgcaatgtattgccacgatccataaagagcaaaggaaattctgtttggccgccgagggccttggcaaccgactatgcttcctcgaaccaaccagcgaagcaaaatatatcccaccagacctgtgcgtatgcaactttgtgctggaacagagcctttccgtaagagctctccaggaaatgctcgcaaacaccggtgagaacggtggcgagggtgcagcccaggggggaggacaccggacactgctgtacgggcacgccgtcctcctgaggcattcttttagtggaatgtatctgacctgcttgactacatcacgatctcagactgacaagctggcatttgacgtcggactcagggagcacgccactggcgaagcttgctggtggaccatacatcccgcctcaaaacaacgatccgaaggtgagaaagttaggatcggggacgatcttatcttggtatccgtctcttccgaaaggtatctccatctgtctgttagcaacggcaacattcaagttgatgcttctttcatgcagacgctgtggaacgtgcatcccacctgcagcggcagtagcatcgaggaaggatacctgctgggtggccacgtagtcaggctgttccacggccatgacgagtgtctgaccattcctagtactgaccaaaatgacagtcagcatcgccgcatcttctatgaggcaggtggggcaggcactcgtgcccgctccctatggagagttgaaccattgcggatctcttggtctggctctaatatccggtgggggcaggcctttcgcttacgccatctgaccactggacattacctggcactcacagaagaccagggcctaatcctgcaggacagggccaaatctgatacaaagagtaccgcttttagttttcgggcctcgaaagagctgaaggagaaactcgactcgagccacaagagagatatcgaggggatgggagtgccggaaataaaatatggcgattcagtgtgcttcgtccaacacattgcgagtggactgtgggtgacttataaggctcaggacgctaagacttcacgcttaggaccactcaaacggaaggtcatcctgcaccaagaaggtcatatggatgacggtctcactctgcaacggtgccagcgtgaggaaagtcaggcggctagaataatccggaacacaactgctcttttcagtcagttcgtttccgggaataacaggaccgcggccccaatcacactaccaatagaggaagtgcttcagactctccaggatctgatcgcctattttcagccaccggaggaggaaatgaggcatgaggataagcagaacaagctgagatctctgaaaaatcgccagaatctcttcaaggaggaaggcatgcttgcgttggttcttaactgcattgaccgtctgaacgtgtataacagcgtcgcgcattttgctggcatcgccagagaggaatctggtatggcctggaaggagattctgaatctgctgtataagcttttagccgccctgattcgtgggaatcggaataactgtgctcagttctcgaacaatctcgactggcttattagcaagcttgatagattggaaagctctagtggaatcctcgaggtcttacactgcattctcacagaaagcccagaggctctcaatctcatcgctgagggccatatcaagagtatcatttccctgctcgacaaacacggtcgcaaccacaaggttctggatattttgtgcagcctgtgtctttgtaatggggttgccgtgcgtgcaaatcagaacttgatatgcgacaacctgctgcccaggcggaatcttctgttgcagacccgtttgatcaacgatgtcacaagtatcaggccaaacattttcctaggcgtggccgaggggtccgctcagtacaagaagtggtacttcgagttgattattgaccaggtagacccgttcctgaccgcggagccaacacacttacgggtggggtgggccagcagttctggatacgccccatatccaggaggaggggaggggtggggtggaaacggagtgggggacgatctgtactcttacgggtttgatggactgcacctatggtcaggacgaatcccaagagccgtggccagtatcaaccagcacctgctccggagtgatgacgtcgtgagctgttgtctagacctgggcgtgcctagtatcagcttccgaatcaatgggcagcctgttcagggcatgttcgaaaatttcaacacagacggcttgttttttcctgtgatgtcgtttagtgccggggtcaaggtcagattcctgatgggaggccgccacggggagttcaagttcctccctccatccggatatgccccctgttatgaggccctgcttccaaaagaaaaaatgcgcctcgagcccgtgaaagagtacaaaagggacgcagatggcattcgagatctactggggacgacacagtttttgagtcaggccagctttatcccttgccccgttgataccagtcaggtgattttaccaccacacttagagaaaattcgagaccggcttgccgaaaatattcacgagctctggggaatgaacaaaatcgagcttgggtggacctttggtaaaattcgggatgataataaaagacagcatccatgtctggtcgaattttctaagctgcccgaaaccgaaaagaactacaatttgcagatgagcactgaaacactgaagactctcctggctctgggatgccacattgcccacgttaatccggcagccgaagaggacctcaagaaagttaaactaccaaaaaattatatgatgtctaatggttacaagccagctcctctcgaccttagcgacgtcaagttgctcccaccacaagagattctagtggacaagctcgctgaaaatgcccataacgtatgggccaaggaccgaatcaagcaaggctggacctatggaatacagcaggatctcaagaacaaaagaaatccaagactcgttccatacgctctccttgacgagcggactaaaaaatccaatagggactccctgagggaagccgttcgcacttttgtcggatacgggtacaacatcgagccctcagatcaggagctggcagatagcgcagttgaaaaagtttctatcgataaaatccgatttttccgagtggaacgatcatacgctgtccggagcggaaagtggtactttgagttcgaggtagtaacgggcggggatatgagagttggatgggcccgccctggatgtaggccagacgtggagctcggtgcggacgaccaagcgttcgtttttgagggaaataggggccagcgatggcatcagggcagtgggtacttcggacgcacatggcagccaggtgacgtcgtcggatgtatgattaatttagacgatgcctcaatgatcttcactttgaatggggaactcctgatcactaacaaggggtccgagctggcatttgccgattacgagattgagaatggttttgtccctatctgttgcttaggactctctcagatcggtcgaatgaatctgggtacggatgccagcacctttaaattctacactatgtgtgggctgcaggaaggcttcgagccattcgccgttaatatgaatcgagacgtggcaatgtggttctccaagaggttgccgacgtttgtgaatgtgcccaaggaccaccctcatattgaggttatgcggattgacgggaccatggactcacccccctgtctgaaagtcacccacaagacatttggcactcagaattcaaacgctgatatgatctactgtaggttgagcatgcccgtagaatgtcacagcagtttcagccattccccctgtctcgattccgaagccttccaaaagcggaaacagatgcaggagatactgtcccacacaacaacacagtgctactatgcaatcaggatttttgccgggcaggacccaagctgcgtgtgggtcgggtgggtgacgccagactaccatctttacagcgaaaagttcgatctgaacaaaaactgcaccgtgactgtgaccctgggcgatgagaggggacgcgtacacgagagcgtcaagaggtccaactgttacatggtatggggcggagatatagtagcttcttcacaacgctctaatcgctctaatgtggacctggagataggatgcctagtggatctcgccatgggaatgttgtcattctccgctaatggcaaagaactgggtacgtgctaccaggtcgaaccgaacactaaggtatttcctgcggtgttcctgcagcccacaagcacctctctgtttcagttcgaactgggaaagctgaagaatgcgatgccactaagcgccgcaatctttagatctgaggaaaagaatccagtaccccagtgtccgcctcgcttggatgtgcaaaccattcagcccgtactttggtcacgcatgcctaactcattcctcaaggtggaaacggagagagtctccgagaggcacgggtgggtagtccagtgccttgaacctctgcagatgatggcccttcacattcccgaagagaaccggtgtgttgatatccttgaactatgtgagcaagaggacctcatgaggtttcactatcacactctgcgtctgtacagtgccgtatgtgcactggggaatagcagggttgcatacgctctgtgctcccacgtagacttgtcccagctgttctatgcgattgataataagtaccttcctggactgctaaggagtggcttttatgatttgctgattagtattcacctggcgtctgctaaggagcgcaaactgatgatgaagaatgagtatattataccaatcacgtcaacaactagaaacatcaggctcttccctgacgagtctaagcgtcacggcctgccaggcgtgggtctgcggacatgcctaaaacctgggtttaggttttcaaccccttgtttcgtggtcaccggagaagatcaccagaagcaaagtcctgaaatacccttagagtcccttcgcaccaaagccttgagcatgcttacggaagcggtccaatgctcaggggcacacatccgcgatcccgttggtggaagcgttgagttccagtttgtgcctgtcctgaaactgattggaaccctgcttgtaatgggagtgttcgatgacgacgacgtcaggcagattctccttctcatcgatcccagcgtgtttggtgagcatagtgccgggactgaggaaggtgccgagaaggaggaagtaacacaggtcgaagagaaagctgtggaggcaggagaaaaggccgggaaagaagcgcctgttaaaggcttgctccagacgcgattgcccgaatcagtgaagctccagatgtgtgaactgcttagctacctctgtgactgtgagttgcagcatagggtagaagccatcgtagcgtttggcgatatatacgtgagcaaattacaggccaatcagaagttccggtacaacgagttgatgcaggcactgaatatgtccgctgccctgacagccagaaaaaccaaagaattccggagtccaccgcaagagcagattaacatgctactgaactttcaactcggagagaactgtccatgtcccgaagaaattagggaggaactttatgactttcacgaggatctccttcttcattgcggagtgccattagaggaagaggaggaggaagaggaagacactagttggacggggaagctgtgtgccctggtctacaagatcaagggccctcctaaaccagaaaaggagcagccgacagaggaggaggaaaggtgccctaccaccctaaaagagctcatatcccaaacgatgatctgttgggcccaggaagaccaaattcaagactctgagttagtcagaatgatgtttaatcttttgcggcggcagtatgacagcatcggcgaactcttgcaggcactccggaagacatatactattagtcacaccagcgtgtcagacacaattaatctgctggctgccttaggtcagatcagatccctcctatcagtgcgcatgggcaaggaagaggaactgctgatgattaatggtctgggcgatatcatgaataacaaggtgttctaccagcacccaaatctcatgagggtccttggcatgcatgagactgtgatggaggtcatggtcaatgtgctgggcactgaaaagagtcagattgctttcccaaaaatggtagcgtcgtgctgccgcttcctttgttatttctgcaggatctccaggcagaatcagaaagcaatgtttgagcatttgtcttacctactggaaaattcttctgtcggtctggcctctcctagtatgcgaggctcaaccccactagacgttgcggcgagtagtgtgatggacaataacgagctggccctctcactcgaggagcccgatcttgagaaagtggtcacttacctggcgggctgtggactgcagagctgtcccatgttgctcgctaaaggctatccagacgtgggatggaatcccatagagggggagagatacctctcatttcttaggtttgcagtctttgtgaattccgagagtgtcgaagaaaatgcttcggttgttgttaagcttcttattagaaggccagagtgtttcggtcctgctttaagaggtgagggaggtaatggactgttagctgcaatgcagggcgcaatcaagatttctgagaatcccgccctcgatctgcccagccagggatacaagagagaagtttccacaggggatgacgaggaggaggaggagattgtgcatatggggaacgcaattatgagcttctactccgccctcatcgatttactaggtcgctgcgcccccgaaatgcacctcatccagacagggaagggtgaggcgatcagaatacggtccatactgagaagtctagtacctactgaggatctggtgggcatcatttcaatcccccttaagctgccgagcctgaataaagacgggtccgtaagcgagccggatatggctgccaacttttgtcccgaccataaggccccaatggtgctgtttctcgatcgggtttatgggattaaggatcaaacatttctgctgcacctcctggaggtgggcttcctgccggatctgagagcttctgcctctctcgacaccgtgagcctcagcaccaccgaggctgcacttgccttaaaccgatacatatgctctgcagtgctccctttactgacgcgttgtgcccccctgtttgcagggactgagcactgtacaagcttgattgattcaacgctccaaaccatttaccgcctaagcaaaggccgctcacttacaaaagctcagcgggatacgattgaggagtgtttgttggcaatctgcaatcatctgcggccgagcatgttgcagcaacttctgagacggttggtgttcgacgtgccgcagctcaacgaatactgcaagatgcctcttaaactgttaaccaaccactacgagcaatgttggaaatactattgtctcccctccgggtggggctcatacggacttgccgtagaggaagagttgcatctgaccgagaagctcttctgggggattttcgacagtttatctcacaagaagtacgatccagatctgtttagaatggctctaccttgcctgtcagccattgctggggcccttcctcctgactatctggacaccaggatcacagcaaccctggagaaacagatctccgtggatgccgatggaaacttcgatcccaagccaatcaacaccatgaatttctctttgcccgagaaacttgaatatatagtcaccaagtatgcggaacattcccacgacaaatgggcttgtgacaagtcacagagcgggtggaagtacggcattagtctggatgaaaatgtgaagacccaccctctcatcaggcccttcaaaacactgacagagaaggaaaaagagatctaccggtggcccgctagggagtccctgaagactatgttagccgtgggctggaccgttgagcgcacgaaggaaggtgaagcgttggtccagcagcgcgaaaatgagaaactccgttctgtctcacaggccaaccagggaaattcatactcgcccgcccctttagatctgtctaatgttgtactctcacgcgaactgcagggcatggtggaggtggtagctgagaattatcacaatatatgggcaaagaaaaaaaaactggaactcgagtccaaaggggggggctctcatccgctgctcgtgccatacgataccttgacagccaaggaaaagttcaaggaccgcgaaaaagcacaagatctcttcaaatttctccaagtcaatgggatcatcgtgagccgcgggatgaaagacatggaattggacgcttcaagcatggagaagcgtttcgcctacaagttccttaagaagatcctgaagtatgtcgactcagcgcaggaatttattgctcaccttgaagcaatagtttctagtggaaagactgagaaatctcccagggaccaggaaattaagtttttcgcgaaagtgctgttgcctcttgtggaccagtacttcacctcccactgcttatacttcctgtcatcgcctctcaaaccgttgagtagcagtgggtacgcatcacacaaggaaaaggagatggtggcgggactgttttgtaaactggcagccctggtccgccaccggattagcctgtttggcagcgattccactaccatggtgtcttgcttgcacatcctggcgcagaccctcgatacacggactgtgatgaaatcgggctctgaactggtgaaagccggcctcagagccttctttgaaaatgcagcggaagacctggaaaagacttccgaaaacctcaaactgggcaagttcacccatagccgcacccagataaagggagtttcccagaacataaactacaccaccgtcgctctcctgccgattctcacatctattttcgagcatgtgactcagcatcaatttggcatggatcttctgttaggtgacgttcagatcagttgctatcatattctctgtagcctgtattcactaggcactggaaaaaatatctacgtggaacgtcagaggcccgccctgggcgagtgcctcgctagcttggctgccgcgattccagttgcgttcctggagccaacattgaatcggtataatcccttaagcgtgtttaacaccaagactccaagagaacgctcaatccttggcatgccagacactgtggaggatatgtgccctgacataccgcagttggagggactgatgaaggaaattaacgatctcgccgaaagcggagcgagatacacggagatgcctcacgtaatcgaggtgatcctgcccatgctttgcaactatttgtcctattggtgggaacgaggtccagagaatctgcctccctctaccggtccatgctgtactaaagttacgagcgaacatctgagtctaatcctgggaaatatccttaaaattatcaacaataatctcggcatcgatgaggcctcttggatgaagcgcattgcggtgtatgcccagcccattatatcgaaagccaggccagatctgcttagatcccacttcataccaacactagagaagctgaagaaaaaggcagtgaagacagttcaggaagaggagcagcttaaggcggacggcaagggggatacacaggaggccgagctgctgatccttgatgagtttgctgttctttgtcgggatttatatgccttttaccccatgcttatccgctatgttgacaataaccgtagcaactggctgaagtcaccagacgcggattctgatcagctctttagaatggtcgccgaggtattcattttatggtgcaagtctcacaattttaagagggaggagcagaacttcgttatacaaaatgagatcaacaacttggccttccttactggtgactctaaatccaagatgtcaaaatcagggggccaggaccaggaacgcaagaagaccaagcgccgcggcgacctctattccatacagacaagcctgattgtggccgctctcaagaagatgttacccatcggccttaacatgtgcacccctggagatcaagagcttatttctctcgcaaagtcccgatattcccaccgagatactgatgaggaggtgagagaacacttacgcaataatctgcacttgcaggagaaatccgatgatcctgccgtcaaatggcagctcaatctctataaggatgtgctaaaatcagaagaacctttcaacccagagaagacagtggagcgggtgcagagaatcagcgcggcggtgtttcacctggaacaggtggagcaacctttaaggtcaaagaaggccgtgtggcataagcttttgtccaagcagcgaaaaagggccgtcgttgcttgttttcgaatggcacctctgtacaatctgccgcgtcacagatcaattaacttattcctgcacggttatcaacgcttttggatagaaactgaagaatattcttttgaagaaaagcttgttcaggatttagcaaagagtccaaaagtggaggaggaagaggaagaggaaaccgaaaaacagccagatcccctgcaccagataattctctatttctcgcgcaatgctttgaccgagcgctcgaaattggaggacgacccactgtacaccagctattcctcaatgatggccaagagctgccaaagcggcgaggacgaggaagaagacgaggataaagaaaagacttttgaggagaaggaaatggaaaagcaaaagactctgtaccaacaggcccgtctccatgagagaggtgccgctgagatggtgctccagatgatttctgcttccaaaggtgagatgtcccccatggtggtggaaaccctgaagctgggtatcgcgattctgaacggggggaatgcaggcgtgcaacaaaagatgctggactacctcaaagagaaaaaggacgccgggttcttccagtccttgtcaggcctaatgcagtcttgctcagttttggacctaaacgcatttgagagacagaacaaggccgagggcctagggatggtcaccgaagaagggacactcatcgtaagagagcgtggggaaaaagtgctacagaatgatgagttcacaagggatctgttcagattcctgcagttattgtgcgagggccacaatagtgacttccagaacttccttcggactcagatgggaaatacgactactgtgaatgttattatcagtacagtggattacctacttcggctgcaggagtccatctccgatttctattggtactacagcggcaaagacataatagatgagagtgggcagcataattttagcaaagccttagccgtaactaaacaaatctttaatagcttgaccgagtacatacaggggccatgtatcggtaaccagcagtcgctggcacacagcagactctgggacgcggtcgtgggatttctgcatgtcttcgccaatatgcaaatgaagctctcccaggattcatctcaaatcgaactgctcaaagagcttctagatctacttcaggatatggtggtaatgcttttgagccttctagaggggaatgtggtcaatggtacaatcggaaaacaaatggtcgacactctcgtcgaaagcagcaccaacgtggagatgattctaaagtttttcgacatgtttctgaagctgaaagatcttacgtccagcgacaccttcaaagaatatgaccccgatggcaaaggcatcatttcaaaaaaggagttccaaaaggccatggagggccagaaacaatatacacagtcggaaattgatttcctcctctcatgtgcagaagctgatgagaatgatatgttcaattacgtcgacttcgttgatcgatttcatgaaccagcgaaggatattgggttcaacgtggctgttctcctgactaaccttagtgagcacatgccaaatgattcaaggctcaaatgcctgctggacccggctgagtcggtgttgaactactttgagccatatcttggtcggattgaaatcatgggcggtgctaagaagatcgagcgagtttatttcgaaatctccgagtcgtcccgcacacaatgggagaaacctcaggttaaagaaagtaagcggcagttcatcttcgatgtggtaaacgaaggtggggagcaagaaaagatggaactgttcgttaacttttgcgaggacaccatcttcgaaatgcagctggcgtcacaaatctccgagtccgacagtgccgaccgtcccgaggaggaagaagaggacgaggactccagctatgtgctggagattgccggcgaggaggaggaggatgggagcctggaaccagcgtctgcattcgctatggcgtgcgcttctgtaaagcgcaatgtgactgatttcctaaaacgtgcaacgctcaaaaacctgcgaaagcaatatcgcaacgtcaagaaaatgacagccaaagagttggtcaaagtactgttctcttttttctggatgctatttgtgggcctattccagctactcttcacgatccttggtggcatctttcaaatcctgtggtccaccgtgtttggcgggggattagtggagggcgcgaagaatatccgggtcaccaagatcctgggagatatgcccgaccctactcaattcgggatccatgacgatacgatggaagccgagcgcgccgaagtaatggaacccggcatcactaccgagctagtgcatttcattaagggggaaaagggggacacagatatcatgtcagatctcttcggccttcaccccaaaaaagagggaagtcttaagcatgggccagaagtgggcctcggcgatctctccgaaattattgggaaagatgaacctcccaccctcgagtctacggtacaaaaaaagcgaaaagctcaggcggcagaaatgaaagcagccaacgaggcagaggggaaagtggagagtgagaaagctgatatggaggacggcgagaaagaagacaaagacaaggaagaggagcaggccgagtacctttggactgaggtcaccaagaaaaagaaaaggaggtgcggacagaaagtggaaaaaccagaggctttcaccgcgaacttttttaaggggctcgagatttaccagactaagttgttgcattacttggccagaaatttttataaccttcgatttctagcactcttcgtagcatttgccatcaactttatcttactgttctataaggtaacagaggagcctctggaggaggagactgaagacgtagccaacctgtggaattcttttaatgacgaggaagaagaagaagcgatggtgttcttcgtgctgcaagagtccacggggtacatggcaccaactctgcgggccctggctatcattcacaccatcatctcgctggtttgcgtggtgggatactattgtctgaaggttccattagttgtcttcaaacgggagaaggaaattgcacgcaaactggaattcgacggcctttacattaccgagcagccctccgaggatgacattaagggccaatgggaccgtttggtgattaacacaccaagctttccgaataactactgggacaagtttgttaagaggaaagtgatcaacaaatatggcgatctgtatggtgctgaaaggatcgcagaattactcggcttagacaaaaatgcactcgatttctcaccagtcgaggagaccaaggctgaagctgcgtccctcgttagttggttgtcatccatcgacatgaagtaccatatctggaagctgggcgtagtgtttaccgacaactcctttctgtaccttgcctggtacaccaccatgtccgtcttgggccactacaataatttcttctttgctgcccacctgctcgacatcgccatggggttcaagacccttcgaacaattttatcaagtgtgacccacaatgggaagcagctggtgctcacagtgggcctgcttgcggtagtggtctacctgtatacagtggtcgcctttaattttttccggaagttctacaataaatctgaagacgatgatgagcctgacatgaagtgcgatgatatgatgacatgttacctttttcatatgtacgtgggtgttcgagccggggggggcatcggagacgagattgaggatccagcaggcgatccttatgagatgtatagaatagtgttcgacataacctttttcttttttgtcatagtgatacttctggcaatcatacaagggctgattatcgacgcatttggggagctgagagatcaacaggagcaggtcagagaggacatggaaacgaagtgctttatatgcggtattggtaatgattatttcgatacgacaccccatggcttcgagacacatactctccaggaacacaacctggcaaattacttattcttcctgatgtacctaattaacaaagatgaaaccgaacacaccggacaggagtcctacgtgtggaagatgtaccaggagcggtgttgggattttttcccggctggcgactgtttcagaaagcaatacgaggatcagctgggatag

SEQ ID NO: 133318 - DNA, 285 bp, synthetic construct
  misc_feature 1..285: note = Description of Artificial Sequence: Synthetic coding sequence
  source 1..285: mol_type = other DNA
atggggtctgaactggagactgctatggagaccctgattaacgtatttcacgcgcattccggaaaagagggcgataagtacaaactctcaaagaaggagctcaaggaactgttgcaaaccgagctctcgggatttttggatgctcaaaaggacgtggatgcagtcgacaaggtcatgaaagagcttgatgagaacggggatggcgaagtcgacttccaggaatatgtagttttggtggctgcccttactgttgcgtgcaataactttttttgggaaaatagttag

SEQ ID NO: 133319 - DNA, 162 bp, synthetic construct
  misc_feature 1..162: note = Description of Artificial Sequence: Synthetic coding sequence
  source 1..162: mol_type = other DNA
atgggctcggaactggaaacggcgatggaaacccttatcaatgtttttcatgctcacagcggaaaggagggggacaaatacaaactgagcaagaaagagctaaaagagctgctgcagactgagttgagtggcttcctggatgttaaggaattaatgctgtag

SEQ ID NO: 133320 - DNA, 444 bp, synthetic construct
  misc_feature 1..444: note = Description of Artificial Sequence: Synthetic coding sequence
  source 1..444: mol_type = other DNA
atggaagaaccccagacaaagaccccaagcgcagagttcccaccctacagagctcaacctgctcagccagccacagcccctgctgctacattcgctaccctggctatttgccctgaaccggcgccaacaagtgggcccgggcaaccctgcacagccgccatggggtccgagttagagaccgctatggaaaccctgattaacgtgtttcacgcccactcgggcaaagagggggataaatataaactgtctaagaaggaactgaaagaattgctgcaaaccgaactgtccgggtttctggacgctcaaaaggacgtggatgctgtcgacaaggtaatgaaagagctggacgagaatggggatggcgaagttgattttcaggagtacgttgtcttggtggcagcgctcactgtggcttgtaacaattttttctgggaaaattcctag

SEQ ID NO: 133321 - DNA, 105 bp, synthetic construct
  misc_feature 1..105: note = Description of Artificial Sequence: Synthetic coding sequence
  source 1..105: mol_type = other DNA
atgggaagtgaactcgagactgctatggaaacactgataaatgtattccacgctcacagcggcaaggagggagataaatataagctctccaagaaagagctgtag

SEQ ID NO: 133322 - DNA, 294 bp, synthetic construct
  misc_feature 1..294: note = Description of Artificial Sequence: Synthetic coding sequence
  source 1..294: mol_type = other DNA
atgcctagccagatggaacatgccatggagacaatgatgttcacattccacaagtttgccggtgacaaaggatatttgacaaaggaagacctgcgagtgttaatggagaaggagttcccaggtttcctcgagaaccagaaggacccattggcagtggacaagattatgaaagacctagaccaatgtagagatggcaaggtcggattccaatccttctttagtttaatcgccgggttgacaatcgcctgcaatgattacttcgtcgtgcatatgaagcagaaaggaaaaaagtag

SEQ ID NO: 133323 - DNA, 294 bp, synthetic construct
  misc_feature 1..294: note = Description of Artificial Sequence: Synthetic coding sequence
  source 1..294: mol_type = other DNA
atgccctctcagatggagcacgcaatggagacaatgatgttcacgttccataaatttgctggtgacaagggatacttgacaaaagaagacctgcgagtattaatggagaaggagttcccaggatttctggaaaatcagaaagatcctcttgccgtggacaaaattatgaaagatctcgaccaatgtagagatggaaaggtaggcttccagagttttttctcacttatcgccggtttgacaatcgcctgtaacgattacttcgtggtccacatgaaacagaaaggcaaaaaatag

SEQ ID NO: 133324 - DNA, 318 bp, synthetic construct
  misc_feature 1..318: note = Description of Artificial Sequence: Synthetic coding sequence
  source 1..318: mol_type = other DNA
atggctaaaatcagtagcccgacagaaactgagcgttgtattgaatcgctcattgctgtcttccagaaatacgcggggaaggatggatacaattataccctcagtaagacagagtttctttcctttatgaatacagaacttgcggctttcactaagaaccagaaagaccccggcgttctggaccgtatgatgaagaaactagatactaactctgatggccagttggacttctccgagtttctcaacttgataggcggactagccatggcctgccatgactccttcctgaaggccgtcccttctcagaagagaacttag

SEQ ID NO: 133325 - DNA, 252 bp, synthetic construct
  misc_feature 1..252: note = Description of Artificial Sequence: Synthetic coding sequence
  source 1..252: mol_type = other DNA
gctggcaaaatgacgaaactggaagagcatctcgaagggatcgtcaacatttttcatcagtattccgttcggaaaggccactttgacactctctcgaagggtgagttaaaacagttacttaccaaggagttggccaataccatcaaaagaccgaagaagggtagttctgtgattgatgaaatcttccagggtttggacgccaaccaggacgaacaggtggattttcaggagtttatcagtctggtcgcttag

SEQ ID NO: 133326 - DNA, 279 bp, synthetic construct
  misc_feature 1..279: note = Description of Artificial Sequence: Synthetic coding sequence
  source 1..279: mol_type = other DNA
atgaccaagctcgaagagcatctggagggaattgtgaacatttttcaccagtacagcgtgagaaaaggacattttgacaccctgtctaagggtgagttgaaacagttgctgaccaaggagctggcgaatacgataaaaaacattaaagataaagcagttatcgacgaaatttttcagggcttagatgctaatcaagacgagcaggtggacttccaggaatttatcagcctcgtagctattgccctgaaagctgcccactaccacacccataaagaatag

SEQ ID NO: 133327 - DNA, 297 bp, synthetic construct
  misc_feature 1..297: note = Description of Artificial Sequence: Synthetic coding sequence
  source 1..297: mol_type = other DNA
atggccgcagaacccctcacggagttagaagagtcaatcgaaacagtggtaaccacgttttttactttcgcacggcaagagggacgtaaggatagtctgtccgtgaacgaattcaaagaactggttactcaacaactgccgcacctgctgaaggatgtggggtcactggatgaaaagatgaaatcactggacgtcaatcaggattctgagctcaagtttaatgagtattggcggttgatcggagaactggcaaaggagatcagaaagaagaaagacctgaagatcaggaaaaaatag

SEQ ID NO: 133328 - DNA, 297 bp, synthetic construct
  misc_feature 1..297: note = Description of Artificial Sequence: Synthetic coding sequence
  source 1..297: mol_type = other DNA
atggccgctgaaccacttacggagctggaagagtccattgagactgtagttaccaccttttttactttcgccagacaggagggacggaaagattctttatctgtgaacgagtttaaggaactggtcacccagcagctcccccacttgcttaaggacgtgggctcattggatgaaaaaatgaagagtctggatgtaaaccaggatagcgagttgaagttcaacgagtattggagactgatcggcgagctggctaaagagatccggaagaagaaggacttgaaaattcgaaagaaatag

SEQ ID NO: 133329 - DNA, 297 bp, synthetic construct
  misc_feature 1..297: note = Description of Artificial Sequence: Synthetic coding sequence
  source 1..297: mol_type = other DNA
atggctgcagagcccctgactgagttggaggaaagtatagagacagtcgttaccacatttttcaccttcgcccgccaggaagggaggaaagactcattgtcggtcaatgaatttaaagaattagtgacacaacagctgccacatctgttgaaggacgtagggtctttagatgagaaaatgaaaagcctggatgtcaaccaggattccgaacttaagttcaatgaatattggagactcatcggcgaactcgctaaggagatccggaaaaaaaaggatctgaagatacggaagaagtag

SEQ ID NO: 133330 - DNA, 297 bp, synthetic construct
  misc_feature 1..297: note = Description of Artificial Sequence: Synthetic coding sequence
  source 1..297: mol_type = other DNA
atggctgccgagcctctgaccgaactggaggagtccatagaaaccgtcgtaactacattcttcacatttgccagacaggagggccgaaaggatagcctatccgtgaatgagtttaaagaacttgttacccagcagctcccccatctgctgaaagacgttggctcactggacgaaaagatgaaatctctggatgttaaccaggattcagagttgaaatttaacgaatattggcgtttaatcggcgaactggccaaggaaatcaggaagaaaaaggatctcaaaatccgcaagaaatag

SEQ ID NO: 133331 - DNA, 297 bp, synthetic construct
  misc_feature 1..297: note = Description of Artificial Sequence: Synthetic coding sequence
  source 1..297: mol_type = other DNA
atggccgccgagccactaacagaacttgaggagagcatcgagaccgtggtgaccacattcttcacattcgcccgccaggagggcagaaaagattccctcagcgtgaacgagtttaaagagctggtcacacagcagctgccacaccttttgaaagatgttggatcacttgatgagaaaatgaaatctcttgatgttaatcaagactctgagttaaagttcaatgagtactggagattgataggggaactcgcaaaggagatccggaagaagaaggatctgaagatcaggaaaaaatag

SEQ ID NO: 133332 - DNA, 315 bp, synthetic construct
  misc_feature 1..315: note = Description of Artificial Sequence: Synthetic coding sequence
  source 1..315: mol_type = other DNA
atgggtcaatgcagatccgctaacgcagaagatgcccaggaattcagcgacgtggagcgggccattgagacacttatcaagaatttccaccagtacagcgtagagggcggaaaggaaaccttgaccccaagcgagttaagggatctcgtgactcagcagctccctcatcttatgccatcaaattgtggcctcgaagagaaaattgcaaacctgggcagctgtaatgattccaagttagaattcagatcattttgggaattgattggcgaagctgctaaaagcgttaagctcgaacgtcctgtgcgtggacattag

SEQ ID NO: 133333 - DNA, 315 bp, synthetic construct
  misc_feature 1..315: note = Description of Artificial Sequence: Synthetic coding sequence
  source 1..315: mol_type = other DNA
atgggacagtgtagaagcgctaacgccgaggacgctcaggagttcagcgacgtggagcgggcaattgaaactcttatcaagaattttcaccaatactcggtggagggcggaaaggagacactaacaccgtccgagctcagggacctagtgacccagcagctgccacacctgatgccgagtaactgcggattggaggagaagatcgccaatctcggtagttgcaacgattccaaactagaatttcgtagtttctgggagttgattggcgaggcagccaaatcggtgaagttggaacggcctgttcgcgggcactag

SEQ ID NO: 133334 - DNA, 315 bp, synthetic construct
  misc_feature 1..315: note = Description of Artificial Sequence: Synthetic coding sequence
  source 1..315: mol_type = other DNA
atggggcagtgtagatctgctaacgcagaagatgctcaggagttttctgacgtggaaagggctattgagactttgattaagaactttcaccagtattccgttgagggaggtaaggaaaccctgacaccaagcgaactgcgcgacctggtcacccagcagcttccccacttgatgccttcaaattgtgggctggaggagaaaattgccaatttgggaagctgcaacgacagtaagctagagtttcgatccttttgggagttaatcggagaggcagcgaaaagcgtgaagctggaacgccctgtgagaggacattag

SEQ ID NO: 133335 - DNA, 315 bp, synthetic construct
  misc_feature 1..315: note = Description of Artificial Sequence: Synthetic coding sequence
  source 1..315: mol_type = other DNA
atgggtcagtgtagaagcgcaaacgctgaggacgcacaagaattcagcgatgtcgagcgggccattgagacgctcatcaagaatttccaccaatattctgtggagggcggaaaagaaactctgaccccaagtgagctcagggatctggtaactcagcagctgccccacctgatgccttctaactgcggtcttgaagagaagattgctaatttgggctcttgtaatgactccaaacttgagttcaggtccttctgggagttgatcggggaggctgccaaatcagtgaaacttgagcgccctgtgcgcgggcactag

SEQ ID NO: 133336 - DNA, 417 bp, synthetic construct
  misc_feature 1..417: note = Description of Artificial Sequence: Synthetic coding sequence
  source 1..417: mol_type = other DNA
atgtgcagttctcttgagcaggctctggctgtactggtgacgacgttccacaagtattcatgtcaggaaggggacaaatttaagttatcaaaaggcgaaatgaaggagttactacataaggagcttccatcttttgtgggacatagcagagaaccatgcgctgtgagagcattccgcgtgcacctgttcaaccccgtgattggggatctcaggaaccagagtccagagggcaagtcggactgccctaaaattacacagcattgggagaaggtggacgaagagggtcttaaaaagttgatggggtctttagacgagaattccgaccagcaagtcgacttccaggagtacgcagtctttcttgcattaatcacagtgatgtgcaatgacttctttcagggctgccctgatcggccctag

SEQ ID NO: 133337 - DNA, 294 bp, synthetic construct
  misc_feature 1..294: note = Description of Artificial Sequence: Synthetic coding sequence
  source 1..294: mol_type = other DNA
atgtgctctagcctggaacaggcacttgcggttctggtaactaccttccataaatacagttgccaggagggcgacaaatttaagctctccaaaggggagatgaaagagctcctgcacaaagagctcccgagttttgttggagagaaggtggacgaagaaggtctcaaaaaattgatggggtccctggacgaaaactctgatcagcaggtggacttccaggaatatgcagtattcctcgccctgattacagttatgtgcaatgatttctttcaaggatgcccagaccgaccttag

SEQ ID NO: 133338 - DNA, 294 bp, synthetic construct
  misc_feature 1..294: note = Description of Artificial Sequence: Synthetic coding sequence
  source 1..294: mol_type = other DNA
atgtgctcctctctcgaacaggccctcgccgtcctcgtgacaacatttcacaaatacagttgccaggagggcgataaattcaaactatcaaagggagagatgaaggagttactgcataaggagttacccagttttgtgggagagaaggtagatgaggagggcctgaagaaactgatgggcagtcttgacgagaacagcgaccagcaagtagactttcaggaatatgctgtgttcttggccctcatcaccgtgatgtgcaatgacttctttcaggggtgccccgataggccgtag

SEQ ID NO: 133339 - DNA, 294 bp, synthetic construct
  misc_feature 1..294: note = Description of Artificial Sequence: Synthetic coding sequence
  source 1..294: mol_type = other DNA
atgtgttccagtctcgagcaagccctggctgtgctggtaacaacattccataaatacagttgccaagagggggacaagtttaagctatctaaaggagagatgaaagagttgttgcataaagagctaccctcattcgtcggagagaaagtggacgaggaaggtcttaagaagttgatgggctccctagatgagaacagcgatcagcaggtggacttccaagaatacgccgtgtttctcgctctgattactgtaatgtgcaatgatttcttccaagggtgccctgaccggccctag

SEQ ID NO: 133340 - DNA, 306 bp, synthetic construct
  misc_feature 1..306: note = Description of Artificial Sequence: Synthetic coding sequence
  source 1..306: mol_type = other DNA
atggctcggccactagagcaggccgtagccgccatcgtgtgcaccttccaagagtacgcgggacgttgcggggacaagtacaagttgtgccaagccgagctaaaagagctccttcagaaggagctcgccacatggacccccacagagttcagggaatgcgattataacaagtttatgagtgtgctcgacacgaacaaggactgtgaagttgactttgtggagtacgttcgctccctcgcctgtctgtgtctctactgccatgagtactttaaggactgcccaagcgaacccccctgttctcagtag

SEQ ID NO: 133341 - DNA, 306 bp, synthetic construct
  misc_feature 1..306: note = Description of Artificial Sequence: Synthetic coding sequence
  source 1..306: mol_type = other DNA
atggctcgccccctggaacaggcggttgctgctatcgtctgtacattccaagaatacgctggccggtgtggtgacaaatacaaactatgccaagccgagctgaaggagctcctgcagaaggagctcgccacatggaccccaacggaattccgagagtgtgattacaataagtttatgtccgttctggatactaacaaggactgcgaagtcgactttgtggagtacgtgagatccctcgcttgtttgtgcctgtattgtcacgagtattttaaagactgtccttccgaacccccttgcagtcaatag

SEQ ID NO: 133342 - DNA, 306 bp, synthetic construct
  misc_feature 1..306: note = Description of Artificial Sequence: Synthetic coding sequence
  source 1..306: mol_type = other DNA
atggcatgccctttagagaaagctctcgatgtgatggtttctacctttcacaagtactccgggaaagagggagacaagttcaagctgaacaagagcgagcttaaggagcttctcacgcgcgagcttccgagtttcttaggtaagaggacagacgaagcagcctttcagaaactgatgagcaatttggatagcaaccgagacaatgaagtcgattttcaggagtactgtgtctttctcagctgtatcgccatgatgtgtaacgaatttttcgaaggatttccggataagcagcccagaaaaaaatag

SEQ ID NO: 133343 - DNA, 306 bp, synthetic construct
  misc_feature 1..306: note = Description of Artificial Sequence: Synthetic coding sequence
  source 1..306: mol_type = other DNA
atggcctgccctcttgaaaaagccctggatgtcatggttagtacctttcacaagtacagcggaaaagagggcgacaagtttaagttgaacaagagcgagttaaaggagctgctcaccagggaactcccttcgtttctgggaaaaagaactgatgaagcagcttttcagaagctgatgtcaaacttggatagcaatcgagacaacgaggtggacttccaagagtactgtgtcttcttaagttgcatcgccatgatgtgtaatgagttctttgagggttttcccgacaaacagccacgcaagaagtag

SEQ ID NO: 133344 - DNA, 306 bp, synthetic construct
  misc_feature 1..306: note = Description of Artificial Sequence: Synthetic coding sequence
  source 1..306: mol_type = other DNA
atggcgtgccccctggagaaggccttggatgtaatggtgtcgacctttcataagtactccggaaaagaaggcgataaattcaaactgaataaatctgaattgaaggaattactcacgagagagctgccgtctttcctcggaaagaggacggacgaggctgctttccagaagcttatgagtaaccttgattccaatcgggataacgaagtagattttcaagaatactgcgtgttccttagttgtatcgcaatgatgtgtaacgagtttttcgaaggatttcccgacaaacagccccggaagaaatag

SEQ ID NO: 133345 - DNA, 306 bp, synthetic construct
  misc_feature 1..306: note = Description of Artificial Sequence: Synthetic coding sequence
  source 1..306: mol_type = other DNA
atggcttgtcccttagagaaggcgctggacgtaatggtgtctacttttcataagtatagcgggaaagagggagataagtttaagctaaacaaatccgagctgaaagagctgctgaccagagagcttccctcattcttgggcaaacgaactgacgaggctgcgttccagaaactgatgtcaaatcttgactcaaaccgggataacgaggttgacttccaggagtattgcgtgtttttgagctgcatagctatgatgtgcaatgaattctttgaagggtttcctgacaagcagcctaggaagaagtag

SEQ ID NO: 133346 - DNA, 273 bp, synthetic construct
  misc_feature 1..273: note = Description of Artificial Sequence: Synthetic coding sequence
  source 1..273: mol_type = other DNA
atggtgtccacattccacaaatactctgggaaagagggagacaaatttaaactgaacaaaagcgagttaaaagagttgcttactcgggaattgccatcttttctcggaaagagaacagacgaagccgcgtttcagaagctcatgtccaaccttgatagtaatcgcgataacgaggttgacttccaggagtactgtgtgttcctgtcctgtattgcaatgatgtgcaatgagttttttgaaggttttcccgataaacagccgcggaaaaagtag

SEQ ID NO: 133347 - DNA, 333 bp, synthetic construct
  misc_feature 1..333: note = Description of Artificial Sequence: Synthetic coding sequence
  source 1..333: mol_type = other DNA
atgcccgccgcctggatattatgggcacattcccattctgagttgcacaccgtcatggagacacctctggagaaggctcttaccaccatggtcaccacttttcacaaatactctggtcgcgagggcagcaaactgactcttagtcggaaggagctcaaggaactgattaagaaagagctgtgcctgggggaaatgaaagaaagctccattgatgacctcatgaaaagtcttgacaagaactcagatcaagagatcgatttcaaagaatacagcgtgtttctgaccatgctttgcatggcttataatgattttttcctagaagacaacaaatag

SEQ ID NO: 133348 - DNA, 279 bp, synthetic construct
  misc_feature 1..279: note = Description of Artificial Sequence: Synthetic coding sequence
  source 1..279: mol_type = other DNA
atggagacaccgctcgaaaaggccctcacaaccatggtgactacctttcataagtactccggacgagagggctccaaattgaccctgagtagaaaggaactcaaagagttgatcaagaaggagctttgcctgggggagatgaaggagtcgagcattgatgatctcatgaaatccttagataagaatagcgaccaggaaatcgattttaaagagtactcagtgttcctcacaatgctttgtatggcgtacaacgatttcttcttggaagacaataaatag

SEQ ID NO: 133349 - DNA, 279 bp, synthetic construct
  misc_feature 1..279: note = Description of Artificial Sequence: Synthetic coding sequence
  source 1..279: mol_type = other DNA
atggaaacccctctggaaaaagcccttacaaccatggttaccacattccacaaatatagtgggagggagggaagcaaattgacactcagtcgaaaagagctcaaagaactgattaagaaggaattatgtctgggcgaaatgaaagaatccagcatcgacgatttgatgaaatctctggacaaaaactctgatcaggagatcgactttaaagaatattccgtgtttctgaccatgctctgcatggcttacaacgacttttttctggaagataacaagtag

SEQ ID NO: 133350 - DNA, 273 bp, synthetic construct
  misc_feature 1..273: note = Description of Artificial Sequence: Synthetic coding sequence
  source 1..273: mol_type = other DNA
atggcgtgccctttagaccaggccatcggcttactggttgcgatattccacaagtacagcggaagggaaggcgataaacatactctgtctaagaaagagcttaaggaattaatacaaaaggagctgacaattggctcgaagttgcaggacgcggagattgccagactcatggaggacctcgatcgcaacaaggatcaggaggtcaacttccaggagtacgttacgtttttgggcgctttagctctcatatataacgaggctctgaaaggatag

SEQ ID NO: 133351 - DNA, 273 bp, synthetic construct
  misc_feature 1..273: note = Description of Artificial Sequence: Synthetic coding sequence
  source 1..273: mol_type = other DNA
atggcctgcccacttgatcaggcgattgggctccttgttgccatctttcataagtattctggacgggaaggtgacaaacacactttatctaaaaaagaattaaaagagctcatccaaaaggagctcacaatcggcagtaagcttcaggatgccgagatcgctcgtctaatggaggatctcgataggaacaaagatcaggaagtcaacttccaagagtacgttacctttctgggcgccctggccctgatctacaatgaagccctcaaaggctag

SEQ ID NO: 133352 - DNA, 306 bp, synthetic construct
  misc_feature 1..306: note = Description of Artificial Sequence: Synthetic coding sequence
  source 1..306: mol_type = other DNA
atgtctaatacgcaggccgaacggtccataatcggaatgatcgacatgttccataagtatactcgaagggatgataagattgagaagcccagccttctgactatgatgaaagaaaactttcctaactttctgtctgcatgcgacaagaaagggaccaattatttggcagacgttttcgaaaagaaggacaagaatgaggataaaaagatcgatttttcagagttcctgtctctgctgggagatattgctactgattaccataaacagtcccatggagcggccccctgtagcgggggtagccagtag

SEQ ID NO: 133353 - DNA, 306 bp, synthetic construct
  misc_feature 1..306: note = Description of Artificial Sequence: Synthetic coding sequence
  source 1..306: mol_type = other DNA
atgtccaacactcaagctgagaggtccatcattgggatgatcgacatgtttcacaagtatacacgtagggatgacaaaatagaaaaacctagtctgctcacaatgatgaaagaaaacttcccaaacttcctgtcagcctgcgacaagaagggtacaaattatcttgctgatgtgttcgagaagaaagataagaacgaagacaagaagattgacttctctgagtttcttagtctgctcggtgatattgctaccgactatcacaagcaatcacacggggctgctccttgcagtggaggcagccagtag

SEQ ID NO: 133354 - DNA, 282 bp, synthetic construct
  misc_feature 1..282: note = Description of Artificial Sequence: Synthetic coding sequence
  source 1..282: mol_type = other DNA
atgctgacagaattagaaaaggcccttaatagcattatcgacgtgtatcataaatactccttgatcaaaggaaacttccatgccgtctaccgagacgatttgaaaaaactccttgaaacggagtgcccgcagtacattagaaagaaaggagcagatgtgtggttcaaagagctcgacatcaatacggacggggcggtgaacttccaggaattcctgattctggtcattaagatgggagtggctgctcataaaaaaagccatgaggagagtcataaggagtag

SEQ ID NO: 133355 - DNA, 282 bp, synthetic construct
  misc_feature 1..282: note = Description of Artificial Sequence: Synthetic coding sequence
  source 1..282: mol_type = other DNA
atgctcactgagctggaaaaagccctcaactcaatcatagacgtgtaccataagtacagtctgatcaagggcaattttcatgcagtctacagggacgatttaaagaagctgctggaaacagaatgtcctcagtacatccggaagaagggagccgacgtatggttcaaagagcttgacatcaacacagatggggcagtcaactttcaggagttcctgatactcgtcattaaaatgggtgtcgccgcacataagaaatcccatgaagaaagtcataaagagtag

SEQ ID NO: 133356 - DNA, 345 bp, synthetic construct
  misc_feature 1..345: note = Description of Artificial Sequence: Synthetic coding sequence
  source 1..345: mol_type = other DNA
atgacatgtaaaatgagccagcttgagcggaatatcgaaacaattattaacaccttccaccagtacagcgtcaagttaggtcacccggacactctgaaccagggagaattcaaagaactggtcagaaaagacctgcagaatttcctcaagaaggaaaataagaatgagaaggtcatcgagcacattatggaagacctggatacgaatgcagataagcagttgagctttgaggaatttatcatgctaatggcccgattaacttgggcttcacatgagaaaatgcacgagggagacgaggggcctggccaccaccacaagcctggcctgggggagggaacaccatag

SEQ ID NO: 133357 - DNA, 279 bp, synthetic construct
  misc_feature 1..279: note = Description of Artificial Sequence: Synthetic coding sequence
  source 1..279: mol_type = other DNA
atgagcgagctcgagaaggctatggttgcattgattgatgtgtttcatcagtattctggtcgagagggagataaacacaagttgaaaaaaagcgagctcaaggagctgattaacaatgaactgagccactttctggaggagataaaagagcaggaggtggtagacaaggttatggagaccctggacaatgatggagacggcgagtgcgactttcaggagtttatggctttcgtcgctatggtcacgactgcctgtcatgaattctttgaacacgagtag

SEQ ID NO: 133358 - DNA, 279 bp, synthetic construct
  misc_feature 1..279: note = Description of Artificial Sequence: Synthetic coding sequence
  source 1..279: mol_type = other DNA
atgtccgaactcgagaaagccatggtcgccctaatcgatgtgtttcaccagtactcgggacgcgaaggggacaagcacaaactaaagaagtccgaactgaaggaactgatcaacaatgagctatctcactttctcgaggagatcaaagaacaagaggttgtggataaggtgatggagaccctggataatgacggtgatggcgagtgtgactttcaagaatttatggcctttgtcgcaatggtaaccactgcatgccatgaattcttcgagcacgagtag

SEQ ID NO: 133359 - DNA, 288 bp, synthetic construct
  misc_feature 1..288: note = Description of Artificial Sequence: Synthetic coding sequence
  source 1..288: mol_type = other DNA
atgacagaattggagaccgcgatgggaatgattatcgatgtgttcagccgctactcaggctcagagggatcgacacagacccttaccaagggggaacttaaagtgctgatggagaaggaactgcctggcttcctacagagcggcaaggacaaggacgcagtcgacaaactgctcaaggacctggacgcaaatggtgacgcacaggttgatttttctgaatttatcgtgttcgtcgccgccataacctctgcctgccacaaatacttcgagaaggctggactgaagtag

SEQ ID NO: 133360 - DNA, 300 bp, synthetic construct
  misc_feature 1..300: note = Description of Artificial Sequence: Synthetic coding sequence
  source 1..300: mol_type = other DNA
atgccaacacagttagaaatggccatggataccatgatccggattttccatagatattctggcaaagaacgcaaaagatttaagctcagcaagggcgaactcaaactgctcctccagcgagagctgacagagtttctttcctgccaaaaggagactcaactggttgataagatcgtccaagacctcgatgccaacaaagacaacgaggttgactttaatgagttcgtcgtcatggtggcagccctgacagtagcttgcaacgactatttcgtggagcagttaaaaaagaagggcaaatag

SEQ ID NO: 133361 - DNA, 300 bp, synthetic construct
  misc_feature 1..300: note = Description of Artificial Sequence: Synthetic coding sequence
  source 1..300: mol_type = other DNA
atgcctacccaattagagatggcgatggacacaatgatcagaatctttcaccgctactcgggcaaggaaaggaagagatttaaactgagcaaaggagagcttaagctcttattgcagcgggaattgaccgagtttctttcctgccagaaggagactcagctcgtcgataaaatcgtacaggacctggacgcgaacaaagataatgaggtggatttcaacgagtttgtggttatggtggctgctttaacggttgcctgcaacgactactttgtggaacagcttaagaagaagggaaagtag

SEQ ID NO: 133362 - DNA, 1029 bp, synthetic construct
  misc_feature 1..1029: note = Description of Artificial Sequence: Synthetic coding sequence
  source 1..1029: mol_type = other DNA
atgatgtgctctcgcgtcccttccgagcagagcagtggtacctccttgttgcctaaggatggggcgcctttctcatgggacagcctcgatgaggacggcctggatgattcactgctcgagctgtcggagggcgaggaagacgacggggacgttaactacactgaggaggaaattgatgcactgctcaaagaagatgaccctagttacgagcaatccagcggggaggatgacgggggccacgtcgagaaaggagagcgcggatcccagattcttcttgacacgccaagagagaagaacagttcatacagccttggccccgtggctgagaccccggacctgtttaagttgcctcagctctccactagcagcggccacggccctgcccacaccaaaccccttaacaggcggtcggtgctagagaagaacctgattaaagtgacagtggctccgtttaatcccacagtgtgtgatgcacttttagacaaggacgagacagattccagtaaagacacggagaagctgagttctctgggcgaagagatgcgcgaggatggcctcagtccaaacgagagcaagttatgcaccgagagcgagggcataagccctaataattctgcctggaatggccctcaactttcaagcagcaataataactttcagcaaacagtgagtgataaaaatatgcccgacagcgagaaccctaccagtgtgttctcacgcatttccgatcattctgagacacccaatatggaactcagttgtaggaatggcgggagtcacaagagctcatgtgaaatgaggagtctggtcgtatccaccagctctaacaaacaggatgtgctaaacaaagactctggcaaaatgaagggacatgagcggcggctgggtaaggttatacctgtgcttcagactaagactcggaccaacgtgccaactttttctcagtcaaatctggaacaacaaaagcagctgtatttaaggagcgtcatcgcacacatcgaggaccctgaagacactaaccagggatag

SEQ ID NO: 133363 - DNA, 1227 bp, synthetic construct
  misc_feature 1..1227: note = Description of Artificial Sequence: Synthetic coding sequence
  source 1..1227: mol_type = other DNA
atgatgtgcagccgggtgccctctgaacaatcatccggaactagcctgctccccaaagacggtgcccccttctcctgggactctttggacgaggacggcctggatgacagcctcctggagctgtctgagggcgaggaggacgacggggacgtgaactacaccgaagaggagatcgatgccctactcaaagaagatgaccccagttacgagcagtcaagtggtgaggacgacggcggacacgtagagaaaggcgagagggggagtcagatcctgctcgataccccacgggagaaaaacagtagttattcactgggacccgttgcagaaacccctgatctcttcaaactgccacaactgtccactagcagtggccatggccctgcgcatactaaaccgctcaacagacggtccgttttggagaaaaaccttattaaagtgaccgtggcccccttcaatccaacagtgtgcgacgccctgctggacaaggacgagaccgatagctcgaaggataccgaaaaactgtccagccttggcgaggagatgcgcgaggatgggttgtctcctaacgagtctaaactctgcaccgaatctgagggcattagtccaaacaactccgcctggaatggcccccagctgtcgtccagcaataacaacttccagcaaactgtgtcggataaaaatatgcctgactctgagaacccaacatctgtattctcacgaatctctgaccatagtgaaactcccaatatggaactcagctgtaggaacgggggctctcataagtcaagctgtgaaatgagaagcctcgttgtgagcacctcaagcaacaagcaagacgtgctgaacaaggactccggtaaaatgaagggacacgagcgtagactgggcaaagtgatcccagtgctgcagaccaaaacacggaccaacgtgcctactttcagccagagcaatctcgaacagcagaagcaactgtatttgcgctccgtgattgcccatatagaagaccctgaggatactaatcaagggatcagtggcgagctgtgtgccctcatggaccaggtccatcacatgcagcacagtaagtggcagcacccctcggatctgacaacacgtaactatgcccggcgtcagaagcacctgcagcgctactccctgacacagtgggtggatcgaaatatgcgctctcaccatcgatttcagagattgcccgacttcagttattcctag

SEQ ID NO: 133364 - DNA, 1227 bp, synthetic construct
  misc_feature 1..1227: note = Description of Artificial Sequence: Synthetic coding sequence
  source 1..1227: mol_type = other DNA
atgatgtgctcaagggtgccctcagagcagtcatccggaacttctttgttgccaaaggatggcgcacccttctcctgggactctttggacgaggacggtctggatgactcactgcttgagctgtcggagggagaagaagacgacggagatgtgaactataccgaagaggagatcgacgctttgcttaaagaggacgacccttcatacgagcagtctagtggcgaagacgatgggggccacgtggagaagggcgaaaggggctcgcaaattctgctggatacgccccgtgagaaaaattcaagctattctctagggccggttgccgaaacacctgatctgtttaagcttcctcaactgtcaacatctagcggccatggaccagctcacacgaagccactcaaccgtcggagtgtgctggagaagaacctaatcaaagttactgtcgcaccctttaatcccaccgtctgcgacgctctgctggataaggatgagacagactcaagcaaggacaccgagaagctctcttccttaggcgaggaaatgagagaagatgggctgagccctaatgagtcaaaactgtgcacggaatctgagggcatcagtcccaacaattctgcctggaacggaccgcagctgagctctagcaacaacaacttccagcagactgtgtctgacaagaatatgcctgattccgagaaccctacatcggtgttcagtcgaatttcagaccactctgagaccccgaacatggagctaagctgccgcaatggagggagtcataagagctcatgcgagatgcggagcctggtggtatctacaagctcgaacaaacaggacgttctcaacaaagacagtggcaagatgaagggacatgaaaggaggcttggcaaagtgatccccgtgttacagaccaagacccgaaccaatgtgccaactttcagtcagagtaacctggaacaacagaaacaactttaccttcgctctgtcattgctcatatcgaagatcctgaggacactaaccaaggaatttctggagaactctgtgcccttatggaccaagttcatcatatgcagcatagcaaatggcaacatccttccgacctgaccacccgcaattacgcacggagacagaagcacctccaacggtattcgcttacacagtgggtcgacaggaacatgcggtcccatcatagatttcaacggctgcccgactttagttacagctag

SEQ ID NO: 133365 - DNA, 1026 bp, synthetic construct
  misc_feature 1..1026: note = Description of Artificial Sequence: Synthetic coding sequence
  source 1..1026: mol_type = other DNA
atgatgtgctccagggtgcccagtgagcagtctagtggcacctccctcctccctaaggacggcgctccattctcatgggactctttagatgaagatggcttggacgatagcttgttagagctgtcagagggagaagaggatgatggcgacgtaaattacaccgaagaagaaatcgatgctctgctcaaagaggatgatcctagctacgagcagagcagtggagaagacgacggtggacacgtggagaaaggagaacgcggatctcagatccttctcgatacccctcgggagaagaatagttcctacagtttgggaccggtggccgagacccctgacctattcaagctgccccagctatctaccagtagcggccatggacccgcccacacaaagcctctgaacagaaggtcagtgcttgagaaaaatttgattaaggtcacagtggccccttttaaccctaccgtttgtgacgcactgctcgataaagatgagaccgatagcagcaaggatacggaaaaattatcctccctcggtgaggagatgcgggaagatggactgagcccaaacgagtcaaaactctgtaccgaatcggagggcataagccctaataatagcgcctggaacggtcctcagcttagctcctccaacaacaattttcagcagacagtgtccgataaaaatatgccggactctgagaacccgaccagcgttttttctagaattagcgatcactctgagaccccaaatatggaactcagttgcaggaacggcggaagccacaaatctagttgcgagatgcgctcactggttgtgagcaccagtagcaacaaagacgtgcttaacaaggatagcggcaaaatgaaaggccacgagaggcgcttgggaaaagtgattccagtcctgcagacaaagaccaggacaaatgtcccaaccttctcacagagcaatctggagcaacagaagcaactgtacctgaggagcgtgattgcccacattgaggacccggaggataccaatcagggatag

SEQ ID NO: 133366 - DNA, 441 bp, synthetic construct
  misc_feature 1..441: note = Description of Artificial Sequence: Synthetic coding sequence
  source 1..441: mol_type = other DNA
atgatgtgcagtcgagtgccaagtgagcagtcttccggcacatcactactaccaaaggacggcgcaccgttttcctgggactctttagacgaggatggcctggatgattccctgctcgaactcagcgaaggtgaggaggatgatggcgatgtcaattacacagaggaagaaattgatgccctgctgaaagaagacgacccgtcctatgaacaatcttctggggaggacgatggaggccacgtggaaaaaggggaacgggggtcccagatcctccttgacaccccgagagaaaaaaactccagctattctctcggtccagtggctgagactcccgatctgtttaaactgccacagctcagcacttccagtggccacggaccggcccatactaagccactaaacagacgatcagtgctcgagaagaatcttatcaaggtctag

SEQ ID NO: 133367 - DNA, 363 bp, synthetic construct
  misc_feature 1..363: note = Description of Artificial Sequence: Synthetic coding sequence
  source 1..363: mol_type = other DNA
atgatgtgttctcgcgttccatctgaacagagcagtggcacctcactgctcccaaaagacggcgcccctttttcatgggattcactggacgaagacggcctcgacgactccctgctggagctatctgagggagaggaagatgacggagacgttaactatacggaggaagaaattgatgctttgttgaaggaggacgatccaagctacgaacaaagcagtggtgaggatgacggaggccacgtggagaaaggagaacgcggctcgcagatcctgctcgataccccccgggagaagaactctagctactcactgggcccagtagcagaaacgccagatctgtttaagttgcctcagctttcatag

SEQ ID NO: 133368 - DNA, 126 bp, synthetic construct
  misc_feature 1..126: note = Description of Artificial Sequence: Synthetic coding sequence
  source 1..126: mol_type = other DNA
atgatgtgcagccgggtcccatcggagcagtcctcagggaccagtctgctgcccaaagatggcgcacccttctcctgggacagccttgatgaggatggactggacgactccctgctggaactctag

SEQ ID NO: 133369 - DNA, 18 bp, synthetic construct
  misc_feature 1..18: note = Description of Artificial Sequence: Synthetic coding sequence
  source 1..18: mol_type = other DNA
atgatgtgttcacggtag

SEQ ID NO: 133370 - DNA, 393 bp, synthetic construct
  misc_feature 1..393: note = Description of Artificial Sequence: Synthetic coding sequence
  source 1..393: mol_type = other DNA
atgatgtgtagccgggtcccgtctgaacagtccagtgggacttccctgctgcccaaagacggcgctcccttctcatgggacagcctagatgaagacgggctggacgacagcctcttggaactgtctgagggggaggaggatgatggggacgtgaactatacagaggaggaaatagacgcccttcttaaagaagatgacccatcatatgaacagagctcaggagaggatgacggaggtcacgtggagaagggagagcgcggctcacagattctcttggatacaccgagagagaagaacagtagctacagtctggggcctgtcgcagaaacacctgatttgtttaaattgccacagctcagtaccagctcaggccatggtcccgctcacacttag

SEQ ID NO: 133371 - DNA, 1026 bp, synthetic construct
  misc_feature 1..1026: note = Description of Artificial Sequence: Synthetic coding sequence
  source 1..1026: mol_type = other DNA
atgatgtgctcaagagttccttccgagcagagctccggtaccagcctgttgcccaaggacggggctcctttctcatgggatagcttggacgaggatgggctcgacgacagcctgctcgagctaagcgagggcgaagaggacgatggagacgttaattacactgaagaagagatcgatgcgcttctgaaagaggacgacccatcatatgagcagtctagcggggaggatgacgggggacacgtggagaagggcgagcgaggctcgcagattctccttgatacaccgcgggagaaaaattcttcctatagcctcggtccagtcgccgaaaccccagatctcttcaaactgcctcaactgtccacatcctccggccacgggcctgcccatacaaagcccttaaacagaaggagcgtcctcgaaaaaaacctgatcaaagtgacagtcgcaccattcaacccaacagtctgtgatgcacttctggacaaagacgagactgacagctcgaaggacactgaaaagttgtcttcactgggggaggaaatgagggaagatgggctgtcaccaaacgagagtaagctgtgtactgagtccgaagggatctctcccaacaactccgcctggaacggccctcagctttcctccagtaacaataactttcagcagaccgttagcgacaagaatatgcctgactcagaaaaccctacgagcgttttttcgcgtattagtgatcactctgagacacctaacatggagctgagttgccggaatggcggctcccataagagctcatgtgaaatgcgcagcttggtggtgtcgacctcatccaacaaggatgtgctgaataaggactccggaaagatgaagggtcacgaaagacgtcttggcaaagtgattccggttctgcagactaagacgcgcactaacgtgccgaccttctctcagtccaacctggaacagcagaagcaactctacctgagatcagtcatcgctcatattgaggaccccgaagacaccaaccagggttag

SEQ ID NO: 133372 - DNA, 516 bp, synthetic construct
  misc_feature 1..516: note = Description of Artificial Sequence: Synthetic coding sequence
  source 1..516: mol_type = other DNA
atgatgtgcagccgggtcccctccgagcagagctctggtaccagcttgctgccgaaggatggagcgccattcagctgggattccctcgacgaggatggcctggatgatagtctattggaactctctgaaggggaggaagacgacggggacgtaaattacaccgaggaggaaattgacgccctgctgaaagaagatgacccaagttacgagcaatcaagcggggaggatgacgggggtcatgtggaaaagggggaacgtgggtctcagatcctgcttgatacgcctcgcgaaaagaatagttcttacagcttgggaccggttgcggagacacctgacctgtttaaactcccacagctgtctacctccagcgggcacggcccagcccacaccaagcctctgaacaggcggtctgtgcttgaaaagaacctcatcaaggtgactgtcgcaccgtttaacccgaccgtgtgtgacgcacttctggacaaagacgagaccgactcatcaaaagatacatag

SEQ ID NO: 133373 - DNA, 1764 bp, synthetic construct
  misc_feature 1..1764: note = Description of Artificial Sequence: Synthetic coding sequence
  source 1..1764: mol_type = other DNA
atggccacagctgcatacgaacaactcaaattacatatcacaccagaaaagttctacgtagaagcctgcgacgatggtgcggatgacgtgctgactatcgacagggtgagcaccgaggtgaccctggcagtcaagaaggacgtgcctccttctgccgtgacgcgacctatattcggaatcctgggcactatacatctcgtggccggaaactacttgatcgttataactaagaagatcaaggttggagagttcttcagtcacgtggtttggaaggccaccgattttgacgtgctgtcatacaagaaaacaatgctacacctcacggacattcagcttcaggacaacaagacttttctcgctatgctgaatcacgtgctgaatgtggatgggttctacttctctaccacatacgacttaacccacaccttgcagagattatcaaacaccagtcctgaattccaggagatgagtctgcttgaaagagccgatcagagatttgtttggaacggccacctgttgcgggagctgtctgctcaacccgaagtgcaccggtttgcactccctgtactgcacggatttatcactatgcactcctgttctatcaatggcaaatacttcgattggattctaatatctcgcagatcatgtttcagggcgggcgtgagatactacgtgcgtggcatagactccgaaggtcacgcggctaactttgtagagaccgagcagattgttcactacaacgggtccaaggcctcctttgtccagacaaggggttccattcctgtgttttggtcacagcgccctaacctcaagtacaaacccctgccccagatctccaaggtggctaatcacatggacggcttccaaaggcactttgacagccaggttatcatctacgggaaacaagttatcattaatctgataaatcaaaagggttccgagaagcctttagagcagacgttcgctacgatggtctctagcctaggatccggtatgatgagatacattgcgtttgattttcataaagaatgtaagaatatgcggtgggaccgcctgtccatcctgttggatcaagttgccgagatgcaggacgagctttcctacttccttgtggactcagcagggcaggtggtcgcaaaccaggagggcgtttttaggtcgaactgcatggattgtctcgatcggaccaatgtgattcagtctctgctcgcaaggaggagtctacaggcccagctgcagagactgggcgtgctccacgttggtcagaaactagaagagcaggatgagttcgaaaagatctacaagaatgcttgggccgacaatgccaacgcgtgcgccaaacagtacgctggcaccggggccctcaaaacggatttcactaggacaggcaaaagaacccatctgggcttgattatggacggctggaactccatgattcgctattacaagaataattttagtgacggtttccggcaggattccattgatctgtttttaggtaattacagtgtggacgaactggagtcccattctcccctctcagtaccacgcgattggaagttccttgccctgccaattatcatggtcgttgccttcagcatgtgcattatctgtctgctgatggccggcgacacatggaccgaaacattagcatacgtcttattctggggagtagcctcaatcggaacattcttcatcattctctataatggtaaagacttcgtggacgcgccccgactcgtccagaaggaaaaaatcgattag

SEQ ID NO: 133374 - DNA, 1581 bp, synthetic construct
  misc_feature 1..1581: note = Description of Artificial Sequence: Synthetic coding sequence
  source 1..1581: mol_type = other DNA
atgtggaaactggtgatgatggagcaaatgacctatctcccactgaccgtttgcccgcagcgcctaccccttcagagccgcaaaatgttcctcctgcagctgagccaggatcaatatctggtatactgggcacagagtatttggtggcagcttcaagacaataaaacgttcctcgccatgctgaaccatgtactcaacgtggacggcttttatttcagtaccacgtacgacttgacacatacactccaacggctgtcaaatacgtcgcctgagttccaggagatgtcgctgctcgaaagagcagaccagcgcttcgtctggaacggacatctgctgagggagctgtccgcccagcctgaggtgcaccggttcgctctgccagtgcttcacggattcatcacgatgcatagctgttcgattaacggaaaatattttgattggatactcattagccgccgcagttgcttcagagcaggggtaaggtattacgttcgcgggattgattccgagggtcacgccgccaatttcgtcgaaacagagcagatcgtgcactataacgggtccaaagcctccttcgttcagaccagaggatcaatcccagtgttctggagtcagcgaccaaacctcaagtataagcccctgccccagattagcaaggtagctaatcatatggacggcttccaacgccactttgactcacaagtgattatatacgggaagcaggtgattatcaacctgatcaatcagaagggatcagagaaaccgttggagcagacattcgccaccatggtgtcctccctggggtccggcatgatgcggtacatcgccttcgattttcacaaagaatgcaagaacatgcggtgggataggcttagcatcctcttagatcaggtagccgagatgcaggatgagctgtcttactttctggtcgactctgctggacaggtggtggctaaccaggagggggtttttcgtagtaattgcatggattgtctggatcggacaaacgttatccagtcattgttggctcgccgctctttgcaagcccagcttcaaaggctgggcgtgcttcatgttggtcagaagctggaggagcaggatgaattcgaaaagatttacaaaaatgcctgggctgacaacgctaacgcttgcgcgaagcaatacgccggcacaggcgccttaaaaaccgattttacgagaactggcaaacggactcacctcgggttaatcatggatggatggaactcaatgattagatactataaaaataatttcagcgatgggtttcggcaagactctatagatctttttctaggcaactactctgtggacgagctggagagccacagtccgctctcggtgccacgggattggaaattccttgccttgccaatcattatggttgttgccttttcaatgtgtattatctgtctgctcatggcaggggacacgtggactgaaactctcgcctatgtgctcttttggggtgttgccagtatagggaccttttttatcatcttgtataacggtaaggacttcgtcgatgccccgcggttggtacagaaagagaaaattgactag

SEQ ID NO: 133375 - DNA, 2901 bp, synthetic construct
  misc_feature 1..2901: note = Description of Artificial Sequence: Synthetic coding sequence
  source 1..2901: mol_type = other DNA
atgttctggaagtttgatctgaatactacctcgcacgtggacaagctgctcgacaaggagcatgtgacactgcaagagcttatggacgaggatgatattttgcaagagtgcaaggcgcagaaccaaaaactgcttgatttcctctgccggcagcagtgtatggaggagttggtatcactgatcacgcaagacccacccctggatatggaggagaaggtcagattcaaataccccaacaccgcttgtgaattgttgacatgcgacgtgcctcagatctccgaccgcctcgggggagatgaatctctgctgagcctgctgtacgatttcttggaccatgaaccaccactgaacccactgcttgccagctttttttctaaaacaattggcaatctgatagcccgaaaaacagagcaggtcatcactttcctgaagaaaaaagataagttcatctccctagtactcaagcacatcgggactagtgctctgatggatttgctgttgagattggtcagctgtgtcgagccagctggactacgacaggacgtcctgcactggctcaacgaagagaaggtgatacagagattagtggagttgattcatccttctcaggacgaagacagacagtccaacgcaagccaaactctgtgcgatattgtgcgcctcgggagagatcagggcagccagttgcaagaggctcttgagccagatcctctgctgaccgcactggagtcccaggattgcgtggagcagcttcttaagaacatgttcgacggggaccggacagaaagctgtcttgtatctggaacgcaggtcttgctgactctcctggagaccagacgagtggggacagagggtctggtggattcattttcccaggggctggagaggagctacgcagtgagcagctcagtgttgcacggcatcgaacccaggcttaaagactttcaccagctgctgcttaatccccctaaaaagaaggccattttaacaaccataggagtccttgaagagccactgggtaatgcccgccttcacggcgcaagactgatggccgctttactccatacaaatacgccctccataaatcaggagctctgccggctcaatactatggacctgctgctcgatctcttcttcaagtacacctggaacaacttcctgcacttccaggtagagttatgtatagcagctatacttagccatgctgctagagaagaaagaaccgaagcctctggcagcgagtcccgcgtggagccaccacacgagaacggcaacaggtcattggaaaccccccagcctgctgcttcactacccgacaataccatggtcacacacctctttcagaagtgttgcctggtgcagagaatcttggaggcctgggaagcaaacgaccatacacaggctgctggggggatgcggcggggaaatatgggccatctaactagaatagcaaacgctgttgtgcagaacttggagagaggaccagttcagacacatatctctgaagtgatcagaggacttccagccgattgccgaggcagatgggaatccttcgtcgaagaaacactcactgaaacaaatagacggaacacagttgacctcgtgtccacccatcacctgcactcaagttccgaggatgaggatatagagggcgccttccccaacgagctctcattacaacaagcgttttcagactatcagatccaacaaatgacagctaacttcgtcgatcagtttggattcaacgacgaggagtttgctgaccaagatgataacataaacgctccgttcgacaggatcgcggagattaatttcaacattgacgcagacgaggatagtcctagcgccgcgctgttcgaagcctgttgcagcgatcgcatccaacccttcgacgacgacgaggacgaggatatctgggaggatagcgatacccgctgtgcggccagggtgatggctagaccaaggttcggcgcaccacatgccagcgaaagttgcagtaagaatggcccggagcgcggaggtcaggatggcaaagcttccttggaggcgcaccgagacgctccgggcgctggagcaccccccgcgcctgggaagaaagaagcaccgcctgtggagggtgatagcgagggcgccatgtggactgccgtcttcgatgaacctgctaattccacaccaactgcacctggcgtggtgagggatgttggctcatcagtgtgggcagctggcacatcagccccggaggaaaaagggtgggctaagtttaccgatttccaacccttttgctgctcggaatcaggtccgaggtgctcgagccccgtcgacaccgagtgctcccacgcggagggcagtagatcccagggccccgaaaaggcctcacaggcaagctacttcgcagtgtcacccgccagtccctgtgcctggaatgtatgtgttacaaggaaggcccccctgctggcttccgacagtagctctagcggcggctcacattcagaggatggagatcagaaggccgcctcagccatggacgcagtgtccagaggacccggccgcgaggccccacccctgcctacagtcgctcgtacagaagaagcagtggggcgggtggggtgcgccgacagtagactgctgagtcctgcatgtccagcacctaaggaggtgacggccgcccctgcagtcgcagtccctcctgaggccacagtggcgatcactacagctctgtccaaggctggtcctgcaattcccactccagctgtcagtagtgcattagccgtcgccgtgcctcttggacccattatggctgtgactgccgccccagctatggtggccacactgggaacggtcaccaaggacgggaagaccgacgctcctcccgaaggagccgccctgaacgggcctgtgtag

SEQ ID NO: 133376 - DNA, 2217 bp, synthetic construct
  misc_feature 1..2217: note = Description of Artificial Sequence: Synthetic coding sequence
  source 1..2217: mol_type = other DNA
atgagcaggcgctcacagcgcctgacccggtattcccagggcgatgacgacgggtccagcagcagtggcggttcaagcgtcgccggatcccagtccaccctcttcaaggatagtccactgcgcacgctaaagcgcaagagcagcaatatgaagagattaagtccagccccccagctgggacctagctctgatgcccacaccagttactattccgaatctctggttcacgaaagttggttccctccaagatccagcctagaggagctacacggtgacgccaattggggtgaagatctgagggttcggcgccgaaggggaaccgggggcagcgaaagcagccgggcctcaggtctggttgggcggaaggctaccgaggactttctcgggtccagctccggatactcctctgaagacgattacgttgaggactctgaagggcgcggttctaaggttactgagaccgagcccgtaagtagctttccagccggatactcagacgttgatcaacagtcttcctccagtagactgcggtctgcagtaagcagagccggttcgctgctgtggatggtggccaccagcccaggccggctgttcagactcctttattggtgggccggcactacctggtaccgtttaacaacagccgcttccttactggatgtgttcgtgctcacacggcgattctcaagtctgaaaacatttttatggttcctactacccttacttctgctgacttgcctcacatacggtgcatggtatttttacccttacggccttcagaccttccaccctgctcttgtgtcttggtgggctgcgaaggattctcggagacctgacgaaggatgggaggctcgagattcgtccccacacttccaagccgaacagagggtcatgtcacgagtgcactccttagagcggagattggaagctctcgcggccgagttttcatccaattggcagaaggaggctatgagacttgagagactagagctgcgtcaaggcgcccctggccagggtggaggtggagggctttcccacgaagacaccttggcccttctggagggacttgtttccaggcgcgaagcagctctgaaggaggatttcagacgggagaccgccgcgaggatccaagaggagctgtccgctctcagggctgagcaccagcaagattccgaagacctttttaaaaaaatcgtcagggcttcacaggagtctgaggcaaggattcaacagctgaaaagtgagtggcagtctatgacccaggagtccttccaggagagtagtgtgaaagaactacgcagattagaggatcaactagccgggctccagcaagaattggctgcgttggccctgaaacagagctccgtggcggaggaggtgggcttactgccacagcagatacaagccgtacgggacgatgttgaaagtcagtttccagcctggattagccagttcctggctcggggcgggggcgggcgcgtcggcctgctccagagggaggagatgcaagcccagctgcgcgagctggaaagtaagatcctgacacacgtcgcggagatgcagggaaaaagcgctagagaagcagcggcctcgctgagcctcactctgcagaaagagggagtaatcggcgtcaccgaggagcaggtccatcacattgttaagcaggctctgcaaaggtactccgaggataggattggacttgccgattacgccctggagtctggtggcgcgtcagtgattagcacgcgctgctccgagacatacgagaccaagacagcccttctatctctcttcggaatccccctgtggtatcattcacagagtccccgggtcattctgcagcccgacgtccatccggggaactgctgggcctttcaaggcccacagggtttcgctgtggtccggctatccgcccgaattcgccctacggctgtgacccttgagcacgtcccaaaggcgctctctccaaactctacaattagctcggctcctaaagatttcgccattttcggctttgacgaagatcttcagcaggaagggactctactcgggaaattcacttacgatcaggatggtgaacccattcagacctttcacttccaggctccaactatggctacctatcaagtggttgagctgcgaattttaaccaactggggccacccggaatacacctgtatttacaggtttcgagtccatggagagccagctcactag

SEQ ID NO: 133377 - DNA, 2154 bp, synthetic construct
  misc_feature 1..2154: note = Description of Artificial Sequence: Synthetic coding sequence
  source 1..2154: mol_type = other DNA
atgagcagacgctcccaaagacttactcgctattctcagggcgatgacgacggatcatccagtagcggaggcagctccgtagccggatctcagtccacgttgtttaaggatagccctttacgaacactaaaacgcaaaagctccaacatgaaacggctgtctcccgcacctcagctcggaccctcatcagacgcccacacatcttactatagcgaaagcctagtccacgagagctggttcccaccacgctctagcctcgaggaactccatggcgatgccaactggggcgaggatcttagagttaggagacggcgcgggaccggcgggtctgaatcatctcgagcctcaggtcttgttgggagaaaagcaacagaggattttttaggtagcagttccggctacagcagcgaagatgactacgttggctactcagacgtggaccagcagagctctagcagcagattacgaagtgccgtctctagagctggaagcctcctatggatggtagcgacgagcccagggcggctctttagacttttatactggtgggctggaaccacatggtatcggctcaccaccgcagcttccttgcttgacgtgtttgtcctcacgcggagattcagcagtctgaagacgttcctgtggtttttgctgccgcttctcttactgacctgcctcacctacggcgcttggtatttctacccctatggactgcaaacgtttcaccctgcactggtgagttggtgggctgcaaaggacagcaggagaccagacgaagggtgggaggcccgggacagttcaccacactttcaggccgaacagcgtgtgatgtccagagtgcactccctcgagcgacggttagaagctctggcagccgagttttcttcgaactggcaaaaagaagcgatgcgcctggagagactcgagctgcggcagggcgctcccggccaaggaggcggtggcggattaagccatgaggatacactggccctgctggaggggctcgtcagtagaagggaggcagctctgaaggaagatttccgtcgcgagacagcggcccgaattcaggaggagttgtccgcactgcgggccgaacaccagcaggactccgaggacttgttcaaaaagatagtcagggcatcacaggaatcagaagcacggattcagcagttgaagtctgagtggcaatccatgacacaggagtcgtttcaagagagcagcgtgaaggaattgagaagactggaggatcagttagcagggttgcagcaagagctcgctgcccttgccctgaaacagtcatctgtcgcagaggaggttggcctgctgccacagcagatccaagccgtgcgggatgacgttgagagccagtttcccgcttggattagccaattcctggcgcggggtggcgggggcagagtgggccttctgcagcgagaagagatgcaggcccagttgcgggagctggaatctaagatcttaacccacgtggccgagatgcaagggaagagtgccagagaggcagctgcttcactgagcctgacattacagaaggagggagtgatcggcgtgactgaagaacaggtacaccacatcgtgaagcaagccctacaaagatactccgaagacaggatcggcctggccgactacgcattggaatcgggcggcgctagcgtgattagtacacggtgtagtgagacttatgagacaaagactgccctgctgtcactttttgggatacctctatggtaccacagccaatcaccacgcgtaatactgcagccggacgttcaccccggtaattgctgggccttccaagggcctcagggctttgccgttgtgcgtctgtctgctagaattcgtcccacagccgtgacgctggagcacgtgccaaaggcgctctcccctaacagtaccatcagctcagcacccaaggactttgcaatttttgggttcgatgaggacctccagcaagaaggaactttactgggcaaatttacttacgatcaggacggcgagcccatccagacattccacttccaagcgcccactatggccacctatcaggttgtcgaactccggattctgaccaattggggccatccggagtacacctgcatttacaggttcagggtccacggagaaccagcacactag

SEQ ID NO: 133378 - DNA, 2154 bp, synthetic construct
  misc_feature 1..2154: note = Description of Artificial Sequence: Synthetic coding sequence
  source 1..2154: mol_type = other DNA
atgtccaggcgctcccagagactcacgaggtactcccagggtgacgatgacggatcctctagctccggcggaagcagcgtggccggatctcagtctaccctatttaaggatagccctttgaggacccttaagcgtaaatcctctaacatgaagaggctgtctccagctccacaactggggccttctagcgacgcacatacatcgtattatagtgagtccctcgtccatgagtcctggtttcctcccaggtcgagtctggaggaactccatggagacgcgaattggggggaagatctccgggtgaggcgaagaagagggactggtggctcagaaagctcccgggcctcgggactggtagggcggaaagcaaccgaggacttcctcgggagtagcagcggctatagcagcgaggacgattacgttgggtatagcgatgtggatcagcagtcgtctagcagccgtctgagatcggccgtatcccgggcgggctcacttctgtggatggtggcaacgtccccgggccggctgttcaggctgctttactggtgggcaggcacgacctggtaccgcctcaccaccgctgcatccttgctagacgtgttcgtcctgaccagaaggttctcctccctgaagacctttctgtggtttctactgccactcctgctactgacctgcctgacctatggcgcctggtatttctacccttatggtctgcagacctttcatcctgctctggtgtcctggtgggccgcgaaggactcccggcgccctgacgagggttgggaggcccgtgattcaagtcctcactttcaagctgagcagcgggttatgagtcgcgtgcactccttagagcgaagactggaggctctggccgcggagtttagcagcaactggcaaaaggaagccatgagactggagcgcctggagctcaggcagggagcacccggtcagggcggagggggcgggctttctcacgaagacactcttgcgttattggaggggctggtgtcccgccgagaagctgccctcaaagaggacttccgacgtgagaccgcagcgcgaatccaggaagaattatcagcattgcgcgctgagcaccagcaagactctgaagatttgtttaaaaagatcgtgcgagctagtcaggaatctgaggctcgtatccagcagctcaaaagtgaatggcagtcaatgacacaggagtcctttcaggagtcttcagtcaaagaactacggaggttagaagaccagcttgccggattgcagcaggagcttgccgctcttgccctgaagcagtcatcagtcgctgaagaagttgggttgttgcctcagcagattcaggcagtgagggacgatgtggagtcccagttccccgcttggatcagccagttccttgctcgcggaggaggcggccgtgtgggtttgctgcagcgtgaggagatgcaggctcaactgagagaattggaaagcaaaattctgactcatgttgccgaaatgcaggggaaatccgcgcgggaagcagcggctagcctcagccttacgctccaaaaggagggcgtgattggggtgacggaagagcaggtccatcacattgtgaagcaggccttgcagcgctacagtgaggaccgtatcggcctggccgattacgcactggagtcaggtggagcttccgtgatttcaacgagatgttcggagacatatgagaccaagacagcactcctgtctctctttggtattcccttatggtaccacagccagagccctagagtcatattacaaccggatgttcaccctggaaactgctgggcattccagggtccccaggggtttgcagttgtccggctgtctgcccgaattcgacctaccgctgtgaccctagaacacgtgcctaaagcactcagtcccaattctacaatatctagcgctccaaaagactttgcgatatttgggttcgatgaggatctgcagcaagaagggacgctccttggtaagttcacatatgatcaggacggggaacccatacagaccttccatttccaagctcctacgatggcgacgtatcaggttgtggaactcagaatcctgaccaattgggggcatcctgaatatacttgcatctatagatttcgagtccacggggaacctgcccattag

SEQ ID NO: 133379 - DNA, 2121 bp, synthetic construct
  misc_feature 1..2121: note = Description of Artificial Sequence: Synthetic coding sequence
  source 1..2121: mol_type = other DNA
atggtgtcaccaccctccgccggacagcggttaaggggagtaccagtgtgggctgccggcgcgtttcggttctcgagtggagaggagtccacaagtcatcttatcatgagccgaaggagtcagagactgacccggtattcccaaggagacgacgatggatcaagctcatctggcggatccagcgtggccggctctcagtctaccttgttcaaagacagcccccttcgcaccctgaaacgtaaatcaagcaacatgaagcgcctatcccccgccccccaattaggaccatcgtccgatgcccacaccagctattatagcgaatccctggtgcacgagtcatggtttccacccagatcaagcttggaggagcttcacggagacgccaattggggttatagtgatgtggaccaacagtcctcttcttcacggctgagaagcgccgtgtccagagcaggcagcctgctttggatggtggcgacgtcacctgggagactgtttagactgctctactggtgggccgggacaacttggtaccggctcaccactgcagcatccctgctggacgtctttgtgctgacccgaaggttcagctcactgaagacatttctgtggtttcttttgccgctgctgctattaacttgtctgacttacggcgcatggtatttctacccctatggactacaaacgttccacccggcgcttgtttcctggtgggcagccaaggattctaggcggccggacgaagggtgggaagcacgggactcttcccctcatttccaggccgaacaacgagtcatgtcgcgagtgcacagcctcgaaagacgactggaggccttggccgccgaattctccagcaattggcagaaggaagctatgcggctggaaagactggaacttcgtcagggtgccccaggccagggcggtggggggggcctttcccatgaagatacacttgccttgctcgagggcctggtgtcacggcgggaggcagcgctgaaggaggatttccggcgagaaaccgctgcgcgcatccaagaggagctgtctgccctgcgggccgaacaccagcaggattctgaagacttgtttaaaaaaattgtgagggcaagtcaggagagcgaggcccggatccagcagctaaaatctgagtggcagtccatgacccaagagtctttccaggaaagctctgttaaagaactgcggagactggaggaccagttagctggacttcagcaggagttggccgctcttgcactaaaacagagttctgtcgctgaagaagttggcctgctgccacaacaaatccaggctgtgcgggacgatgtggagtcgcagttccccgcctggatctctcaattcctcgcaagaggtgggggtggaagggtaggattactgcaaagagaggagatgcaagcacagctgagggagctggagagcaaaattcttacgcatgttgcagagatgcagggtaagagtgctcgagaagctgctgctagcctctcattgacactacagaaggaaggtgtaatcggtgtgactgaagaacaggtacaccatattgttaaacaggctctgcaaaggtactccgaggaccgcatcggcctggcagactatgccctggagtccggaggagcgtcagttatatcaactaggtgcagcgagacctatgaaaccaaaacggcccttctctccctgtttggcattcccctttggtatcactcccaatcgccccgtgtgattctccagcctgatgtgcaccctggcaactgctgggcttttcagggaccacaaggcttcgccgtcgtgcggctgagcgcgcgcatccgcccaactgcggtgactctggaacacgtgccaaaagccctgagtcctaattcaacaatctctagcgctccgaaggacttcgctattttcggattcgatgaagatctccaacaggagggtactctgctgggaaaattcacttatgaccaggacggggagccgattcagaccttccatttccaggcaccaacgatggccacatatcaagtggtggagttgcgaatcctgaccaactggggacacccagaatacacctgcatttatagattccgggtgcacggagagccagcccattag

SEQ ID NO: 133380 - DNA, 375 bp, synthetic construct
  misc_feature 1..375: note = Description of Artificial Sequence: Synthetic coding sequence
  source 1..375: mol_type = other DNA
atgtctagaagatcccagcggctcacaaggtattctcagggtgacgatgatgggagttcttcaagtggggggtcttcagtagctgggtcccaatcaactttatttaaggacagtcctcttcgaacgttaaaaaggaagtcttccaacatgaaacgtctgtccccagctccccagctgggtccgtcaagcgacgctcatacgtcctactacagcgaatctttagtgcacgagtcctggttccctcccagaagtagccttgaggagttgcatggagatgcgaattgggaccccacgttccagaaacttctcgaggcgcagaagtccccttggttcttcccggcccaggtgaggacctgcggatgcgggggtggctag

SEQ ID NO: 133381 - DNA, 384 bp, synthetic construct
  misc_feature 1..384: note = Description of Artificial Sequence: Synthetic coding sequence
  source 1..384: mol_type = other DNA
atgtcacgccgctcccagcggcttactagatacagtcagggggacgatgacggttcctcctcctcgggtgggtcttcggtagctgggtcccagagtacacttttcaaagacagccccctgagaaccctgaagagaaagtccagcaatatgaagaggctgtcccccgcaccccaactaggcccatcatctgacgcgcataccagttattattcagagtccctggttcacgaatcatggtttcccccgcgcagttctctggaggagcttcatggagatgctaattgggggtactctgacgtggaccaacagagcagttcctcccgtctgcgaagcgcggtctccagggctggatctttgctgtggatggttgccacctctccctag

SEQ ID NO: 133382 - DNA, 333 bp, synthetic construct
  misc_feature 1..333: note = Description of Artificial Sequence: Synthetic coding sequence
  source 1..333: mol_type = other DNA
atgagccggcgttcccagcgcttaacacggtacagccaaggagatgatgatggttctagcagcagtggcgggtctagcgtggccggcagtcagtcaactctttttaaggattctccacttcgtaccctgaagagaaagtcctccaacatgaagaggctgtctcctgcccctcagctgggaccctcaagcgacgcacatacaagttattattctgaatctttagtacatgaaagctggtttcccccccgaagcagtctggaagagctacacggagatgcaaactggggggaggacctgagggtcagacggcggaggggaacagggggatcatag

SEQ ID NO: 133383 - DNA, 675 bp, synthetic construct
  misc_feature 1..675: note = Description of Artificial Sequence: Synthetic coding sequence
  source 1..675: mol_type = other DNA
atgagcagacgatcccagcggctcacgcgttactcccagggggatgacgacggctcgtctagctccggtggaagtagcgttgcgggatcccaatccacactattcaaggatagtcctctgagaactcttaaaaggaaaagcagtaatatgaaaaggctgagtcccgccccccagctgggaccctcttcagacgctcatacgtcctattactcagaatcactggtgcacgagtcttggttccctcctcgatccagcttagaggagctacatggggatgcaaactggggttacagtgatgtggaccagcagtccagcagcagccggttgcggtctgctgtgagtagggcaggatccctcctgtggatggtagccacttctcctggacggctatttcggttactttactggtgggctggcactacctggtatcgcttgaccaccgctgcgtccctgcttgacgtgttcgtgctcacccggcgttttagttctctcaagaccttcctctggtttttactgcctcttctgctgttaacctgtctcacatatggcgcatggtacttctacccttacgggttgcagacttttcatcccgcccttgtctcttggtgggctgctaaagattcacggcgacctgatgaaggatgggaggcccgagatagttcaccccacttttag

SEQ ID NO: 133384 - DNA, 306 bp, synthetic construct
  misc_feature 1..306: note = Description of Artificial Sequence: Synthetic coding sequence
  source 1..306: mol_type = other DNA
atgagccggcgatcacagcgcctgacgcggtatagccagggggatgatgacggttcctcttcctctggcggcagttctgtcgccggcagccagagtaccctgtttaaggactccccgcttcggacacttaaaagaaagtcaagtaatatgaaaaggttgagtccggcccctcagctcggccctagctccgacgcccataccagttattattccgaaagtcttgtgcacgagtcatggtttccccctcggtcctctctggaagagctgcacggagacgccaattggggggaagacctgagagtctag

SEQ ID NO: 133385 - DNA, 435 bp, synthetic construct
  misc_feature 1..435: note = Description of Artificial Sequence: Synthetic coding sequence
  source 1..435: mol_type = other DNA
atgtcaagacggagtcagaggctgacacggtattcacagggagacgacgacggatcgtcctcaagcggaggatctagtgttgctggaagccagtcaaccttgtttaaggactcccctttgcggacccttaagcgaaagtctagcaacatgaagaggctgagccccgcgccacaattaggcccgtcgtcagacgcccatacgtcctattattcagagagcctggtgcacgaatcctggttcccaccacgatcatcccttgaagagctccacggtgatgccaattggggggaagacctccgagtccgaagaaggcggggtactggaggatctgaatcatctagggctagcggtctcgtgggccgtaaagctactgaggacttcttgggctcttcttctggttactcgtcggaggatgattacgtaggccggagatag

SEQ ID NO: 133386 - DNA, 618 bp, synthetic construct
  misc_feature 1..618: note = Description of Artificial Sequence: Synthetic coding sequence
  source 1..618: mol_type = other DNA
atgagtcgacgttcacagcgcttgacccggtatagtcaaggagatgacgatggctcttcatccagcggaggctctagtgtggctggttctcagagcactctgtttaaagattcacccctgcggacccttaaaaggaagagttctaatatgaagcggctttctccggctcctcagttgggcccatctagtgatgctcatactagctattactctgaaagcctcgttcacgaaagctggttccccccccgttcttccctggaagagctgcatggggacgctaactggggggaggacctcagggtccgacgccggcgggggacgggcggatcagagtcatctcgggctagcggtctcgtagggcgtaaagccactgaggacttcctaggatccagctccggatactccagtgaggatgactacgtcggctactcagacgttgatcaacagagttctagcagcaggctgaggagcgctgtgtccagggccggctctctgctgtggatggtggcgacgtctcctggacggctctttcgactgctgtactggtgggcgggtacaacgtggtatcgtcttacgaccgcagcttcactgttggatgtcttcgtgctcacccggtag

SEQ ID NO: 133387 - DNA, 1140 bp, synthetic construct
  misc_feature 1..1140: note = Description of Artificial Sequence: Synthetic coding sequence
  source 1..1140: mol_type = other DNA
atgcctagaagctctcggagccccggcgatcccggggctcttctcgaggacgttgcccataacccacgtccacgccgaatcgctcaacgtggccgaaacacaagccggatggccgaagatacgagccccaacatgaacgacaacattctgctgccagttcgaaataacgatcaggccctgggactcacacagtgcatgttgggatgcgtgtcttggttcacttgctttgcatgcagtttgaggacacaggcacaacaggtgctttttaatacatgccggtgtaaactgctctgtcagaagctaatggagaaaaccgggatcttgcttctgtgtgccttcggattctggatgttctccattcacctgccatccaagatgaaggtgtggcaggacgacagtataaatgggcccctccagagtctgcggctgtaccaggaaaaagtgcgccaccactctggagagattcaggacctgcgtgggagcatgaatcagctgatcgcgaaactccaggagatggaggcaatgtccgatgaacagaagatggcccagaagatcatgaagatgatccatggagactacattgaaaagccagactttgcactgaaatcaattggagcgtctatcgactttgagcacacttcggtgacgtataaccacgaaaaggcacatagttattggaactggattcagctgtggaattatgcacagcccccagatgtgatcctagaacccaatgtaacgcctgggaactgctgggctttcgaaggggaccggggtcaggtgaccatacagctggcccagaaggtgtacctgtctaatctaacacttcaacatatcccaaaaaccatatcactgagcgggagtttggacactgcccccaaggattttgtcatctatggaatggaagggagtcccaaggaagaggtatttttgggcgcatttcaatttcaacctgagaacattattcagatgttcccccttcagaaccagcccgctagggcgtttagcgcggtcaaagtaaagatctcaagtaactggggaaaccctggttttacttgcctctatagggtcagagttcacggctcagtggcccccccacgggaacagccacaccagaatccatatcctaaacgcgactag

SEQ ID NO: 133388 - DNA, 369 bp, synthetic construct
  misc_feature 1..369: note = Description of Artificial Sequence: Synthetic coding sequence
  source 1..369: mol_type = other DNA
atgcccaggtcttctcgctctcctggcgacccaggcgcattactggaggacgtggcacacaacccgcgccccagaagaatagcccagcgcggtagaaatactagtaggatggctgaagacacatcgcctaatatgaatgacaacatacttctcccagtacgcaataacgaccaggctctgggcttaacacagtgcatgcttggatgcgtgtacgcctcctgctgcgcgcggagctcatggcgcaggcaagccttctgttcttcagtcctgagtgtgtgccctcgggctcttccttctcctagatggaggtatccctgggctttagctctgatcattggccactgggcgcggcattgtactgcaacctag

SEQ ID NO: 133389 - DNA, 1065 bp, synthetic construct
  misc_feature 1..1065: note = Description of Artificial Sequence: Synthetic coding sequence
  source 1..1065: mol_type = other DNA
atgcctcgctctagccggtcaccaggagaccctggagctctccttgaagacgtggctcataatcctagaccacgacgcattgcacaacgcggtaggaacacgagcaggatggccgaagatacgtcacctaatatgacatggttcacatgctttgcatgttcattaagaacgcaggcccaacaggtgctttttaacacttgtcgatgtaaactgctttgccagaagctgatggagaagaccggcattctcctgttgtgcgcgttcggattttggatgtttagcatacacttaccttctaagatgaaagtctggcaggatgattccatcaacggcccactgcagtcacttagactttatcaagaaaaagtacgccatcatagcggagagatccaggatcttcgaggctccatgaaccagcttatcgctaagctacaggaaatggaagcaatgagcgacgagcagaaaatggcgcagaaaattatgaagatgatacatggcgattatatcgagaagccagacttcgcgcttaaatctataggggcttccatcgactttgagcacacaagtgtgacatacaatcacgaaaaagcacactcttactggaattggatccagctctggaattatgcccagccccccgatgtaattttggagccgaatgttacacccggtaactgttgggcattcgagggcgacagggggcaggttaccatccagttggcgcagaaggtttatttgagcaatcttaccctacaacacattccaaaaacgattagtctcagcgggtcactcgacactgccccaaaggattttgtgatctacggtatggagggttcccccaaggaagaggtgttcctcggggctttccagttccagccagagaacatcatccaaatgttcccactccagaaccaacctgcccgagcatttagtgctgtaaaggttaagatatcctccaactggggcaatccagggttcacatgcctatacagggtcagggtgcacggctccgtggcaccaccccgggaacagccacaccagaacccttaccccaaaagagattag

SEQ ID NO: 133390 - DNA, 459 bp, synthetic construct
  misc_feature 1..459: note = Description of Artificial Sequence: Synthetic coding sequence
  source 1..459: mol_type = other DNA
ggggctctgttggaggatgttgctcacaatccacgacccagaaggatcgcccagcgaggccgcaatacgagccgcatggctgaggacacctctccgaatatgaatgataatattctactgcccgttcggaataacgaccaggccctggggctgacacagtgcatgcttgggtgtgtttcttggtttacttgtttcgcttgttcactgagaacgcaggcccagcaagtgctgttcaatacctgcaggtgtaagcttctctgccagaagcttatggaaaaaaccggaattctgttattatgtgcctttggagtcagccagggcccggctcagtcccaggtggaggtgtccctgggcccagggaccgattacagaactctgggcaagaccctgcactgccacgtgactcagtttccacacttgccggatggatgctgctgtgagaactatgagatgaaatag

SEQ ID NO: 133391 - DNA, 387 bp, synthetic construct
  misc_feature 1..387: note = Description of Artificial Sequence: Synthetic coding sequence
  source 1..387: mol_type = other DNA
atgtccgagggggggggccaggtcagttgtattttcgcagctccaacacggctttgtcgctggccagccctgatcgagtgtggggtcaatctcacccagccactgtgtgagtggatgatccaggttgcgcgcgatagaacactctcactggcctgggaagtcgcctctctcctgaccttgtccagttctgaggtgggccttgaaggggtgggaaccatttggccaagcagttactcatcagaagagtccagcagaaacggtgccgaacagggcaggcagctgagtatcgaaggaccttttcaggggcagaattgcccaagccatccagccgccgcactccctctaccaatgcgcggggaatcccaagccactagctgccaggtctag

SEQ ID NO: 133392 - DNA, 3975 bp, synthetic construct
  misc_feature 1..3975: note = Description of Artificial Sequence: Synthetic coding sequence
  source 1..3975: mol_type = other DNA
atgtcccggaggaaacaagccaagccccagcactttcaaagtgatccagaagtggcgtccctgcctcgtagggatggcgacaccgagaaagggcagccgtctcgccctaccaagtccaaagacgcccatgtgtgtggccggtgctgcgccgagttcttcgaactatcggatctgctcctgcataagaaaaactgtacaaagaatcaactggtgctgatagtaaatgaaaacccagctagcccacccgagaccttttcaccctccccacctcctgacaatcctgatgaacaaatgaatgacaccgtgaataaaacagaccaggtggattgcagcgatttgtctgagcacaacggcctcgatcgtgaggagtctatggaggtggaagcccccgtcgccaataagagcggatcaggcacgagcagcggctctcatagcagcacagcaccttcttcgtctagctcgtcgagcagcagttcaggcgggggtggtagcagctccaccggtacctccgcgatcaccacaagcttgccccagctcggagacctgacaacattgggaaatttttcagttattaacagtaatgtgatcatagagaatctgcagtcaaccaaggttgccgtggcccagttctcgcaggaagctaggtgtggaggcgcctcgggcggcaagctggccgttcccgctctgatggagcaactactcgctctccagcagcagcagattcatcagctgcagctgattgagcaaatccgacaccaaattttattactagcatcccagaatgctgatcttcccacgtcatccagcccttctcagggaacactgagaacaagcgcaaacccactaagtactctgagctcccacctcagccaacagcttgcagccgcagcgggcctggcccagtctcttgcgagccagtctgcctctatatcaggagtcaagcagctgccccccatccagctgcctcagtcctcgagcggcaacaccatcatccccagtaattctggatcctctccaaacatgaacatcctggctgccgccgtgaccactccatcctccgagaaggtcgcttcttccgcaggtgcctctcacgtttctaacccggccgtcagctcttcatcctcacccgccttcgccatttcatcactgctgtcccctgccagcaatcctcttttaccccaacaggcctccgctaattcggtgtttccgagtcctctccccaacattggcacaaccgctgaagatttgaattccctgtccgcattggctcagcagcgcaaatcaaaaccacctaacgttacagcttttgaggctaaatcgacgagcgatgaggctttcttcaaacacaagtgccgattctgtgctaaagtgttcggcagcgactctgcactgcaaattcacctaagatcacacactggggagcgcccgtttaaatgcaacatctgcggcaacaggttttcaacaaaagggaaccttaaagtgcactttcagcggcacaaagaaaagtatcctcacatacagatgaatccataccctgtgccagagcaccttgacaatatcccgaccagtacggggattccttatggaatgtctataccccctgagaagccagttacttcttggctagataccaaacccgtattaccgacactgacaacatctgtaggcctgcctttacctccaaccctgcctagcttgatacctttcattaaaaccgaagaaccagcgccaattcctataagtcactctgccacatccccccctgggtcagttaaatccgacagtggagggccggaaagtgccacacgtaatctggggggtctgcccgaggaagctgaaggctctactctaccaccttccggaggtaaatccgaagaatcaggcatggtgacgaattccgtcccaacggcctccagtagcgtgctgtcgagccctgccgccgactgcggaccggccggaagtgcaacaacatttaccaacccattacttcccctgatgagcgaacagtttaaggctaagtttccattcgggggcctccttgattccgcacaggcctctgaaacttcgaagcttcagcaactcgtggaaaatattgacaaaaaagctaccgatcccaacgaatgtataatatgccaccgcgtcctcagttgccagtccgcactgaagatgcattaccgcacacatactggtgagcgaccttttaagtgtaaaatttgtggtcgcgcctttactactaaaggtaacctaaaaactcattactcagtacatcgggccatgccccctctacgagtgcaacactcttgtcccatatgccaaaagaagttcactaatgctgtggttttgcagcagcacatccgaatgcacatgggagggcaaatccccaacactcctgtgccagattcttactctgagagcatggagagtgatacaggtagctttgacgagaaaaacttcgacgacctagacaatttctccgatgagaacatggaagattgtcccgagggatcaatacccgacaccccaaagagtgccgatgcatcacaggacagtctttccagctctcctctgcccctcgagatgagttccatcgctgccctcgaaaatcagatgaaaatgatcaacgctggattagcagagcagctgcaggccagccttaaaagtgtggaaaacggttcaatcgaaggtgacgttttgaccaacgactcatcctctgtgggcggcgatatggaatctcagtcagccggcagtcctgcaatttccgaaagtactagtagtatgcaggcgctgtccccatccaatagtacacaggagttccacaagtctccctctatagaagagaagccccagcgtgccgttccctctgaatttgcaaatggactatctcccaccccggtcaacggaggcgccctggatctgacttcctcacatgctgaaaaaattatcaaggaggattctctgggcattttattccctttccgcgatcgcggaaagttcaagaacaccgcctgcgacatctgtggcaagactttcgcttgtcagagtgccttggacatacactacagatctcatacaaaagagcgacctttcatctgcaccgtttgtaatcgaggttttagtactaagggaaacctgaaacagcacatgctcacccaccagatgcgggacctgcccagccagctatttgaaccttcctcgaatcttggtccaaatcaaaatagtgccgtcatccccgctaactctctatccagcctgatcaagactgaggtcaacggattcgtccacgtgtccccacaagactccaaggatactccgacaagccatgtgccttcaggccccctgtccagctctgccacttcgcccgtgctgctgcctgctctcccaaggaggacccctaagcaacattactgtaacacctgcggcaagacgttctcgagctccagcgcacttcaaatccacgaacggacgcatacaggcgagaagccctttgcttgcaccatttgtggccgggcctttactactaaaggcaatctcaaagtgcacatgggtacacacatgtggaactccacccccgctcgcaggggtcggcgtctgtcagtggatggcccaatgactttcctcggagggaaccctgtcaagttcccagagatgtttcaaaaggatctggccgcccggtctgggtcaggcgaccctagctccttctggaatcaatacgccgctgcgttgagcaacggcctggccatgaaggccaacgaaatctccgttattcagaatggcgggatcccaccgattccaggttcactcggcagcgggaactcaagccccgtgtccggactgacgggcaatctggaacgtcttcaaaactcggagcctaacgcacctctagcaggactggagaaaatggctagctccgagaacggtactaattttcggtttacccggtttgttgaggatagcaaggaaattgttacctcctag

SEQ ID NO: 133393 - DNA, 3684 bp, synthetic construct
  misc_feature 1..3684: note = Description of Artificial Sequence: Synthetic coding sequence
  source 1..3684: mol_type = other DNA
atgaacgacactgtaaataaaaccgaccaggtcgactgctccgacctaagcgagcacaatggcctggatagagaggagagcatggaggtcgaggcccctgtagcaaataaaagcggcagcgggacctcatccggaagccacagctccaccgccccttcttcatcctcatcctcttcctctagctccggaggcggcggatcctccagtaccgggacttctgctatcaccacctctctccctcaactcggggacctcacaacgctgggtaactttagcgtaatcaattctaacgttatcattgaaaatctgcagtctaccaaggtcgccgttgcgcaattcagccaagaggctcgttgtggcggcgcgtcggggggaaagctggctgtacccgcgctgatggagcaacttctggcactgcagcagcagcagattcaccagctccaactgatcgaacagattcggcaccagattcttctgctggcctctcagaacgccgacctgcccactagcagcagcccatcccaggggacactgagaacttccgctaatcccctgtcaacactgtcctcacaccttagtcagcagctggccgctgccgccggccttgcacagtctttggctagccagagcgcatcaattagcggggtcaagcaacttcctccgattcagttaccgcaatcctcatcgggcaatacaatcatcccatcgaattccggatctagcccaaacatgaacattctggcagctgctgtcaccactcctagcagcgaaaaagtggccagttctgctggagcctctcacgtctccaatccagccgtctcatcgtcctcttctcccgcgttcgcgatcagctcactgctttctccggcgtcaaacccactgctgccccaacaggccagcgccaactctgtgtttcccagccctttgcctaacattggaacaacggcagaagaccttaactccttatcagcccttgcacaacagaggaagtctaagcctccaaatgtgacggccttcgaggcaaagagtacttccgacgaagcattcttcaagcacaagtgtaggttctgtgcaaaagtatttgggagtgattctgctcttcagatccacctacgcagccataccggtgaacgtcccttcaaatgcaatatctgtggcaaccgtttctcgacgaaaggaaatctgaaagtccacttccagcggcataaagaaaaatacccacacatccagatgaatccctatcctgttccagagcatctggataatatccccacatcaaccggcattccttatggaatgtcaatccctcccgagaagcctgtgacctcctggctagacacaaaaccggtcctcccaaccctcaccacgagtgttggactgcctctccctcccacattaccatctctgatacccttcatcaaaacagaggaacctgcccccattccaattagtcattctgcgacaagccctcccggcagcgttaagtccgatagtggcggtcctgaaagcgctaccagaaatctgggtggcctgccagaagaggctgagggttccacgcttccgccatcagggggcaaatcagaggagagtggaatggtgacgaacagtgtgccgaccgcatccagtagcgttttgtctagtcccgcagctgactgcgggccagccggctccgcaactacgttcaccaatcctctgctccccttgatgagtgagcagttcaaggctaaattccccttcggagggcttcttgacagcgctcaggccagcgagacttcaaaactccagcagctcgtggaaaatatcgataaaaaagcgactgacccaaacgaatgcataatctgtcacagggtgctttcctgtcagtccgccctcaagatgcactatcggacccacacaggcgagaggcctttcaaatgtaaaatctgcggacgggcattcactaccaaaggcaacctcaagacccactattcagtccatagagctatgccacctctgcgtgtgcagcattcatgccccatttgtcagaaaaagttcacgaatgctgtggtactgcaacagcacatccggatgcacatgggcggacagatcccaaatacacctgtccctgacagctattcagaaagcatggaatcagatactggatcctttgacgagaagaacttcgacgacctggacaatttttccgacgaaaacatggaagactgcccagaaggaagcattccggacacacctaaatccgccgacgccagtcaggacagtttaagcagctccccgttgcctctggaaatgtcatctatagcagccctcgagaatcagatgaaaatgatcaatgccggcctagctgaacagctgcaggcgagtcttaagtccgtagaaaacggcagtattgagggggatgtgttaaccaacgactcatcttcagtcggaggagatatggagagccaaagtgctggatcaccagctatatccgaaagtacatcctcaatgcaggctctgagtcctagcaactcgacgcaagagtttcacaagtcacctagcattgaggagaagccacagagagccgtgccttccgagttcgccaatggtctttcaccaacacctgtcaatggtggtgcactcgacttgacatccagtcacgcggagaagatcattaaagaggattcccttggcattctgttcccattcagagatcgcggaaaattcaagaacacagcttgcgatatctgtggcaagactttcgcatgccagtcggctctggacatccattacagaagtcacactaaagagagaccgtttatctgcaccgtctgtaatagagggttctccaccaagggcaacctaaagcaacacatgttaacacaccaaatgcgcgatttgccttcccaactgttcgaaccctctagtaaccttgggcccaaccaaaactccgctgtgattcctgccaatagcttgtcttcactgattaagacagaggtgaatggttttgtgcacgtgtcacctcaggattctaaggatacccccacaagtcacgtacccagtggtcctttgtcaagctccgccaccagccctgtcctgctccccgccttgcctcgcagaactcctaagcagcattactgcaacacgtgcggcaagactttttcttcctcatccgccctccagattcatgaacgtactcacaccggtgagaagccatttgcttgtacgatttgcggcagggcatttaccacaaagggtaatctcaaagtgcatatgggcactcacatgtggaactcaaccccagcacggcgcggtaggcgactctccgtggatgggccgatgacgtttcttggcgggaatcctgtgaagtttcccgagatgtttcagaaggacttagccgccagatctggcagcggagatccctcttcattctggaatcaatacgcggctgccctgtccaacggcctcgcaatgaaggcaaacgagatttccgtgatccaaaatggcggcatccccccgatccctggatccctgggatccggtaatagttctcccgtttccggactcacggggaacttggaaaggttgcaaaacagtgagccaaacgcacctctggcagggttggagaagatggcctctagcgagaacggaactaactttagatttacacggttcgttgaagactcgaaggagattgttacatcttag

SEQ ID NO: 133394 - DNA, 3867 bp, synthetic construct
  misc_feature 1..3867: note = Description of Artificial Sequence: Synthetic coding sequence
  source 1..3867: mol_type = other DNA
atgtcccgaagaaagcaggccaagccacagcacttccagagtgatcccgaggtcgctagtctaccacggcgcgacggagacactgagaaaggccagcccagccggccaactaaaagcaaggatgcccatgtctgcggtaggtgctgcgccgagttttttgaactgagcgatttactcttacacaagaaaaactgcaccaagaatcagctcgtgttaatagtcaacgaaaaccccgcctccccacctgagacattcagccctagtccacctccagacaatccggacgagcagatgaatgacactgtcaacaaaacggggtctcacagctcgactgcaccgtctagctcgagctccagttctagcagctccggcggcggcggttccagctccaccggaacaagtgctatcaccacttctctacctcagctgggcgatcttaccacactaggtaacttctcagtgatcaatagtaacgtgataatcgaaaacttgcaaagcacgaaggtagcagttgcccagttttcgcaggaagctcggtgcggcggggcctccggtggcaagctggcagttcctgccctaatggagcagttgctggcactgcaacagcagcagatccaccagcttcagcttatcgagcaaattcggcaccaaatactgctcctggcttctcagaacgcagatcttcccacgtccagcagtccgtctcagggaaccttgaggacatctgcaaatccactgtccacactcagcagccatctttcacagcagttagccgccgcagcgggcctagcacagtctctggcttcacagagtgcctcaattagcggggtcaaacaattgccacccatccagctgccacagtcttcatcgggtaatacaattattccttccaacagcggatctagcccgaacatgaatatcctggctgctgccgttaccactccttcttccgaaaaggtcgccagctcagcgggggcctcccacgtgtccaacccagccgtgtcgtcgtcttccagtcctgccttcgcgatttccagcttactgagccccgcctctaaccccctgctgccacagcaggctagcgcaaatagcgtgttcccatcccctttgcctaatatcggaaccaccgccgaggacctcaactccctgagcgccttagctcagcagcgcaaatctaaaccccctaatgttaccgcttttgaggcaaagagcacaagcgatgaagccttcttcaagcacaaatgcaggttctgcgccaaagtgttcggctctgacagtgctctccagatccatttgaggtcccacacaggagagagaccttttaaatgtaatatttgcggcaatcggtttagcactaagggcaacctaaaggtgcatttccaaagacataaggagaagtatccccacatccaaatgaacccttatccagttcctgaacatctcgataatattcctactagcacaggcattccatatggaatgagtatacctcctgagaagccagtgacctcttggctggataccaagcctgttctgcctacgctaacgacatcggtcggccttcctctgccaccaacacttccttctcttatcccctttataaaaaccgaagagccagcccctatcccaatatctcactccgctactagcccgcccggctcggtgaaatcagacagtggcggcccagaatccgcgacccgcaatctgggcggtctgcctgaggaggctgagggaagcacgctgcccccttccggcggtaaaagtgaagagagtggtatggtcactaactctgtgcctactgcgtcaagcagtgttctctcctcgccagccgccgattgcgggcctgctggatccgcaaccactttcactaacccgcttttaccgctaatgtctgaacaattcaaagccaagtttccgtttggggggctgctcgactctgcgcaagcttcagagaccagtaaacttcagcagctggtagagaacatcgataaaaaggccactgatcctaacgagtgtattatctgccatcgggtattgagctgtcagagcgctctgaagatgcactaccgcacgcacaccggcgagagaccctttaaatgcaagatttgtggtcgggcattcaccaccaaaggtaatctcaagacacattattctgtccatagagctatgcctcccctgcgcgtgcagcactcttgtcccatatgccaaaagaagttcactaatgcagtagtccttcaacagcacatacggatgcacatgggtggacagattcccaacactcctgtgcctgattcctattccgagtcaatggagtcagacactggcagctttgatgaaaagaatttcgatgacctggataatttctcagacgaaaacatggaggattgcccggaagggagcatccctgatactcctaagtcagcggatgcttctcaagattcgcttagctccagtcccctgcctcttgagatgtcctcaattgccgcacttgagaatcagatgaaaatgatcaacgccggattagctgagcagttgcaggcatccctaaaaagcgtggagaacgggagcattgagggagacgtcctgactaacgacagctctagtgtcggcggcgatatggaaagccagtcagccggttccccagctattagtgagtctacatctagcatgcaggctctgtcaccaagtaacagcacacaggaattccacaagtcaccctctatcgaggaaaagcctcaaagagcagtgccatcagagtttgctaacggattgtctcctacccccgtgaatggaggcgccctcgacctgactagctcccacgccgagaaaattatcaaggaagacagcctcgggattctgtttcccttcagggaccggggaaaattcaaaaacactgcttgcgacatctgcggaaagaccttcgcttgtcagagtgcgctcgacatccattatcgatcccatactaaggaaaggccattcatatgtacagtctgtaacaggggatttagtacaaagggtaatctaaagcagcacatgcttacccatcagatgagggacctgccttcccagctgtttgaacccagcagtaacctaggacctaaccagaacagtgccgtaatcccggccaacagcctgtcatctctgatcaaaaccgaagtgaatgggtttgtccatgtgtcaccccaggactctaaagacacacccacatctcacgtaccgagcggcccgctcagttcctcagccacttcccctgtgctgcttcctgccctccctcggagaactccaaaacagcattactgcaacacatgcggcaagacattttccagttccagtgctttacagatccacgaaagaacacataccggtgaaaagcccttcgcctgtactatctgtgggagagctttcaccacaaaggggaatttaaaggtgcacatgggtacgcacatgtggaactccactccagccaggcgaggacgtaggctcagcgtcgacggccctatgactttcctcggtggcaatcctgttaagtttcctgagatgttccaaaaagacctcgcggcacgctctggttccggtgacccctcctcattctggaatcagtatgcggccgccctaagcaatggcctggcaatgaaggcaaatgagatcagtgtgattcaaaatggcggaattccacccattccgggaagcctgggaagtggtaattcaagtcccgtcagcggcctgaccgggaacctggaaaggcttcaaaattcagagcctaatgcccccctggcgggcctggagaagatggcctcctctgaaaatgggactaactttcgcttcacaaggtttgtcgaggattccaaagaaatcgttacaagctag

SEQ ID NO: 133395 - DNA, 444 bp, synthetic construct
  misc_feature 1..444: note = Description of Artificial Sequence: Synthetic coding sequence
  source 1..444: mol_type = other DNA
atggtgcacatggggacccacatgtggaattccaccccagcgagaaggggcagacgcctgtctgtggatgggcccatgaccttcctcggtggaaaccccgtgaaattccctgagatgttccagaaagatcttgcagcacgctccggatcaggcgatccaagttcattttggaaccaatacgctgctgctcttagcaatgggttagctatgaaggcgaatgagatatccgtcattcagaacggtggtatccccccaatccctggtagccttggctcgggaaacagctcccccgtttcaggcctgacaggaaatttggagcggctgcagaactcagagcccaatgcacctctggccggtctggagaagatggcctcatctgagaacggaactaatttcagattcacgcgatttgttgaggactcaaaagaaatcgtgacaagttag

SEQ ID NO: 133396 - DNA, 3024 bp, synthetic construct
  misc_feature 1..3024: note = Description of Artificial Sequence: Synthetic coding sequence
  source 1..3024: mol_type = other DNA
atgtcacgcagaaagcagagaaagcctcaacagctgatctccgattgtgagggcccgagtgcgtccgaaaatggagatgctagcgaggaggaccatccccaggtgtgcgccaaatgttgtgcgcagttcaccgatcctacagagttcttggctcaccagaacgcctgctcaacagacccgcccgtgatggttatcattggcggacaggaaaacccaaacaattccagcgcttcttccgagccgaggcctgagggacacaacaacccccaggtcatggatacagagcactcaaatccacccgacagtgggagttctgtcccgacggatccgacgtgggggcctgagcgccgcggcgaagagagtcccgggcactttctagtggccgctacagggacggccgctggcgggggaggagggctgattctcgccagtccaaaattaggggcgaccccattgcctccggagtctacacccgcaccacccccaccccccccaccaccgcctcctcctggcgtgggcagcggccatttgaacataccactgattctcgaagagctgcgcgttcttcagcagcggcaaattcaccaaatgcagatgactgagcagatttgtaggcaagttttactgctgggatctcttggacagacagttggggcacctgcttccccttcggagttgccaggcacggggacagcatctagcacaaagccgctcttgcctcttttttcgcccatcaagcctgtccagaccagcaaaactctcgcctccagcagctcgtcaagctctagctcgtccggagccgagacacccaagcaggctttcttccacctgtaccaccctctgggaagccagcaccccttcagtgccggtggggttggcaggagtcacaagccgacccccgctcccagtccagcacttcccgggtctactgatcaactgattgcgtcccctcaccttgcgtttccatcaaccaccggcctgctggcagcacagtgcctcggagcggcgagggggcttgaagccactgcttctccaggactgctcaagcccaaaaacggaagcggcgaactctcctatggtgaggttatgggcccactcgaaaagccagggggtcggcacaagtgcagattttgtgccaaggtctttggtagcgattccgccctccagatccatctgcggtcccacactggagaacgcccatacaagtgtaatgtctgtggcaacaggttcaccacccgagggaacctcaaagtacatttccaccggcaccgagaaaaatatccccatgtgcagatgaacccgcaccccgtgcctgaacacttggactacgtgattacgagctcgggcctcccatacggaatgtctgtgcctccagagaaagccgaggaggaagctgccaccccaggagggggagtcgaacgcaaacctcttgtggcctctacgacagctctcagcgcgacagaatctctgacccttctgtctacttctgctggcacagctaccgccccagggctccccgccttcaacaagtttgtgctgatgaaggctgtagagcccaagaacaaggccgatgaaaacacaccccctggaagtgaagggagcgctattagcggagtggctgagtcctccactgccacaagaatgcaactgtcaaaactagttacttcactccccagctgggctctgctgaccaaccatttcaagtcaactggcagttttccattcccttacgtcctggagccgttaggcgcttccccctccgagacatctaagctgcaacagctcgttgaaaaaattgaccgacaaggggccgtcgccgtcacctccgccgcaagcggcgcccccaccacgtccgcaccggcaccctcgagctcggcatcatctggacctaatcagtgcgtaatttgcctgcgcgttctttcatgtccgcgtgcattaagacttcactacgggcagcacggcggagagcgcccctttaagtgtaaggtgtgtggaagagcattctccactcgaggcaatctccgcgcccacttcgtgggccacaaggcatcacccgctgctagggcacaaaattcatgcccgatctgccaaaaaaagttcacgaatgccgtcacactgcaacaacacgtgcgcatgcacttgggcgggcagatccccaatggagggacggctctgccagagggcggaggagcagcccaagaaaatggcagcgaacagagtacagtcagcggcgcagggtcttttccacaacagcaatcacagcagccatccccagaggaagaactgtccgaggaagaagaggaggaagatgaagaagaggaagaggatgtcacagacgaagatagtttggccgggagggggagtgagagtggtggggagaaggcgattagcgtgcgcggcgactctgaggaagcatctggcgctgaggaggaggtcgggacggtggcggctgccgcaaccgccggcaaagagatggattcaaatgagaagaccacccagcagagctcactgccccctccacctccccctgactctctggatcaacctcagcctatggaacagggttcctcaggcgtactgggcggaaaggaggaaggcggtaagcccgagagatcatcatctcccgcttccgcgctgacccctgagggcgaggcaacatctgtaaccttggtggaggagctctccctgcaggaagctatgagaaaggagccaggggagtcaagttcgagaaaagcgtgcgaagtgtgtggccaggccttcccaagccaggcggcactcgaagaacatcagaagactcatccaaaggaaggccctctctttacgtgcgttttttgcaggcagggttttctggagagggcgaccttaaaaaaacacatgcttttggcacatcatcaagtgcaaccctttgcccctcacggcccacaaaacatcgctgctctttctctcgtgccaggatgctcaccctctatcacgtccactggtctgtcccctttcccacggaaagatgatccaaccatcccctag

SEQ ID NO: 133397 - DNA, 1827 bp, synthetic construct
  misc_feature 1..1827: note = Description of Artificial Sequence: Synthetic coding sequence
  source 1..1827: mol_type = other DNA
atgtcacggaggaaacagcgcaaaccacaacagcttattagcgactgcgaaggcccttccgcctcagagaatggggatgcatctgaagaagaccatcctcaagtttgtgccaagtgttgcgctcagtttaccgaccccacagaattcctcgcacaccagaatgcctgttccaccgaccccccagttatggttatcattggagggcaggagaacccaaacaattcgtcagcctcttctgagcccagacctgagggtcataacaacccacaagtgatggataccgagcattccaacccaccggattctggtagctcagtgccaaccgaccccacttgggggcccgagaggcgtggagaggagtcaccgggacatttcctagtagccgccactggcaccgccgctggaggaggaggcggcctaatcttagcctctccaaagctgggagcgactcctcttcccccggagtctactcccgcccctccaccaccacctccaccccccccgccacccggtgtgggaagcggacacttaaatattccattaattttggaggaactgcgggtcttgcagcagcggcagattcaccagatgcagatgaccgagcagatctgtcggcaggtccttctccttgggtcactgggtcagactgttggtgcccccgctagcccatcagaactaccaggcaccgggacagcgtcctcgacaaagcccctgttgccactgttttccccaataaagcccgtccaaacatcaaagacactggcctcaagcagttcgtccagcagctcgtcctctggggctgagaccccaaagcaagctttctttcacctgtatcatcctctgggttcgcagcatccattcagtgctggcggcgtaggcaggagccacaaacctacaccggcgccctctcccgccctgcccggctccacggaccagctgatagcatctccccacctggcttttccaagtacgaccggccttctggccgcccagtgtctgggcgcggctcgtggactggaggccacggcttccccagggttattgaaacccaagaatggcagtggggagctctcatacggggaggttatgggcccgctggaaaaaccagggggtaggcacaagtgtaggttttgtgctaaagtatttggttccgactccgcacttcaaatccatctgcggtcacacaccggcgaacgcccctacaagtgcaacgtgtgcggaaataggttcactacacggggaaatcttaaagttcacttccataggcaccgggagaagtacccccatgtccagatgaatcctcacccagtcccggaacatctggactacgtgatcactagctccggtttgccgtatggaatgtccgtcccccccgagaaggctgaagaggaagccgctactccgggcgggggggttgagcggaagcccctagtcgcatcgactaccgctttgtccgccacagaaagcctgacacttttgtcaaccagcgctggaacagctacagcccccgggcttccagccttcaacaagttcgtgctgatgaaagccgtggagcctaaaaacaaagcagacgaaaataccccccccggttcagaagggagcgccatctccggggttgctgagtcctctacggcaacacgaatgcagttgtctaaacttgtgacatctctgccttcctgggcactgctgacaaaccacttcaagtcaacaggatcattcccctttccatatgttccagaggaagtgcatcagtgctgccacagcgccgctgcttgtcctgatgcaccaggcggaccggacccccagaggtggtactgtactccctag

SEQ ID NO: 133398 - DNA, 3687 bp, synthetic construct
  misc_feature 1..3687: note = Description of Artificial Sequence: Synthetic coding sequence
  source 1..3687: mol_type = other DNA
atgtcgcgtcggaagcaagcaaagccccagcacctgaagagtgatgaggaattgttgcctcccgacggcgcgcctgagcatgccgctcctggagagggtgctgaggatgcagatagcggacccgaaagtcgatcgggtggcgaggagacatctgtgtgtgagaaatgctgtgccgaattttttaaatgggccgattttctggaacaccaaagatcatgtactaaactcccacctgtgttgatcgtgcacgaagatgcccccgctccgcctcccgaggacttccccgagccatcccccgcctcttccccctccgagagagcagagtcggaggccgcagaagaagctggagcagaaggcgccgagggggaggcccgtccagtggagaaagaagctgagccaatggacgcggaacccgccggggacacacgtgcgcccagacctcctcccgctgcacctgcaccccccactcctgcctacggagccccaagcactaatgtgacgcttgaggccctcctcagtactaaggtcgccgtagcgcagttcagtcagggagctagggcagcaggaggctccggggcaggtggcggtgtggccgctgcggcggtgccgctcatcctggaacagcttatggcccttcagcagcagcaaatccatcagctgcagcttatcgagcaaatccggagtcaggtcgcgctgatgcagagacctccccctcgtccctctttaagtccagccgctgctccatcagcgccgggacccgcaccctcacagctgcctgggttagccgccctgcctctgagcgcaggggcccccgccgcagccatcgcaggttcgggccctgccgcccctgctgcttttgaaggggcacaacccctgtcaaggccagagagcggagcttccacacccggtggccccgcggaaccgtccgcacccgccgccccttccgcagctcccgcccctgcagctccggcccccgcccctgcaccacagtccgcagccagcagtcagccacagtccgcctccactcctccggctctggctccggggtctctgttgggcgctgcaccaggcttgccgagtccactgttgccacagacttccgccagcggagtgatttttcccaatccactcgtgtccatcgctgcaacagcaaatgcactcgatccgctgtccgcactgatgaaacatagaaaggggaagcctcccaacgtgagtgtttttgagccaaaagccagcgccgaggatccattcttcaagcataagtgtcgcttttgtgctaaggtcttcggctctgatagcgctctccagatccatttacggagccatacaggcgagcgtccttttaaatgtaatatctgcggcaatcgctttagcacaaaaggaaatttaaaggtgcactttcagagacacaaagagaaataccctcacatccagatgaatccttacccagtgcctgagtatctcgacaacgtgcccacctgttccggaatcccatatggcatgagtctcccaccagaaaagccagtgacgacttggctggactcaaagccggtgctccctactgtgcccacgagcgtgggactgcaactccccccgactgtgccaggtgcgcacggctatgcggatagcccctcagcaaccccagcgtcacggtcaccacagagaccgagccccgcctcctctgaatgtgcttctctgtcccccggcctgaatcatgtggaatccggggtgagcgccacagcggaatctccgcaaagcctgttgggaggacctccactaacaaaggctgagcctgtctctctgccgtgcacgaatgcgagagccggagatgctccagttggagcacaagcctccgcagctcccacctcggtggacggtgcaccaaccagtcttgggtcacctggattacccgctgtcagcgaacagtttaaagcccaatttccgttcggaggccttctcgactccatgcagacatctgaaacatcgaagcttcagcaactcgtagaaaatattgacaagaaaatgaccgatccaaaccagtgcgttatctgccacagagtgttgtcatgccagtccgcactgaaaatgcattatcgaacacacactggcgaacggccattcaaatgcaagatctgcggacgtgcgtttactacaaaaggaaacctaaagacgcactttggcgttcaccgggccaagccccctctgcgcgtgcagcactcctgtcctatttgccagaaaaagttcaccaacgcggtggttttgcagcagcacatcagaatgcatatgggcggacaaatcccaaacacccctttgcccgagggttttcaggacgctatggactctgaacttgcttatgatgacaaaaatgccgagactctgagttcctatgacgacgacatggacgaaaacagcatggaggatgacgccgagctgaaggacgccgctaccgaccctgcaaaaccactgctgtcctacgccggctcttgcccccccagccccccatcggtgatctcttctattgctgcacttgagaatcagatgaagatgatagacagcgtgatgtcctgtcagcaactaacagggctgaagtctgtggagaacggcagcggcgagtccgatcgactcagtaacgactcctcctcagctgtgggggacctagaaagccgttcggctggttcccccgcactcagcgaaagttcttcttcccaggccctttcaccagctccttcgaatggcgagtcatttagaagcaaatccccagggctgggagcccctgaagaaccacaggagattcctctcaaaactgagcggcccgattcccctgcagcggccccaggctccggaggtgcgcctggtagagccggaattaaggaggaggcaccattcagtctcctatttctaagccgggagcggggtcccagtcagagtaccccaagcctcatcagttcggccgctcctaccatgattaagatggaggtgaacggtcacgggaaggcaatggcgctgggagaagggcccccccttcccgcaggagtgcaagtgcccgcaggaccccagaccgttatgggacccggactggccccgatgttggcgcctccccctagaaggacacctaaacaacacaactgtcagtcgtgcggtaaaactttttccagtgcttccgccttgcaaatacacgagcgaactcatactggcgaaaaaccgttcgggtgtaccatttgtgggagggcctttactactaagggaaacttgaaggtacacatggggactcacatgtggaacaacgccccggcgcgacgcgggaggcggctgtctgtggagaacccaatggccctcctggggggggacgcacttaaattctccgagatgttccaaaaagatctagctgctagggcgatgaatgtggatccgtcgttctggaaccaatatgccgctgccatcactaacggcttggctatgaaaaacaacgagatctctgttattcagaatggcgggattccccaactccccgtgtcccttgggggctcagccctgccccctctcggatccatggcatccggaatggataaggcccgtactgggagctcccccccaatcgtttcgttggataaggcttcgtctgagactgcagccagtaggccatttacgaggttcatcgaggacaataaggaaatcggaataaactag

SEQ ID NO: 133399 - DNA, 3903 bp, synthetic construct
  misc_feature 1..3903: note = Description of Artificial Sequence: Synthetic coding sequence
  source 1..3903: mol_type = other DNA
atgagccgacgaaagcaggcaaagcctcaacatctcaaaagtgacgaggaactcctgccacccgacggcgccccggaacacgctgccccaggagagggagccgaagacgcagactctgggccagagtccaggtctggtggtgaggagacttcagtgtgtgagaagtgttgcgcggagttcttcaagtgggcagacttcctcgaacatcagaggtcgtgcacgaaactcccgcccgttttaattgtgcacgaggacgctcctgcaccccctcccgaagacttccccgaacctagtcccgcgtcctccccctccgaacgcgcagagtctgaggccgcggaagaagctggcgctgagggagcggaaggagaggcccggcccgtcgagaaggaagccgagcctatggacgcagagcccgccggggacacccgcgcccccaggcccccccccgccgcccccgccccccccacccctgcttacggtgctccgtcaacgaatgtcacgcttgaggctctactctccacaaaagtggctgtcgcacagttctcccaaggggcaagagcagccggcggttctggggccggcggtggcgtagctgccgccgcagtgcctctgatcctcgagcagctcatggcgctccagcagcagcagatccaccaactgcaattgatcgaacaaatccggagtcaggtagcccttatgcagcgccccccaccacgaccctcactcagcccagccgccgctccatccgcccctggtcccgcacccagccagctcccaggacttgcagccctgccattatcggcaggggcccctgcagcagctatagcagggagtggtccggctgcccctgctgcttttgagggcgcccagcccctgtctcggcctgaaagcggcgccagcaccccagggggacctgctgaaccatctgctccagcggcccctagcgctgccccagctccagcggcacccgctcctgctcccgcaccccagtccgcagcttctagccaaccacagagcgcatccacgcctccggctctggccccggggtctctcttaggggctgcccccggcttgccctcccctctgctaccccaaacatcagcaagcggagtgatctttccgaacccattggtgtccatcgctgccactgctaatgccctcgatcccctctctgctcttatgaagcatcgcaaaggaaaaccgccaaatgtaagcgtattcgagcctaaggcttcggccgaagacccattcttcaaacataagtgtcggttttgcgccaaggtgtttggttccgatagtgctctgcagatacacctgcgttcccacaccggcgagcgaccattcaaatgcaatatttgtggcaataggttcagcaccaagggaaacctgaaggttcacttccagaggcataaggaaaaataccctcacatccaaatgaatccctaccccgtgcccgagtatctcgacaatgtgccgacttgtagcggtatcccatatgggatgagtcttccacccgaaaagcctgtgactacctggctggacagcaagcccgttctcccaaccgtgcctactagcgttggactgcagctgcctccaactgtgcctggggcccacggctacgcagactctccctctgccacccctgcaagcaggtccccgcagcgccctagcccggccagctcagagtgcgcttcgctttcacctggcctgaatcacgttgaatcaggggtctcggcaacagccgaatctcctcaatctctgctggggggtcctcctctcaccaaggctgaaccagtatcacttccgtgtacaaacgccagggctggggacgcccctgtaggggcacaagcatccgctgccccaacaagcgtcgatggggccccaacctcactcgggtctccaggccttcctgccgtctccgaacaatttaaagctcagtttccatttggcgggttgctggacagtatgcagacctcagagacttcaaaacttcagcagctggttgagaacatcgataaaaagatgaccgaccccaaccaatgcgtgatatgccaccgcgtgctgtcatgccaaagcgccctcaagatgcactatagaactcacacgggagaaaggccttttaaatgcaagatatgtgggagggcctttacaacaaagggcaatctgaagacacattttggtgtacaccgcgcaaagccacccctgagagtccagcatagctgtccaatctgtcaaaagaagtttacaaatgccgtggtgctgcagcagcatatccggatgcacatggggggccagattcccaacaccccgctgcctgagggcttccaggatgctatggactccgaacttgcttacgatgacaagaacgcagaaaccctttccagttatgacgacgatatggatgagaacagtatggaggatgacgctgaactaaaagatgcggctacagatccagccaagccccttctgtcctacgccggaagttgccccccctcaccgccctcagttatttcctcaatcgcggcccttgagaatcagatgaagatgattgacagtgtgatgtcctgtcagcaactgaccggcttgaaatctgtggaaaatggctccggagagagcgacaggctttcaaacgacagcagttctgctgtgggcgatctcgagagtagatcagccgggagccccgccctgtcggagtcttccagttctcaggctttgtccccagccccctcaaacggggagtcattcagatccaaaagccctggtcttggggcacccgaagagcctcaggaaattcctctgaagaccgagaggccagatagccctgctgcagcacctggtagcggcggagcacccggccgcgccggaattaaggaagaggctcctttctctctgctattcctgtcccgagagaggggaaaatgtcctagtaccgtatgtggtgtgtgtggcaagccattcgcttgtaaatccgcactcgaaattcattatcggtcgcataccaaggaaagaccgttcgtttgtgccctgtgccgaaggggatgttctaccatgggtaatctgaagcagcacctgctgacccatcgtctgaaggaacttcccagtcagctatttgatcccaatttcgcccttggcccatcacagagcacgccctccctgatcagcagcgccgcccctacaatgataaagatggaggtaaacggacacgggaaagcgatggccttgggtgaaggcccccccttgcccgctggagttcaggtacctgccggcccacagacagtaatgggccctgggcttgctccaatgttggctccacccccgcgcaggaccccgaaacagcataactgccaaagctgcggtaagacattcagcagcgccagcgcactgcagatacacgaaagaacgcacacaggcgaaaagccctttgggtgtacaatttgcgggcgcgcattcaccaccaagggcaatttgaaggtccatatgggtacccacatgtggaacaacgctcccgccagaagaggaaggaggctctcggtggaaaacccgatggccctgcttggaggagacgcgttgaagttctcagaaatgttccaaaaggacctggccgctcgggcaatgaacgtggacccctcgttttggaatcagtatgctgccgctattacgaacgggctggccatgaaaaataacgagatctccgtgattcagaatggggggattccccagctgcctgtctcgctgggcggaagtgcactgccaccactcggtagcatggcaagcggcatggacaaagcaagaaccggctccagcccaccgatcgtgtcgctcgataaagcctccagtgagacagccgcctcacgcccgtttacacgttttatcgaggataacaaggaaattgggattaattag

SEQ ID NO: 133400 - DNA, 2883 bp, synthetic construct
  misc_feature 1..2883: note = Description of Artificial Sequence: Synthetic coding sequence
  source 1..2883: mol_type = other DNA
atgtctcgcagaaaacaagctaaaccacagcaccttaaatccgacgaggagctgttgcctccggatggtgcaccggaacatgccgcacctggcgaaggggccgaggacgccgactccgggccagagtcccggtctggcggggaggaaacatctgtgtgtgaaaagtgttgtgcggagttcttcaaatgggcggatttccttgagcatcaacggagctgcactaagttgccccccgtcctaatcgtccatgaagacgccccccctgggctgccgagcccccttttaccccagacatccgcatctggtgtgatcttccccaaccccctggtatcaattgccgcaaccgcgaatgcactagatccgctgtccgccctcatgaaacaccgtaagggaaagccccctaacgtttccgtcttcgagccaaaagcatccgccgaggatcctttctttaagcacaaatgtagattttgcgctaaggtgttcggcagcgacagtgccttgcagatccatctgcgcagtcacactggcgagagaccctttaaatgcaacatttgtggaaaccgcttcagcacaaaggggaatctgaaggtgcatttccagcgccacaaggaaaagtatcctcatattcaaatgaatccctaccctgttcccgagtatctggacaacgttcctacttgttcgggcattccctatggcatgtctctgccaccagagaagcccgtgaccacctggttagattccaaacctgtgctgcccaccgtccccaccagcgtaggactgcagctaccacccaccgtccccggtgctcatggctatgctgatagcccatccgctactcctgcgagcaggagcccccagcgtccttcacccgctagctccgagtgtgcaagtctgagcccaggcctgaatcatgtggaatccggggtgagtgccactgccgagtccccccagtctctgctcggcggtcctcctttgacaaaagccgagcctgtgtccctcccatgcacaaacgcccgagcgggtgatgctccagtgggagcccaagcttccgctgcgcccacttccgtggacggagcccccacgtcactaggcagtccaggccttcccgcagtctctgaacaatttaaggcccagttcccttttgggggcctcttggactctatgcagaccagtgagacatctaagttgcagcaactcgttgaaaacatcgataagaaaatgaccgaccctaaccaatgcgtcatctgtcacagggttctgagttgccagtctgctctgaagatgcactaccgtacccacacaggagagcggcccttcaagtgcaagatttgtggtagggccttcacaacgaaggggaatcttaagacacacttcggggtgcaccgcgccaaaccccccctgcgggtgcaacactcgtgccctatctgccaaaagaagttcacaaatgccgtcgttctgcagcagcacatccggatgcacatgggaggccagattcctaacacacctctgcccgagggcttccaagacgctatggacagcgaacttgcatatgacgacaagaatgcggaaactctgtccagctacgacgatgatatggatgaaaatagcatggaggacgatgcagagctcaaagatgctgccactgacccagccaagccattgctctcctatgcagggagctgccccccctctcccccctcggtgatctcttccatcgcggcactggaaaatcagatgaaaatgattgacagcgtgatgtcttgtcagcaacttaccggacttaagtccgtcgaaaacggaagcggcgagtcagatcgactgtctaatgacagttcaagcgccgtgggcgatctcgagtcgcgaagcgctggaagcccagcactttcggagtccagttctagtcaggccctgtctcctgctcccagtaacggtgagtcattcaggagcaagagtcctggcttgggagcgccggaagaacctcaggagatcccactgaaaactgagaggcctgatagtcctgctgcagctccggggagtgggggcgctcccggccgggccggaattaaggaggaggctccgttctccctgctgttcctaagccgggaaagggggccttcacagagcacacctagcctgatctctagcgcagctccaactatgataaagatggaggtgaacgggcatggtaaagctatggcactgggtgaagggccaccccttcccgctggggtgcaagtccccgccggacctcagacggtgatgggccctggtcttgctcccatgctggcacctccccctcgccgcacccccaagcagcacaactgtcagagctgcgggaagacattcagttccgcctccgccttacagattcatgagaggactcacaccggcgagaaacctttcggctgcactatctgcggcagagcctttacaactaagggaaacctaaaagtgcacatgggcacacatatgtggaataacgccccagctaggcgaggaaggagactgtctgttgaaaacccaatggcgctcctaggcggcgacgccctcaaattctcagaaatgttccagaaagaccttgccgccagagccatgaacgtcgatcccagtttctggaatcagtatgctgccgctatcacgaacggacttgcgatgaaaaacaatgagatatctgtgattcaaaatggaggaattccacagttgccagtaagcctgggaggtagcgctctgccacccctgggttctatggcctcagggatggacaaggcccgcacagggagtagtcccccgatcgtcagcctcgataaggcctcaagtgagactgccgccagccggcctttcaccagattcatagaggataacaaggagatcgggatcaattag

SEQ ID NO: 133401 - DNA, 516 bp, synthetic construct
  misc_feature 1..516: note = Description of Artificial Sequence: Synthetic coding sequence
  source 1..516: mol_type = other DNA
atggtcaggccaccggtggtacctcggcgtccacctgctcatatttcatcagtgcgccaggcatcaacgcaggtgccgaggacggtgccacacacccagcgggtggccaacatcggtactcaaacaaccggaccttctggcgtcggatgctgtacgccgggcaggccattgcttccctgcaagtgttcctcggccgcccactctacctacagagtgcaggaacctgccgtccacatacctgggcaggagcccttgactgccagcatgctggccgctgcaccactccatgaacaaaagcagatgatcggcgagcggctctaccctttaatacatgacgtacatacacagctcgccgggaaaatcacgggcatgctgttggagatcgataactctgaacttctgcttatgcttgagtcaccggaatccctgcacgccaagaagagaaagagttctttgccctggctgcctaagggccagtgcttctggttgtccgctctgcgaccctgtaagttatag

SEQ ID NO: 133402 - DNA, 831 bp, synthetic construct
  misc_feature 1..831: note = Description of Artificial Sequence: Synthetic coding sequence
  source 1..831: mol_type = other DNA
atgtccagacgcaagcaggcaaaaccacagcacatcaattcagaagaagatcagggagaacaacagccacaacagcagacacccgaattcgcggacgccgctccagctgcaccggcagcgggagaattgggacggagcagtctacctagtaccttcatcagggcccctcctacttacgtcaaggtggaagtgccaggcactttcgtcgggccatccacgctctctccaggtatgaccccactccttgccgcccagcctcgcagacaggcaaaacaacacggttgcactcggtgcgggaagaacttttcaagtgccagcgcacttcagatccacgagaggactcacacaggcgaaaagccatttgtttgtaatatttgcggccgggctttcaccacgaagggaaacctgaaagtgcactacatgacccacggagcaaacaacaactctgctcgacgtggaagaaagttggccattgagaacactatggcattactgggaactgacggcaagagagtatctgagatcttcccaaaagagattcttgctccctctgtgaacgtcgacccggtggtatggaaccagtatacctcgatgctcaacggtgggttggcagtgaagaccaacgagatatccgtgatccagagcggcggcgtccctacactcccagtgagcctgggggctacatcggttgttaacaacgccactgtgtctaagatggatggctcgcagagtggcattagtgccgacgtggaaaaaccctctgcaacagacggcgtgcccaaacaccagttcccccacttcttggaagagaataagatcgctgtgagttag

SEQ ID NO: 133403 - DNA, 1851 bp, synthetic construct
  misc_feature 1..1851: note = Description of Artificial Sequence: Synthetic coding sequence
  source 1..1851: mol_type = other DNA
atgagccgcaggaagcaagccaagcctcagcatattaattcggaagaggaccaaggggagcagcagccccagcagcaaacacccgagtttgccgatgccgcccccgctgccccagcagcgggggaactgggggcccccgtaaaccatcccggaaacgacgaggtagcgagcgaggatgaggctacggtaaagcgactccgacgcgaagaaactcacgtctgtgaaaagtgttgcgccgaattctttagcatctccgagttcctggaacataaaaagaattgcactaaaaatccgcccgtgctgatcatgaacgactccgaggggccagttccttcggaggactttagcggggctgttctgtcccaccaacctacttctcccggtagcaaagactgccatcgtgagaacggtgggtcttccgaggacatgaaggaaaagcctgacgcggaatcagtggtgtaccttaaaaccgaaacagccctgccaccaacccctcaggacatctcctacctggcgaaggggaaggtcgcaaataccaacgtgacgctccaggccctcagagggactaaagtggccgtgaaccagcgatccgcagacgccttaccagcaccagtacctggagccaattcaataccatgggtgctggagcagatattgtgcctccagcagcaacagttgcagcagatacagttgaccgaacagattcggatccaggtcaatatgtgggcatcccatgcgctgcactcctcaggagccggtgccgacactctcaaaacactcggcagtcatatgagtcagcaggtttcggctgccgtcgccttgctctctcagaaagcgggctcgcaggggctctcactggatgcactgaagcaggctaagctaccacatgccaatatcccatccgctacctcatctctgagccccggactggcacccttcactctgaagccggacggcaccagggtccttccgaacgtgatgagccggttaccctccgccttgctccctcaagctcccggctccgtcctcttccagtcaccattttctactgtggccctcgatacatccaagaaagggaaaggcaagcctcctaatatcagcgccgtggatgtgaagcctaaggatgaggccgctctgtacaaacataaatgtcgatcctcgctgccttctaccttcatcagggctcctcctacttatgtgaaggtcgaagttccgggcacattcgttggaccaagtaccttatctccgggcatgactccactcttagctgcccagccccggaggcaggccaaacagcatgggtgtactaggtgtggtaagaatttcagctctgcctccgcgctccagattcacgaacggactcacaccggagagaaaccttttgtctgcaatatttgtggtcgtgcatttacaactaaaggaaatttaaaggtccactacatgacccacggagctaacaacaattctgcgcggcgagggagaaagctggccattgaaaatacaatggccctcctcggcacagatggcaaacgggtgtctgaaattttcccaaaagaaatcctggcacctagcgtgaacgtcgacccagttgtttggaaccagtatacatctatgctcaatggggggctagccgttaaaaccaatgaaataagcgtaatacaatccgggggcgtgcctaccctgccagtttccctgggcgcaactagtgttgtcaataatgctacagtcagcaagatggacggtagccagtctgggatctctgctgatgtggaaaaaccttccgcaactgacggcgttccaaagcatcagttcccgcactttctggaggagaataagattgccgtgtcctag

SEQ ID NO: 133404 - DNA, 2781 bp, synthetic construct
  misc_feature 1..2781: note = Description of Artificial Sequence: Synthetic coding sequence
  source 1..2781: mol_type = other DNA
atggtgatggcggatgggccccggcatttgcagagaggccccgtgcgggtgggattctacgatatagagggaactctcggcaagggaaatttcgccgttgtgaagctggggcggcaccgtatcactaagaccgaggttgctatcaagatcattgataagtctcagcttgatgctgtcaacttggagaagatttaccgagaggtgcagatcatgaaaatgctggaccacccgcacataatcaaactgtatcaagtcatggagaccaagtccatgctctatctggtcactgagtatgcaaagaatggcgaaatctttgactaccttgctaatcatggcaggctcaatgagagcgaggcgcggcgcaaattttggcaaatactgtcagcggtcgattactgtcacggacgcaaaattgtccacagggatctgaaggctgaaaacctcttattggataataatatgaacataaagattgccgatttcggtttcggcaacttcttcaagagcggagagctgctagcaacctggtgcggatcccccccttatgccgccccagaggtgtttgaagggcagcagtatgaaggtccccagttggatatttggtccatgggtgttgtgctgtacgtgctagtgtgcggggctctgcctttcgacggccccacgctgccaattttgcgccagcgtgtgctcgaaggaaggttcagaattccatattttatgtcagaagactgcgagcaccttattagacgcatgctggtcctcgacccttctaagcgtctgaccatcgcccagataaaggagcataaatggatgctgattgaagtgcccgttcagagacctgtcttatacccgcaggaacaggaaaatgaaccttctataggggagttcaacgagcaggtgcttaggctcatgcacagcctgggtattgaccagcaaaaaactatcgaatcgttacagaacaagagctataaccatttcgccgctatttactttctgcttgtggagcggctgaaaagccacagatctagcttccccgtggaacagagactggacggcaggcaacgacgcccaagcaccatcgccgagcagaccgtagccaaagcccagacagtgggactccctgtgacaatgcactctccaaatatgagactcctgcggtcagcgctgctcccgcaggcctcgaacgttgaggcatttagttttccagcctctggctgccaggccgaggctgcttttatggaagaggaatgtgtggacacaccaaaagtgaacggttgcctactggaccccgtgcccccagttctcgttcgaaagggatgccagtccctgccatcaaacatgatggagacttccattgatgagggactggaaaccgagggcgaggccgaggaagatcccgcacacgcttttgaggcctttcagtccacacggtcaggacaaagacgtcacaccctatccgaggtcactaatcagctggttgtgatgccgggggccggcaaaatcttcagcatgaatgattccccttccctggattctgtggactctgagtatgatatgggttcagtacaacgcgatctcaatttccttgaagacaatcctagcctcaaggatatcatgctggcaaatcagccctctccgcgaatgactagccctttcatcagccttaggccgaccaatcccgccatgcaggccttgagcagccaaaagcgggaggtccacaacagaagtcccgtaagctttagggagggaagacgggccagcgatacttccctgactcaggggattgttgcttttaggcagcatctgcagaatctggcccgcaccaaagggattttggagctgaataaggtccagctgttatacgagcagattgggccagaagcagacccaaacctggctcccgcagcaccccagcttcaggatttagccagctcatgcccgcaagaagaggtctcccagcaacaggagtctgtgagcactctgccagccagcgttcaccctcagttgtctccacgccaaagcttagaaacacagtacttgcagcacaggctgcaaaaaccatctctgctttccaaggcccaaaatacatgccagctgtactgtaaggagccacctagatccctggaacagcagctgcaagaacatcgattgcagcagaagcggctctttctgcagaagcagagccagctccaggcttactttaaccaaatgcagatagctgaaagcagttacccacagccaagccagcagctgccactgcctcgccaggagacacctccccccagtcagcaggcccctcctttcagtctcacgcaaccactctccccagttctggaaccttccagcgaacaaatgcagtattcgcccttcctaagccagtaccaggagatgcagttgcagccgctgcctagcaccagtggaccccgcgccgcccctcctctacccactcagctgcagcagcaacagcctccgccacccccacctcctccacctcctcgacagccaggggccgctcctgctccactccagttctcttatcaaacttgtgagctgccttccgccgccagtcctgcccccgactatcccacgccgtgccagtatccagtggatggcgcgcagcagagcgacctaactgggcccgattgcccccgatcaccaggtttgcaggaagcaccgtcatcctacgaccccctcgccttgagcgaattgcccgggctctttgactgtgagatgctggatgctgtcgatccccagcataacggctacgtgcttgtcaattag

SEQ ID NO: 133405 - DNA, 1881 bp, synthetic construct
  misc_feature 1..1881: note = Description of Artificial Sequence: Synthetic coding sequence
  source 1..1881: mol_type = other DNA
atgcaaagggcagactctgagcaaccctcaaaaagacccagatgtgatgatagtccaagaacccctagtaacaccccatctgcagaagcagattggtcacccggcctagagttgcaccctgactacaagacttggggccccgagcaagtgtgtagtttcctcagacgggggggttttgaggagccagtgttacttaagaatattagagagaatgagattacgggtgcccttttgccctgtcttgatgagagcaggtttgaaaatttaggtgtgtccagtttgggcgagcgcaaaaagctgctctcctacattcaacggttagtccagatccacgttgatactatgaaggtgataaacgatccaatccacgggcacattgagctgcatcccttactggttagaatcatcgacacccctcagttccaacgcttgagatacatcaagcagttggggggaggatactatgtattccctggtgcctcccacaaccggttcgagcactctcttggcgtgggatacctggctggatgtctcgttcatgctctgggagaaaaacagccagaactgcagatttctgagagagatgtcttatgtgtacagatcgccggactctgtcacgatctgggccatggcccgttttcacacatgtttgatggccgctttattcccctggcacgaccagaagtaaaatggacccatgagcagggcagcgtgatgatgtttgagcacctgatcaattctaatggaatcaaacctgtcatggagcagtatgggctcatccccgaagaagacatctgctttattaaggagcagatcgtagggccactggagtcccccgtggaggactctctctggccctataaaggacgtcccgaaaacaaaagtttcttgtatgaaatagtaagtaataagaggaacgggattgatgtggataaatgggactatttcgcacgcgactgccaccacttggggatccagaacaatttcgattacaaaagattcattaaatttgcccgcgtatgtgaagtagacaatgagttgaggatttgtgccagggataaggaggtcggcaatctgtacgacatgttccacacacggaatagcctgcaccggagggcctatcaacataaggtgggcaacatcattgacaccatgattacagatgccttcctgaaggctgatgactatattgaaattactggtgccggcggcaaaaagtacagaattagtaccgccatcgatgacatggaggcctacaccaagctgactgacaacatctttttagagatactgtatagcaccgatcctaaactcaaggatgcgcgggagattctgaagcagattgagtaccggaatctgttcaaatacgtgggcgaaactcagcccactggtcaaattaagattaagagggaggactacgagagcttgccaaaggaggtggccagtgcgaaacctaaggtattgttggacgtgaaactgaaggccgaagactttatcgtagatgttataaatatggactatggcatgcaagagaagaaccccattgatcacgtatcgttctactgtaagactgccccgaaccgggcgatccgcattactaaaaatcaggtctctcagctgctgcccgagaagtttgcagaacagctgatacgcgtctattgcaagaaagtagacaggaaatcactgtatgccgcgaggcagtacttcgtgcagtggtgcgcggacaggaattttactaaacctcaggacggcgacgtgattgccccacttatcactccccaaaaaaaagagtggaacgatagtactagcgtgcagaacccaactcggttgcgggaagccagtaagtcccgagtccagctttttaaggacgatcccatgtag

SEQ ID NO: 133406 - DNA, 513 bp, synthetic construct
  misc_feature 1..513: note = Description of Artificial Sequence: Synthetic coding sequence
  source 1..513: mol_type = other DNA
atgttcgacggtcgcttcatacccctggcaaggcccgaggtgaagtggacccacgagcaggggagcgtgatgatgttcgagcaccttatcaacagcaacggtatcaagcctgtgatggagcaatacggactcatcccagaagaggatatctgttttataaaagagcaaatcgttggtcccctcgagtcacccgtcgaagattctctatggccatataaggggcgcccagaaaataaaagctttttatacgaaattgtctcaaacaagagaaacgggattgacgtggacaagtgggactacttcgcacgagactgccatcacctcggaattcagaacaacttcgactataagaggttcattaagttcgcaagggtgtgcgaagtggacaatgagctgcggatttgtgccagagataaagaggtcggcaacttatatgatatgtttcatacaagaaactctttacatcggcgagcctatcagcacaaggttgggaatatcattgataccatgtag

SEQ ID NO: 133407 - DNA, 1326 bp, synthetic construct
  misc_feature 1..1326: note = Description of Artificial Sequence: Synthetic coding sequence
  source 1..1326: mol_type = other DNA
atggaaatccggctagacacactcagtgccagtttgggccgcagctctacgcttaacaactgcaaccttgaagataagctagcctggtatgagggtgaggcttacatgtggcatcactggaaaccctttcccgagaacccgctctggacctgcttagatttccagatcgcacaagtcggtccctgggatcattgctccagctgcatcagacacaccagattgaaaagttcttgctctgatatggatctcctgcattcctggaggagttcttcttttgggaactttgaccgctttagaaataactctctgagcaagcctgacgattcgacggaggctcacgaaggcgacccgacaaatggatccggggagcaatccaaaacaagtaacaatggtggaggcctaggcaagaagatgcgggccatttcatggacaatgaaaaaaaaagtgggaaagaagtatatcaaggcattgtccgaggagaaggacgaggaagacggtgagaacgctcacccttatagaaacagtgacccagtcatcgggacccacactgagaaggtttcactgaaggctagtgactccatggatagcctgtactcaggccagtcctcctcctccggtatcacctcatgttccgacggtacgagcaatcgcgattccttccgcttggatgatgacggtccctactcaggtcctttttgtggcagggccagagtgcatacggactttacgccatctccttacgacactgacagtttgaaaataaaaaagggtgatattattgatattatttgtaaaacgccaatgggcatgtggacaggtatgctcaacaataaagtgggcaattttaaatttatctatgtggatgtcatttccgaggaagaggcagccccgaagaagataaaagccaatagaaggtccaatagtaagaagagcaaaactcttcaggagttcctggaacggatccatctgcaggagtatacttcaaccctcttgcttaatggatacgagactcttgaggaccttaaggacataaaggaatctcatctaatcgagctgaatatcgagaatcctgatgaccggcggagattgctctctgccgcggaaaacttcctagaagaggagatcattcaggaacaggaaaacgagcctgagcctctctcactctccagtgacattagtttgaacaagagccagctggacgactgccctagggactcagggtgttacatctcctccgggaattcagataacggcaaggaggacctagaatccgagaacctgtctgacatggtccataagatcattattacagaacccagcgattag

SEQ ID NO: 133408 - DNA, 618 bp, synthetic construct
  misc_feature 1..618: note = Description of Artificial Sequence: Synthetic coding sequence
  source 1..618: mol_type = other DNA
atgttgaaacggaagcccagcaatgtgtcagagaaggagaagcaccagaagccaaaaaaaggggatattattgatatcatttgcaaaaccccgatgggcatgtggacaggtatgctgaataacaaggtggggaatttcaagtttatttacgtcgacgtcattagcgaagaagaagccgcccccaagaagatcaaagctaaccggagaagtaatagcaagaagagtaaaaccctgcaggagttcctggagcgcattcacttgcaagagtatacatcaacactgctccttaatggttatgaaaccctggaggacctcaaagacattaaggaaagtcaccttattgagctgaacatagagaatcctgatgaccggcggcggttgttaagcgcggcagaaaatttcctggaagaagagattattcaggaacaggagaatgagccagagcctctgtcattgagcagcgacatcagcttgaacaagtcacagctcgatgactgcccacgcgactccggatgttatattagctcaggtaacagcgacaatggtaaggaagacctggaaagcgagaacctgtctgacatggtgcataaaattataatcaccgaaccctccgattag

SEQ ID NO: 133409 - DNA, 1122 bp, synthetic construct
  misc_feature 1..1122: note = Description of Artificial Sequence: Synthetic coding sequence
  source 1..1122: mol_type = other DNA
atgttgaaacgaaagccctcaaatgttagcgaaaaggagaagcatcaaaagccaaaacgctcaagttctttcgggaactttgaccggtttagaaataattccctttcaaagccagacgattctacagaggcccacgaaggcgacccaactaatggcagtggagaacaatctaagacttccaataacgggggaggactcggtaaaaagatgcgcgctatctcctggacaatgaaaaaaaaggttggcaagaaatacattaaagccctttccgaggagaaagacgaggaggatggagaaaacgcacatccatacagaaattccgacccagtcattggaacacacaccgaaaaggttagcctcaaagcttcagatagcatggattctctctactccggacaatcgagctcctccggcatcacaagttgcagcgatggtacaagtaacagggactccttccgccttgacgacgatggaccctacagcggcccattttgtggacgggctcgagtacatactgacttcacaccaagtccttatgacacagactctctaaagatcaaaaagggagatattattgatattatctgtaaaacccccatggggatgtggaccggtatgctcaacaacaaggtgggaaattttaagttcatctacgtggacgttatttctgaggaggaagccgcacccaagaaaatcaaagcaaaccggcggtccaactccaaaaagtccaaaacccttcaggagttcttggagcgtatccatctccaagaatacacctcaaccctactgctgaacggttacgagacattggaggatttaaaggatataaaggagagccatcttatagagttaaacattgaaaaccctgacgatcggcgacggctgctgagcgccgctgaaaattttcttgaagaagaaattatccaggaacaagagaatgaacctgagcctctgtcactgagctccgatatatcccttaacaaaagtcagctggatgactgcccgcgagactccgggtgttacatctcctcagggaactctgacaacggtaaagaagatctggagagcgagaacctgtcagatatggtgcacaagattattatcaccgagccttcagactag

SEQ ID NO: 133410 - DNA, 1008 bp, synthetic construct
  misc_feature 1..1008: note = Description of Artificial Sequence: Synthetic coding sequence
  source 1..1008: mol_type = other DNA
atgggtagtgcgagccctggactttcgagtgtgtctccctctcacctgctgttgcccccagacacagtcagtcgtacgggactcgagaaagctgcagccggggctgtcggcctcgaacgcagagactggtcgccgtccccccccgccacacctgaacagggtctaagcgctttctatctctcatacttcgacatgttgtacccggaggatagcagctgggccgcaaaagcccccggcgcctctagccgggaggaacccccagaggagcccgagcaatgtccagtgattgactcccaggccccagccggtagcctcgatttggtgcccggcggccttacactcgaggagcacagtctggagcaggtccagtctatggtagtaggtgaagtacttaaagatattgagaccgcctgtaaactgcttaacatcacagccgaccctatggattggagtcccagcaatgtgcagaagtggcttctctggacagagcaccaatataggctgcccccaatgggtaaagcctttcaagaactcgcaggcaaagagctctgcgccatgagcgaggagcagttcagacagcgttcacctctggggggggacgttctgcacgcccacttggacatttggaaatccgctgcctggatgaaagagaggacgtctcctggtgccatccactattgtgcatctactagcgaggaatcgtggaccgactcagaagtcgatagtagctgcagcggacagcccatccatctgtggcagtttctgaaagagctgcttctgaagccacacagctatggcagattcatccggtggcttaataaggagaaggggatatttaaaatagaggacagcgcacaggtcgctcgtctgtggggcattcggaagaacagacccgcaatgaactacgacaaactgagtcggtctattagacagtactacaaaaaagggatcattaggaagccggatatttcccaaaggctggtgtaccagtttgtccaccccatctag

SEQ ID NO: 133411 - DNA, 960 bp, synthetic construct
  misc_feature 1..960: note = Description of Artificial Sequence: Synthetic coding sequence
  source 1..960: mol_type = other DNA
atgggtagcgctagtccaggcctcagcagtgtcagtcctagccaccttttacttccccccgatacggtcagccgaacagggctggagaaggcagctgctggggcggtaggcctggagagaagggattggagtccttcacctccagcgacaccggaacaggggctttctgccttttacttgtcttacttcgatatgctttacccagaagacagctcctgggccgccaaggcgccaggggcatccagccgagaggagccaccagaagagcctgaacaatgccccgtgatcgatagccaagctcccgcagggtcactagacctcgtgccaggaggcctgactctcgaggaacattcactggagcaggtccagagcatggtggtaggagaagttttgaaagacatagagaccgcatgtaaattgctcaatattaccgctgaccccatggactggagcccctccaatgtgcagaagtggctgctgtggaccgagcaccagtatcgccttcctcccatgggcaaggcatttcaggaacttgccggcaaagagctgtgcgccatgagcgaagagcagttcaggcagcgctcaccactgggaggcgacgtcttgcacgctcacctggatatttggaagagcgcatcaaccagcgaggaatcatggacagactccgaggtcgactccagctgtagcggccagcccattcacctgtggcagtttcttaaggaactgctcctgaaacctcattcatacggcaggttcatccgctggcttaacaaggaaaaagggatatttaaaattgaggattctgcacaggtggctcgtctatggggaattagaaaaaacagacctgcgatgaattacgacaagctgtctagatccatcagacagtattacaagaagggcattatcagaaagcctgatatctcacagagacttgtctatcagtttgtgcacccaatttag

SEQ ID NO: 133412 - DNA, 1218 bp, synthetic construct
  misc_feature 1..1218: note = Description of Artificial Sequence: Synthetic coding sequence
  source 1..1218: mol_type = other DNA
atggcagcaagtgggaaaaccagtaaatctgagcctaaccatgtgatatttaagaaaatcagccgagacaagtcagtgaccatctatctcggcaacagagactacattgatcacgtcagtcaggttcaacccgttgacggagtggttcttgtagatcccgacctcgtgaagggtaagaaagtttatgtgacgctgacctgcgccttcaggtacgggcaagaagacattgacgtcattgggctgacttttcgaagagatttgtatttcagtcgggtacaagtgtaccctcctgtgggcgcggcttctactcctaccaagctgcaggagtcactcttgaagaaactcggatcaaacacatatccctttctcctgacatttccagactatctgccttgctcggttatgctccagcccgcgccccaggacagtgggaagagctgtggagtcgactttgaagtgaaagcctttgcgaccgattcaacggacgccgaagaagacaagatacctaagaagtcaagcgtgcgcctgcttatacgcaaagtacagcacgcccccttggagatgggtcctcaaccgcgggcagaggccgcatggcaattcttcatgtcagataaacctctccacctagccgtgagccttaataaagagatctacttccacggggaacccatacccgtaacagtgaccgtgactaacaacaccgagaaaaccgtaaaaaaaatcaaagcctttgtggaacaggttgccaatgtagttttatattcaagtgactattacgtgaagccagtggctatggaagaggcacaggaaaaagtccctccaaacagcacactgactaagaccttgactctacttccactgttggcgaataatcgggaacggagaggcattgcactggatggaaagatcaagcatgaagatactaacctggcaagctcgacaataattaaggaggggatcgaccgaacggtgcttggcatcctggtgagttaccagattaaggtgaaactgacggtatccggcatgacaggtagacagaaagctagtgaggtggctaccgaggttcctttcaggctgatgcacccccagcctgaagaccctggccaattctcctaccaagacgctaacttagtcttcgaggaatttgcccgccataatctgaaagacgccggcgaggccgaagaggggaagcgggacaagaacgacgtggacgaatag

SEQ ID NO: 133413 - DNA, 1218 bp, synthetic construct
  misc_feature 1..1218: note = Description of Artificial Sequence: Synthetic coding sequence
  source 1..1218: mol_type = other DNA
atggccgccagtggaaaaaccagtaagtcggaacccaatcacgtcattttcaaaaagatctcgcgtgacaagtccgtcaccatctaccttggcaaccgcgattacatagaccatgttagccaggtgcaaccagttgacggagtagtgcttgtcgacccagaccttgtgaaaggaaaaaaagtctatgtgacattgacatgcgcttttaggtatgggcaagaggatatcgatgtgattggacttacgttccgcagagacctatacttctcaagggtccaggtttacccccccgtaggcgcggcttctacacccaccaagctacaggagtccctcctcaaaaaattggggtctaacacatatccgtttctcctgacttttcccgactacctgccctgttccgtgatgctccagccggcccctcaggactcagggaaaagctgcggagttgacttcgaagtcaaagccttcgctactgattctaccgacgccgaggaagataaaatccccaaaaagtcatccgtacgacttctgatacgcaaagttcagcacgcacctctggagatgggaccacagccccgcgcggaagctgcatggcagttttttatgtccgataaaccactgcacttggcagtgtcactcaacaaagagatctattttcacggcgagccaattcctgtgaccgtgacggttaccaataacacagagaaaacggtcaaaaaaattaaggcgttcgtggagcaggtcgctaacgtggtactgtacagctccgactattatgttaagccggtggccatggaagaggcacaggagaaagtcccaccaaacagcaccctgacaaagaccctgaccctactgccccttctcgccaataaccgagagagaagagggattgcgctggatggaaagatcaagcatgaggacacaaatctggcatcaagcaccattatcaaagaaggcatcgatagaacggtactgggtatcctcgtctcctaccagattaaggttaagctgacagtgtccggttttttgggagaactgacatctagcgaggtcgccaccgaggttccctttagacttatgcatccacaaccagaggacccagcaaaggagtcataccaggatgccaacttagtattcgaagagtttgcccggcacaacctgaaagatgcaggcgaagccgaggagggcaagagagacaagaatgacgtggatgagtag

SEQ ID NO: 133414 - DNA, 510 bp, synthetic construct
  misc_feature 1..510: note = Description of Artificial Sequence: Synthetic coding sequence
  source 1..510: mol_type = other DNA
atggccgcaagtggaaaaaccagtaaatcagagcctaaccacgtgatttttaagaaaatctccagggataaatctgttactatatacctcgggaaccgcgattatattgatcatgtgtcacaggtacaacccgtggatggagttgtcctagttgatccagacctggtgaagggaaagaaggtatatgtgactctgacatgcgcatttcgctatggccaagaggacatcgacgttattggactgaccttccgacgcgatctctatttctcccgagtccaagtctatccacccgtaggcgcagcctcgactccaactaagcttcaagagagtctcctcaagaaactcggctcaaacacataccccttcctcctgaccttcccagattaccttccttgttccgtgatgcttcagcccgccccccaagactctgggaaatcttgtggcgtggattttgaagtcaaagcatttgccaccgattcgaccgatgcagaggaagacaaaatcccctag

SEQ ID NO: 133415 - DNA, 708 bp, synthetic construct
  misc_feature 1..708: note = Description of Artificial Sequence: Synthetic coding sequence
  source 1..708: mol_type = other DNA
atgctccagcctgcccctcaggatagcggcaaaagctgtggagttgatttcgaagtgaaagcttttgcgacggacagtacagacgccgaggaagataagatcccaaagaagtcatcagtgcgcctgttaatacggaaggtccagcacgcacctcttgagatgggccctcagcccagggccgaggctgcctggcagttcttcatgtctgataaaccactacacctggcagtctcactgaataaagaaatttacttccacggagaacctatccccgtgacggtgacagtgacgaataacaccgaaaaaaccgtcaagaagataaaggcatttgtggaacaggtggcaaatgtggtcttgtattcatctgactattatgtaaagcccgtggcaatggaagaggcccaggaaaaagtaccccctaattccacactgaccaagacgctcacactgcttccactgctagcaaacaatcgggagaggagaggaattgccctcgatggtaagataaagcatgaggatacaaatctggccagcagcacaatcataaaagaagggattgaccgcacagtgcttgggatcctagtgtcctaccaaatcaaggtcaaacttaccgtgtcaggatttctcggtgaactcactagttctgaggtcgccacagaagtgcctttccgcctcatgcacccacagcctgaggacccaggcaaatag

SEQ ID NO: 133416 - DNA, 204 bp, synthetic construct
  misc_feature 1..204: note = Description of Artificial Sequence: Synthetic coding sequence
  source 1..204: mol_type = other DNA
atggccgcctcgggtaaaacatctaaaagtgaaccgaaccacgttatctttaagaaaattagccgtgacaagtccgtatcaggagcccaggttactatctatctgggcaaccgtgactacatcgatcatgtatcccaggtccagcctgtcgacggggtcgtactggtggaccccgaccttgttaagggcaagaaggtgtcctag

SEQ ID NO: 133417 - DNA, 633 bp, synthetic construct
  misc_feature 1..633: note = Description of Artificial Sequence: Synthetic coding sequence
  source 1..633: mol_type = other DNA
atggcaaccgaaacagtggagctgcacaagctgaagcttgccgagctgaaacaggaatgcctggccagggggcttgagacaaagggcatcaagcaggatttaatccacagactgcaggcctacctcgaggaacacgccgaggaggaagctaacgaggaggacgtcctaggcgatgagaccgaggaagaagagaccaagccgattgagctcccagtcaaggaagaagagcccccagagaaaaccgttgatgtagccgccgagaagaaagtggtgaagatcacttctgagatcccacagaccgagaggatgcagaagcgggccgagagattcaacgtcccagtgagcctggagagcaagaaggcagctagagccgcgaggtttgggatctcgagtgtccctaccaaggggctcagctccgacaacaaacctatggtgaacctggataagctgaaggagagagctcagaggtttggccttaacgtaagctcgatatcgcgaaaaagtgaggacgacgagaaactaaaaaaacgtaaggaacgctttggaatcgtcacgtcatcagccggtacggggacgaccgaagacactgaggcaaagaagaggaagcgggccgagcggttcggaattgcatag

SEQ ID NO: 133418 - DNA, 453 bp, synthetic construct
  misc_feature 1..453: note = Description of Artificial Sequence: Synthetic coding sequence
  source 1..453: mol_type = other DNA
atggaggaggagacgaagccaatcgagctgccggtgaaggaggaagaacccccggaaaaaactgttgatgtcgctgcagaaaaaaaggtcgtcaaaatcacctctgaaattccgcagacagagcgaatgcagaagagagcagaaaggttcaacgtgccagtttctctggagagcaagaaagcggccagggcagctcggttcggaattagttcggttccaacaaaaggtctgtcctctgacaacaagcccatggtgaacctggataagctcaaagagagggcccagagatttggccttaatgtgtcatcgatctctagaaagtctgaggatgatgaaaagctgaaaaaacggaaagagcgtttcgggatcgtgacctcaagcgcagggaccgggaccaccgaggacacagaggcaaagaagagaaaacgagccgaacgtttcggcattgcgtag

SEQ ID NO: 133419 - DNA, 633 bp, synthetic construct
  misc_feature 1..633: note = Description of Artificial Sequence: Synthetic coding sequence
  source 1..633: mol_type = other DNA
atggccacagagacagtggagttgcacaaactcaagctcgctgaactcaaacaagagtgcctcgcaaggggtttagagactaagggtattaaacaggatctgattcaccgtctgcaggcctatctggaggagcacgctgaagaggaagcaaacgaagaagacgtgctaggtgatgagacagaagaagaggaaaccaaacccatcgaattgccagtcaaagaggaggaacccccagagaagaccgtggacgtggccgcggaaaaaaaggtggttaaaattactagcgaaatcccccagacagaacgcatgcagaagcgggccgagcgatttaatgtgcccgtctctctagagagtaagaaggcggctcgagctgccaggttcgggatctcatcggtgcctacgaagggcctgagctccgacaataagcccatggtgaatcttgacaaactgaaagagcgcgcccagcggtttgggctgaacgtatcttctatttccagaaagtctgaagacgatgagaagctaaaaaaaagaaaggagagatttggcatcgtaacttcttctgcgggaacaggcaccactgaagataccgaggccaaaaagaggaagcgtgctgagaggtttggcattgcgtag

SEQ ID NO: 133420 - DNA, 879 bp, synthetic construct
  misc_feature 1..879: note = Description of Artificial Sequence: Synthetic coding sequence
  source 1..879: mol_type = other DNA
atggctgggaagaaaaacgtgctgagctctctagccgtatacgccgaggattctgagccagagtccgatggggaagctgggatcgaagcagtgggcagcgcagccgaagagaagggaggcctagtgtctgacgcttacggcgaggatgacttcagtagactgggcggcgatgaagatggttatgaggaggaggaggacgagaactcgcgacagtctgataatacagaggcggaaaaaagggacccgcaggaactggtggcaagcttctcagagcgggtgcgtaatatgtccccagacgagattaaaatccccccagaacctccaggcaggtgctccaaccacctccaggataagatccagaaactgtacgagcggaagattaaggaagggatggatatgaactacataatacaaagaaagaaagagttcagaaatccctcaatctacgagaagctcattcagttctgtgcaattgacgagttaggaacaaactatcccaaggacatgttcgatccgcacggatggtccgaagatagctactatgaggccctcgctaaggctcagaaaattgaaatggacaagcttgaaaaagcaaagaaggagcggacgaagatcgagttcgtgaccggcacaaaaaaaggaacaacgacgaacgccacctccaccacaacgactactgcttccactgccgtggccgatgcacagaagcgcaagagtaagtgggacagcgcgatcccagtgacaacaatcgctcagcctacaatcctgaccactaccgccactctccctgccgtggtgacggtaacaacttccgcctccggtagcaagactaccgtcattagcgccgttggaacaattgtgaagaaggcaaagcagtag

SEQ ID NO: 133421 - DNA, 927 bp, synthetic construct
  misc_feature 1..927: note = Description of Artificial Sequence: Synthetic coding sequence
  source 1..927: mol_type = other DNA
atggctgggaaaaaaaacgtgctctcttcattggcagtctacgctgaagattcagaacccgagtcagatggcgaagctggaatcgaagccgtgggtagcgccgccgaggagaagggaggccttgtgtcagacgcctatggggaagatgacttttcacggctggggggagacgaggacgggtatgaggaggaagaagacgagaactccagacagagcgaggacgatgacagcgaaacggaaaagcccgaggcagacgacccaaaagataacacagaggctgagaagcgcgacccgcaggagttggtggcctcttttagcgagagagtcagaaatatgtcaccagatgaaattaaaattcctcctgagccgccagggagatgcagcaatcacttacaagacaaaattcagaagctgtacgaaagaaagataaaggaggggatggatatgaattatatcattcagaggaagaaggagtttagaaacccctctatctacgaaaagctcatccagttttgtgccatagacgaattagggaccaactaccctaaagacatgtttgatcctcacggttggtcagaggacagctattacgaggctctcgctaaggcccagaagatcgagatggacaagctggagaaggcaaaaaaggagcgtacaaaaattgagtttgtcactggcactaagaagggaaccactactaatgccacatcaacaactaccacaacggcatccaccgcggtggcggatgctcagaaaagaaagtccaagtgggacagcgctatccccgtgacaaccatcgcacagcctacaatccttaccaccaccgccactctccccgcggtggttaccgtcaccacgtcagcttctggatctaagacaaccgttatttccgctgtagggacgatcgtcaagaaggcgaaacagtag

SEQ ID NO: 133422 - DNA, 507 bp, synthetic construct
  misc_feature 1..507: note = Description of Artificial Sequence: Synthetic coding sequence
  source 1..507: mol_type = other DNA
atggcaggtaagaagaacgttctctctagcctggccgtatatgctgaggatagcgagccggagtctgacggcgaggccggaatcgaagcggtcgggagcgccgccgaggagaaaggtggcctggtcagcgacgcgtacggagaggacgacttcagtaggctgggcggagacgaagacgggtacgaggaggaggaggacgagaactccagacaatcagaggacgacgattccgagaccgaaaagccagaagccgatgacccgaaagacaatacagaagccgagaaaagagatccgcaagagcttgtggcgagcttcagtgagcgcgtgcgtaatatgtcacctgatgagatcaagattccacctgagccaccaggcagatgcagtaatcatctccaagacaagatccagaaattgtatgagagaaaaataaaggaaggaatggacatgaactatattatccagcgcaagaaagagttcaggaacccgagccaggggccagagaactag

SEQ ID NO: 133423 - DNA, 927 bp, synthetic construct
  misc_feature 1..927: note = Description of Artificial Sequence: Synthetic coding sequence
  source 1..927: mol_type = other DNA
atggcaggcaagaagaacgtcctgtcttccttggcggtctatgccgaggattctgagcccgagtccgacggtgaggctggaatcgaggcagtgggcagcgctgctgaggagaaaggtggactggtgtcagacgcctacggggaagacgatttctccaggctcggaggggacgaggacggatacgaggaggaagaggatgaaaatagtaggcagtctgaagacgacgatagtgagaccgaaaaacccgaagccgacgaccctaaagacaatactgaggccgaaaaacgggacccacaggagttagtggcctcattttctgagcgcgtccgaaatatgtcccccgacgagatcaagataccaccagaacccccaggcagatgcagcaaccacctccaggataagatacaaaaactttacgagcgcaagatcaaggaaggaatggatatgaattacattatccagcgaaagaaagaattcaggaatccttctatatatgaaaaactgatccagttctgcgccatagatgagctcggcaccaattacccaaaggacatgttcgatccccatggatggtccgaagattcttattatgaggcccttgcaaaggcacagaagattgagatggataagctcgaaaaagccaagaaagaacgaacgaaaatcgagttcgtgacgggaaccaagaaaggtaccaccaccaatgccacttctacaaccactactacagcaagcacagcagtggcggatgctcagaaaagaaaaagcaaatgggattctgcgattcccgtgaccacaatcgcccagccgacaatcctgaccaccaccgccactctgcccgctgtggtgacggtcacaacgtccgcatctgggtctaaaactacagtaatttcagccgtgggcaccatcgttaaaaaggcaaaacagtag

SEQ ID NO: 133424 - DNA, 366 bp, synthetic construct
  misc_feature 1..366: note = Description of Artificial Sequence: Synthetic coding sequence
  source 1..366: mol_type = other DNA
atgtccttcatcttcgaatggatctacaacggctttagctccgttctgcagttcctgggcttgtacaagaaaagtggtaagctcgtgttcctcggtctggataacgctggaaagaccaccctactgcacatgctaaaagacgatcgactcggtcagcacgtccccacactgcatccaacatcagaggagctgaccatcgccggaatgacctttaccaccttcgacctgggcggacacgaacaggctcgccgagtgtggaagaactacctgcctgcaattaatggtattgttttcttggtcgactgtgctgaccatagcaggttagtggagtcaaaagtagagctcaatgtctgctttgtgctgtag

SEQ ID NO: 133425 - DNA, 597 bp, synthetic construct
  misc_feature 1..597: note = Description of Artificial Sequence: Synthetic coding sequence
  source 1..597: mol_type = other DNA
atgtcctttattttcgaatggatctacaatggcttctcaagcgtcctccagttcctaggactctataagaaatccggtaagctcgtgtttctgggcctggataacgctggtaagactaccctgctgcatatgcttaaggacgaccgcctcgggcaacatgtgccaaccctacatcctacctctgaggagctaaccatcgctggcatgaccttcaccaccttcgatctcggaggccacgagcaagccagacgagtgtggaagaattaccttcccgccatcaacgggatcgtgttccttgttgattgtgccgatcacagcaggctagtcgagtcaaaagtggagttaaacgctttaatgaccgacgaaaccatctctaacgtccctatcctgatcctcggcaacaagattgatagaacggatgcaatatctgaggaaaaactccgtgaaattttcggcttgtacggccagacaactggcaaagggaatgtcacactgaaggagctaaacgcccggcctatggaggtctttatgtgctcggtgctgaaacggcagggttatggagaaggcttccggtggctgagtcaatacattgattag

SEQ ID NO: 133426 - DNA, 597 bp, synthetic construct
  misc_feature 1..597: note = Description of Artificial Sequence: Synthetic coding sequence
  source 1..597: mol_type = other DNA
atgtccttcatctttgaatggatctacaacggcttctcatctgtactgcagttcttaggactgtacaagaagtctggaaagctggtttttctggggttggacaacgctggcaaaacgactctgctccacatgttgaaggatgatcgcctcggccagcacgttcctaccttacatcccacttccgaagaactgactatcgcgggtatgacttttacgacctttgacctgggtggacatgagcaagccaggagggtttggaaaaattacctgcctgctatcaacggcattgtgttcctggttgattgcgccgaccactcgcgactggtggaatctaaggtagagttaaatgcactcatgaccgatgagaccattagtaacgtgcccatattgatcctcggcaacaaaattgaccggacagatgcaatttcagaggagaagctgcgggagatcttcggcctgtatggccaaacgaccggcaaagggaatgtgaccctcaaagagttgaacgctcggcccatggaggtctttatgtgctctgtgctcaagcgccaaggctacggtgaaggattcaggtggttgagccagtatatcgactag

SEQ ID NO: 133427 - DNA, 597 bp, synthetic construct
  misc_feature 1..597: note = Description of Artificial Sequence: Synthetic coding sequence
  source 1..597: mol_type = other DNA
atgtccttcatctttgagtggatttataacgggttctcatccgtgctgcagttcctgggcctttacaaaaagagcggcaaattggtatttctggggctagataacgccggaaagaccactctactgcacatgttgaaagacgatcgcctggggcaacatgtcccaacgcttcatccgacgagcgaagagcttacaattgctggtatgacctttaccaccttcgacctggggggtcacgagcaggctaggcgtgtgtggaagaattacctgccagccatcaatggcattgtgttcctggtcgattgcgccgatcattctagactggtggaatctaaagtggagctcaacgctcttatgaccgacgaaaccattagcaacgtgcccattctgatcctgggcaacaagattgatcgcaccgacgcaatctcagaggagaaactccgggagattttcggactgtacggacagaccactggcaagggcaatgtgaccctcaaggaactgaatgctcggccaatggaagtcttcatgtgcagtgtgctcaagcgccaaggttatggcgagggattccgttggcttagccaatacattgactag

SEQ ID NO: 133428 - DNA, 597 bp, synthetic construct
  misc_feature 1..597: note = Description of Artificial Sequence: Synthetic coding sequence
  source 1..597: mol_type = other DNA
atgtcattcatctttgaatggatatacaatggcttttccagcgtcctgcagttcctggggctctacaaaaaaagcgggaagttggtgtttttgggcctcgataatgccggaaagacgacacttctgcacatgctgaaggatgatcggctgggccagcacgtgcccaccctgcaccctacgtccgaggaacttactattgcaggaatgacttttaccaccttcgacctcggcgggcatgagcaggctaggagggtgtggaagaattacctgccagcaattaacgggattgtgttcctcgtggactgcgctgatcactcccggcttgtcgagtctaaagtggaacttaatgctctaatgaccgacgaaacaattagcaatgtgcctattctaatcctggggaataagatcgatcggactgacgctatcagcgaagaaaagctgagggagatctttggactctacggccagaccacaggtaaaggtaatgtaacactcaaggagctgaatgctcggcctatggaggtgttcatgtgtagcgtcctcaagcgacaaggctatggagagggatttcggtggttgagtcagtatattgactag

SEQ ID NO: 133429 - DNA, 354 bp, synthetic construct
  misc_feature 1..354: note = Description of Artificial Sequence: Synthetic coding sequence
  source 1..354: mol_type = other DNA
atgggtctctcgttttggtggaccgtccagattattttggccagctggaaccctaagctatccctgatgatctattgctcatccctgctaaccctggcacccaacgcattaatgacggatgagaccatttctaatgtgccaatactgattttagggaacaagatagatcgtacagacgctataagcgaagagaagttgcgcgaaatcttcggtctgtatggccagaccacaggcaagggcaacgttacactgaaggagctcaatgctcgccctatggaagtgtttatgtgctcggtccttaagcgccaaggatacggcgagggatttaggtggctctcccagtatatcgattag

SEQ ID NO: 133430 - DNA, 597 bp, synthetic construct
  misc_feature 1..597: note = Description of Artificial Sequence: Synthetic coding sequence
  source 1..597: mol_type = other DNA
atgagtttcattttcgagtggatatacaatggcttttcctcagtgttacaattcctgggtctgtataaaaaatctgggaagctcgtgtttctgggtctggataatgccggaaagacaacgctgctgcatatgcttaaggacgacagattaggacaacatgtaccaacactgcaccctacatctgaagaattaaccattgcaggcatgacatttacgacctttgacttaggcggtcacgagcaggcacgacgcgtgtggaaaaactacttacccgcgattaacggcattgtgtttttggtggactgtgcagaccatagtcgcctggtggaatccaaggtagaactgaacgccctgatgacagacgaaacaattagcaacgtgccaatcctaatcctcggcaataagatagataggacagatgctatctccgaggaaaaactccgagagatctttggcctgtacgggcaaaccaccggaaagggaaatgtcacccttaaagagctcaacgccagacccatggaggtttttatgtgctctgtcctgaaacgtcaagggtacggggagggcttccggtggctgtctcagtatatcgattag

SEQ ID NO: 133431 - DNA, 348 bp, synthetic construct
  misc_feature 1..348: note = Description of Artificial Sequence: Synthetic coding sequence
  source 1..348: mol_type = other DNA
tgatcattttggtggactgtgcagatcatcctggcctcctggaaccccaagctgtcactgatgatatattgttcctctcttcttaccctggctcccaacgctcttatgacagatgaaaccatctccaacgtccctatcctaattctgggaaataaaattgataggacggacgccattagcgaagagaaactgagggaaatcttcggattgtacggccagacaacaggaaagggcaacgtgactctaaaggagttaaatgctcggcccatggaagtgttcatgtgctctgtcctaaagagacagggatacggcgaggggttccgctggctgagccagtacatcgattag

SEQ ID NO: 133432 - DNA, 468 bp, synthetic construct
  misc_feature 1..468: note = Description of Artificial Sequence: Synthetic coding sequence
  source 1..468: mol_type = other DNA
atgctgaaggatgatcggctcgggcaacatgttccaaccctgcaccccaccagcgaagaactgaccatagcaggtatgactttcacgacctttgacctgggtggccacgagcaggcacggcgagtgtggaaaaattaccttccagcaattaatggcattgtgtttctggtggactgtgccgaccactcacgccttgtggagagcaaggtggagttgaacgccctgatgaccgatgagactatcagcaacgtccctattttgattctaggcaataaaattgacagaaccgacgccatctcagaagagaaactaagggagatcttcggactatacggccagacaacaggcaagggaaacgttaccctgaaggaactaaacgctaggcctatggaggtgtttatgtgttccgtgctgaaacgtcagggctacggcgaaggatttagatggctttcgcagtacattgactag

SEQ ID NO: 133433 - DNA, 393 bp, synthetic construct
  misc_feature 1..393: note = Description of Artificial Sequence: Synthetic coding sequence
  source 1..393: mol_type = other DNA
atgacattcactactttcgacttaggggggcacgtccaggccaggagagtgtggaaaaattacctgccggctattaatggcattgtgttccttgttgattgtgccgaccacgaaagactgttagagtccaaggaggagctagattctttgatgacagatgagaccatcgccaacgtacctatattgatcctgggcaacaagattgacagacccgaggcaatctcagaggagcggctgagagagatgtttggcttgtacggtcagactaccggcaagggcagcatttcccttaaggagttgaatgcgagaccccttgaggtttttatgtgcagtgtgctgaagcgacaaggctatggggaaggatttcggtggatggcccagtacatcgattag

SEQ ID NO: 133434 - DNA, 597 bp, synthetic construct
  misc_feature 1..597: note = Description of Artificial Sequence: Synthetic coding sequence
  source 1..597: mol_type = other DNA
atgagttttatattcgattggatatactcagggttttcctcagtgttacagtttctcgggctgtacaaaaagacgggtaagttagtctttctgggccttgacaatgccggaaagacaactctcttacacatgctgaaagatgataggctgggccaacacgtgccaaccttgcaccccacttctgaggagttgaccattgccggcatgacattcacaaccttcgacttaggtgggcacgtccaggccaggcgcgtgtggaagaattatctcccggctattaatggaattgtttttctcgtggattgcgctgatcacgagcgcctgttggaatctaaagaggagcttgatagcctgatgaccgacgagaccattgcaaacgtgcccatcctgatcctggggaataaaatagaccgcccagaagcgattagtgaagagcggcttcgcgagatgttcggattgtatggacaaaccacaggaaagggctccatttctctcaaggaattaaatgcacgccccctggaagtcttcatgtgctctgtgctgaaacggcagggctatggggagggctttcggtggatggcacaatacattgattag

SEQ ID NO: 133435 - DNA, 597 bp, synthetic construct
  misc_feature 1..597: note = Description of Artificial Sequence: Synthetic coding sequence
  source 1..597: mol_type = other DNA
atgtctttcatctttgactggatctacagcggcttctcgtctgtcttgcagtttcttgggctttataagaaaaccggaaagctagtgtttctgggtttggataacgccggaaagacaaccctcctccacatgctcaaagacgaccgactgggacaacacgtccccaccctccaccctacaagcgaggaattgaccatcgccggaatgacgttcacgacgttcgacctcggaggacacgtgcaggcccgacgggtgtggaagaactacctcccagccattaacgggatcgttttcctggtcgactgtgctgatcatgagcggctgcttgaaagtaaagaagagctcgacagcctgatgactgacgagaccatagccaatgtgccaatactgatactgggtaataagatcgatagacccgaagcaatcagcgaagaacggctccgcgagatgtttggactgtacggccaaaccacaggaaaggggagcatttccttaaaggaattgaacgccaggccattggaggtgttcatgtgctccgttctgaaacgccagggctacggggaaggattcaggtggatggctcagtatatcgactag

SEQ ID NO: 133436 - DNA, 312 bp, synthetic construct
  misc_feature 1..312: note = Description of Artificial Sequence: Synthetic coding sequence
  source 1..312: mol_type = other DNA
atgtcattcatcttcgattggatctatagtgggttcagtagcgtcctgcagtttttggggttatacaaaaagaccggcaaactggtgtttcttggccttgataacgctggcaagaccaccctgctccatatgctgaaggacgacaggctgggccagcatgtccctacactgcaccccacatcagaggaacttaccatcgccggcatgaccttcacaaccttcgatttgggggggcacgttcaagctaggagggtttggaaaaactacctaccagcaatcaatggcatcgtgtttcttgtggattgcgcctag

SEQ ID NO: 133437 - DNA, 393 bp, synthetic construct
  misc_feature 1..393: note = Description of Artificial Sequence: Synthetic coding sequence
  source 1..393: mol_type = other DNA
atgacgttcacaacctttgatttaggggggcatgttcaggcccgccgcgtttggaagaactaccttccggcgataaacggtattgtgttcttagtggactgcgccgaccatgaaaggttgctcgagtcaaaggaggaattggactctctgatgacagacgagactatcgccaatgtacctatcctgattcttggcaacaagatcgaccggccagaggcaatctcagaagaacgtctgcgggaaatgtttggactgtatggtcaaaccacaggcaaagggtccatcagtcttaaggagctaaacgccaggccattggaagttttcatgtgtagcgtcctgaagagacagggatacggcgagggatttcgatggatggcacagtatatcgactag

SEQ ID NO: 133438 - DNA, 513 bp, synthetic construct
  misc_feature 1..513: note = Description of Artificial Sequence: Synthetic coding sequence
  source 1..513: mol_type = other DNA
atgtccttcatctttgactggatatactccggattctccagtgtcttgcaattcctcggtttgtataagaaaacaggaaagttagtgttcctaggcctcgacaatgcaggtaaaaccacactgctgcacatgttaaaagacgatagattaggccagcacgtgcctactcttcatcccacctctgaggaattgaccattgctggaatgaccttcaccacgttcgacctgggcgggcatgtgcaggcgaggcgcgtatggaaaaattacctgcctgctataaacgggatcgttttcctggttgactgcgccgatcacgagagactccttgaaagtaaggaggaacttgattctttgatgacagacgagaccatcgccaacgtcccgattctgatactcggtaacaaaatcgatagacccgaagctatctcggaggagaggctgagagaaatgttcggactgtatggccagaccactggaaagggctcaatcagcctcaaggagctgaatgcctag

SEQ ID NO: 133439 - DNA, 393 bp, synthetic construct
  misc_feature 1..393: note = Description of Artificial Sequence: Synthetic coding sequence
  source 1..393: mol_type = other DNA
atgacattcaccacatttgacctgggcgggcatgttcaggcccgtagagtatggaaaaattacctaccagcaattaacgggatcgtttttcttgttgactgcgcggaccacgaaaggctgcttgaatctaaagaagagctcgactctttgatgaccgacgaaactattgcaaacgtgccaattctcattctcggaaataaaattgatcgccctgaggcaatctctgaggagagactcagggagatgtttgggttgtacgggcagacaactgggaaaggtagcatcagtcttaaggagctgaacgcaaggcctttggaggtttttatgtgcagcgtattgaaacggcaggggtatggtgaaggtttccggtggatggctcaatacattgattag

SEQ ID NO: 133440 - DNA, 393 bp, synthetic construct
  misc_feature 1..393: note = Description of Artificial Sequence: Synthetic coding sequence
  source 1..393: mol_type = other DNA
atgacatttacgacgtttgatctgggggggcatgtccaggctcgacgggtctggaaaaactatctgcccgctattaacggaatcgtgttccttgtggattgtgccgaccacgaaagactgctggagagcaaggaggagctcgacagtcttatgacagacgagaccatcgccaacgtgcctatcctgatactcggcaataagatcgacaggcccgaggccatctctgaagaacgcctgagagaaatgttcgggctgtacggccaaacgaccgggaaaggatcaatatccctgaaagagctaaatgccagacctctagaggtgtttatgtgctcagtgttaaagcgtcagggatatggagagggttttaggtggatggcacagtacatcgactag

SEQ ID NO: 133441 - DNA, 2796 bp, synthetic construct
  misc_feature 1..2796: note = Description of Artificial Sequence: Synthetic coding sequence
  source 1..2796: mol_type = other DNA
atgcgagccttagttttgctcggctgtctgctggcaagtcttttgttcagtggacaggccgaactgcaggtctcagcgagtggcgggactgaggatgtgggaaatctcttagagaaccattttagcgcaggggatgcgtccctcgaggagaaagagagagccctctacgcagataccgccccccaagacaaaaagctgctcctccactacccagacggacgtgaagctgaatctcccaaaaagacacctgctagtgccgccagtgccgggccggacccggaagcgagcctttcaaatgcttctgctacagagagtcctccgcctggagagcgagacgatcgagatgccgcgggtccaggtgaagagaaaaatggcccccccgtggcttctgcattacctcctggtggggcaaaagggcccgtggaggaagaatggcctgaacctagtagcggagaaggccaaggcgaggaagaaactggctttggactccctactgaggggacagcttctggcgaggctgggggtcaggcaggggggcatgagttaccagaagaggtgcaagaggtccagggagatagcttagttcagggagctgttgccggcactgcagagcccaaagccgagggcgcaagcccacattccgagggagatggcgtcggacccctgaatgccgaggccgagggttctcctggtcctggcgaagaacctgccgtacccgagggcgcacctgacgtagcggccgtaggtggagaatccgaaccagacatcgatactcaggccagcgagggcaccgaagatcagggcgagccaggacctgcagccgaggcgtcagcagaacccggcggtgcccagagcgtcaaggccggcgataccgaggagaaccagtcaccggaaatgacagaagaggatgccgacgaagcttcctccgaggaggaatcaggcgacggcagtggatccgaggaagaggggggcgtgccttccgaagaggagtctgaagaggacagcggagatggcgccagctcagaggaagccgaaggcgccagcgaggaagctaccgagccccaagaggcaggagagccccaggaggcacgtgaaccacaagaggggggggatctgcaggaagctgaggaatctcaagagggtggcgatccccaagaggcggaggagcctcaggagggaggtgcaccacaggaggggggcgaacctcaggagggcggggatccccaagaggcaagggaaccccaggaggctagggagccccaagagggggccgagcttcccgaagccaccggcaccacaagccatagggacaggggtgcccaaccgggtccggaggagctaaacacggagagcatgggctccgagacactggatatgaaagcagaagagccagaagaaggacatcaacgtgagagccctattattgtggcccaggaggaaacagaggatgcaaacgaggaggcgcccttgagagatcgctcccatattgagaagaccctgatgctgaacgaagacaagccctccgatgattactctgccgtgctgcagcggctgcggaaaatctatcactcaagcattaaacctctcgagcagtcctacaagtataacgagctgcgccagcacgaaatcaccgacggcgagatcacatccaaaccgatggtactgtttctgggtccgtggtccgtaggaaaaagtacaatgattaattacctccttggcttagaaaacactcggtatcagctgtacaccggagccgagcccaccacctcagagtttactgtgctgatgcatggcccgaaactgaaaacaattgagggcatagtgatggcggcggactccgcaaggtcttttagcccactggagaaatttggccagaatttcctcgaaaagctgattggaattgaagtaccacataagcttttggaacgcgttacattcgtagatacgccaggcatcatcgaaaaccgcaagcagcaggagagaggttatcccttcaatgacgtttgccagtggttcatcgatcgggcagatctcattttcgtggtcttcgaccctacgaaactcgacgtgggattagagttggagatgctttttcggcagctcaagggccgggagagccaaattcgcatcattcttaacaaagccgacaatcttgcaacccagatgctgatgcgcgtctacggtgccttgttttggtccctggcaccactcattaatgtaaccgagccacctagagtttacgtgagcagcttctggccacaagaatataaacctgatacacatcaggagctcttcctacaggaggaaatctcccttttggaggatctgaatcaggtgattgagaaccgcctcgaaaacaagatcgcctttatccgacagcatgcaattagggtgcgcattcatgcgctgctggtggaccgataccttcagacatacaaggacaagatgacattcttctctgatggcgagttggtatttaaagacatagtcgaggatcctgacaagttttatattttcaaaacaatcctcgccaaaactaacgtcagtaaatttgacctgcccaaccgggaggcgtataaagacttttttggaatcaatcccatatcgagttttaagctgctgtctcagcagtgttcttacatggggggctgtttccttgaaaagatagaacgcgctatcacgcaggagctccccggactattggggagcttagggcttgggaaaaacccgggtgctctgaactgcgacaaaacggggtgctcagagacgcccaagaatcggtataggaaacactag

SEQ ID NO: 133442 - DNA, 1422 bp, synthetic construct
  misc_feature 1..1422: note = Description of Artificial Sequence: Synthetic coding sequence
  source 1..1422: mol_type = other DNA
atgcgggcgttggttctgctcggatgcctcctggcatctttgctgtttagtggacaggcagaggagacagaggacgccaatgaagaagctcctcttcgagataggtcccacatcgagaaaactctaatgctgaacgaggataagccctcagacgactatagtgcagttctgcagagacttcgcaagatataccactcctctatcaagccgttggagcaatcttacaagtacaacgaactgcgccaacacgaaattactgacggagaaattacaagtaaacccatggtgctgtttctgggtccttggagcgtgggtaagagcacaatgatcaactatttgttaggcctggagaataccagataccaactgtacacaggtgcagaaccaactacgagtgaattcaccgtgctaatgcacggacctaaattaaaaactatagaaggtatagtaatggccgccgattctgcaaggtctttctccccattagaaaagttcgggcagaacttcttagagaagctcatcgggattgaagtgccacacaagctgctggagagagtgacattcgtggatacacctggcatcattgagaatcggaaacagcaagagagaggctatccctttaatgacgtgtgccaatggtttattgatagggccgatttaatcttcgttgtctttgatcccactaagctagatgtaggcctggagttagaaatgctctttagacagttgaaagggcgagaaagccagatcagaattattcttaacaaagccgacaacctggcaacacaaatgttgatgagggtgtacggggctctgttttggagcctcgcacctctgatcaatgtcacggagcctccaagggtctatgtgagttctttctggccacaagagtataagccagacacacaccaagaactgttcctgcaggaggagatatccctgctggaggatctgaatcaggtcatcgagaaccgccttgaaaataagattgcattcatcaggcagcacgccatacgagtgcgcattcatgccttgctggtggacaggtatctacaaacatataaagacaagatgactttctttagcgacggggagctcgtctttaaggacatagtcgaagacccggataagttctatatctttaaaacaatactagcgaagacgaacgttagcaagttcgatttgccaaacagggaggcatacaaggactttttcggaataaatcccatctctagtttcaagctcctctcccagcaatgcagttacatgggaggctgttttctcgaaaaaattgagcgggcgattactcaggagctgcctgggttgttagggtctcttggactgggtaagaatcctggagccttgaactgtgacaagacaggctgctcagagacgccaaaaaaccggtatcgcaagcattag

SEQ ID NO: 133443 - DNA, 1296 bp, synthetic construct
  misc_feature 1..1296: note = Description of Artificial Sequence: Synthetic coding sequence
  source 1..1296: mol_type = other DNA
atgctgaacgaagacaaacccagcgacgattactccgccgttcttcaaagacttcgaaaaatctatcattcatctatcaaacccctagaacagtcttacaaatacaatgagctgcggcaacatgaaattactgatggagagatcactagtaaacctatggtgctctttctgggaccctggagtgtcggcaaatcaactatgattaactacttattgggactggaaaacacgagatatcagctgtacaccggagcagagcctaccactagcgagtttaccgtgttgatgcatggtcccaaactgaagacaatcgaaggaatcgtgatggctgccgatagcgcaaggagcttttcacccttggaaaagttcggccagaatttcttagaaaagttgatcggcattgaagttccccacaagctgctggagcgggtcaccttcgttgacacccctggcataattgagaatagaaagcagcaggagcgcggatatccgttcaacgacgtctgccagtggttcatcgacagggcagatttgatcttcgtggtatttgatcccaccaagctggatgtgggtcttgaattggagatgctgtttcgtcagctcaaggggcgtgagtcacagattaggatcatcttgaataaagccgacaatctcgctacacagatgctcatgagggtgtacggcgccctcttttggtcactagcgccccttataaacgtcaccgagcctccccgggtctatgtaagctcattctggccacaggaatacaaaccggacactcatcaggagctgtttctgcaggaagagatctctttgttggaggacctgaatcaggtgattgaaaatcgcttggagaacaaaatcgccttcatccggcagcacgcaatccgcgtacgcatccacgctctgttggtggatagatatttgcagacctataaagataagatgacctttttcagcgatggagagctcgtctttaaagatattgtagaggatcctgacaagttctatattttcaaaaccattcttgcaaaaaccaatgtgagcaaatttgacctgcccaatagggaagcctataaagacttcttcgggattaatcccatcagttcctttaaattgctatctcagcagtgcagctatatgggcggatgctttcttgaaaaaatcgaacgtgccatcacacaggagctgcctgggctcctgggcagcctggggctcggaaaaaatccaggtgcacttaactgtgacaaaactggctgctctgagacccccaagaataggtaccggaaacattag

SEQ ID NO: 133444 - DNA, 1164 bp, synthetic construct
  misc_feature 1..1164: note = Description of Artificial Sequence: Synthetic coding sequence
  source 1..1164: mol_type = other DNA
atggctgaaaccttgttctggactccattgctggtggtactccttgctggtctcggtgacacagaagctcagcagaccactctccatcctttggttggccgggtcttcgttcacacactggaccatgagacgtttctctcactgcccgagcacgtggctgtgccacccgccgtgcatattacttatcacgcccacttacaaggccacccggacctcccccgttggcttcgttacacacagagatcacctcaccaccctggcttcttgtatgggtccgcaacccccgaagatcgcggcctgcaggtgatcgaggttacggcttacaatcgagacagttttgatacgacaagacaaaggttagttttggagattggcgaccccgagggtcctcttctaccgtaccaagccgagttccttgtgagatcgcatgacgcggaagaggtcctgccttccacacccgctagccgattcttgagtgcactaggcggactttgggagccaggggagctgcaattgctaaacgtcacgtccgcacttgatcgtggcgggcgggtgccgttgcccatagaaggtcgaaaagaaggagtctatatcaaggtcggcagcgcaagccccttttcaacttgtctcaagatggtggcctctcccgactcccacgctagatgcgcccaggggcaacctccactgctctcctgttatgatactctcgcaccccatttcagggtggattggtgcaatgtgactctggttgacaagtcagtgcctgagcccgcggacgaggttcccactccaggagacggaatcctggaacatgatcctttcttctgtcctcccacagaggcgcccgatcgtgactttttggtcgatgccctcgttacgttgctggtcccactcctcgtagccttgttattgaccctgttgcttgcctacgtaatgtgttgccggcgggaagggaggctcaagagagatctagctacctctgacatacagatggtgcaccactgtacgattcatggaaacacagaagagctccgacaaatggccgcatcaagggaggtgcccagacccttatctacactgcctatgtttaacgtgcacactggcgagagactgccaccccgagtcgactctgctcaggtacccctgatcctcgaccagcactag

SEQ ID NO: 133445 - DNA, 792 bp, synthetic construct
  misc_feature 1..792: note = Description of Artificial Sequence: Synthetic coding sequence
  source 1..792: mol_type = other DNA
atggctgaaactttgttctggactcccttgttggtagtccttctagccggcctgggcgacacagaagctcagcagacaacactccaccctctggttgggcgggtgttcgttcatactcttgatcatgaaacttttctctccttgcccgagcatgttgctgtgccacccgccgtgcacataacataccatgcacatctccagggacacccagacctgccacgctggttgaggtacacacagaggagcccccatcatcccggctttctttacggctcggcgacaccggaagatcgggggctgcaagtgattgaggttaccgcgtacaatcgggactcctttgatacaacacggcagcgcttggtgctagaaattggcgaccccgagggcccacttctgccctaccaggctgagtttcttgtgcggtcccatgatgccgaggaagtgctgccttccacaccagcttcgcggttcctgagcgctttgggtggcctgtgggagccaggagagcttcaattgttaaacgtcaccagcgccttagaccgaggagggcgcgtacctctgcccattgagggccgtaaggaaggcctgaagagggatctcgccacatctgacattcagatggtgcaccattgtaccatacatgggaacaccgaagagctgcgccagatggctgctagtagagaggtcccaagacccctgtccactctcccaatgttcaacgtccacacaggagagaggctacctcctcgagtggattctgctcaggttcctcttattttggaccagcactag

SEQ ID NO: 133446 - DNA, 537 bp, synthetic construct
  misc_feature 1..537: note = Description of Artificial Sequence: Synthetic coding sequence
  source 1..537: mol_type = other DNA
atgtctgtgacagcttacaaccgcgactctttcgataccactcgccaacggctggtgctggagattggagaccctgagggacccctgcttccctatcaggccgaatttctggtgcgctctcacgatgccgaagaggtgctccctagcactccagcctcacgcttcttaagcgccctgggaggcttgtgggagccgggcgagttacagctcctcaacgttacttccgcacttgaccgcggagggagggttcctttacccatcgagggtcggaaggagggcgtgtacatcaaggtcggatccgcttccccgttcagtacgtgcttgaagatggtggcctcacctgacagtcatgccaggtgcgcacagggacagcctccgctgctgtcatgctatgacactctggcgccacacttccgagtagattggtgcaacgtgaccctggttcggagggatccaggaagcggcggtggggttggtcatggtcctcacccaagtcctcccagtttgccctgttgtttccttagcccgagtctgtag

SEQ ID NO: 133447 - DNA, 792 bp, synthetic construct
  misc_feature 1..792: note = Description of Artificial Sequence: Synthetic coding sequence
  source 1..792: mol_type = other DNA
atggcagaaactttattctggacacccctgttagtcgttcttctggcagggcttggggacaccgaggcacaacagaccacactccatcctcttgtggggcgcgtctttgtccacacactggaccacgaaacatttttgtccctgccagagcacgtagccgtgccgcccgctgtgcatatcacataccacgcgcatctgcaagggcacccagatttgcctcgatggttgcgctacacacagaggagtccacatcatcctgggtttctttacggaagcgccacacccgaggacagaggactacaggtgatcgaggtgacagcctacaacagagattcattcgacaccacccgccagcgcctggtcctggaaatcggggatcccgaaggcccactcttgccataccaggccgagttcctcgtcagaagccacgacgccgaagaggttcttccctctacaccagcatctagattcttatcagccctcgggggtctttgggagccaggcgagttgcagctgcttaacgttacctcggccctggatcgtggggggcgcgtgcccctccctatcgagggtaggaaggaggtgcttctcaggcacttagggactcccttaatccaaatggtccatcactgcaccattcatggaaatactgaggagctgagacagatggctgcctcccgagaagtcccccggccactctccaccctaccgatgtttaacgttcacacgggtgagcgcttacctcccagggttgattccgcgcaggtgccccttatattggatcaacactag

SEQ ID NO: 133448 - DNA, 957 bp, synthetic construct
  misc_feature 1..957: note = Description of Artificial Sequence: Synthetic coding sequence
  source 1..957: mol_type = other DNA
atggccgctgctgctgctgctgccgccgaacagcagtcttcaaacgggccagtgaaaaaatcgatgcgggagaaagccgtggaacgaaggtcagtcaataaggaacacaattcgaacttcaaggcaggatacattcccattgacgaagaccgactccacaagactgggctgagaggtcggaagggcaacctcgcaatctgcgtgatcatactactgttcatcctggctgtcatcaatctgatcatcactctggttatttgggccgtgatccggattggccccaacggatgcgattctatggaatttcatgagagtgggctcctgcgattcaagcaggtctcagatatgggagtgatccatccgctgtacaaatcaactgtcggcggtcgaagaaatgagaatctggtcatcactggaaataatcagcccatcgtgttccagcaagggaccacaaaacttagcgtcgaaaataacaagaccagcatcacttcagacatagggatgcagttcttcgatccaagaacccagaatatcctgtttagcacagactacgagacgcacgagtttcacttaccgtctggggtcaaaagcctgaacgtacagaaggcttctactgagagaataactagtaatgccacatcggatcttaatatcaaagtagatgggcgagccatcgtgcgaggcaacgaaggcgtctttatcatgggcaaaacaattgaatttcatatgggaggcaatatggaactgaaagctgaaaattccattatcctgaacggaagcgtgatggtatcaacaacgaggctcccttccagttctagcggcgatcagctgggcagtggcgattgggtgagatataagctctgcatgtgcgcagatggcacgcttttcaaagtgcaagtgacatctcagaatatgggatgtcagatttcagacaatccctgtgggaacacccattag

SEQ ID NO: 133449 - DNA, 747 bp, synthetic construct
  misc_feature 1..747: note = Description of Artificial Sequence: Synthetic coding sequence
  source 1..747: mol_type = other DNA
atggcagccgcagcagccgccgcagccgaacaaatcaccctcgtgatttgggcagttatcagaataggcccaaatgggtgcgatagcatggagtttcatgagagtgggctactgcggtttaagcaggtgagtgatatgggggttattcatcctctttataaatctaccgttggaggtcgacgaaacgagaaccttgtgatcaccggcaataaccagcccatcgtgttccagcagggaacaactaaactcagcgtggagaacaacaaaaccagtattacatcagacattgggatgcaattttttgacccccgcacccagaacatcctcttctctacagattatgagacacacgagttccacttgcccagtggcgtcaagtctctcaacgtccagaaggcctctactgaacggatcacttccaatgccaccagcgatctaaatatcaaagtggacggtcgcgcaattgtccgtggtaatgagggagtcttcattatgggaaaaactatagagtttcatatgggcggcaacatggaattaaaggcggagaattcaattatcctgaacgggagcgtgatggtctctactactcggctcccgagctcgagctccggcgatcagctgggatctggagattgggttcgctacaagctctgcatgtgcgcagatggtaccttgttcaaggttcaagttacctcacagaacatgggatgccaaattagtgataatccctgcggtaatactcattag

SEQ ID NO: 133450 - DNA, 873 bp, synthetic construct
  misc_feature 1..873: note = Description of Artificial Sequence: Synthetic coding sequence
  source 1..873: mol_type = other DNA
atgatgcctcaggaacagtacacgcaccatcggagcactatgccaggcagcgtcggcccacaagtttataaggtggggatctatggctggaggaagcgatgcctgtatttctttgtgctgctcctcatgattctaatccttgttaatctggctatgacgatatggatcctgaaggtaatgaatttcaccatcgacggcatgggcaatctgcgcattacagagaagggactgaagctggaaggtgattctgagttcctgcagccgctttacgcgaaagagatccagtccagaccagggaacgccctgtacttcaaatccgcgcgaaacgttactgtcaacatcttgaatgatcagaccaaagtgctgacacaactgataacagggcccaaggctgtggaggcttatggaaaaaagttcgaggtgaagactgtcagcggaaagctgctgttcagcgcagataacaacgaggtggttgttggagctgaacggcttcgcgttctgggagccgagggaacagtattccccaaatcaattgaaactccgaatgtgagagcagatcccttcaaggagctccgactggaaagccctacccgatctcttgtcatggaggctcccaaaggcgtggaaatcaacgctgaagcgggaaatatggaggccacatgtaggactgagctccgcttggagtctaaggatggggagatcaaactggatgcagcgaaaatcagacttcccaggctgccccacggaagttacacccccaccgggacaagacagaaggtttttgaaatctgcgtgtgcgctaatggccgactgttcctgagtcaggccggagcaggctctacgtgccagattaatactagtgtgtgcttgtag

SEQ ID NO: 133451 - DNA, 870 bp, synthetic construct
  misc_feature 1..870: note = Description of Artificial Sequence: Synthetic coding sequence
  source 1..870: mol_type = other DNA
atgccacaggaacagtacacgcaccaccggtctacgatgcccggaagtgtaggcccccaggtgtacaaggtgggaatttatgggtggcggaagaggtgtctctactttttcgtgctcttgctcatgattctgatactcgtgaacctagccatgaccatctggatcctcaaagtaatgaactttaccatagacgggatgggtaatttgagaattacagagaagggactgaagctcgaaggcgatagcgaattcttacagcctctgtacgccaaggaaatccagagccgacctggaaacgccctgtactttaaatctgccaggaacgttacagtaaatatcctgaacgatcagactaaggtgctgacccagcttatcacaggcccaaaagcagttgaagcctatggcaagaaatttgaggtaaaaacggtgtccggcaaactgctcttttccgccgataataatgaggtcgtcgtgggggccgaaaggttaagggtcttaggggcggaggggaccgtgttcccaaaaagtatcgagactcctaacgtccgggccgatcccttcaaggagctcaggctcgaatcccccacccgctctttagttatggaagctccaaagggtgtggagatcaatgccgaggccggcaacatggaagccacctgtcggacagagctccggctggagtcaaaagatggggaaatcaagcttgatgcagcaaaaattcggctgcctcgtcttcctcacggctcgtacactcccaccggcaccagacagaaggtctttgagatctgtgtatgcgctaatggcaggctgtttttgtcccaggctggggcagggtccacctgtcagatcaatacatctgtgtgtctatag

SEQ ID NO: 133452 - DNA, 771 bp, synthetic construct
  misc_feature 1..771: note = Description of Artificial Sequence: Synthetic coding sequence
  source 1..771: mol_type = other DNA
atgatgccccaggaacagtatacacaccaccgcagcacaatgccgggtagcgtgggtccgcaggtgtacaaagtagggatatatgggtggcgcaaacgctgcctctactttttcgttctgctgctgatgattctgatactggtgaatttggcaatgacaatttggattctcaaggtcatgaatttcactattgatggcatgggcaacctgcggatcaccgaaaaagggctcaagcttgagggggacagcgagtttctgcaacctctgtatgccaaagagattcagagcaggccggggaatgcgctctatttcaaaagcgctaggaatgtgacggtgaacatcttgaatgatcagaccaaggtgctaacccagctaataacagggcctaaggcagtagaggcctacggaaaaaaatttgaggtgaagacagtatccggaaaactcttattttcggctgacaataatgaagtagttgtgggagccgagcgcttgcgagtgctcggcgctgagggtaccgtgtttcccaagtctatcgagacaccgaatgttcgggccgatccctttaaggagctacgcctggaatcacccacccggagtcttgtgatggaagcccctaaaggtgtggagattaacgcagaagcaggaaacatggaagccacttgtcgaacagagctgcgtctggagtctaaggatggagaggttcgagacgagaaagatcgttctagcaaaagctattcctttaaccgccccacacttccaattaccggatag

SEQ ID NO: 133453 - DNA, 771 bp, synthetic construct
  misc_feature 1..771: note = Description of Artificial Sequence: Synthetic coding sequence
  source 1..771: mol_type = other DNA
atgatgccgcaggagcagtacacacaccacagatctaccatgcctggaagcgtagggccacaggtatacaaagtcggaatttacggctggagaaagcgatgtctgtacttcttcgttctgcttctgatgatcttgatcttggtgaatcttgctatgacaatctggatcctaaaagtgatgaactttaccatcgatggcatggggaatttacggatcaccgagaaaggcctcaaattagagggcgactccgaattcttacagcccctttacgccaaagaaatacaatcccggccgggtaacgctctatatttcaagtcagccagaaatgtcacagtaaatatcctaaacgaccagaccaaggtgctgacacagctgataacagggcccaaagctgtggaggcctacggcaagaaatttgaagtgaaaactgtcagcggcaaactccttttctccgctgataataacgaggtcgttgtaggcgctgaacgcctgagagttctaggtgcggaagggaccgttttccctaaatccattgagacacccaacgttcgcgccgacccctttaaggagttgcgcctggaaagccctacaagatccttggtaatggaagctccaaagggtgtcgaaatcaatgctgaggctgggaatatggaggctacttgccggactgaattaagactcgagtctaaggatggagaagttagagacgagaaggatcgatcctcaaaatcatactctttcaatcggcccactctgcctatcactgggtag

SEQ ID NO: 133454 - DNA, 1314 bp, synthetic construct
  misc_feature 1..1314: note = Description of Artificial Sequence: Synthetic coding sequence
  source 1..1314: mol_type = other DNA
atgcagctcccgcggtggtgggaactgggggacccctgtgcctggactggccagggcaggggcaccagaagaatgagtcctgctacaacaggcacatttctgctgacagtttactccatcttctctaaggttcactcagatcggaacgtttacccatccgcaggcgtactgtttgtgcacgttctggagagggagtatttcaagggtgaatttcctccctacccgaagccaggcgagattagcaatgatccaattacttttaacacaaatctaatggggtacccggaccgccctggttggctgcggtacatccagagaacaccctactcggacggcgtgctgtacggctctcctaccgccgaaaacgtgggcaagcctacaataatcgagatcacggcgtacaatcgtcggacctttgagaccgcccggcataatctgattatcaatatcatgtcggctgaggatttcccattaccttatcaggctgaattctttattaagaatatgaatgtggaggagatgttagccagtgaggtgctgggtgatttcctcggcgccgtcaaaaacgtgtggcagccagaacgccttaacgccattaatatcacctcagcgctggaccggggcggtcgagttccactgcctattaatgatttgaaagagggagtgtatgtgatggtaggggccgatgtcccgttctcttcttgcctccgggaagtggagaaccctcagaaccagttgagatgcagccaggagatggaaccagtgattacctgcgacaagaaattccgaacacagttctacatagattggtgtaagatttctctggtggacaaaacgaagcaggtgagcacatatcaggaggtcatccgcggggaggggattctgcccgatggcggtgaatacaagcccccttcagactccctaaaaagtagggactattatacagactttctgattacccttgctgtacccagtgctgtggctctggtactcttcctcattttagcctacattatgtgctgcaggcgcgagggcgtagagaaacgaaacatgcagacaccagacattcagctggtgcaccactctgctatccagaagagcaccaaggaactccgggatatgtcgaaaaatcgagagatagcctggcctctgtctaccctgccggtgttccaccctgttacaggtgaaattataccccccctacacacagacaactacgactccacaaacatgccccttatgcaaacgcagcagaacttaccccatcaaactcagattcctcagcaacagacaactggcaagtggtacccttag

SEQ ID NO: 133455 - DNA, 1416 bp, synthetic construct
  misc_feature 1..1416: note = Description of Artificial Sequence: Synthetic coding sequence
  source 1..1416: mol_type = other DNA
atgcagttgccccgatggtgggaactgggtgacccttgcgcatggactggacagggccggggaactagacgcatgtcaccagcaaccactggtaccttccttctcaccgctttcctgctcagctgcgcagacgggatcaatgggacagttaattggaagacccgccaagctaacaacttcatcatttcacgtaagatggccgccggcatgaaggacgtttacagtattttttccaaagtccactcggaccggaacgtctaccctagcgctggcgtcctcttcgtccatgtcctcgaacgagagtatttcaaaggggagttccctccctaccccaagccgggcgaaatttcaaatgaccccatcacatttaataccaatctaatgggttatcccgacagacccggctggcttagatatatccagcgaacaccctattctgacggggtgctctatggaagtccaactgccgagaatgttggcaagcctacaatcatagagattaccgcatataaccgtagaacttttgagaccgccagacataacctgataattaacattatgtctgcggaagatttccccctcccttaccaggccgagttctttatcaagaatatgaatgtcgaagagatgctcgccagcgaagttttgggggactttcttggtgctgtcaagaacgtttggcagccagaaagacttaacgccatcaatataacctctgctctggacagaggagggcgggtgccactccccatcaatgacctgaaagaaggggtgtatgtgatggtgggcgccgatgtccccttttccagttgtctgcgagaagtagagaatcctcagaaccagttacggtgctcccaggaaatggaacccgtgataacctgcgacaaaaaatttagaacacaattttatatcgactggtgcaagatctccttggttgataagacaaaacaggtgtccacctatcaggaagtgattaggggagagggcatattgccagatgggggtgagtacaaaccgcccagcgattccctaaagtccagagactattatacggacttcctgattaccctcgccgttccctccgccgtggccctggttctcttcctgatcctagcgtacattatgtgctgtcgacgtgaaggcgtggagaaacggaacatgcaaaccccagacattcagctggtgcaccattccgccattcaaaaatcaactaaggaactgcgtgatatgtccaagaaccgggagattgcgtggcctctctccactctgcccgtgttccatcccgtgactggcgagattattcccccattacacacggacaattatgactccaccaatatgcctctcatgcagactcaacagaaccttcctcaccagacacaaatcccacagcagcagactaccggggagtgttag

SEQ ID NO: 133456 - DNA, 1356 bp, synthetic construct
  misc_feature 1..1356: note = Description of Artificial Sequence: Synthetic coding sequence
  source 1..1356: mol_type = other DNA
atgcagctgccaagatggtgggagctgggtgacccctgcgcttggacaggacaggggcgtggcaccagaagaatgagcccagcgacgacaggcaccttcctgcttaccgtttattcaatcttctcaaaagtgcatagtgaccgaaatgtgtaccccagtgcaggtgtgcttttcgtgcacgtgctggagcgtgaatattttaagggcgaatttcccccataccccaagcccggcgagatctcgaatgacccaatcacatttaacactaaccttatggggtatcccgaccggcctgggtggctgcgctacattcagcgcaccccatatagcgacggagtgttgtacgggagtcccacagccgaaaacgtaggcaaaccgaccatcatcgaaatcacagcctataaccgcagaaccttcgaaacagcccgtcataatcttatcattaacatcatgagcgccgaagactttcctctgccgtaccaggctgaatttttcatcaaaaatatgaatgtagaggaaatgctggccagcgaggtcttgggggactttctgggggccgttaagaacgtctggcagccggagcggctaaacgccatcaatatcacaagcgctttggatagagggggccgcgtgcctctgccaatcaatgatctaaaagagggcgtctacgtcatggtgggcgccgacgtaccattctcatcctgtctcagggaggtggaaaacccccagaatcagttgcggtgttctcaggaaatggaaccggtcattacatgtgacaaaaaatttagaacacagttctatatagattggtgtaaaatcagtctggtggacaagacgaaacaagtctcgacataccaggaagtgatacgtggagaaggcatcttaccggatggcggggagtacaagcctccttcagacagcttgaaatcgagagactactataccgacttccttattactttagctgtcccttcagccgtggctctggtgctgtttctcattcttgcctacatcatgtgttgcagaagagaaggggtgatccaactggtgcatcattcagccatccaaaaatctacaaaggagctacgggacatgtctaagaaccgggaaattgcatggccactttccacactgcctgtgtttcaccccgtgaccggggagattatcccacccctacataccgataattatgactccactaacatgcccctaatgcaaacccagcaaaatctaccacaccagacccagatcccccagcagcagacaaccggggactttcgtctgaccactttccaacggtttgaggtgaatggtattcctgaggaacgaaagctcacagaagccatgaatctgtag

SEQ ID NO: 133457 - DNA, 1389 bp, synthetic construct
  misc_feature 1..1389: note = Description of Artificial Sequence: Synthetic coding sequence
  source 1..1389: mol_type = other DNA
atgcagctgcctagatggtgggaacttggggacccatgtgcttggactggtcagggcagaggtacgagacggatgagtcccgctacaaccgggactttcctgctgacagtatactcgatcttttctaaagtgcacagcgatcgcaacgtctatcccagcgcgggcgttctgtttgtgcacgtgctggagcgcgaatacttcaaaggagaattcccaccttatcccaaaccaggagagatatccaatgatcccattaccttcaacaccaacctcatggggtatcccgataggcccggttggctgaggtatattcaaaggactccatacagtgacggggtactatatggctcacccactgcggagaatgtcgggaagcccactataatagaaatcaccgcttataaccgtcgcacgtttgagaccgcccggcacaatctcatcatcaacatcatgtcggccgaagatttccctctcccttatcaggcggaattcttcattaaaaacatgaatgtggaggagatgcttgcgtccgaagtcctcggtgatttcttgggagctgtcaagaacgtctggcaacctgagcgcctcaatgcaatcaatataacaagcgcactggacagagggggccgagtgcctttgcccataaatgacctgaaggaaggcgtctacgtgatggtgggcgcggacgtaccattctcttcctgcctgcgagaggtggagaacccgcagaaccagctgagatgcagccaagagatggagccggtcatcacatgtgacaagaaattcaggacccagttctacatcgactggtgcaagatttcgctggtcgataagaccaaacaggtgagcacataccaggaggtgattcgcggagaaggtatcctgcctgacggcggtgaatataaacctccctccgactccttgaagtcccgggactattacaccgattttctgattaccttggctgtaccttcagccgtagcactggtactgtttttgattctggcctacatcatgtgctgccgccgtgaaggtgtggagaagcgtaatatgcaaactccagacatccagctggtccatcattccgctatccagaaaagcaccaaggagctgcgcgatatgagcaagaacagagagatcgcatggcccctctcaaccctgcctgttttccaccctgttaccggggaaatcatcccccccctccataccgataactatgactccacaaacatgcccctgatgcaaacccagcagtggagttttgccccagtggctcaagcaggagtccagtggagcgacctgggctcactgcaacccccgccccctcggaacctgccacaccagacacagatccctcagcaacaaaccactggaaagtggtacccatag

SEQ ID NO: 133458 - DNA, 2118 bp, synthetic construct
  misc_feature 1..2118: note = Description of Artificial Sequence: Synthetic coding sequence
  source 1..2118: mol_type = other DNA
atgactgacaacagtaataaccaattggtggtacgcgcgaaatttaacttccagcagacgaacgaggacgaactctctttcagcaaaggcgatgtgatacatgttaccagagtggaagaaggcggctggtgggaaggaacgctgaatggccgaaccgggtggttcccctccaactacgtgcgtgaggtcaaggcatccgaaaagccggtcagtccaaagagtgggactttaaaatctccgcccaaaggctttgacactacagcgattaacaagtcttattataacgtggtcctgcaaaacatactggagacagaaaacgaatactctaaggaactgcagaccgtgttgtctacctacttgcgaccgttgcagaccagtgaaaaattgagttcggcaaatatctcctacctgatgggaaatttggaagagatttgtagtttccagcaaatgctagtacagtctctggaggaatgtactaagcttcccgaggcccagcagcgggtgggcggttgcttccttaatcttatgccccagatgaagacgctgtacctcacatactgtgccaatcatccttcagcagtgaacgttctaaccgagcactctgaggagcttggagagtttatggaaaccaagggcgcgagtagccccgggattttggtgctgacaactgggctttccaagccatttatgagactggataagtatcccaccttactgaaagagctcgaacggcatatggaagactaccatactgatagacaggacattcagaaatcaatggcagcatttaaaaacctctcagcccagtgccaggaagtccgcaagcggaaagagcttgagttacagattttaactgaagccatacgcaattgggaaggcgatgacataaaaacactcggcaacgtcacgtatatgtctcaggtgttgatccagtgtgccgggtcagaggaaaaaaacgaaagatacctgttattgttcccaaatgtgctattgatgctttccgcttctccaagaatgtccggtttcatctatcagggtaagttaccaacaactggaatgacaatcacgaagctcgaggatagcgaaaatcataggaacgcctttgaaatcagcgggtcaatgattgagcggattttagtctcttgtaacaaccagcaggatctacaggaatgggtagaacacctgcagaagcagaccaaggtcacatccgtcgggaatccaactatcaaacctcactcagtgcctagtcacacccttcctagccatcctgtcaccccatcgtccaaacacgcagacagtaagcccgctccacttactcctgcataccacaccttaccccacccttcacaccacggaacgcctcacactacaatcaactgggggccattggagcctcctaaaacccccaagccctggagtctctcctgcctgcgccctgcccctcccttacgtccgagtgcggcgctgtgttataaagaggacctgtccaaatctcctaagactatgaaaaagctactgccaaagcggaaaccagaacgcaaacccagcgatgaggagttcgcatccagaaagagcacagcagcactggaggaggacgcccaaatattaaaggtgatagaagcgtattgtacatccgccaaaacaagacagactctgaacagtacctggcaaggcaccgacctgatgcacaatcacgtgctcgcggacgatgaccagcccagtctggattccctgggcaggcgaagcagtctttcccgactcgagccatccgatctgtctgaagattcagactatgattctatctggacggctcattcatataggatggggagcaccagtcggtcaagaaaggagtctgccccacaagtcctacttcccgaagaggaaaaaatcatcgtggaagaaactaaatcaaacggccagacagtaattgaagagaagagtttggtggacaccgtttacgccctgaaagacgaggtgcaggagttgagacaggacaacaaaaagatgaaaaaatccctggaagaggagcagagagcaagaaaggaccttgagaagttagtgagaaaggtgttgaaaaacatgaacgaccctgcctgggacgaaactaatctctag

SEQ ID NO: 133459 - DNA, 876 bp, synthetic construct
  misc_feature 1..876: note = Description of Artificial Sequence: Synthetic coding sequence
  source 1..876: mol_type = other DNA
atggttcgggaacagtacacaacggcaactgagggcatttgcattgaacgcccagaaaatcaatacgtttacaaaatcgggatttacggatggcgcaagcgatgcctgtacctattcgtcctcctactacttatcatcctcgtggttaatttggcgctcaccatttggatcctgaaagtgatgtggttttctcctgcagggatgggtcacctttgtgtgaccaaagacggcctacgcctcgaaggagagtccgaattcttgttccccctgtatgcaaaagaaattcactctcgcgtagattctagcttgcttctgcaaagtacgcagaatgttacggtaaatgcgagaaattcagagggcgaagtcaccggtcgcctgaaagtcgggcctaaaatggtggaggtccagaatcaacagttccagataaattccaatgatgggaagcctctgtttaccgtggacgaaaaggaagttgttgttggcactgataagttgagggtcactggacctgagggagccctgtttgaacattcggtcgagacacccctggtgcgtgccgaccctttccaggatctgagattggagtcccccaccagatctttatctatggacgctccacgcggcgtccacattcaggcacacgccggcaaaatcgaggcactgagtcagatggacattctctttcatagtagtgatgggatgctggtgcttgatgcggaaaccgtgtgtctgcctaagcttgttcaggggacatggggccccagcgggtctagtcaatcactctacgagatatgtgtatgccctgacgggaagctgtatttgtctgtcgcaggggtttcaacgacgtgtcaggagcataaccacatatgcctgtag

SEQ ID NO: 133460 - DNA, 876 bp, synthetic construct
  misc_feature 1..876: note = Description of Artificial Sequence: Synthetic coding sequence
  source 1..876: mol_type = other DNA
atggttagggaacaatacacaacagcgactgaggggatttgcattgaaagacctgagaatcagtatgtctataagatcggtatttacggctggcgcaagcgctgtctttacctgtttgtgttgctcctcttgatcatcctggtcgtcaacctggctctaactatttggatcttaaaggtgatgtggttctcacctgctggtatggggcacctgtgtgtcaccaaggacggtttgcgattggagggcgaatcagagttcttgtttcccttatatgccaaggaaatccatagtcgggtcgatagctctttactgttgcaatctacccagaatgtcaccgtcaatgcacgaaacagtgaaggagaggttaccggccgcctcaaagtcggtccaaaaatggttgaggtgcaaaatcagcaattccagatcaactccaacgacggaaagcctctcttcacagttgacgagaaagaggtggtggtgggaactgacaaactacgggttacgggaccagagggagccctgtttgagcatagcgtggaaacccctctggttagagcagacccgttccaggatctgcgattggaaagcccaacaagatctctgagcatggatgcgcccagaggcgtccacatacaagcccacgcaggaaaaatcgaagcgttatcacaaatggacatcctgttccactcctcggatggcatgctggtgctggatgcagagactgtttgcctgccaaagctggttcaggggacatgggggccaagcggctcttctcagtctctgtatgaaatttgtgtgtgccccgacggtaaactgtacttgagcgtcgcaggggtgtcaaccacatgtcaagagcacaaccatatctgtctgtag

SEQ ID NO: 133461 - DNA, 96 bp, synthetic construct
  misc_feature 1..96: note = Description of Artificial Sequence: Synthetic coding sequence
  source 1..96: mol_type = other DNA
atgggcattaatacgagagagctgtttctgaactttaccatcgtgctcattacggtcattctgatgtggcttctggttcgatcttatcagtattag

SEQ ID NO: 133462 - DNA, 96 bp, synthetic construct
  misc_feature 1..96: note = Description of Artificial Sequence: Synthetic coding sequence
  source 1..96: mol_type = other DNA
atgggtatcaacactcgggagctcttcctgaatttcacaattgtactgatcaccgtcattctgatgtggctgctggtgaggagttaccagtactag

SEQ ID NO: 133463 - DNA, 96 bp, synthetic construct
  misc_feature 1..96: note = Description of Artificial Sequence: Synthetic coding sequence
  source 1..96: mol_type = other DNA
atgggcataaatactcgcgagctcttcctcaactttacaattgttctcattactgtaattctgatgtggctgctcgttcgtagctaccagtactag

SEQ ID NO: 133464 - DNA, 732 bp, synthetic construct
  misc_feature 1..732: note = Description of Artificial Sequence: Synthetic coding sequence
  source 1..732: mol_type = other DNA
atggggaaaaataaacaacctcgcggccagcagaggcagggcggtccaccagctgcagatgctgcaggaccggacgacatggagccgaagaaaggtaccggggcccccaaagagtgcggcgaggaagagcctagaacatgttgcggctgccggttccccctcctgcttgccttactccagctagcattaggtattgccgtgacagtggtgggatttcttatggcgtctataagtagttccctgctggttagagatacccccttctgggcagggattattgtctgcctcgttgcctatctcggcttattcatgctgtgcgtgtcctaccaagtcgacgagagaacatgcattcagttttccatgaagctcctgtacttcctgctctcggctctcggcctcaccgtgtgtgtgttggcagtcgcatttgcagcgcaccactacagccagctcacccagtttacttgtgagaccactttagacagctgtcagtgtaagctgcccagctctgagcccctttccaggaccttcgtttatcgggacgttactgattgcaccagcgtgaccggaacttttaaactgtttctactgattcagatgatcctcaatctggtgtgcggactcgtgtgcctgctcgcttgtttcgttatgtggaagcatcgctaccaggtgttctatgttggcgtgcgtatctgttctttgacagctagtgaggggccccaacagaaaatctag

SEQ ID NO: 133465 - DNA, 423 bp, synthetic construct
  misc_feature 1..423: note = Description of Artificial Sequence: Synthetic coding sequence
  source 1..423: mol_type = other DNA
atgctgtgcgtgtcttatcaggtcgacgagcgaacctgcatacagttctctatgaaactactgtactttcttctttccgccctgggcttaactgtatgcgttctagctgtcgcctttgccgcacatcactattcccagttgacgcagtttacctgtgagactacactggatagctgccagtgcaagctgccgtcaagcgagcccctcagtcggacattcgtctaccgcgacgttacagactgcactagcgtgacaggaacattcaagctgtttctactgatccagatgatcctaaacctagtttgtggccttgtctgtcttcttgcatgctttgtcatgtggaaacatcgctaccaggtattctatgtgggagtgaggatttgctctcttacggcgagcgagggacctcaacagaagatttag

SEQ ID NO: 133466 - DNA, 654 bp, synthetic construct
  misc_feature 1..654: note = Description of Artificial Sequence: Synthetic coding sequence
  source 1..654: mol_type = other DNA
atggaacctaagaagggcactggggctccaaaagaatgcggcgaggaggaaccccgaacttgttgtggttgccgattccctctcctgctagcattactccagctggccctggggatcgccgttacagtggttggctttctcatggctagtatttcctcatccctgctcgtgagggacacacccttctgggccggaattatagtctgtttggtagcctatctggggctgttcatgctgtgcgtgtcctatcaggtggatgagcggacttgtatccagttcagcatgaagctgctttatttcttacttagcgccctcgggctaacggtgtgtgtcctcgcagtggcctttgctgctcatcactactcccaattgacccagtttacttgtgagacaacactggattcttgtcagtgtaagcttcctagctctgagcctttatctcgcacgtttgtctatcgagacgtgacagactgcacgtcggtgaccggaactttcaaactttttctactcatccagatgatcctgaatctggtgtgcggcctggtctgtttactcgcatgctttgttatgtggaagcacaggtatcaggttttctatgtgggcgtgcgcatctgttcgcttaccgccagcgaagggcctcagcaaaaaatttag

SEQ ID NO: 133467 - DNA, 387 bp, synthetic construct
  misc_feature 1..387: note = Description of Artificial Sequence: Synthetic coding sequence
  source 1..387: mol_type = other DNA
atgggtaagaacaagcagccacgggggcagcagcgccagggcggccctccggcagccgatgctgccggtccggatgacatggaacctaagaagggcacaggcgctccaaaggagtgcggagaagaggagccacggacctgctgtgggtgcaggttccccctgttattagccctgctgcagctggctttagggattgcagttaccgtcgtgggatttttgatggcttctatatccagttccctgctagtgagagatactcccttctgggctggaattatcgtgtgtctcgtagcttatctgggcctcttcatgctttgtgtgagctaccaggtcgacgaaagaacgtgcatccagttttctatgaaaatccattgccacgatttctag

SEQ ID NO: 133468 - DNA, 363 bp, synthetic construct
  misc_feature 1..363: note = Description of Artificial Sequence: Synthetic coding sequence
  source 1..363: mol_type = other DNA
atgctgtgtgtgtcttaccaggtggacgaaagaacttgcattcaattctcaatgaaactgctctatttcctcctctcagcgttaggccttaccgtctgcgtgctcgcagtcgctttcgctgctcatcactatagccagcttacccaatttacttgtgaaactactctcgatagctgccagtgtaagttaccttccagcgagccactgtcaagaacctttgtataccgcgacgtgaccgattgtacaagtgtgaccgggacattcaagcttttcttgcttatccagatgattcttaatctggtttgtggcctggtgtgcctgctggcttgtttcgtgatgtggaaacatagataccaggtgtag

SEQ ID NO: 133469 - DNA, 423 bp, synthetic construct
  misc_feature 1..423: note = Description of Artificial Sequence: Synthetic coding sequence
  source 1..423: mol_type = other DNA
atgttgtgcgtttcataccaggtggatgagcgtacatgtatccagttcagcatgaagctcctgtacttccttctgtcggccctcggccttaccgtctgcgtgttagccgtcgcctttgccgcccaccattattcacagcttacacagttcacatgcgagactacacttgattcttgtcagtgcaagctgccaagctctgaacctctctcccggacctttgtgtatcgggacgtcactgactgtacctcggtaaccggtactttcaagctgttcctgctgatccagatgatactcaatttagtctgtgggctcgtatgccttcttgcgtgcttcgtcatgtggaaacatcgataccaggtgttctatgtgggcgtcagaatctgtagcctcacggctagtgaagggccacagcagaaaatctag

SEQ ID NO: 133470 - DNA, 2292 bp, synthetic construct
  misc_feature 1..2292: note = Description of Artificial Sequence: Synthetic coding sequence
  source 1..2292: mol_type = other DNA
atggatcacctgaatgaagcaacacagggcaaggaacactctgaaatgtcgaataatgtctctgaccctaagggccctcccgccaaaatcgctcggctggagcaaaatgggtccccactgggtagaggcaggctcgggagcaccggagccaagatgcagggtgtccctttgaagcattccggccatttgatgaaaactaaccttcggaaggggacaatgttgcccgtgttctgcgtggtggagcattatgagaacgccattgagtatgattgcaaggaggagcatgctgagttcgtccttgtccgaaaagatatgctgttcaatcagctcatcgagatggccctgctcagtctaggttatagccactcatcagcggcacaagccaaaggccttattcaggtagggaaatggaacccagtcccgctgtcctacgtcactgatgccccagacgccactgtggccgatatgctgcaggatgtgtaccatgtggttaccctgaaaattcaactacactcttgccctaaattagaggatttgccacctgagcagtggtcacataccactgtgcgaaacgcccttaaagacctcctcaaagacatgaaccagagctccctggccaaggaatgccctctgtcacagtctatgatcagctctatcgtaaactccacgtattacgctaacgtgagcgcagccaaatgtcaggagtttggccggtggtacaagcatttcaaaaagacaaaagatatgatggtcgagatggatagcctatctgaattgtcacagcaaggggcaaatcacgttaacttcggacagcagcccgttccaggcaatacggccgaacagccaccgagtcctgctcagctgtcacatgggtcgcagccatcagtgcgcacacccctgccgaatctgcatcctggactagtgagtacaccaattagtccccagctggtcaaccaacagctggtcatggctcaactgttaaaccagcagtatgccgtgaaccggctacttgcgcaacagtctttaaaccaacagtacttaaaccaccccccccctgtctcccgttctatgaacaagcctctggagcagcaggtcagcaccaacacagaagtatccagcgagatataccaatgggtgagagatgaactgaaaagagccggcatcagccaggccgtgttcgcacgcgtcgcgtttaataggactcagggcctgctgtccgaaatcttgcgaaaggaggaggacccgaagacggcctctcagagcctactggtgaatctgcgggccatgcaaaattttctacagctgcctgaagccgagagggaccgcatctatcaagatgaacgagaaagatcactcaatgctgcctcagctatgggtcccgccccccttatcagcacacctcctagtaggccgcctcaggtcaaaaccgccactatagccaccgagcgcaatggcaaacctgagaataacacaatgaacattaacgcttctatttacgacgaaattcagcaggagatgaaacgcgccaaggtcagccaagctctgttcgctaaggttgcagcaacaaaatcccaaggttggctgtgtgaacttctacgctggaaggaagaccccagccctgagaatagaaccctctgggagaatctgtctatgataagaagattcctcagcctcccccagcccgaaagagacgctatatacgaacaggagtcaaacgccgtgcatcatcatggagacagaccaccccacatcattcatgtgcctgccgaacagatccagcagcaacaacagcagcagcaacagcagcagcagcagcaacaggcgcccccacccccacagccccaacagcagccacagacgggacctaggctcccaccacgccagcccaccgtggcgtctcccgcagagagcgacgaagagaatagacaaaagacccggccgcggacgaagattagcgtggaggccctcgggattttgcagagtttcatacaggatgtaggtctatatcctgacgaggaggccatacagacgctgtctgcacagctggacctgcccaaatacaccataatcaagtttttccagaatcagcgatactacctgaagcaccacggcaaacttaaggataacagtggcttggaggtggacgtcgctgaatataaagaggaagagctgctcaaggatctggaagaaagcgttcaagacaaaaacaccaatacactgtttagcgtgaaactggaggaggagctctcagtcgaaggaaatacagatatcaatactgatcttaaagattag

SEQ ID NO: 133471 - DNA, 351 bp, synthetic construct
  misc_feature 1..351: note = Description of Artificial Sequence: Synthetic coding sequence
  source 1..351: mol_type = other DNA
atggatcacctaaatgaagccacccagggtaaggaacactcagagatgtccaacaatgtgagcgaccccaaggggccacccgctaagattgcgaggcttgaacagaacggaagtcccctcgggcgggggagattggggagtacgggagcaaagatgcagggtgtgcctttgaagcactcaggacatctgatgaaaaccaatctgcgtaaaggtactatgctacccgtcttttgcgtagtagagcattatgaaaatgccatcgagtatgactgtaaagaggaacacgcagaatttgtccttgtcaggaaggacatgctgttcaaccagcttattgagatggcactcctgtag

SEQ ID NO: 133472 - DNA, 675 bp, synthetic construct
  misc_feature 1..675: note = Description of Artificial Sequence: Synthetic coding sequence
  source 1..675: mol_type = other DNA
atggatcatttgaacgaggccacccagggaaaggaacactcggagatgagcaataacgtctccgaccccaagggcccacctgcaaagattgcccggctagaacagaatggctctcctctcgggcgaggtagactggggtcaaccggagcaaaaatgcagggcgtacccctgaaacactccggacaccttatgaaaaccaacctgcgtaaaggcacaatgctgccagtcttctgtgtagtcgaacactatgagaacgccattgagtatgactgtaaggaggaacatgctgaattcgtcctggtgcggaaagatatgttgttcaatcaactgatcgagatggccctcctgtcactgggctacagccatagctcagccgcccaggctaagggactcattcaggtaggtaaatggaaccccgtgcctctgagttacgtgaccgacgctcctgacgccaccgtggccgatatgctccaggacgtctatcacgtcgtgacattaaagattcagctgcactcttgtcccaaactcgaggatttacctccagagcagtggagccataccacggtccgcaacgcattgaaggatctcctgaaagacatgaaccaaagctcactggcaaaggagtgtccccttagccagagtatgatcagtagcatcgtgaattcaacatactag

SEQ ID NO: 133473 - DNA, 216 bp, synthetic construct
  misc_feature 1..216: note = Description of Artificial Sequence: Synthetic coding sequence
  source 1..216: mol_type = other DNA
atggaccacctgaatgaagcaacccagggaaaggagcacagcgaaatgagcaacaacgtttctgatcctaaaggaccccccgctaagattgccagactggaacaaaacggatcgcccctgggacgcggcagactggggtctaccggggccaagatgcagggagtgcccttgaaacactccgggcacctcatgaaaacaaatctacggaaaggctag

SEQ ID NO: 133474 - DNA, 27 bp, synthetic construct
  misc_feature 1..27: note = Description of Artificial Sequence: Synthetic coding sequence
  source 1..27: mol_type = other DNA
atggaccacctgaatgaggcgacctag

SEQ ID NO: 133475 - DNA, 519 bp, synthetic construct
  misc_feature 1..519: note = Description of Artificial Sequence: Synthetic coding sequence
  source 1..519: mol_type = other DNA
atggaccacttgaatgaggcaactcagggcaaggaacacagtgagatgtcaaataatgtgtcagaccctaagggcccccccgccaaaatcgcaaggctggaacagaatggtagcccactgggccgaggccggctgggatccacgggagcaaagatgcagggagtgccactgaaacactccggccacctgatgaagaccaatctgcgcaaaggaaccatgctgccagttttctgcgtggtcgagcactatgagaacgccatagaatatgattgtaaagaagagcatgcagagttcgtcctggtccgcaaagacatgctgtttaaccagctgatcgaaatggcgctgttgtcattgggatattcacacagttcggctgcgcaggccaaggggctgatccaggtggggaagtggaatccggttcctctgagctatgtgactgacgctcctgacgccaccgtagccgacatgctgcaggatgtttaccatgttgtgacgctgaagatccagttacaccggtag

SEQ ID NO: 133476 - DNA, 2292 bp, synthetic construct
  misc_feature 1..2292: note = Description of Artificial Sequence: Synthetic coding sequence
  source 1..2292: mol_type = other DNA
atggatcacttgaacgaagcgactcaaggaaaagagcattcagagatgtctaacaacgtttcagatcccaagggcccccccgcaaagatcgccaggcttgagcagaacggctctcctctgggacggggtcggttgggctccacaggagctaaaatgcaaggagtgcccttgaaacattccggacacttgatgaagaccaatctccgaaaggggaccatgctgcctgtgttctgtgtggttgaacattatgagaatgcaatcgagtatgattgtaaagaggaacacgccgagttcgtgttagttaggaaagacatgttgtttaaccagttaatcgagatggctttgctgtcactgggttactcgcacagtagtgcagcgcaagccaagggcctgattcaggtgggcaaatggaatccggtccccttatcctacgtgaccgacgccccagatgccacggtggcggacatgctgcaggatgtgtatcacgtggtgaccctgaagattcagctacactcatgccctaagctagaggacctgcctcctgagcagtggagtcacacgacagttaggaatgcactgaaggacctcctcaaggatatgaatcagtcctccttggccaaagagtgtcctttaagccagagcatgatctcctcgattgtcaacagcacttattacgcaaacgtgtccgccgcaaagtgtcaggaattcggacgctggtataagcactttaagaaaacaaaggacatgatggttgaaatggatagtctttcagaactgtctcagcaaggagctaaccacgtcaacttcggacagcagccggtccccggcaatacagccgagcaaccccctagtccagcccagctttcacatgggagccagccttctgtccgcaccccacttccaaatttacaccccggccttgtgagtacccccatttccccacaactagtgaatcagcagctagtgatggcgcagctcctgaatcagcagtacgccgtgaatcgcctacttgcccagcagagtcttaatcagcagtacctgaatcaccccccacctgtatcaaggagtatgaacaagcccttggaacagcaggtgtccacaaacaccgaggtatccagtgagatttatcagtgggtgcgcgacgagctcaagcgcgccggcataagccaggccgtgtttgctcgtgtcgcattcaacaggacacagggtttactgtctgagatattgaggaaagaggaagatccgaaaaccgcttcacagtctctcttggttaacctgcgtgccatgcaaaactttttgcaacttccggaggccgagagggatcgcatctaccaggacgagcgggagaggtccctgaatgctgcctctgctatgggtcctgcccccctgatctcaactccgccttccagaccccctcaagtgaagaccgcgaccatagcgactgaacgcaatgggaagcccgagaataacaccatgaacatcaacgccagcatttacgacgagatccagcaggaaatgaaacgggctaaagtcagccaggccctgttcgcaaaagtggcagctacgaagtctcagggctggctgtgcgagcttctcagatggaaggaggatccttcgcccgagaatcggacgctttgggagaatctcagtatgatcagaagatttctgtcacttccacagccagaacgggacgccatttatgaacaggaaagtaatgctgtgcatcatcatggcgatcgtcctccacacattattcatgtgccagccgagcagatccagcagcagcagcaacaacagcagcagcaacagcagcagcagcaggccccgccacccccgcagccacagcagcagccgcagacgggaccccgcctcccccctcgacaaccaactgtcgctagtcctgccgagagcgacgaggagaacagacagaagacacgcccacgcacaaagattagcgtggaagcactcggcatactgcagtcattcattcaagatgtgggtttgtacccagatgaggaggcaatccagacgctctccgctcagctcgaccttccaaaatacaccattattaagttttttcagaaccaaaggtactacctaaaacaccatggcaaattgaaggataactcaggcctggaggtcgatgtggcagaatacaaggaagaagaacttctgaaggatttggaggagtcggtgcaggacaagaacactaacactctgtttagcgtgaagctggaggaggaactcagcgttgaggggaataccgatattaatactgacctaaaggattag

SEQ ID NO: 133477 - DNA, 393 bp, synthetic construct
  misc_feature 1..393: note = Description of Artificial Sequence: Synthetic coding sequence
  source 1..393: mol_type = other DNA
atggaccacctgaatgaggctacccaaggaaaagaacattctgaaatgtcaaacaatgtgagtgatcctaaaggcccaccagctaagatagcaaggttggagcagaacgggagtcccctgggccgcggtcgactggggtccaccggggccaagatgcaaggggtgccacttaagcattcaggccatctgatgaagaccaacctacgaaaagggaccatgctgccagtcttctgcgtggtggaacactacgaaaacgccatcgagtacgattgtaaagaggaacatgccgagttcgtcctcgtcaggaaggatatgctgttcaatcaactaattgaaatggccttgttaagcctaggatattcccattccagcgctgcacaggcaaagggttag

SEQ ID NO: 133478 - DNA, 2388 bp, synthetic construct
  misc_feature 1..2388: note = Description of Artificial Sequence: Synthetic coding sequence
  source 1..2388: mol_type = other DNA
atggatcatttgaatgaggccactcagggcaaagagcacagcgaaatgtcaaacaacgtttctgaccccaaaggaccccccgcaaaaattgcaagactcgagcagaacggatctcctctcggtcgcggtagactgggaagcactggagctaagatgcagggagttccattaaagcatagtggccatctcatgaagacaaacctgaggaaaggtacaatgctccccgtgttctgcgttgtcgagcactacgagaatgctatagaatacgattgtaaagaggagcacgcagagttcgtccttgtgcggaaggatatgctctttaatcagctgatcgagatggcgctgctctctttggggtacagtcatagctctgcagcccaggctaaaggtctgatccaggtcggaaagtggaatccagtgcccctgagttacgtaaccgatgctccagatgcaaccgtggccgacatgctccaggatgtctatcacgtggtaactctgaagatccaactccatagttgccctaagcttgaggacctccctccagagcaatggagccacacgacagtgcgcaatgccctgaaggacctgttaaaagatatgaatcaatcgagcttagccaaagagtgtcctctctcccagtcaatgatttcttccattgtgaactcaacttactatgccaatgtttcagcagccaagtgtcaggagttcggccgatggtataaacatttcaaaaagacaaaggacatgatggtggagatggactcgctgagtgagctgagtcaacagggcgctaatcatgtgaacttcggtcagcagcctgtgccgggaaacactgcagagcagcctccgtcacctgcacaactcagccacggttcgcagccatccgtacgcaccccacttccaaacctgcaccccggcctggtttctactccaatatcgccgcagctagttaatcagcaactggtcatggctcaactgctgaatcaacagtatgccgtgaacagactcctggcacaacaatccctgaaccagcagtatctgaaccaccctcctcccgtgagtaggagcatgaataagccgctggaacaacaggtcagcacgaacaccgaggtgtcttctgagatttaccaatgggtgcgagacgaactgaaacgggccgggatcagccaggccgtgttcgcacgggtggcatttaataggacgcagggactcctctccgaaattctgagaaaagaggaggatccgaagacggcatcccaaagcctgctcgttaatttacgggcaatgcagaatttcctgcagttgcccgaagctgagcgggataggatataccaggacgaacgcgaaaggtctctcaacgctgcatccgccatgggcccagcgccgctgatctccacccccccctctcggcccccccaggtaaaaacggcgaccatcgccaccgagagaaacggcaagcccgaaaacaacacaatgaatatcaatgcaagcatctatgacgagattcagcaggaaatgaagcgggcaaaggtctcccaggcattattcgcgaaagtcgccgccactaagtcacaggggtggctgtgcgaattgttaagatggaaggaggacccatcccccgagaacagaaccttgtgggagaacctgagtatgatccgacggtttttgtcccttccccagcctgaacgggatgccatttatgaacaggagagtaacgcggtgcaccaccatggagaccgccctccgcacatcatacatgtgcctgccgaacagattcaatctccttctccaacaaccttggggaagggtgagtctaggggggtctttctccccgggctgcctactccggcgccgtggctcggcgctgcgccccagcagcaacagcagcagcagcagcagcagcagcaacagcagcaagcacctccgccaccccagcctcaacagcagccccagactgggccccgtttgcctccaaggcagccaactgtagcttctcctgccgagtctgatgaggaaaacaggcagaagacacgtccacgtacaaaaatcagtgtggaggctctcgggatcctgcaaagctttatccaggacgtaggcctctaccctgatgaggaggctattcagaccctgtctgcccagctcgatctacccaaatatactattatcaagttctttcaaaatcaacggtactaccttaaacaccacggtaagctgaaggacaacagcggcctcgaagtagacgttgccgaatataaggaggaggagctgctgaaggatctcgaggagtctgtgcaggataaaaatactaacaccttgttctccgtgaaattagaagaggagctgagtgtagaggggaacacggatatcaacacagacctcaaagattag

SEQ ID NO: 133479 - DNA, 2202 bp, synthetic construct
  misc_feature 1..2202: note = Description of Artificial Sequence: Synthetic coding sequence
  source 1..2202: mol_type = other DNA
atggaacgacggagtgaatcaccatgtctgcgagattctcccgatagacgttctggatcaccagatgtcaaggggcctccccccgtgaaagtggctaggttggaacaaaacgggagccctatgggtgcacggggccgtcccaacggcgctgtggcaaaagccgtgggcggcctgatgattcctgtgttttgtgttgtggaacagttggacggtagcctggaatacgataatagagaagagcacgctgagtttgtgctcgttcggaaggacgtcctatttagccagctggtcgagactgctctgctggccctcggatactcccactcctccgccgcacaggctcagggcatcattaagttgggccgctggaaccctttgcctttatcttatgtgaccgacgccccggatgccaccgtggctgatatgttgcaagatgtctaccatgtggtcaccttaaagatacaacttcaatcctgcagtaagctggaggatcttcccgctgagcagtggaaccacgccacggtgcgcaacgctctgaaagagctattgaaagagatgaatcagtcgaccctcgcgaaggagtgcccgttgagtcagtcaatgattagctccattgttaattcgacctactatgccaatgtttccgccacaaaatgccaggagtttggtcgctggtacaagaaatacaaaaaaataaaggttgagcgcgttgagcgcgaaaatttatcagactactgtgtcctaggacagcgcccaatgcatcttccaaacatgaaccagttggcgtccctcggtaagactaatgaacagtcaccccactcacagattcaccactccacgcccatcagaaatcaggtcccggcgctacagcctatcatgagcccggggttactttctccccaattgtctccacagttagttaggcagcagatcgccatggcacatctgatcaaccagcagattgcggtgagtagattgcttgcacaccagcaccctcaagccataaaccagcagttcttgaatcaccctccaatcccgagagctgttaagccagaacctaccaattcatccgtagaagtgtctcccgatatctatcagcaagtccgggacgagcttaagcgtgcctctgtttcacaggctgtttttgcccgggtggcatttaatcggacgcagggactcctgagtgagatactgcgcaaggaagaagatccacgcacggcctctcagtcccttctggtgaacctgcgggccatgcagaattttctcaatctgccagaagtcgagcgcgacagaatctaccaagacgagagggagcggtccatgaacccaaatgtgtctatggtttcttctgcctcatccagtccaagttcctcgcggaccccacaagccaaaactagcacccccacaacagatctgcctattaaagtcgacggtgctaacattaacatcacagccgcgatttacgacgagatccagcaagaaatgaagcgggcgaaggtaagccaggctttgtttgccaaggtcgcagctaacaaatcccagggatggctgtgtgagctgctgcgctggaaagagaaccctagtccagaaaacagaactttgtgggagaacctatgcaccatcagaaggtttctcaacttaccacagcacgagcgggatgttatctacgaggaggaatctcggcaccatcacagtgagagaatgcagcacgtggtccagctacctcccgagccggtccaggttcttcatcgtcagcagtcccagcctgctaaagagtcgagtccgcctagggaggaagccccgcctccccctccccctacagaggactcatgtgcaaaaaagcctagaagtaggactaaaatttccttggaagctctcggaatactgcagagttttatacatgatgtgggcctctaccccgatcaagaggccatccataccttgtccgcccagttggacctgccaaaacacacgattatcaaattcttccagaatcaacgctaccacgtgaaacaccacggtaaactgaaagaacacctcggctccgcagtcgacgtggcagaatacaaagacgaggagctgctcactgaatctgaggagaacgattcagaagaagggtccgaagagatgtacaaggtggaagccgaggaagagaatgcagacaaatctaaggctgcaccagcggagatagaccagcgctag

SEQ ID NO: 133480 - DNA, 2202 bp, synthetic construct
  misc_feature 1..2202: note = Description of Artificial Sequence: Synthetic coding sequence
  source 1..2202: mol_type = other DNA
atggagagacgcagcgagtctccgtgtctgagggacagccccgatcggaggtcagggagccctgacgttaaggggcccccaccggtcaaggtggcacggctggaacaaaatggttcccctatgggagccagaggcaggcccaacggtgccgttgccaaggccgtgggcggcctgatgattccggttttttgtgttgtggaacagttagacggcagtctggagtacgacaatcgggaggagcatgctgagttcgtccttgtcagaaaggacgtgctgttctcacagctcgtggagaccgctctgctggccctgggttactcgcatagctccgccgctcaagctcagggtatcattaagctcgggaggtggaatccactgccactgagctatgtgacagatgcacccgacgctaccgttgctgatatgctccaggacgtctaccacgttgtaacactcaagatccagctccagtcgtgtagcaagctggaggacctgcccgccgaacaatggaaccatgccacagtgcgcaatgccttaaaagagctgcttaaggagatgaaccagtccactctcgccaaggaatgtccattgtcccagtccatgatttcaagtattgtgaactctacctattacgctaacgtttcggccacaaagtgtcaggaatttgggcgttggtataaaaaatacaaaaagattaaggtcgagcgagtggagagagagaatcttagtgactattgcgtgcttggacagcgcccaatgcacctacccaatatgaatcagttggcatcccttggcaaaacaaacgagcagagcccgcattcacagatccatcactctacacccatccggaaccaagtgccagctctgcagcccattatgtccccaggtctgctgagcccccagttaagccctcagctggtgcgccagcagattgccatggcacaccttattaaccagcagattgccgtgtcccgcctgctggcccaccagcacccccaggccattaatcagcagttccttaaccaccctccaatccctcgcgcagtcaaaccagagccaacaaattcctctgtggaggtgagccccgatatttatcaacaggtacgagatgaactcaaacgcgcaagcgtgagtcaggccgtgttcgcaagagtggcctttaatagaacacaggggttactctccgaaatcctgcgcaaggaggaagaccctaggaccgcgtcccagagcctcttagtgaatctgagagctatgcaaaacttcctgaatctgcccgaggtcgaacgagatagaatttaccaagatgagcgcgagagaagtatgaatcccaatgtgagtatggtcagcagtgcctcttcgtccccatccagttccagaacacctcaggcaaagacatcaacccccaccaccgacctgcccattaaggtggatggtgccaatatcaacattacagccgcaatatatgacgaaatccagcaggagatgaaacgggcaaaggttagtcaggcacttttcgctaaggtcgcagccaacaaatcccagggctggctttgcgaacttctgcgctggaaggagaatccgtctccggagaacagaaccctgtgggagaacctgtgcactatccggagatttctcaatctgcctcagcacgaaagggacgtgatctatgaggaggaatcccgccatcaccactccgagcgaatgcaacacgtggtacaattaccacctgaacccgtgcaagtgctgcaccgccagcaatcacagcctgccaaggagtcctctcccccacgggaggaggctccacccccacctcctcctacagaggacagttgtgcgaaaaaacccagatctaggactaagatttcgctagaagccctcggtatactccaatcctttatacacgacgttgggctctatcccgaccaggaagccatccacactttaagtgcccagctggacttgcctaagcacactattattaaattttttcagaaccagaggtaccatgtcaaacaccatggcaagctgaaggagcacttgggatccgccgtggacgtggccgagtacaaggacgaggagctcctgacggagagtgaagagaacgattccgaagaggggtctgaggaaatgtataaggtggaggcagaagaggagaacgcggataaatccaaggccgcccccgccgaaatcgaccagcggtag

SEQ ID NO: 133481 - DNA, 1848 bp, synthetic construct
  misc_feature 1..1848: note = Description of Artificial Sequence: Synthetic coding sequence
  source 1..1848: mol_type = other DNA
atggagcgccgttcggaatcaccctgccttagggatagtcccgatagacggagcgggtctccagacgttaaaggccctcctcccgtaaaggttgccaggctggaacagaatggatctcccatgggggcccgcggtcggcccaatggagccgtcgcgaaagccgttggcgggctgatgatcccagtgttttgtgtggtcgagcagctggatggatcactagaatatgacaatagagaggagcatgcggagtttgtgctggtccggaaggacgtgctttttagtcagctagtggagacagccctcttagccttgggttatagtcatagttccgcggcacaggcccaggtggagagggtcgaaagagaaaatctgagtgattattgcgtattgggccaaaggccaatgcatctgccaaacatgaaccagctggctagccttggaaagaccaacgagcagtcacctcactctcagatacaccactcaacgcccataagaaaccaggtgccagctctccagcccatcatgtccccaggtttgctttcgccacagctatctcctcagcttgtgcgtcaacagatcgccatggcacatctgatcaaccaacagatagcagtctctaggctcctcgcccatcaacacccccaggccatcaaccagcagttcctgaaccacccacctattcccagggcagtgaaacctgaacctactaacagctccgtcgaggtgtcccccgacatttaccaacaggtcagggacgaattaaaacgtgcctcggtctctcaagccgtgttcgccagagtggcgttcaatcgaacacaagggctgctcagtgaaatccttaggaaggaagaggacccacgtaccgcctcgcagagcctgctggtaaacttacgtgctatgcagaacttcctgaatctaccggaggtcgagcgagatcggatctatcaggatgagcgagagcgcagcatgaatcccaacgtctcgatggttagtagcgctagcagtagcccgtccagctcacgcacccctcaggcaaagacctccacacctaccaccgacctgcccattaaagtggatggcgccaatattaacataaccgccgccatctatgacgaaattcaacaggagatgaaacgcgcaaaagtcagccaagctttgtttgccaaagtggccgccaacaagagccagggatggctatgcgagctgctaagatggaaggagaatcccagtcctgagaaccggaccctctgggaaaacctgtgtacaatccggaggtttctcaatctgcctcagcatgagcgagatgtgatttatgaggaggagtcccgtcaccatcattctgagagaatgcagcatgtcgtgcagctccctcctgaaccagtgcaggttttgcaccgtcagcagtctcagcccgctaaggagagctcacctccacgtgaggaagctccgcctccacccccgcctaccgaggatagttgcgctaagaaaccccgatctcgaactaaaatctctctcgaagctctggggatcttgcagagcttcattcatgacgtgggcctctatcccgatcaagaagccattcacactctcagtgcccaactggacctgccaaagcatacaattatcaagtttttccagaaccagcgctaccacgttaagcaccacggaaagctcaaagagcatctggggtcagccgtggatgttgccgagtacaaggatgaggaactgttaactgagtcggaggaaaatgactcagaggagggatcagaggagatgtacaaggtggaggcagaagaagaaaatgccgacaagagcaaggccgcccccgccgaaatcgaccagcgatag

SEQ ID NO: 133482 - DNA, 2202 bp, synthetic construct
  misc_feature 1..2202: note = Description of Artificial Sequence: Synthetic coding sequence
  source 1..2202: mol_type = other DNA
atggaaagaagatctgaaagcccttgtctgagggactcaccagatagaaggtcgggtagtccggacgttaagggtcctccaccggtcaaagtagcccgacttgaacagaacggaagcccgatgggcgctaggggaaggccaaatggggccgtggccaaagcagtgggcgggctcatgatccccgtgttttgcgtagtggagcaacttgacggcagcctcgaatacgacaatcgcgaggagcacgccgagttcgttctggtgagaaaggatgttctgttcagtcagttagtagagacggctcttttagccttaggctattcccacagttccgcagcccaggcccagggaatcattaaactgggcaggtggaatccactgccccttagttacgtgactgatgcaccggacgccaccgtagccgacatgctccaggatgtctaccacgtggttaccctgaagatccagctccagtcatgttccaaactcgaagacctccctgccgagcagtggaatcacgcaaccgttcggaatgctttgaaggagctcctgaaggaaatgaaccagagcaccttggctaaggagtgtccattgtcccagagcatgatcagctccatcgtgaacagcacctattatgccaacgtgagcgcaacaaagtgccaggaattcggtagatggtataagaagtacaagaaaattaaggtggaacgcgtggagagagagaatctgtccgattattgcgtgttggggcaacggcctatgcatctgccgaatatgaaccaattggcgtcactaggcaaaactaatgagcagtccccacatagccagatacatcacagtaccccgatcagaaatcaagtgccagcactccagcccattatgtcgcctggactactgtctcctcagttaagtccacagctggtcaggcagcagatcgccatggcgcatcttatcaaccagcaaattgcagtgagccggttgctggcccatcaacacccccaggccatcaaccagcagtttctcaaccacccccccatcccacgtgcagtgaagcccgaacctaccaacagcagcgtcgaagtctccccggacatctatcagcaggttagagacgagctaaagcgggcttcagtaagccaggcggtttttgccagagtagccttcaacaggacacaggggctcctgagtgaaatcttacggaaggaggaggatccgcgcacagccagccagagcctgctggtcaatctcagagcaatgcagaatttccttaatctgcccgaagtcgaaagagacaggatttatcaagacgaaagggaacggtccatgaatccaaacgttagcatggtcagctccgcctcctcaagtccgagctcatcacggactccacaagcaaaaacatccacacctacaacagatctgccgatcaaagtggatggagcaaacatcaatatcaccgccgccatctacgacgagatccagcaggagatgaagcgcgctaaggtctcccaggctctgttcgccaaggttgctgcgaacaagagccaaggttggctgtgtgagctgctccggtggaaggaaaaccccagtccagagaacagaaccctctgggagaatctgtgtaccattcggcgctttctgaacctaccccaacacgagcgggacgtcatctatgaggaagagagccgccaccatcatagcgaaagaatgcagcatgttgttcagttgcccccagagcctgttcaggtgctacataggcagcagtctcaaccagcaaaagagtcctccccccctagggaggaagctccgccccccccccccccaaccgaggacagctgcgcgaaaaagccccgttcaaggacaaaaatcagcctggaagctcttggcatcctgcaatccttcattcacgatgtgggattgtaccctgaccaggaagccatccatacactgtcagcccaactggatctgcccaaacatactatcatcaaatttttccagaatcaaagataccatgtgaaacaccacggaaagcttaaagaacaccttgggagcgccgtcgatgttgcggagtataaggatgaggaactgcttactgaaagtgaagagaatgatagcgaagagggctccgaggagatgtacaaagttgaggcagaggaggagaatgctgacaagagtaaagcagcccccgctgaaatcgaccagaggtag

SEQ ID NO: 133483 - DNA, 2748 bp, synthetic construct
  misc_feature 1..2748: note = Description of Artificial Sequence: Synthetic coding sequence
  source 1..2748: mol_type = other DNA
atggcagagacgctgagcggcctaggagatagcggcgctgcgggcgctgcggccttgagcagtgccagcagcgaaactggaacacggaggttgagcgacctgagagtgatcgatctgagggcggaactgcggaagagaaatgtcgattcgtcagggaataagagcgttctcatggaacgcttaaaaaaggcaatcgaagacgagggcggcaaccctgatgagatcgaaatcacctcagaaggaaacaagaagacatcgaaacggagttccaagggtcgtaagcccgaggaggagggcgtcgaagacaatgggctcgaggaaaactcaggggatgggcaggaggacgtagagacttctcttgaaaaccttcaggatattgacatcatggatatctcggtgttagatgaggctgaaattgacaatggaagtgtggctgactgcgtggaggatgatgatgctgacaatctccaggaatccctgtctgatagccgcgagttggtggaaggcgaaatgaaggagttgccggaacagctgcaggagcatgctattgaagacaaagaaactattaataacctggacacatccagttccgatttcacaattctgcaggagatcgaggaaccttctttggaaccagagaatgagaaaatcctagacatccttggggagacctgcaagtcagagcccgttaaggaagagtcctcagaacttgaacagccattcgctcaggacactagctctgttgggccagaccgaaagctagctgaggaggaagacctttttgactcagcccacccagaagaaggtgacctcgaccttgcgtccgaaagtaccgcgcatgctcagagcagcaaagctgactcgctgttagcagtggtgaagcgcgaacccgctgagcaaccaggcgatggtgagcggacagactgtgaaccagtaggactcgaacccgcagttgagcagtcctcagcagccagcgagcttgcagaggcaagcagcgaagagctggccgaagcaccaacagaggctccttcaccagaagcccgagacagcaaagaagatgggaggaagttcgattttgatgcttgcaatgaagtgccaccagcaccaaaggagagctctactagcgaaggggcagaccagaagatgtcgtcacctgaagacgatagcgacacaaagcggctctcaaaggaggagaagggacggtcctcgtgcggtaggaacttttgggtgagtggattgagctccacaacgcgcgcaactgacctgaaaaacttgttcagtaaatatggaaaggtcgtgggcgcaaaagttgtcaccaatgcacgaagccccggggctcgctgctatggctttgtcactatgagcaccgcagaagaggcaacaaaatgtatcaaccatctgcacaagaccgaactccacgggaagatgataagtgtggagaaagccaaaaacgagcctgtcgggaaaaaaacctctgacaagagggatagtgatggcaaaaaggaaaaaagctctaattcagacaggagcaccaatctgaagcgggatgacaagtgcgaccgcaaggatgacgccaaaaagggggatgatgggagtggggagaaatcaaaggatcaagatgaccaaaaacctgggccatcagagagatctcgggctactaaatccggctctagaggcaccgagaggactgtggttatggacaagagcaagggcgtgccagtaatttcggtcaagacatccggaagcaaggaacgagcaagcaagagccaggaccggaagtctgccagtcgcgagaaaaggagtgtggtcagcttcgataaagttaaggaaccccgcaagtcccgggactccgagtctcacagtcgcgtgcgagaacgatctgaacgagaacagagaatgcaagcccagtgggaacgggaggagcgcgagcgcttggagattgccagggagcgactggccttccagcgccagcgactcgagcgggaaagaatggaaagagagagactggagcgagaacggatgcatgtagaacacgagagaagaagagagcaggagcgcatccaccgagagcgcgaggaattgcggcgtcaacaggagctaagatacgagcaggaacgccgccctgctgtgcggcggccttatgacctcgaccgacgggacgatgcctactggcccgaggcaaaacgagcagccctggacgagcgctatcatagtgactttaaccggcaggatagatttcacgactttgatcaccgggaccggggcaggtacccagaccattcagtggatcgacgagaagggtctcggtcgatgatgggtgagagagagggtcagcattaccccgagagacacggtgggcccgagaggcatggtcgagacagccgggacgggtggggcggatacggcagtgataagcgtatgtctgaaggaagaggactcccacccccacccagacgagattggggtgaccatggaaggcgagaggacgatagatcttggcagggcaccgccgatggcggtatgatggaccgggatcacaagaggtggcaaggaggtgagagaagtatgtcgggacactcaggacctgggcacatgatgaatagagggggcatgtcagggagggggagcttcgcccccggtggggccagtcggggccatccaatcccgcacggcgggatgcagggtggatttgggggtcagtcacgcggatccagaccgtccgacgcaagattcactcgccgctactag

SEQ ID NO: 133484 - DNA, 2244 bp, synthetic construct
  misc_feature 1..2244: note = Description of Artificial Sequence: Synthetic coding sequence
  source 1..2244: mol_type = other DNA
atgaaagagctccctgaacaactgcaagaacatgccatcgaggataaggaaaccattaataacctggacactagctcttcagactttacaatcctgcaggagatcgaggagcccagcctggagccagagaacgaaaaaatattggacattctgggcgaaacctgtaagtccgaaccagtcaaggaggaatcatcggagcttgaacaaccattcgcccaggatacatcttccgtaggtcctgaccgaaagctggctgaagaagaggatctgtttgatagcgcccacccagaggagggggacctggacctcgcatcggaatcaacggcccacgcccagtcaagtaaagctgactccttgttagccgtggttaaaagagagcctgccgagcagccgggtgacggggaacgcactgactgtgaaccagtgggcttggagcccgcagtcgagcaaagtagtgccgcgtctgaattggctgaggctagcagtgaagaattggctgaggctcctaccgaggcaccgtctcctgaggcccgggattccaaggaagacggcaggaaatttgacttcgacgcttgtaacgaggtgcctcccgctcctaaggaatcctccactagtgaaggcgctgaccagaagatgtcatccccagaggatgattcggatacgaaacgtctgagcaaagaggaaaaagggcggtcctcatgtggaagaaatttctgggtgtcaggcctgtctagcaccacccgggccacagacctgaagaacttgttcagtaagtacggaaaagtggtaggtgcaaaggtagtgacaaacgctcgttccccaggcgcccgctgctatggcttcgtgaccatgtctacggcagaggaagctaccaagtgcataaatcacctgcataaaaccgagctacatggaaaaatgatttccgtcgaaaaagcaaaaaacgagccggtcggcaaaaaaacctcggataagagagacagtgatggtaagaaggagaagagttccaactcggacagatctacaaatttaaagagagacgacaagtgcgacaggaaggatgacgcgaaaaaaggagacgacgggtcaggtgagaaaagcaaagatcaggacgatcagaagccaggcccctccgaaaggtctcgtgcaacgaaaagcggaagccgcggtacagagagaaccgtagtgatggataagagtaaaggcgtgcccgtcatctcggtcaaaaccagcggatcaaaggagagagcatccaaaagccaggaccgcaaaagcgcctctagggaaaagcgtagcgttgtctcctttgacaaggtgaaagagcctaggaaaagtagagatagcgaaagtcattcacgcgtgcgagaaagaagtgaaagagagcagcgtatgcaggcccagtgggagcgggaggagcgggagaggctggagatcgcccgcgagcggcttgcgtttcagagacagcgattagaacgcgaaagaatggaaagagagcgactggagagagaaagaatgcacgtggaacatgaaaggcgtcgcgaacaagagcggattcacagggaacgggaagaactacgaaggcagcaggagttaaggtacgaacaggaacggcggcctgctgttagaagaccctacgatctcgatcggagagacgatgcatactggccagaggcaaaaagagctgccctggacgaacgttaccactctgactttaaccggcaggataggttccacgacttcgatcacagggaccggggtcggtacccagaccattcagtggaccgtcgcgagggatctcgctccatgatgggcgaaagagaaggccagcactatcctgagcgacatgggggaccagagcggcatgggagagactctagagatggttggggtggctatgggtcagataagcggatgagcgagggaagagggctcccccccccgccccgtggacgacgggactggggagaccacggtcggcgggaggacgacaggtcatggcaaggcaccgccgacggaggcatgatggatcgcgatcataagcgatggcaggggggcgagcgctccatgtcgggacacagcggccctgggcatatgatgaacaggggtggaatgagcggacgcggatcgttcgctcccgggggtgcttcccgcggtcaccctatccctcatggagggatgcagggcggctttgggggccagtcccggggttcacggccaagcgatgctcgattcacccgccgctattag

SEQ ID NO: 133485 - DNA, 2547 bp, synthetic construct
  misc_feature 1..2547: note = Description of Artificial Sequence: Synthetic coding sequence
  source 1..2547: mol_type = other DNA
atggcggaaacattgtctggattaggcgattcgggcgccgccggggcggctgctctgtctagtgccagcagtgaaaccgggaccaggcggctctcagacctgcgggtgatagacttgcgggccgagctccgcaaaaggaatgtggattcctctggtaacaaaagtgtgctgatggaacgactgaagaaggctatcgaggacgagggcggcaaccctgatgaaatagagatcacctcagagggcaataaaaagacttccaaacgctctagcaagggaaggaaacccgaggaggagggcgtggaggataacggcttagaggaaaattccggggacgggcaaatcgaggacaaggaaactataaacaatcttgatacgtcaagcagcgactttactatcctccaggagatagaagagccttccctggaacccgagaacgagaagattcttgacatcctcggcgagacctgtaaatctgagccggttaaggaggagtcaagcgagctggaacagccattcgctcaggatacaagctctgtggggcccgaccgcaagcttgcagaggaggaagatctgttcgatagtgcacaccctgaagagggggacctggatttggcatcagagtccactgcccatgcccagagttccaaggccgactctctgctggccgtggttaaaagggaaccggccgagcagccgggcgacggggagcggactgattgtgagccggtcgggcttgaaccagctgtggagcaaagctctgcagcatctgaactcgccgaggcaagctccgaggagctcgccgaggcccccaccgaggctccctcccccgaggcaagagacagcaaagaggatggccgcaagttcgacttcgacgcctgtaacgaggtaccacctgcaccaaaggagagctctactagtgagggagccgaccagaagatgtccagccctgaagatgattccgacaccaaacgtttgtcaaaggaggagaaagggcgcagcagttgcggcagaaacttttgggtgagtggactgagctccacaacccgggcaactgatttgaaaaaccttttctcaaagtatggcaaggttgttggagcaaaagtagtgactaacgcgaggagcccaggcgccagatgttatggcttcgtgaccatgagtacagcagaagaagccactaagtgcatcaaccatctgcataaaacggagctccacggtaaaatgatttctgtcgagaaggccaagaacgagcctgtgggtaaaaaaaccagtgacaaaagagactctgacggcaagaaggagaagagctctaatagcgaccgttcaaccaatctgaagagagacgataaatgtgatagaaaggacgacgccaaaaaaggcgatgacggctccggcgagaaatccaaggatcaggatgaccagaagccaggcccaagtgaacggtccagagcaactaagtcagggagccggggtactgaaagaactgtggttatggataagtctaagggggtccccgtaatctccgtgaaaacaagcggatccaaggagagagcttcgaaatcgcaggatagaaaaagcgcctctagagagaagagaagcgtcgtgtcattcgataaggtgaaggaaccgcgtaaaagccgtgactccgagagtcactctagggttagagagaggagcgaaagagaacagcgcatgcaagcccagtgggagagggaggaacgcgagaggctggagattgcgcgggagagattggcgtttcagagacaacggttggaaagagagcggatggagcgggagagactggagcgggaaagaatgcacgtcgagcatgagcggagaagggagcaagagaggatccacagagaacgcgaggaactccggagacagcaggaactgcgctacgaacaagagcgcaggcccgccgtacggcgcccatacgatcttgataggagggacgatgcctactggcccgaggcaaagagggcagccctggatgaacgctaccactcggatttcaatcgacaggaccgcttccacgacttcgaccaccgggaccgtggccggtatcccgaccacagcgtggatcggcgcgaagggtcccggtcgatgatgggagagagggaggggcagcattatcctgagcgccatggcggacctgagcggcatgggagggattcgagggatgggtgggggggatatgggtcagacaaaaggatgagcgaagggcggggcctgccccctccaccgaggggcaggcgtgattggggtgatcatgggcggagggaggacgaccgctcgtggcagggaacagccgatggaggcatgatggatcgggatcacaaaaggtggcaggggggggaaaggagtatgtcaggccatagtggacccgggcatatgatgaatagaggcggaatgagtggccgggggtctttcgcgcccgggggagcttctcggggacaccccatcccgcacgggggtatgcaaggcgggtttggcggacagagtcgaggctctcgtccctcagatgcccgttttacccggcgttattag

SEQ ID NO: 133486 - DNA, 2280 bp, synthetic construct
  misc_feature 1..2280: note = Description of Artificial Sequence: Synthetic coding sequence
  source 1..2280: mol_type = other DNA
atgaaagtagttatcctcactaagttgaagctcccacccagagaaaccaggaaacatcagaggggactggcaaagatcgaagataaagagacaattaacaacttggataccagcagcagcgatttcaccatactacaggagattgaggagccctcgctggaacccgaaaatgagaagatcttggatatccttggagaaacttgcaagagcgagcccgtgaaggaagagagttctgagctcgagcagccatttgcacaggatactagctccgtgggaccggacagaaagctggctgaagaagaagacttattcgattcagctcacccagaggagggtgacctggacctggcctctgagtctaccgctcacgcccagtcaagcaaagcggacagcctgttggcggtggttaagagggaacctgcggagcagcccggagacggcgagcgcactgattgcgagccagtcggactggagcctgccgtggaacaatcttcagcagccagcgaactggccgaggcttcctctgaggagctggcagaggccccaacagaagcaccatccccagaggctagggactccaaggaagacggtagaaagttcgattttgacgcatgcaacgaagtgccaccggccccgaaggagtcatctacctccgagggggccgaccagaagatgtccagcccagaagatgacagcgacacgaagaggctgtcaaaagaggagaaagggaggtcctcatgcgggaggaatttttgggtcagcggcctcagttctacgacccgggccacggatctgaagaatcttttctcgaaatacggcaaggtagtaggggcgaaggtcgtgacaaatgcccgctctccaggtgccagatgttatggctttgttaccatgtctaccgcagaggaggccaccaagtgcataaatcatttgcacaaaactgagctccatgggaaaatgatttccgtagaaaaggcgaagaacgagcctgttggcaaaaagacctcagataagagggatagcgacggtaaaaaagagaagtccagcaattccgatcgctcaacaaatttgaaaagagatgataagtgtgataggaaggatgatgcaaaaaaaggcgatgacggctctggagaaaagtcaaaggaccaagacgatcagaagccaggaccttcggagcgctcaagagcgactaaatcgggctctcggggaacagagaggacggtcgtaatggataagtctaaaggtgtacccgtaatcagtgtaaagacatcaggtagcaaggagcgggcgtccaagagccaggatagaaagagcgccagtcgagaaaagcgcagcgtcgtatctttcgacaaagtcaaggagcccagaaaatctcgggacagtgagagccaccgcgtcagagagagatccgagcgtgagcagaggatgcaggcccagtgggagcgagaggagagggaaagactggagatagcccgtgagagattggccttccagcgccagcgcctcgaacgggagcggatggaaagagaacggttagaaagggagaggatgcatgtagaacacgagcgaagacgcgagcaggagcgtattcacagagagcgggaagaactgcggcgccagcaggagttgcgctacgagcaagagaggagacctgcagtgcgtcggccttacgatctggacaggcgagacgatgcttactggccagaggcaaagcgcgctgctctcgacgagaggtaccacagtgactttaatagacaggataggttccatgacttcgaccacagagacagaggccgctacccagaccactccgtggatcgccgtgagggctctcgctcaatgatgggcgagcgggagggccagcactaccctgagcggcacggcggtcctgagcggcacggccgcgattctagagatgggtggggcggctatggcagcgacaaacggatgagcgagggacgcggtttgccaccccctccacgcgggcgacgagattggggcgaccatggacgcagggaggatgatcggtcctggcagggcacagctgatggcgggatgatggaccgcgatcacaagaggtggcaaggaggggaaagatcaatgagtggccattcagggccaggccacatgatgaatagaggcgggatgagcgggagggggtctttcgctccggggggagccagcaggggtcatccaatcccccacgggggcatgcaagggggcttcggaggccaaagccggggaagccggccaagcgacgcgcgtttcacacgaaggtactag

SEQ ID NO: 133487 - DNA, 2439 bp, synthetic construct
  misc_feature 1..2439: note = Description of Artificial Sequence: Synthetic coding sequence
  source 1..2439: mol_type = other DNA
atggcagaaactctctctggccttggggactccggggctgccggcgctgcagccctctcgagtgccagttcagaaaccggcacacggcggctgtctgatctgcgggtgatcgacctgcgtgcagagctccgaaaaaggaatgtagacagtagcgggaacaaatccgtgctcatggaacgcctgaaaaaggcgatcgaagacgaaggaggaaacccagacgagatcgagatcactagcgagggcaataaaaagacatccaaaaggtctagtaagggtaggaaacctgaagaagaaggcgtggaagataatggtttagagcccgaaaacgagaaaatacttgatatccttggcgaaacttgcaaaagcgaacccgtgaaggaggagtccagtgagttagagcagcctttcgctcaagacacaagttctgtaggaccggacagaaaacttgccgaggaggaagatctgttcgatagcgcccatcccgaggagggagatctcgacctggccagtgagtctaccgcacacgcccagagcagtaaggccgattctctgttggccgttgtcaagagggagcctgccgagcagcctggagatggggagcgtacggattgtgagccggttggcctggaacccgccgtggaacagtcttccgctgcaagtgaactggcggaggccagtagcgaagaactcgcagaagcccccaccgaggccccaagcccagaggcccgcgactctaaggaggacgggcggaagtttgacttcgatgcatgcaacgaggtgccaccagcccctaaggaatcttcgaccagcgagggggcagatcaaaaaatgagcagtcctgaggatgactcagatacaaagcggctaagcaaggaggagaaggggcggtcgtcatgtggcagaaacttttgggtaagtggcctgtccagcacaactagagccacagacctcaagaatctcttcagtaagtatgggaaagtcgtgggcgcaaaagtagttactaacgccaggtcgcctggcgccaggtgttacggttttgtcacgatgtccacagccgaagaggctaccaagtgtattaatcacctacataaaacagaactacatggaaaaatgattagcgtggaaaaggctaagaatgaacccgtgggtaaaaaaacatccgacaagcgagatagtgatggcaagaaggaaaagagctccaattctgacaggagtaccaatctaaagcgggatgacaagtgtgaccggaaggatgacgccaagaaaggggacgacgggagcggagaaaagagtaaggatcaggacgatcaaaaacctggacctagtgaacgttcacgggctacaaagtctggctcaaggggaactgaacggacagtagtgatggataaatctaagggggtgccggtcatctcagtgaagaccagtgggtcgaaagagcgagcttccaaatcacaggacagaaagtctgcgtctcgggaaaagcgcagtgtggtgagctttgacaaggtgaaggagcctagaaagagcagagatagcgagtcccattcacgcgtgcgggagagaagcgaacgggaacagcgcatgcaggctcaatgggagagggaggagcgcgaacgattggagattgcccgcgaaagactggctttccagcgtcagcgacttgaaagagaaagaatggaaagagagcggctggagcgcgagagaatgcatgtcgaacatgagcggaggcgagagcaggagcgcattcaccgggagcgggaggaactgcggcgacagcaagaactccggtatgagcaggaaagacgccctgccgtgaggagaccatatgatctcgacaggcgcgacgacgcctactggcctgaggccaagagggccgctcttgacgagagatatcactctgatttcaatcgccaggatcggtttcatgacttcgaccatcgagataggggaaggtaccccgaccactcagtagatagacgggaggggtcccgatcaatgatgggcgagcgggagggtcagcactacccagaacgccatggcggccctgagcggcacggcagggacagccgcgacgggtggggagggtatggcagcgacaagcggatgtctgagggcagaggtctgcctccgccaccccgtggccggagggactggggagaccacggcagacgtgaggatgatcgctcatggcaaggaacagctgatggtgggatgatggaccgcgatcataagagatggcaggggggagagcgctcaatgtccgggcactccggtcccggtcacatgatgaataggggggggatgagtggccgcggtagcttcgcccctggtggtgcctcacgcggccatcccattccccacgggggaatgcagggtgggtttggaggacagtctcggggcagtagaccctccgatgcccggttcactagaaggtattag

SEQ ID NO: 133488 - DNA, 2862 bp, synthetic construct
  misc_feature 1..2862: note = Description of Artificial Sequence: Synthetic coding sequence
  source 1..2862: mol_type = other DNA
atggctgagactcttccgggctctggtgactccgggcccggtacagcctctctcggacccggcgttgcagagactggcaccagacggctctctgaattacgtgtgatcgacttaagagcagaactgaagaaacgcaatctcgataccggcggcaacaaatctgttctgatggaacgcctcaagaaggccgtgaaagaagaaggccaggaccctgatgaaatcggcatcgagctcgaagctacctctaagaagtctgctaaacgctgcgttaaggggcttaagatggaggaggagggcacagaagacaacggacttgaagacgattcccgggatggacaagaggatatggaagcaagcctggagaacctccaaaacatgggaatgatggatatgagcgtacttgacgaaacggaagtggctaattcgagcgcgcccgactttggggaagacggcacagatgggttgcttgactccttttgcgattcaaaggaatatgtggccgctcagcttcgtcagctgcctgcccagccacccgaacacgccgttgacggcgaaggcttcaagaataccttggaaacatcctcactgaatttcaaagtaacccccgacattgaagaaagtcttctggagcctgagaatgagaagatcctggacattctcggcgaaacatgtaagagcgagcccgtaaaagaagaatcttcagaactggagcagccattcgcgcaagatacatcaagcgttggcccggaccggaaactggctgaagaagaggatctgtttgatagcgcccaccctgaagaaggtgacttggatctagctagcgagtcgaccgcacacgctcagtcatccaaggcagattccctgctcgccgtggttaaacgcgagcctgctgagcagccaggagacggggaacgcacagactgcgaaccagtcggccttgagcccgcggtggagcaatcctcagcagcctcagagctcgctgaagcctccagcgaggaattggcagaagcaccaacagaagcaccgtccccagaagctagggattctaaagaggacggccgaaaattcgacttcgacgcttgcaacgaagtgccccctgcccctaaggagagctccacctcagaaggggcggatcagaaaatgtcatcattcaaggaggagaaggatatcaagcccattataaaagacgagaagggtcgggtggggtcaggaagcggacgcaatctgtgggtgtccgggctctcttctaccactcgcgcaacagacctgaagaacctgttttcaaagtatggcaaggtcgtgggcgcaaaagtggtgaccaacgctagatcgccaggggctcgatgttacgggttcgtgacgatgagtacctccgatgaggctacaaagtgcataagccatctgcaccggacagaactccacggtaggatgatctcggtggagaaggctaaaaacgagccggccgggaaaaaattgtctgaccgcaaggagtgtgaggttaagaaagaaaaactgtcttctgtggatcgacaccactcggtggaaatcaagatcgaaaaaactgtgattaagaaagaagaaaagatagaaaagaaggaggagaagaaaccagaggacatcaaaaaggaagagaaggaccaggatgagctgaagcctggcccaaccaatcggagccgtgtgactaagagcggcagccgcgggatggaacggaccgtggtcatggacaaaagcaagggggaacctgtcatttcggttaagaccacctcccgctcgaaggagagatcaagtaaaagtcaagaccggaagtctgagtctaaggagaaaagagacattcttagctttgataaaattaaggaacagcgggagcgcgagagacagagacagcgagagcgcgagatccgcgagaccgagaggcgtcgggaaagagaacaacgcgaaagggagcagagactggaagcgtttcatgaacgcaaggaaaaagcccggctgcagagggagcgcttgcagctcgaatgccagcggcagaggctggagcgggagaggatggagcgcgagcggctcgagagagagcgaatgcgagtggagcgggagcgccgaaaggagcaagaaaggatacatagggagcgggaggaattgaggcggcagcaggaacaactgagatacgagcaggaacgccggcccggccgtagaccttatgacctcgaccgccgcgacgacgcatattggccagagggtaagagagtcgcaatggaggaccggtaccgcgcagatttcccgagaccagaccaccgcttccatgattttgatcatcgcgatcggggacagtatcaagaccacgccatcgaccggcgagagggctcacggccgatgatgggggatcatagagatggacagcactacggcgacgatcggcatggacatggcggcccacctgagcggcatggacgggatagtagagacggttggggcggctatggatctgataagcgtctgagtgaaggacgcggcctgcctcctccccccagaggtggcagggattggggcgagcacaaccagagactcgaggagcatcaagcacgcgcatggcagggcgctatggatgccggcgcggcaagtagggagcacgcccgatggcaagggggcgaaagaggattgtctggaccctctgggcctggtcatatggcctccagaggcggtgtggcaggtcgcggaggctttgcccaaggaggccactctcagggccacgttgtccccggcggcgggctcgagggcgggggtgtggcttctcaagaccggggctccagggtgccccatccccatccacacccccctccgtatccccactttacccggcggtattag

SEQ ID NO: 133489 - DNA, 1533 bp, synthetic construct
  misc_feature 1..1533: note = Description of Artificial Sequence: Synthetic coding sequence
  source 1..1533: mol_type = other DNA
atggccgaaacccttcctggcagcggcgacagcggacccgggactgcgtctctcggacccggggtggcggaaaccggcacaaggaggctgagcgaactgcgggtgatagacctgcgcgcagagctgaagaagcggaacctcgacaccggcggtaacaagtccgtgctgatggaacgactgaaaaaggccgtaaaagaagagggccaggatccggacgagatagggattgaattggaggcaacttcgaaaaagagtgccaagcgctgtgtgaaaggacttaagatggaggaggagggcactgaagacaacggactggaggatgactccagagacggccaggaagacatggaagcaagcctagagaacctgcagaacatgggaatgatggatatgagcgtccttgatgaaacggaggtggcaaactcatctgctcccgactttggagaggatggtactgacggcctgctggattctttttgcgacagtaaggagtatgtcgcagctcagctgcggcagttgcctgcccaaccgccggaacacgcagtgggcaatctcgaaactaggcaggacgtgccaacttcttcctcactcagagtttccgtcgctgctgtccctgtcccacatctctctgtcgagaacgaaaaaatattagatattttgggtgaaacgtgtaagtccgaacctgtgaaggaggaaagtagcgaactggaacagccatttgctcaagacactagctctgtgggacccgaccgcaagctggccgaagaggaggatctgtttgactcggctcatcccgaagagggagacctggatttagccagtgagtcaactgcacacgcacagtcatcgaaggctgactcactcctggccgtggtcaagcgggagcccgccgaacagccgggggacggcgaacgaacagactgtgagccagtggggctggagccagctgttgaacaaagctccgccgcctctgagctagccgaagcttctagcgaagaactagctgaagctccgactgaggcacctagtccagaggcgcgtgactctaaggaagacgggcgtaaattcgatttcgacgcgtgtaatgaagtgcccccagcgccaaaagaaagctctaccagcgaaggcgctgatcagaaaatgagctcattcaaagaggagaaggatataaaacccattataaaagatgaaaaaggacgcgttggatctggctctggccggaatttgtgggtgtctgggctgagcagcacaacgcgggctacagatctgaaaaaccttttctctaagtacggcaaggttgtgggagccaaggtcgttactaacgcgagatctccaggcgcacggtgctatggatttgttacaatgagtacctctgacgaggctacaaagtgtatctcacatctgcataggaccgagctccacgggcgcatgatctctgttgagaaagctaaaaatgaacctgctggcaagaagctgtctgatcggaaggaatgcgaggtgaaaaaagagaaactctcctccgtggaccgctag

SEQ ID NO: 133490 - DNA, 786 bp, synthetic construct
  misc_feature 1..786: note = Description of Artificial Sequence: Synthetic coding sequence
  source 1..786: mol_type = other DNA
atggccgaaacactgcccggtagcggcgattctggtcctggcacagcatccctcggacctggggtagccgagacagggacccggcgtctgagcgagctgagggtgatcgatttgagggccgaattgaaaaaacggaacctcgacaccggcgggaataaatcggtactgatggaacgcctaaaaaaagccgtgaaagaagaggggcaggatccagacgaaatcgggatcgagttggaggcaacttctaagaagtccgcgaagcggtgtgtgaaagcccctagcccagaagccagggactccaaggaggacggccggaaattcgactttgatgcttgtaatgaagtgccaccagcccccaaggagagcagtacctcagagggagccgaccagaaaatgtcatctttcaaggaggagaaggacattaagcctattatcaaagacgaaaagggtagggtgggaagtggcagcggccgaaacctgtgggtcagcggcctgtctagcaccaccagagcaactgatctaaagaacctcttcagtaagtatgggaaagtggtcggtgctaaggtggtgaccaatgctcgcagtccaggcgcaaggtgttatggattcgtaacgatgtccacttcagatgaggccactaagtgtatcagtcacctgcaccgtacagaactccatgggcgaatgattagcgtcgaaaaggcaaagaatgaacctgccggcaagaaactgtcagatagaaaagaatgtgaggtgaaaaaagagaagctgtcctctgtcgatcgatag

SEQ ID NO: 133491 - DNA, 1221 bp, synthetic construct
  misc_feature 1..1221: note = Description of Artificial Sequence: Synthetic coding sequence
  source 1..1221: mol_type = other DNA
atggctgagaccctgccggggtctggtgatagcgggccaggtacagcatctcttggccctggcgtagctgagacaggaacaaggcggctctcagaacttcgggtcattgacctgcgggccgagctgaagaaaaggaacctggacactgggggaaacaagagcgtgctaatggaaagactcaaaaaggcagtcaaagaagagggccaggaccccgatgagatcggaattgaactggaggcaacctcaaaaaagtcagcaaaacgatgtgtgaagggcttgaagatggaggaagagggcacagaggataacggcctcgaggtcgagaacgagaaaatccttgatatcctcggggaaacctgtaaaagtgaacctgtcaaggaggagtcatccgagctcgagcaaccttttgcccaggatacatcatccgtggggcccgaccggaagttggctgaagaggaggacttgttcgactccgctcaccccgaagaaggcgacctggatctcgcatcagaaagtaccgcccatgctcagagctcgaaggctgactcgcttctggcagttgtcaaacgcgagcctgccgaacagccaggggatggagaacgaacagactgcgaacccgtcgggctcgagcccgccgtagagcagagcagtgctgctagtgaattggccgaagcgtccagtgaggagttggcagaagcccccacagaggctcccagccccgaggccagagatagcaaggaggatggacgcaagtttgactttgacgcctgcaacgaagttccaccagctccaaaagagtcatctacctcagagggggcggaccagaagatgagtagctttaaagaggagaaagatatcaagcccatcatcaaagacgagaagggcagagttggttctggctctggacggaacctgtgggtgagcggactgagcagtactaccagagcgactgacctgaagaacctgttcagcaagtacggcaaagtggttggcgcgaaggttgtaaccaatgccagatcaccaggggcaaggtgttacggcttcgtaactatgagtaccagcgacgaggcaaccaagtgcatcagccacctgcaccggaccgagctgcatggccgcatgatctcagtggaaaaggccaaaaacgagcccgccggaaaaaaattgtctgatcgaaaagagtgcgaggtgaaaaaggagaagctatccagtgtcgacagatag

SEQ ID NO: 133492 - DNA, 606 bp, synthetic construct
  misc_feature 1..606: note = Description of Artificial Sequence: Synthetic coding sequence
  source 1..606: mol_type = other DNA
atggccgaaactgggacacgacgactgtccgagcttagagtgattgatctccgagccgagctgaagaaacggaacctcgacaccggagggaataagagcgtcctgatggagagattgaagaaggcagttaaagaggaagggcaagatcccgacgaaattggcatagaactggaagcgacttctaaaaagtctgccaaacggtgcgtgaaggggttaaagatggaggaagagggcacagaagacaatggtcttgaggatgattcccgcgacggtcaggaagacatggaagcgagtcttgagaatctgcagaatatggggatgatggatatgagcgtactggacgagacagaagtggccaattcctccgcccccgactttggcgaggatgggactgatggcctgctcgacagtttttgcgactctaaagaatacgtcgccgcacagctgagacagcttccagcccaaccaccagaacatgccgtcgacggagagggcttcaagaatacacttgaaacctcctcactcaacttcaaagtgactccagacattgaggaatctcttctggaacccgggacggataaaagaaacaccacagtgatggtctag

SEQ ID NO: 133493 - DNA, 1821 bp, synthetic construct
  misc_feature 1..1821: note = Description of Artificial Sequence: Synthetic coding sequence
  source 1..1821: mol_type = other DNA
atgaaggtgagatccgcaggcggtgatggcgacgccctgtgcgttaccgaagaggacctggctggagacgacgaggatatgccaacattcccctgcacccagaaaggtcgccctggaccccggtgtagtaggtgtcaaaaaaacctgagtcttcacaccagcgtaagaatcttgtatctgtttttagctctattgttggtcgctgtggcagtgctggcatccctggtgtttcgaaaggtggactctctgtcagaggacatcagtttaacccaaagtatttatgacaaaaagcttgtgctgatgcaaaaaaatttgcaagggctcgatccgaaggcgctaaacaattgttccttctgccacgaggccggccaactcgggccagagatcagaaagctgcaagaggagctcgaaggcatccaaaagcttctgctggcgcaggaggttcagctggaccagaccctccaggctcaagaggtgctgtctacgacaagtcggcagataagccaggaaatggggtcttgctcattttccatccatcaagtcaatcaatcacttggtctctttctggcccaggtgcgaggctggcaagccaccaccgccggcctggatctgtcccttaaagatctaacccaagagtgttatgatgtaaaagctgcggttcaccagattaatttcaccgtcggccagacctctgagtggattcacggtattcagaggaagactgatgaggagacattaacattgcagaaaatcgttacagactggcagaactacacccggctcttcagtgggctacgcacaacaagcaccaaaactggcgaagcagtgaaaaacatccaggccactttaggggcatcaagccaacgaatcagccagaacagcgagagcatgcacgacctggtccttcaggtgatgggtcttcagcttcaactggataatatctcatcatttctggacgatcacgaagaaaatatgcatgatctacagtatcatactcactacgcccagaaccgaactgttgagcggttcgaatcattagagggtcggatggcaagccacgagatagagataggaaccatatttacgaacattaacgccacagataaccatgtacactctatgctgaaatacctcgacgacgtccgcctgtcctgcaccctggggttccacacacacgcggaagaactatattatctcaacaagagcgtgagtatcatgctgggtaccacagatctgctgcgggaacggttttccctgctgtcagcccgtctggacctgaacgtccgtaacctatccatgatcgtagaggagatgaaagcggtggacactcagcacggcgagattctgcggaacgttacaattttaagaggagcccccggaccccctggccctcgagggtttaagggagacatgggagttaagggtccagtgggcggccggggccccaaaggagacccgggcagtcttgggccattgggtccccagggaccccagggccagcccggcgaggctgggccagtgggagagagggggccagtcggacccaggggcttcccaggactgaaaggttcaaagggcagctttgggaccggcggccctagagggcagcccgggccaaagggagacatcggcccacctggtccggaggggccccctggatcccccgggccatctggcccccaggggaaacctggtattgcagggaagacggggagtcctggccaaaggggagcaatggggcccaagggagagcccgggattcagggtccccccggccttcctgggccacccggccccccgggatcccagtccttttattag

SEQ ID NO: 133494 - DNA, 1401 bp, synthetic construct
  misc_feature 1..1401: note = Description of Artificial Sequence: Synthetic coding sequence
  source 1..1401: mol_type = other DNA
atgaaggtccgtagcgctggcggagacggagacgccttatgtgtgactgaagaggacctggccggcgacgacgaagatatgccaacgtttccatgcactcaaaagggtaggcccggccctcgctgtagtaggtgccagaagaacctctcactgcacacgtctgtccggattctgtacctttttctcgctctcctgctcgttgcggtggcagtattggcgtctctcgtttttagaaaagtggacagtctttccgaagatatctcccttacacaaagcatttatgacaagaagctcgtgctcatgcagaaaaatcttcaggggctagatccaaaggccctgaacaactgttcattttgccacgaggctggtcaacttgggccagaaatccggaagctccaagaggaattggaagggatccagaagctactgctggcccaggaggtgcagcttgatcagaccttacaggcccaggaagtgctctccacgacctcacgacaaatcagccaagaaatgggttcctgctccttctccatccaccaggtaaaccaatcactgggactgtttcttgcccaggtcagaggctggcaggcaacaacggcaggcctcgatctatccctgaaggacctgacgcaggagtgttacgacgtcaaagccgcagtccatcagatcaatttcactgtcggtcagactagcgagtggatccacggcattcagcgtaagacagatgaggagaccctaactctacagaagatcgttaccgactggcagaattacactaggctgttctcaggactgaggacgacgagtactaaaactggcgaggctgtcaagaatatacaggccactcttggtgccagttcccagcgcatcagccagaattctgagagtatgcatgacctcgttctgcaagttatgggcctgcagttgcaacttgacaatatcagctcatttcttgatgatcatgaagagaatatgcacgatctccaatatcacacccattacgcacagaatcgcactgtcgagagatttgagagtctcgagggcaggatggcatcccacgagatagaaataggcactatttttactaacattaacgccacagacaaccacgttcacagtatgctgaaatacctggacgatgtgcgtctctcctgcacgttaggctttcatactcacgccgaagaattgtattacttgaataaatctgtgagtataatgctgggaaccactgatctgttaagggagcgattctcactactctcagccaggctggatcttaatgtgcgaaacctgtccatgatcgtagaagaaatgaaagctgtggacacgcagcacggggagatcctgcgcaatgttacaattttgcggggccacacccttttctcacacaatcgtatatag

SEQ ID NO: 133495 - DNA, 1008 bp, synthetic construct
  misc_feature 1..1008: note = Description of Artificial Sequence: Synthetic coding sequence
  source 1..1008: mol_type = other DNA
atgggtaggtgctgcttttataccgctgggaccttgtccctccttctactggtaacgtcggtcactcttttagttgccagggtcttccagaaggcagtcgaccagtctatcgagaaaaaaattgtgctgcgcaacggcacagaagcctttgacagctgggagaagccaccacttcccgtatacacacagttctatttctttaacgtgaccaacccagaggagattctgagaggtgaaacgcctcgcgtagaagaagtggggccatacacctatcgcagccttgattggtggatcacagacaaatgcaacatgattaacggaactgatggcgactcttttcaccccctcataaccaaggacgaggtgctctacgtcttcccttctgatttttgccgaagcgtctatatcaccttttccgactacgagagcgtgcaggggctgcctgccttcaggtacaaagtgcctgccgagattttggctaatacaagcgataatgctggtttctgtatccctgaaggaaattgcctggggagtggagtcctgaatgtgtctatctgtaagaacggtgcaccgattatcatgagcttcccgcacttctaccaagctgatgagcgctttgtttccgccattgagggcatgcaccccaatcaagaggaccacgagacatttgtggacattaatcctttaactggcatcatactgaaggcagccaaacggttccagatcaatatatacgtcaagaagctggacgatttcgtggaaactggggacatccgcaccatggttttccccgtcatgtacctcaacgagtctgtccacattgataaagagacggcctcacggcttaagtccatgatcaatactacactcataattactaatataccttacataataatggccctcggtgtcttcttcggactggtgtttacctggttggcgtgcaaaggacaaggatctatggacgaggggaccgcagacgagcgtgctccgctgattagaacctag

SEQ ID NO: 133496 - DNA, 1530 bp, synthetic construct
  misc_feature 1..1530: note = Description of Artificial Sequence: Synthetic coding sequence
  source 1..1530: mol_type = other DNA
atgggatgttccgccaaagcccggtgggcggccggcgccctcggagtggctggcttgctttgcgcggtgctgggcgctgttatgatcgtgatggtgccgtctcttataaaacagcaggtcttaaagaatgtgagaatcgatccatcctcgcttagcttcaatatgtggaaggaaattcccattcctttctacctttctgtgtatttctttgatgttatgaacccatcggaaatcttgaaaggtgaaaagccacaggttagggaaagaggcccctacgtgtaccgggaattcaggcacaagtcaaatatcaccttcaataacaacgataccgttagctttttggaataccgaacctttcagtttcaaccaagcaagtctcacggcagcgaaagcgactacatcgttatgccaaacattttggtgctgggggccgcagtaatgatggagaacaaaccgatgacactgaagttgatcatgacactcgcatttaccacgttgggggagcgcgctttcatgaaccgcactgtcggagaaatcatgtggggatataaagaccctctggtgaacctcatcaacaagtactttccgggaatgtttccattcaaggataagttcggattgttcgccgagcttaacaatagtgattccgggctcttcaccgtgtttaccggagttcagaacatttctagaatacatctggtggataaatggaatgggctatctaaagttgacttctggcactctgatcagtgtaatatgatcaatgggacctccggtcaaatgtggcccccctttatgacccccgaatcatcactggaattttacagtccagaggcatgcagatccatgaagctgatgtacaaggaatccggcgttttcgagggcatccctacctatagatttgtcgcccccaagaccctctttgccaatgggagcatttatccacccaacgaaggattctgcccgtgcctggaaagcgggatacagaacgtatctacctgccgcttttctgcaccactatttctaagtcatccccacttcctgaacgccgatccggtgttagctgaggccgtcacaggccttcatccaaaccaggaggctcattccttattcctggatatacacccagtcacaggcatacctatgaattgttccgtcaaactgcagctgagtctgtatatgaaaagtgtggcaggtatcggccagaccgggaagatcgaacccgtcgtgctgcctctgctctggtttgctgagagtggtgccatggagggagagaccctgcacaccttttatacgcaactagtgctgatgcctaaggtgatgcattatgctcagtacgtactgctcgctctcggttgcgtgcttctcctggtgccagtcatatgtcaaattagaagccaggaaaaatgctatctgttctggtcgtcatcaaagaagggttcgaaagacaaggaagccattcaggcatattctgaaagcctgatgaccagcgctcctaagggctcagttcttcaggaagctaagctgtag

SEQ ID NO: 133497 - DNA, 1521 bp, synthetic construct
  misc_feature 1..1521: note = Description of Artificial Sequence: Synthetic coding sequence
  source 1..1521: mol_type = other DNA
atggggtgctctgctaaggcacgctgggctgctggggccctgggggtggccggtctcctttgcgctgtgcttggcgccgtaatgatcgtgatggtaccttccctgatcaaacagcaggtcctgaaaaacgtgaggattgacccatcgtctctctcattcaacatgtggaaggagatacctattcccttctatctgagcgtctatttttttgacgtgatgaatccatcggaaattctgaaaggagagaagcctcaggtgcgggagcggggcccttatgtgtatagggaatttcgtcataaatctaatattaccttcaataataatgatacagtctcctttctggagtatagaaccttccagttccaaccatcaaagagccacggatccgagagtgactacattgtgatgccaaatatcctggtgctgggggccgcagtaatgatggagaataagcccatgactttaaaactgatcatgaccctggcatttacaacactgggcgagcgtgcgtttatgaacaggacagtgggggaaatcatgtggggttataaggaccctctggtaaatctgattaataaatattttcctggaatgttccccttcaaagataagttcggtctctttgccgagctgaataactctgatagcggcctgtttaccgtgtttactggagttcagaatatcagccgcattcatttggtcgacaagtggaacggcttatctaaagttgatttctggcactctgatcagtgcaatatgatcaacgggacctccggacagatgtggccgcctttcatgacacctgaatcgagcctggaattctactctcctgaggcttgtagaagcatgaagcttatgtataaggaatcaggtgtgtttgaagggatccccacgtatcggtttgtggctccaaaaaccctgttcgctaatggatccatctatccgccaaacgaaggattctgcccatgcttggaatctggaattcagaatgttagcacttgtcgttttagtgcccctctgtttctctcccatccccatttcctaaacgccgatcccgtgcttgcagaagcagtcaccgggcttcacccaaaccaggaagcccattctttgtttctggatattcacccagtaacaggaataccgatgaattgttccgtgaagcttcaactctccctttatatgaaaagcgtggccgggattggacagaccggtaaaattgagcctgttgtgctccctctgttgtggtttgccgaaagcggtgcgatggagggtgagactctgcacactttttacactcagctggtgctcatgccaaaggtgatgcattacgcgcagtatgtgctgctggctctcggctgcgtgctcttgctggtgccagtgatttgtcagatccggagccagggccccgaggatactgtcagccagccaggacttgccgccggcccggatagaccgccctctccgtatacccctctcctgcccgacagcccatccgggcagccaccttcacccacagcttag

SEQ ID NO: 133498 - DNA, 1230 bp, synthetic construct
  misc_feature 1..1230: note = Description of Artificial Sequence: Synthetic coding sequence
  source 1..1230: mol_type = other DNA
atgggctgcagcgccaaagcacgctgggcagccggagccctcggcgtagctggcctgctgtgcgccgtgctgggagctgtaatgatcgtgatggtgccatcactgatcaagcagcaagtgctgaaaggggccgccgttatgatggagaacaaacccatgacactgaagctgatcatgacactggctttcaccaccctgggagaacgtgcctttatgaatcggactgtgggcgagattatgtggggttacaaggacccgttggtgaaccttattaacaaatattttcctggcatgttccccttcaaagacaaattcgggctgttcgctgagctgaacaattctgactcagggctgttcactgtcttcactggtgtccagaatatctctcggattcacttggttgacaagtggaacgggctgtctaaggtggacttttggcacagtgatcagtgcaacatgataaatggtacatccggacaaatgtggccacccttcatgacccctgagagttcgttggaattctacagccccgaggcatgcaggtccatgaagttgatgtataaagaatctggagtcttcgaaggcatccccacctatcgctttgtggccccaaaaacactgtttgctaacggctctatctacccccctaatgagggcttttgtccctgtcttgaatccggtatccagaatgtttcgacgtgcagattctcagcaccactgttcttgagccatccacactttcttaacgccgaccctgtcttggccgaagccgtgacaggcctgcaccctaatcaggaggctcactcgctgttcctggatatccacccagtgacaggcattcccatgaactgtagcgtcaaactacaactcagcctgtatatgaagagcgtggccgggataggacagaccgggaagatcgagccggtggttctcccacttctctggttcgcagaatcgggcgctatggaaggggaaacgctacacacattctacacccaactcgtccttatgcctaaggttatgcattacgcccagtatgtgcttctcgctcttgggtgtgtactcctgttggtgccagttatctgccagattcgatctcaagagaaatgttacctcttttggagctcctcaaagaaggggagtaaggacaaggaggctattcaggcctacagcgaatctctaatgaccagtgcccccaagggaagcgtgctacaggaggctaaattgtag

SEQ ID NO: 133499 - DNA, 1659 bp, synthetic construct
  misc_feature 1..1659: note = Description of Artificial Sequence: Synthetic coding sequence
  source 1..1659: mol_type = other DNA
atggggtgctctgcaaaggctcggtgggctgccggggctctgggggtcgcagggctcctgtgcgccgtgttgggagccgtcatgatcgtaatggtgccttcccttatcaaacagcaggttctcaaaaacgttcgcattgacccttctagtctgtcatttaacatgtggaaagagattccaatccccttttatctgagcgtttacttcttcgacgttatgaatccttctgaaattctgaagggcgaaaaaccccaagttcgcgaacgaggtccatacgtataccgagagtttcgtcataagtccaacatcactttcaacaacaatgatactgtatcgtttctggaatatcgaactttccagttccagccatctaaatctcacgggagtgagtctgactatatcgtgatgccaaacatcctggtgctcggtgccgccgttatgatggagaataagcctatgactctgaagctgatcatgacactcgccttcactacccttggagagcgagcgtttatgaaccgcacggtgggagaaatcatgtggggatataaggatcctttagttaatcttatcaataagtattttcccggcatgttccccttcaaagataagtttggactctttgctgagctgaacaattcagattctggactgttcacggttttcactggggtacagaatattagccgcattcacttggttgacaagtggaatggtctaagtaaggtcgatttctggcactcagatcagtgcaatatgattaacgggaccagtggccagatgtggccgcctttcatgacgccagagagctccctcgagttttattctcctgaagcttgtcgatccatgaaattaatgtacaaagaaagtggagtgttcgaaggaatcccaacatatcggttcgtcgccccaaagaccctgttcgcgaacggttctatatacccacccaatgaagggttttgtccttgtctggaatcgggcatccagaatgtttccacatgtcggttcagcgcacctctgtttctcagccacccgcacttcctaaatgccgacccggtactggcagaggcggtcacgggcctccatcccaaccaggaagcccatagtctgttcctcgatatccatcctgttaccgggattccaatgaattgtagtgtgaagcttcagctttcactatacatgaaaagtgtggccggtatcggccagacaggcaaaatcgagcctgtcgtactgcccctgctgtggtttgctgagtctggagcgatggaaggagaaaccctccataccttctatacccagctggtgctgatgcctaaggtgatgcactacgcacagtacgtgctacttgcactaggttgcgttttgctgctggttccggttatttgtcagattagatcgcaagtcggggctggccagagggcagctcgcgcagacagtcattcacttgcttgttggggaaagggggcgagtgatcgtaccctctggccaaccgctgcctggtcaccccctccggccgctgtcctcaggctttgcagatccggaagcggccactgttggggcctacggtcaaccttggcctccttcgcctgtcgcgtcgcaaccactttgcccgtgttggaggggttgggacctagtctgggaggcggtacaggcagctag

SEQ ID NO: 133500 - DNA, 1551 bp, synthetic construct
  misc_feature 1..1551: note = Description of Artificial Sequence: Synthetic coding sequence
  source 1..1551: mol_type = other DNA
atgtgtgccgttggaaacgtgcgcattgacccttcctccttgtcttttaacatgtggaaagagattcccatccccttttacctgagtgtgtacttcttcgacgtcatgaatccttctgagatactaaagggggagaagcctcaggtaagggagaggggcccgtatgtgtatcgcgaattcaggcataagtcaaatataacttttaacaacaatgatacagtcagtttcctggagtatagaactttccagtttcagccaagcaaatcccacggcagtgagtcagattacatcgtcatgcctaacatcctggtgcttggtgcagcagtcatgatggaaaataaacccatgacactgaaactgattatgacactggcctttaccaccctgggggagcgcgcatttatgaacaggactgtgggcgaaataatgtgggggtacaaagatccccttgttaaccttatcaacaagtatttcccgggcatgtttccgttcaaagataagttcgggctctttgcagaactcaacaactccgatagcggtctgttcaccgtatttacgggtgttcagaatatctctcggattcacctggttgacaagtggaatggcctttcaaaagtggacttttggcacagtgaccaatgcaacatgattaatggaacgagcggccagatgtggcctccttttatgactcctgagagctccttggaattctattcccccgaggcatgtcgcagcatgaaactcatgtacaaagaatcgggtgtgttcgagggtatcccgacttatcgattcgtggctcctaaaaccctgttcgccaatggcagcatctaccccccaaacgaagggttctgtccctgcctagagagtggcatccaaaacgttagcacctgcaggttctccgcgcccctgttccttagccacccccacttcctgaacgcagacccggtgctcgctgaggccgtaaccggattacaccctaatcaggaagctcactctctttttctggatatccacccggttacggggataccaatgaactgttccgtgaagctgcagctctcattgtatatgaaatccgtggctgggattggacagaccggcaagattgagccagtggtactgccactcctgtggttcgccgaaagtggtgctatggaaggggagaccctccatactttctacactcagctggtcttgatgcctaaggtgatgcactacgcgcaatatgtcctgctcgcactcggatgcgttcttcttttggtaccagtcatctgccaaattaggagtcaggttggggctggccagagagctgcgcgcgctgactcccattcactggcttgttggggaaagggagccagtgaccgcacactgtggccaaccgcagcttggagccctcctccggcagcagtgcttaggctgtgcagatccggttcaggtcactgctggggcctgaggagcaccctcgcctcatttgcctgtcgtgtggctacgacccttccagtgttagaaggactcggtccttctttggggggtggtaccggaggtttatag

SEQ ID NO: 133501 - DNA, 1539 bp, synthetic construct
  misc_feature 1..1539: note = Description of Artificial Sequence: Synthetic coding sequence
  source 1..1539: mol_type = other DNA
atgaacgttcgtattgatccgagcagcctgagttttaacatgtggaaggagataccaatcccattctacctatccgtctactttttcgacgttatgaatccctccgagatactcaaaggggagaagccgcaggtgcgggaacgcggcccctacgtgtacagggagttcaggcataagtcaaacatcaccttcaacaataatgatactgtgtccttcttggagtatagaactttccagtttcagccaagcaagagccatgggagtgagtccgactacatcgtgatgccaaatatcctagtgctcggtgcagcggtgatgatggagaataaacctatgactctaaagttaatcatgacgctcgccttcacaaccctgggggagcgtgcctttatgaaccgtaccgtgggagaaatcatgtgggggtacaaagatcctctggtcaacctgatcaacaagtacttcccaggcatgttcccttttaaggacaaattcggcctttttgctgagcttaacaactctgactcaggcctgtttacggtcttcaccggcgttcagaatatctcaaggattcatctcgtggacaaatggaatggcttatcaaaggtggacttttggcactctgatcaatgcaacatgatcaatgggacaagcggtcaaatgtggcccccgttcatgactcctgagagctcgctcgagttttattcccccgaagcttgccggtctatgaagcttatgtacaaggaatccggagtctttgaagggatcccgacatataggtttgtggctccgaaaacactctttgcaaacgggtccatctacccccctaatgaggggttttgtccgtgcctcgaatccggtatccagaatgtgtctacttgtcgattctctgcgcctctgttcttgtcacatccccacttcctgaacgctgatcccgtacttgcggaagcggttaccggattgcatcccaaccaagaagcccacagtctttttctggacatccaccctgtgaccggaatcccgatgaactgtagcgttaagctgcagctgagcctgtacatgaaaagtgtggccgggatcggacagactgggaagatcgaaccggtggttctacctctgctgtggttcgccgaatccggtgcgatggaaggagagacactgcacacgttttacacccaactcgtgctgatgcctaaggttatgcattacgcccagtatgtcctccttgctctgggatgcgtattgctgctggtgccagtgatctgccagattagatcgcaggtgggggctggccagcgtgctgcccgggctgacagccactctctggcttgttggggaaagggcgcctcagacagaaccttatggcccactgcagcttggtcacctccaccggcagccgtgttgcgactgtgccggagcggatcggggcactgctggggcctccgctctacactggcctcctttgcatgccgagtggctactacactgccagtcctggaagggctcggccccagcctgggaggcgggactgggggcttgtag

SEQ ID NO: 133502 - DNA, 441 bp, synthetic construct
  misc_feature 1..441: note = Description of Artificial Sequence: Synthetic coding sequence
  source 1..441: mol_type = other DNA
atggggtgttctgcaaaggccagatgggcagccggggctcttggtgtggccggactcctttgcgctgtacttggagcggtgatgatagtcatggtgccaagtctcattaagcagcaggtgctgaagaacgtgcgaattgatccctcttctctcagcttcaatatgtggaaagaaatccctatccccttctacctgtccgtgtatttcttcgatgtgatgaatccatcagaaattcttaaaggcgaaaagccccaggtcagagaacgcggcccatacgtgtatagggaatttaggcacaagagtaacataacgttcaataataacgatacagtgtcattcctagaataccgtactttccagtttcagccgagcaagtctcatggctctgaatccgactacatcgtcatgcccaatatcctcgtcctagtgcgactcccttag

SEQ ID NO: 133503 - DNA, 1446 bp, synthetic construct
  misc_feature 1..1446: note = Description of Artificial Sequence: Synthetic coding sequence
  source 1..1446: mol_type = other DNA
atgggatgtagcgcaaaggcccggtgggctgcaggagctctaggggtggcaggcctactgtgcgctgtgctgggcgccgtcatgattgtcatggtcccctctcttatcaagcaacaagttctgaagaacgtgcgcatagacccttccagtttgtcatttaatatgtggaaagaaatccctatcccattctacctatcggtttatttcttcgatgtgatgaacccctcggaaattctgaaaggcgagaagccacaggtgcgggaacgtggtccctatgtgtatagggaatttagacataagtcaaatattaccttcaataacaacgataccgtgtccttcctggaatatcgaactttccagttccagccctctaagagccacgggagcgaatccgactacatcgttatgcccaatattttagtgctcggcgccgcggttatgatggaaaataaacccatgactctgaagctaatcatgaccttggcttttacaactctgggcgagcgagccttcatgaatcggaccgtaggcgagataatgtggggatataaggatccgctggtgaatctgattaataaatattttccaggcatgtttccctttaaggacaagttcggcctctttgctgaactgaacaacagcgatagcggcctcttcacagtcttcaccggggtgcaaaacatttcaaggatacatctagtcgataagtggaacgggctgagtaaagtcgacttctggcactctgaccaatgcaatatgattaacggcacatccggacagatgtggcctccattcatgacccccgaaagtagccttgagttctattcacccgaagcctgtagaagcatgaagttgatgtacaaggaaagtggagtgtttgagggtatccccacataccggtttgtggcacccaaaactctgttcgccaatggcagcatttacccgcccaatgaaggattttgcccttgcctggagagtggcatccagaatgtgtctacctgtagattcagtgcgcccctgtttctgagccatcctcacttcctcaacgccgaccccgtgctcgcagaggccgtgacaggcctgcacccaaatcaggaagcccatagcctgtttttggacattcaccctgttactggcattccaatgaactgttccgttaagctgcagctgtctttatatatgaaaagtgttgctggaatcggccagactggcaagatagagcccgttgtgctgcccttactttggtttgccgagagcggagcaatggagggagaaaccctgcacactttctatacccagttggttttaatgcctaaagagaaatgttatctgttttggagcagcagcaaaaaaggctccaaagataaggaggctatacaggcctactccgaaagcttgatgaccagcgctccaaaggggtccgtgctgcaggaggccaagctgtag

SEQ ID NO: 133504 - DNA, 1437 bp, synthetic construct
  misc_feature 1..1437: note = Description of Artificial Sequence: Synthetic coding sequence
  source 1..1437: mol_type = other DNA
atgggacgttgctgtttttacaccgccggcaccctgtctcttttgctcctggtgactagtgtcacgcttttagttgccagggtgttccagaaggcggtcgatcagtcgatcgaaaagaagattgtgttaaggaatggcactgaggcctttgacagttgggagaagccacctctgcccgtctacacacagttttatttcttcaacgttaccaacccggaggagatcctgcgaggtgagacacctcgcgttgaagaagttggcccttacacctatcgcgagctgcgtaacaaggcaaatatccagtttggggacaatggaacgactatcagcgcagtatcgaacaaggcatatgtcttcgagagagatcagagtgttggggaccccaagatagatctgatccgaacactgaacatcccagtgttgactgtcatcgaatggtctcaggtgcactttcttcgggaaataatagaggccatgttaaaagcctatcagcagaagctgttcgtgactcataccgtggacgaattgctatgggggtacaaggacgagatcctgagtctgattcatgtttttaggcccgacatcagcccgtactttggcttgttttacgagaagaatggtacaaatgacggggattacgtttttttaaccggggaggacagttacctcaattttaccaagatcgtggaatggaatggcaaaacttcacttgattggtggataacagataagtgtaacatgatcaacggtactgacggcgatagtttccaccctctaattactaaagacgaggttctgtacgtgttcccttcagacttctgcaggtccgtctatattacattctccgattacgagtctgtgcaggggctgccagcattcagatacaaggtccccgccgagattctcgcaaataccagtgacaacgcgggcttttgtatccctgagggcaactgtctgggctccggagttcttaacgtgtcaatctgcaagaatggtgctcctattatcatgagttttccacacttctatcaggcggatgaacggtttgtcagtgctatcgaaggcatgcaccccaaccaggaggatcacgaaacttttgtcgatattaaccccctgacaggaatcattctgaaagctgccaagagattccagatcaatatctatgtgaagaaactggacgatttcgtggagaccggcgacattcgcaccatggtctttcctgtcatgtatttgaacgagtcagtgcacatagacaaggagaccgcaagtcgcttgaagtccatgattaatactaccctgataatcaccaacattccgtacattataatggccctcggtgtattcttcggcttggtgttcacctggttggcctgcaaggggcaggggtctatggacgagggcaccgccgatgaaagagcgccacttatcagaacttag

SEQ ID NO: 133505 - DNA, 1710 bp, synthetic construct
  misc_feature 1..1710: note = Description of Artificial Sequence: Synthetic coding sequence
  source 1..1710: mol_type = other DNA
atgggcctgggcctcctcctgccgctccttctgctgtggactaggggcacgcaaggaagcgaattagaccccaagggccagcacgtttgcgtagcctcaagtccatctgctgaactccagtgctgcgccgggtggcggcagaaggaccaagagtgcaccattccaatatgtgagggtccagatgcttgtcagaaagacgaagtttgcgtaaagcccggtctttgccggtgcaaacctggcttctttggcgcccactgttcatcccgttgccctggtcaatattgggggcccgactgtcgcgagtcttgtccgtgtcatccccacggacagtgcgaaccagcaaccggtgcttgccagtgtcaggctgaccgctggggagccaggtgcgagttcccatgcgcttgcggcccccacggcaggtgtgatccggccaccggggtgtgccactgcgaacccgggtggtggtctagcacgtgtaggcgaccttgccagtgtaatactgcggccgcaaggtgtgaacaagcgacaggagcttgcgtatgcaagcctggttggtgggggaggcgctgttcattccggtgcaattgccatggcagcccgtgcgagcaggattctggtagatgcgcctgtagacctggttggtggggcccggagtgccagcaacagtgcgagtgtgtccgaggccggtgtagcgccgcctctggggaatgcacttgccccccaggtttcaggggagcccgatgtgaattgccttgtcctgctggcagccacggagttcaatgtgcccattcctgtggtcgatgcaaacataatgagccttgtagcccggatactggatcgtgtgaatcatgcgagccaggctggaatggtacccagtgtcagcagccttgtttaccaggcacctttggggagtcttgtgagcagcagtgtccacactgcagacatggcgaagcctgcgagcctgatacagggcactgtcagcggtgtgaccccggctggctcgggcctaggtgtgaggacccctgccctacaggcaccttcggggaggattgtgggagtacctgtcccacttgtgttcaggggagctgtgatacagtgacaggcgattgtgtatgttcggccggctactggggcccttcctgcaacgctagctgtccggcaggatttcacggtaacaactgtagcgtgccgtgtgagtgtcccgaaggattgtgtcacccagtgagcgggtcatgccaaccagggagcgggagcagggacacagcactgattgctggctcactggtgccactattgctcctctttttgggactggcttgctgtgcctgttgctgttgggcacctcggagtgatctgaaggatcgaccagctcgagacggtgctactgtgtcccgtatgaagctccaggtctggggtacactcacatctctgggctccacactgccttgccgcagtctctccagccacaagttaccatgggtgactgcctcatcttccagacccctgcctgctggacccctgatgaccccttcccaccccattctcagcctggagcgccagatgaggtttctgccaaccgtctgccaccccaagaagggctggagcctctggcctaggcagggtcgtcagcgacccgcctggttgcaggtattgtctcggccacttcgaacaccccctcgccatagtcccagccgtgccccaccagcgtag

SEQ ID NO: 133506 - DNA, 2613 bp, synthetic construct
  misc_feature 1..2613: note = Description of Artificial Sequence: Synthetic coding sequence
  source 1..2613: mol_type = other DNA
atggagggtgccggccctaggggcgcaggacccgcacgccggaggggagctggcggacctccctcccccctgctgccgagtttgttactgctattgctactgtggatgttgccagacaccgttgccccacaggagttgaacccgcgcggacgcaacgtgtgtagggcccctggttcacaggtgcctacctgttgtgcagggtggagacagcagggagatgagtgtggaatcgccgtgtgcgagggtaactctacttgttctgaaaacgaagtttgcgtgagaccaggagagtgtaggtgccggcacggctattttggggcgaactgcgacaccaagtgtccacggcagttttggggccctgattgcaaagagttatgttcttgtcacccccatggccagtgtgaggacgtgactggccagtgtacttgccatgccagacgttggggagccagatgcgaacatgcttgtcagtgtcagcatggcacctgccatccccgcagcggggcatgccggtgtgagccaggttggtggggcgcccagtgcgcttccgcgtgttactgcagcgccacttctcgctgcgatcctcaaactggcgcttgtttgtgccacgccggctggtggggaagaagctgtaataatcaatgtgcatgcaatagctctccatgtgagcagcagagtggccgttgccagtgtcgagaacgtacgttcggcgcccgttgcgaccgctactgtcagtgcttccgcgggcggtgccacccagtagatggcacttgcgcgtgcgagccagggtacagaggtaaatattgccgggagccctgtccagctggcttttatgggctcggttgtcgtcgacggtgcggccaatgtaaaggtcagcaaccctgtaccgtcgccgagggccgatgccttacttgcgaaccaggctggaacggcactaaatgtgatcaaccttgtgctacaggattttatggagaagggtgctcgcatcggtgccccccatgtagagatggccatgcatgcaaccatgtcactgggaagtgcacgagatgtaatgccgggtggattggggacagatgcgagaccaagtgctctaacggtacttatggcgaggattgtgcatttgtgtgcgctgactgcggatcaggacactgcgatttccaatctgggcggtgtttgtgcagcccaggagtacacggcccccactgcaacgtaacgtgtcctcccggacttcacggggccgactgtgctcaagcatgttcttgccacgaggacacatgcgaccccgttacgggcgcttgccatttagaaactaaccaacgtaaaggggtgatgggggcaggggccctgctcgtcctactggtgtgcctcctgcttagcctgctcggttgctgctgcgcttgtcgtggtaaagaccccacacgaaggccgcggccacgccgcgaattgtcccttggacgcaagaaggccccacacaggctatgcggccggttttcaagaatatctatgaaactgcctcgcattccactgagacgccagaaactccccaaggtagtcgtggcgcaccacgacctggacaatactcttaactgcagctttcttgagccacccagcggcttggaacagccgtcaccatcttggagctcgcgggcatccttttcaagcttcgacaccacagatgagggcccggtctactgcgtgccccatgaggaggcccctgctgagagcagagacccagaagtccccactgtgcctgccgaagctcccgcaccctcaccagtgcctctcactacacctgcatctgctgaagaggccatcccgctcccagcttccagtgactcggagagaagcgcctcttctgtcgagggcccagggggcgcactttacgccagggtcgcacgacgcgaggccagaccggccagagcccgtggcgagatcggcggtctgagcctttccccaagtcccgagagaaggaaacctccacctccagatccggcaacaaagccaaaagtgtcctggattcacggcaagcacagtgcagccgccgccggtagagcacccagccctcccccacccgggtccgaggcagcgccctctccatcaaaacgcaagcgaacccccagcgacaagtcagctcacacagtggagcacggtagtccacggacccgcgatcccactccccgcccgcccgggctgccagaagaggccaccgcccttgcagctccatctccaccaagagccagggcacgggccgcccctaggcctttaggcgctcatggaagacgccggtctccagcaaagcgagctgaggctgctagcatgcttgccgccgacgtaaggggtaaaacccgcagtctgggccgtgcagaggtggctcttggggctcaaggtccgagagaaaaaccagcacctccgcagaaggccaaaagatcggtcccacccgcttctcccgcaagggcccctccggccaccgaaactccaggaccagagaaggctgctacggatctgcctgcaccggaaacaccccgaaaaaagactcctattcagaaacctccgcgaaaaaagagtcgcgaagccgccggtgagctcgggcgtgccggagctcctaccctttag

SEQ ID NO: 133507 - DNA, 2493 bp, synthetic construct
  misc_feature 1..2493: note = Description of Artificial Sequence: Synthetic coding sequence
  source 1..2493: mol_type = other DNA
atgggtctggggctgttgctgccgctgctgttactgtggacacgcgggacacagggctctgagctcgatcctaagggacagcacgtgtgcgtggcctcctccccgagtgccgagctgcagtgttgtgctggatggcgccaaaaagatcaagaatgcacaattcctatttgcgaaggaccagatgcttgtcagaaggacgaggtgtgcgttaagcctggcctttgtagatgtaagccaggattttttggggctcattgctctagcagatgccctggacaatactggggccctgactgtagagagtcctgcccatgtcatccccatggccagtgcgagcctgccacgggagcatgtcagtgtcaggccgaccggtggggggccaggtgtgagttcccgtgtgcctgcgggccacatggaaggtgcgatccggcaacaggagtgtgccactgcgagcccggctggtggtcctccacgtgccggcggccatgccagtgtaataccgccgcagctcggtgtgaacaggctacgggtgcgtgtgtgtgcaaacctggctggtggggacgccgatgcagctttcgctgcaactgccacgggtccccttgtgaacaggatagcggcaggtgcgcatgtagacccgggtggtggggacccgagtgtcagcagcaatgcgaatgtgttcggggccgctgttctgcggcctctggggaatgcacgtgtccgcctgggttccggggcgccaggtgcgaattgccttgtccagctgggtcccatggcgtgcaatgcgctcattcctgcggtagatgtaaacacaatgaaccatgttctcctgacaccgggagctgtgagagctgcgaacctgggtggaacggcacccaatgtcagcagccctgtttgcctggtacctttggtgagtcatgcgagcaacagtgtcctcactgtcgccacggtgaggcttgcgaacccgacacagggcactgccagcggtgcgatcctggatggctgggccccaggtgtgaagatccttgtcctaccggcacgtttggtgaagattgtggatctacctgtcccacgtgtgtacaagggagctgcgatacggttaccggcgactgcgtctgttctgctggatactggggcccaagctgcaacgcgtcttgtccagcaggattccacgggaataactgcagcgtgccgtgcgaatgtcctgaaggcctgtgtcatcccgtttccgggagctgtcagcccgggtctggctctagggatactgcccttatcgccggaagtctagtgccattgctgctgttgttcttaggcctcgcctgctgtgcatgttgctgttgggccccgcgatctgatctgaaagaccgtcccgcaagggatggcgctactgtctcccggatgaagttacaggtgtggggtacacttacttcgctgggatccaccttgccctgcagatccctgagttcgcacaagttaccttgggtcacagtgagccatcatgacccggaggtgccgtttaatcatagctttatcgagccaccctccgctggctgggctaccgatgatagtttctcatccgaccccgagagtggcgaagccgatgaggttccagcctactgtgtgccgccacaagagggcatggtgccagtggcccaggcggggagtagcgaggcctctcttgccgccggtgcctttccgcccccggaagacgcaagcacccccttcgcgatccctcggacatccagcctagcccgagcgaaacgaccatcagtgagctttgcagagggaacgaagtttgccccacagtcacgccggagcagcggcgaactgagtagtccccttaggaaaccaaagaggctatccaggggggcccagagcggccccgaaggacgggaggcagaagagtcgaccggcccggaagaagcagaagcgcccgaatcatttcctgcagctgcaagccctggcgattccgccactggtcaccggaggcccccgctggggggaaggactgttgcggaacacgtggaggccatagagggatcagtccaagagagcagtgggcccgtcactacgatctacatgcttgctgggaaaccacggggctctgaggggcctgtccggtctgtattccgacacttcggctcatttcagaaaggacaggccgaggctaaggtgaagcgggcaatcccgaaacccccacggcaggcacttaaccgcaagaagggatctccggggttggcttctggatcagtcggacagtccccaaactcagccccaaaggcaggccttcctggcgcgacaggtcccatggctgtgcggcctgaggaggctgtgagaggattgggagctggaaccgaatcttctcgtcgagcacaagaaccggtgagtggatgtggcagtccagagcaggacccacagaaacaagccgaagaagaacgacaggaggagcccgagtatgagaacgttgtacctatctcccggcccccagagccctag

SEQ ID NO: 133508 - DNA, 2235 bp, synthetic construct
  misc_feature 1..2235: note = Description of Artificial Sequence: Synthetic coding sequence
  source 1..2235: mol_type = other DNA
atgggcctcggactgctcctcccattgcttctgttgtggacccgagggacacagggaagcgagcttgatcctaagggtcaacacgtgtgtgtagccagctcaccttctgcggaattgcagtgctgtgctggttggaggcagaaggatcaggaatgcactatcccaatctgtgaggggcccgatgcttgccaaaaggacgaggtttgcgttaaacccgggttatgtcgatgcaaacctgggttcttcggcgcacactgttcctcacgctgtccagggcagtactggggccccgactgtagggaaagctgtccctgccatccacatggccagtgtgagcccgccaccggagcctgtcagtgccaggccgacaggtggggtgcacgatgcgaattcccctgcgcatgcggcccgcatggaagatgtgaccccgcgaccggcgtctgccactgtgagccaggatggtggagttccacatgtcggagaccctgtcagtgtaatactgccgctgctagatgtgagcaggcaacgggtgcctgcgtctgtaaaccagggtggtggggccgcagatgctccttccgctgcaattgccacgggagtccctgcgagcaggatagcggccgctgtgcgtgccgtcctggatggtggggccccgagtgccaacagcagtgcgaatgcgtccgcggccgctgctccgcagcctcaggtgagtgcacttgcccaccgggctttcgcggcgcacgatgcgaattaccttgtccagcggggtcccacggtgtgcaatgcgcccactcatgtggaagatgcaaacataacgagccttgcagtccagatacaggttcatgcgagtcctgcgagcccggctggaatgggactcagtgtcagcaaccttgtctgccaggtacatttggcgagtcatgcgaacaacagtgcccccattgccggcacggagaagcctgcgaaccggatactgggcactgccagcggtgctcaggatcccgcgacactgcactgatcgccggatccttggttccccttttgttgctgtttctgggtctggcgtgttgtgcatgttgttgctgggccccacgatctgatctcaaagacagaccagctagagacggggccacagtgtcccgcatgaagcttcaagtttgggggacactaactagcttgggctcaacgctaccatgcaggtcactgagtagccacaagctgccatgggtgaccgtttcgcatcacgatcctgaggtgccttttaaccactcctttatcgaacctccaagtgccggatgggcgacggacgatagcttttcgagtgatccggaatccggagaggcggatgaggtaccagcatactgcgtgcccccacaggagggcatggtgcccgtggcccaagcaggttccagtgaggcaagcctcgcagcaggagccttccccccgccagaggacgcatcaaccccatttgccattccgcggacttcttccttggccagggctaaacgaccgagtgtgagttttgcagaggggacgaaattcgcccctcaaagcagacggagcagcggagaacttagtagccccctccgaaaaccaaaacgcttaagcagaggcgcacaatcagggcccgagggaagagaagccgaagagagtacaggtcctgaagaggctgaagctccagaatcctttccggccgctgcaagtccaggtgattccgcaacagggcaccgtaggccgcccctgggaggtagaacagtagcggaacatgtcgaagccatagaggggtctgtgcaggaatcatctgggcccgtgaccacaatatacatgctggccggcaagccccgggggtcggagggacccgtaagatcagtgttcagacacttcgggagtttccaaaaaggccaggccgaagctaaagtcaaaagggccattccaaagcccccacgccaagccttgaatcggaaaaagggctccccgggactcgcttcgggttccgtggggcaatcacctaacagcgcacctaaagccggcctgcccggcgctaccggcccaatggccgtgcgccccgaagaagctgtcaggggcctgggcgctgggaccgaaagttcccgccgagcacaagagcccgtcagtggctgtggtagtcccgagcaggaccctcagaaacaggccgaggaagaacggcaggaagaacctgagtacgaaaatgtggtgccaatttcccgtcctccagaaccgtag

SEQ ID NO: 133509 - DNA, 1710 bp, synthetic construct
  misc_feature 1..1710: note = Description of Artificial Sequence: Synthetic coding sequence
  source 1..1710: mol_type = other DNA
atgggcctggggctcctcctgcctttgctgttgttatggaccaggggaacccagggatctgaactagacccaaagggccaacatgtttgcgtggcgtcctccccttctgccgaactgcagtgttgtgccggctggaggcagaaggatcaggagtgcaccattcccatttgcgaggggccagacgcctgccaaaaagatgaggtttgcgtgaagccaggcttatgtcgctgtaaacctggcttcttcggtgcacattgtagctcaaggtgcccgggacagtattggggaccagactgcagggagtcttgcccgtgtcacccgcacgggcagtgtgaacctgccactggcgcctgtcaatgccaagccgacagatggggggctcggtgcgagttcccttgtgcttgtgggccccacggacgctgcgaccccgctaccggagtgtgtcattgcgaacctggctggtggtcctcaacatgccgaaggccctgccaatgcaacacggcagccgctagatgtgaacaggcaacgggagcttgtgtgtgcaaacctggctggtggggccgaaggtgttcctttcgctgcaattgccacggtagtccgtgcgagcaggactccggcaggtgcgcctgcagacccggttggtggggaccagagtgtcagcagcaatgtgagtgcgtgcgggggcgctgttcagctgcttccggggaatgtacttgtcctcccggttttagaggagcacggtgcgagctcccatgccctgcgggatcacacggcgtccagtgcgctcactcatgcggacggtgtaagcataacgagccatgtagtccagatacaggctcctgtgaaagttgcgagccaggctggaatggtacacagtgtcaacagccgtgtttgccaggcacgttcggggaaagttgcgagcagcaatgtcctcattgtcgccacggggaggcatgcgagcccgacaccgggcactgtcagcgttgtgatcccggatggctgggcccgcggtgcgaagacccctgcccaactggtactttcggagaggattgtgggtcgacctgcccaacatgtgtccagggaagttgcgacactgtcaccggagattgtgtttgcagcgcaggatactgggggccctcctgtaatgcttcttgtccagccggctttcacggtaacaactgtagtgtcccttgcgagtgtccagaggggctttgccacccagttagcggtagctgtcaaccaggctccggatcacgggacacagccctaatcgctggcagtctcgttcccttgcttctcttgttcctgggtctggcctgctgtgcatgctgttgctgggcgcccagatcagacctcaaggatcgcccagctcgtgacggcgccaccgtgtccaggatgaaactgcaagtctgggggactctcacctctttgggatccactcttccatgcagatcccttagcagtcacaagcttccttgggttactgctagctcatctcgtcccctgcctgccggccctctgatgacccctagccatcccatcctctcgctcgagcggcagatgcgatttctacctacagtgtgccaccccaaaaagggctggtcactttggccgcggcaggggaggcaacgccccgcctggctccaggtcctgtcacgcccactgcgtacaccacctaggcacagcccatctagggcccctcccgcatag

SEQ ID NO: 133510 - DNA, 2595 bp, synthetic construct
  misc_feature 1..2595: note = Description of Artificial Sequence: Synthetic coding sequence
  source 1..2595: mol_type = other DNA
atggaaggggctggaccgcgaggggcgggcccagcccggagaaggggggccgggggacctccctccccactcctgccctcacttctgctcctattacttctatggatgctcccagacacagtggctccacaggagctgaacccccgaggacgcaatgtgtgccgggctccgggctcacaggtgccaacctgttgcgccggatggcggcagcagggtgatgagtgtgggatcgccgtgtgcgaagggaactctacctgttctgaaaacgaggtttgcgtgagacctggcgagtgccgctgcaggcacggatactttggcgctaactgtgacaccaagtgcccacggcagttctggggtcccgactgtaaggagttgtgctcctgccacccgcacggtcaatgcgaggatgtgactggccagtgtacgtgtcacgcccgaagatggggggcgcgttgtgagcatgcctgtcagtgtcagcacgggacttgccacccccggtcaggggcatgtaggtgtgagccgggttggtggggtgcccagtgtgcctcagcatgctactgctcggcaacttcccggtgcgacccccagacgggcgcctgcctgtgtcatgccggctggtggggcagatcctgtaataaccagtgcgcatgtaattccagtccatgtgagcagcaaagcggtcgatgtcagtgtcgcgaaagaacttttggagccaggtgcgatcgttattgccagtgctttcggggaaggtgtcaccctgtagacgggacctgcgcctgtgagccaggttacaggggtaagtactgccgcgaaccttgtccggcgggtttctacggcctggggtgccggcgcagatgcgggcagtgtaaaggacaacaaccttgtaccgtagcagagggtagatgcctcacatgcgagcctggctggaacgggaccaaatgtgaccaaccatgcgcaacaggtttctatggggagggttgctcacatcggtgtcctccctgccgggatggccacgcatgcaatcatgtgacaggaaagtgtacgcggtgcaatgccggatggatcggcgacaggtgtgagacaaaatgtagtaacggaacttacggggaagactgcgcctttgtttgtgctgactgtggaagcggtcattgtgatttccagtccggaagatgcctctgcagcccaggcgtgcatggccctcactgtaatgttacctgccccccggggctgcacggcgctgactgtgcgcaagcatgttcctgccacgaagacacgtgtgacccagtgaccggcgcatgtcacctggaaacaaatcagcggaaaggtgtgatgggtgccggagccctactggtacttctcgtatgcttgctcctgtcactgctcggttgctgttgcgcatgtagggggaaggacccgaccaggagagagctttctctcggcagaaagaaagccccacacagactttgcggaagattctcacgaatctctatgaaactgccgagaatacctctacggcggcagaagctgcccaaggtggtggtcgctcatcacgacctggataacactctgaactgttcattcctggagccgcccagcgggttggaacagcccagtccctcatggtcttcgcgggcttctttttcatcattcgacactactgacgaggggcccgtgtactgcgtccctcatgaagaagctcccgccgagtcgcgcgacccagaggtgcccacagtgcccgctgaagctccagccccgtctccagttccactgacgacacccgcgtctgctgaggaagcgattcctctgccagcctcttccgactctgaacgatccgcttcttcagtcgagggtcccggcggtgccctttatgcgcgcgttgctagaagggaggcacgcccggctagggctcggggggaaatcggaggactctctcttagtccaagcccggaaaggcggaagccaccgccgcccgaccccgccacaaagcctaaagttagctggatacatgggaaacactctgcagccgccgctgggcgtgcacccagcccaccccctcccggaagtgaggcagccccaagtccctctaaacggaagcgcacccccagcgataaatccgcgcacacggtggagcatgggagcccacggacacgggaccccacgcctcggccccctggtctcccagaggaggctacggccctggcagcgccaagcccccccagagcccgcgctcgtgcccggccaggactcctggaaccaacagatgcagggggacccccgaggtctgccccagcggcttctatgctggctgctgatgttcgaggcaagactaggtctcttggccgggcagaagtggccctgggcgcccagggacccagggagaagcccgcccccccacagaaagccaagagatctgtgccccctgctagcccagcccgtgctccgcctgctacggaaacccccggtccggaaaaagcagcaaccgacttgccagctcccgaaacgcctaggaaaaagactccaattcagaagccgcctaggaagaagagcagggaagcagcgggcgagcttggacgcgccggagctcccacattgtag

SEQ ID NO: 133511 - DNA, 2598 bp, synthetic construct
  misc_feature 1..2598: note = Description of Artificial Sequence: Synthetic coding sequence
  source 1..2598: mol_type = other DNA
atggagggggccggcccccggggtgcgggtcccgcgagacgcagaggtgccggcgggcctccttcgcccctccttccatcattgttgttgctgcttttgctctggatgttacctgatacagtggctccccaggaactgaatccgaggggcagaaacgtctgtagagcccctggtagccaggtgccaacatgttgtgctgggtggcggcagcaaggcgacgaatgtgggatcgccgtctgtgaaggcaacagcacctgtagcgaaaacgaggtctgcgttagaccaggggagtgtaggtgccggcacggctacttcggtgcaaactgcgacactaagtgcccgcgtcagttctggggcccagattgtaaagagttgtgttcctgtcatccccatgggcagtgcgaagatgtaacagggcagtgcacatgtcatgcacgaaggtggggcgctagatgtgagcacgcgtgccagtgccagcacggaacatgtcatcccaggtccggagcttgtcggtgtgagccaggctggtggggcgctcagtgcgcaagcgcttgctattgcagtgctaccagtaggtgcgacccccagacaggagcctgtctgtgccacgctggctggtgggggcggagctgcaataatcagtgtgcatgtaacagctctccctgcgaacaacagagcggacggtgccagtgtcgtgagagaacgtttggcgcgcggtgtgacaggtattgtcagtgtttccggggacgatgtcacccggtggacggtacctgtgcatgtgaaccgggatatcgcggtaaatactgtcgggaaccctgtcctgcaggattctacggacttgggtgtagaaggcgctgcgggcaatgtaaggggcaacagccatgcaccgttgccgagggccgctgcctgacttgcgaacctgggtggaacggcactaaatgcgatcagccctgcgctactggcttctatggcgaggggtgcagtcatagatgtcccccctgtagagacggccatgcatgtaaccacgtcactggaaagtgtaccaggtgtaatgctggatggattggtgataggtgcgagaccaagtgtagcaatggcacatacggagaggattgtgccttcgtgtgtgctgactgcggatcaggacattgtgattttcagagtggccggtgtctgtgttctccaggagttcatggacctcattgcaacgtcacctgtcctcccgggctccacggagcagattgcgcccaggcatgttcttgccacgaagacacctgtgatccagtcactggtgcctgtcacctagagacgaaccaacgcaagggcgtgatgggagctggagcattgctagtcctgttggtttgtcttctgctgtcactgctcggatgttgctgtgcatgcagaggcaaagatccgaccaggagggaactcagtttggggagaaaaaaagctcctcataggctctgtgggaggttctcccgaatttccatgaagctgccccggattcctctgcggcgacagaaactcccaaaagtggtcgtggcgcatcacgatcttgacaacacactgaattgcagcttcctcgagcccccttcaggcctggaacagccttctccctcatggagctctagggcatccttctcttcttttgataccaccgatgagggccccgtgtactgcgtcccccatgaggaggcccccgccgagtcgagagaccccgaggtacccacggtgccagctgaagctccggctccctctcccgtgccgctgaccactccagctagcgccgaagaagccattcctttacctgctagctcagattcagaacgctcagcaagttccgtggagggccccgggggggccctttacgcccgtgtagccagacgtgaagcccgacccgcccgagcccgtggagagatcggaggtctcagcctgtccccaagcccagagcgacgcaagccacccccccctgatccagcaactaaacctaaagtgtcatggatccacggaaaacacagtgccgccgccgccggcagagcaccgtcacccccgcctcctggttccgaggccgctccctcaccttctaaaaggaagcgtacaccgtcagataaatctgcgcacaccgtcgagcacggctccccacggacaagggaccctaccccacggccgcctggcctgccggaggaagcaaccgctctggcagccccatcacctcctcgcgcgcgggcaagggcagcgcccagaccattaggtgcccatgggcggagacgatctcccgccaagcgcgccgaggcggctagcatgttggctgctgacgtgcggggtaagacgaggagtctcggacgggcagaggttgctttgggggcgcaggggccacgtgaaaaacccgctccacctcaaaaggcaaaaaggtccgttccaccagccagcccagctagggcccctcctgctacggagacacctggacccgaaaaagcagccacagatttaccagctccggaaactcctagaaagaaaacgcctatccagaagccaccgcggaagaaaagcagagaggccgcaggagaactggggcgcgccggcgccccaacgctttag

SEQ ID NO: 133512 - DNA, 1728 bp, synthetic construct
  misc_feature 1..1728: note = Description of Artificial Sequence: Synthetic coding sequence
  source 1..1728: mol_type = other DNA
atgcacaaggaggcggagatgctcatcggcccacagctggatgagaagagatggggttggcggctgggcgatggttctgcggccccgccattcttgccccaggcgctcagctttctcttattattgcctctggccagcgctctgcaaccaaccccattgcctttccaagagctacgactagtgggtggaccttcgcgctgtcgcggcagactggaggtgatgcacggggggtcttggggatcagtctgcgacgacgattgggatgtcgtggatgctaacgtagtgtgccgccagctgggatgtggacttgctttacccgttccgcggccactggccttcgggcagggccggggcccaatactgctcgataacgtcgagtgtcggggtcaagaggcagctcttagcgagtgtgggagtcgagggtggggcgtgcataattgcttccactacgaggacgtcgctgtcctatgtgacgaatttctgcccacgcaaccaccgactagaaagatgttgacctctagagcgccgcccactaccttacccaatggaaagagtgaaggttctgtcaggctggtcggtggcgccaacctgtgtcagggacgcgtggaaatcttgcactcggggctgtggggtacagtgtgcgacgacgattggggcctgcctgatgcggccgtagtgtgccggcaactagggtgcggcgctgccatggccgctaccactaacgccttttttggctatggcactggccatatcctgctggacaacgtgcactgcgagggcggggagcccaggttggcagcctgtcagtcattaggctggggggtccataactgtggccaccacgaggatgccggcgccctgtgcgctggcctcggacccccaacactgacagctctgcccagttctgcgacccgggaggactgggcttggcagactgacccttccgccactggcgttggaccacagccctctagagagacggcattgctcacaactgccgcctgggccgcaggtaagaagagtggccgacttcgcctggttgggggaccaggcccttgtaggggacgcgtggaggtgctgcatgccggaggctggggaaccgtgtgcgatgacgattgggattttgcagatgcccgggttgcttgcagggaagctggctgcgggccggccttaggagctactggattgggtcatttcggctacggccgcggacctgttctactggacaacgtgggctgcgcgggaaccgaggccagactaagcgactgtttccatctgggctggggccagcacaattgtggacaccacgaggatgcgggcgccctgtgcgctgggccggaggagctgggtctgcaggtccaacaggatgggtctgagaccaccagagttccaacgccaagaccgcgcgacggccatctgcgccttgttaatggcgctcacagatgcgaaggccgagtggagctgtatctgggacagaggtggggaactgtatgcgacgatgcatgggacctgcgcgctgctggagtactctgtagacagctgggatgtggccaggcactagccgcaccaggggaggcccactttggcccaggccgtggtcctatcctgctagacaatgtcaagtgccgcggagaagaatccgctctgcttctctgctcccacattcgctgggacgcccataattgcgaccatagtgaagacgccagcgttctctgccagcccagctag

SEQ ID NO: 133513 - DNA, 849 bp, synthetic construct
  misc_feature 1..849: note = Description of Artificial Sequence: Synthetic coding sequence
  source 1..849: mol_type = other DNA
atgtcaaacgtcacactccgaaagatgtcccccacaggcaatgaaatgaagtctaccacgcaaggaaccacccggaagcagcaggacttccatgaagttaataagagacgcacatttctgcaggacaactcttggatcaaaaagagaccagaagaggagaaggatgagaattacggacgtgtagtactgaatcgccacaactcccacgatgcacttgaccgaaaagtaaatgagcgcgatgtcccaaaggccactatctctcggtactcatctgacgacaccctggatcgctctatgtcaatgtttcggtcacttgaggtgaccaagctgcagccagggggaagcctgaacgcgaatactagtaacaccattgcatcaacatccgcaactacccccgtcaagaagaaacggcagtcctggttccccccccctccaccgggctacaatgcctcctcctctaccgggacgcgaagaagagagcccggagtgcacccacctatccctcccaagcccagtagtccagtctcttcgcccaaccagttaagacaagacaaccgacaaatccaccctccgaaacctggtgtgtatacagaaactaatagatcagccgagcgcaatataagcgaggaacttgataaccttataaagatgaacaagagtctgaaccgcaatcagggccttgattcactcttccgggccaacccaaaagtggaagaacgcgaaaagagggccaagtctctggagagcttgatttatatgagtactagaactgacaaagacggtaaggggattcagtctcttggttcacccattaaagttaatcaacgtacagacaaaaacgaaaagtag

SEQ ID NO: 133514 - DNA, 2067 bp, synthetic construct
  misc_feature 1..2067: note = Description of Artificial Sequence: Synthetic coding sequence
  source 1..2067: mol_type = other DNA
atgtccaatgtcacgctgcggaagatgtctccaactggcaacgaaatgaagagcaccactcaggggacaacgaggaaacaacaggacttccatgaggtgaataagagaaggacgttcctgcaggataattcctggattaagaagaggcctgaagaagaaaaggatgaaaactatggcagggtggtgctaaataggcacaactctcacgacgcactggatcggaaggtcaatgaacgggatgtacctaaggccaccatttcccgttatagctctgacgatacgttagaccgcatcagtgatcgtaacgacgccgcaaagacttacaaagctaacactctcgacaaccagctgactaataggtctatgtctatgttccggtctctggaagttacaaaactacaaccaggaggttcacttaatgcaaacacatctaacactatcgcctcaaccagcgctacaacacccgtgaaaaagaagagacaatcctggttcccgccacccccaccggggtataacgcttccagtagcaccggcaccagacggagggaacctggcgtgcaccctcccataccgcctaagccctcttcacccgtgagctcccccaaccagctgaggcaggacaacaggcagatccatccccccaaaccaggggtctatactgagactaaccgcagtgctgagagaaatattaggtcccaggatcttgataatattgtcaaagtggcgacttcactgcagagatcagataaaggggaggaattagacaatctgattaagatgaacaaatcgttaaacaggaatcaaggtctggattccctctttcgcgccaatccaaaggtagaggagcgggagaaaagggccaaatctctggagagccttatctacatgtcaactcgtactgacaaagacggcaagggcattcagtctctggggagcccaatcaaagtcaatcagcggacagacaagaatgaaaagggaagacagaatctggaaagtgtcgctaaagtgaatgcgcggatgaataagacatctcggaggagtgaggacctcgacaacgcgactgaggtgaacccaaagggccatgaaaatacaacaggtaaaaaagacctggatgggctaattaaggtcgatcctgaaactaataagaatatcacccgcgggcaatccctagataacctgatcaaggtcacccccgaagttaaacggtctaaccaggggagcaaggacctgaacaacttcatcaaagtgtaccctggaacagagaaaagtacagaaggcggccagtcactagactccctgataaaggttacccctgagagaaaccgcaccaatcagggcaaccaggacttggaaaatttgatcaaagttatcccctccgccaacaaatcgagcgagcaggggctcgacgagcatattaatgtgtcacctaaggccgtgaagaacacagacggaaagcaggatctggacaaattgatcaaagtcaatcccgaaatctttaccaacaaccagcgaaaccaggacctggcgaacctgattaaagtgaatcctgccgtcatccgcaataaccagtctcaggatctggataatctgatcaaggtgaaacctagcgctctgcgaaacactaaccgcgaccagaacctggagaatttgatcgaagtgaattcacatgttagcgagaataaaaatgggtctagcaatacaggagctaaacaggctgggcctcaggacacagtggtatacacccgaacctatgtggaaaattctaagtctccgaaggacggttaccaagaaaatatcagcggaaagtacatccagacggtgtattctacttcagatcgttccgttatagagagggatatgtgcacctactgccggaaaccactaggcgtcgagacaaaaatgatcttagatgaacttcagatctgttgtcactccacctgcttcaaatgtgaaatctgtaagcagcccttggaaaacctccaggccggggattcgatatggatctatagacagaccatccactgcgaaccctgctacagcaaaattatggccaaatggataccatag

SEQ ID NO: 133515 - DNA, 2007 bp, synthetic construct
  misc_feature 1..2007: note = Description of Artificial Sequence: Synthetic coding sequence
  source 1..2007: mol_type = other DNA
atgtctaacgtcactctacggaagatgagcccaacgggcaacgagatgaagtccactacccaaggcacaacaaggaaacagcaagacttccacgaagtgaataaacgccgcaccttcctgcaggacaattcctggattaagaagcgccccgaggaggagaaagacgagaactacggaagggtcgtgttgaacagacataacagccatgacgcactggacaggaaggtaaacgaacgggatgtcccgaaagctacaatttcaagatatagcagtgacgacacactggacagaatttctgaccggaatgatgccgccaagacatataaggcgaacaccttagataaccagctgaccaatagatccatgtctatgtttagaagtctcgaggtgacaaaactccagcccggcggatccctgaatgcaaatacctcaaataccatcgccagcaccagcgctacaacgccagtaaaaaagaaaaggcagagctggttcccgccgcccccccctggatataatgcttcgagctcaacaggcacccgccgccgagagcccggtgtacacccccccattcccccgaaacctagctcacccgtaagctcaccgaaccagcttagacaggacaataggcaaatccatcctccaaagcccggggtctatactgagaccaacaggtcagcagaaagaaacatctctgaagaattggacaatctgataaaaatgaacaaatctctaaacagaaaccagggattagatagcctttttcgagctaatcctaaagtggaggagcgcgagaaacgcgccaaatccctcgagagtctgatctacatgtctacccggacggacaaggatggtaagggaatccaaagtctgggctcacctattaaagtgaaccaacgtaccgataaaaatgagaagggacggcagaaccttgaaagcgtagccaaggtgaacgccagaatgaataagacatctcggcgtagtgaggacttggacaacgcaaccgaggtgaaccctaaaggacatgagaatactacagggaaaaaggatctggacggcctgatcaaggttgatcccgaaactaacaaaaatatcactcgggggcagtccttggataatctgatcaaggtgaccccggaggtcaaacggtcaaaccagggtagtaaggatcttaataatttcatcaaggtttacccaggaacagaaaaatccacggaggggggtcaaagtctggactctttgatcaaggttacccccgagagaaacagaaccaatcaagggaaccaggatctcgagaatttgattaaagtaatcccttcagctaataaatcctccgaacagggactggacgaacacatcaatgtgagtcccaaggccgtgaaaaacacggatggcaaacaagatttggacaaactcatcaaagttaatcctgaaatctttacaaataaccagcgtaaccaggacctggccaatctcatcaaagtaaatcctgcggtgattcgcaacaaccagagccaagatctggacaatcttataaaggtcaagccaagtgctctgcgaaacacaaatcgcgatcagaatctggaaaaccttatcgaggttaactcccatgtatctgaaaacaaaaacggtagtagcaacacgggcgccaaacaagctggtccccaggacaccgtcgtgtatacccggacatatgtggaaaactcgaagtctcccaaggacggttaccaggaaaatataagcggcaaatatatccaaactgtatactctacatcggaccgatcggtcattgaacgggatatgtgcacatattgtcggaagccccttggcgttgaaactaaaatgattctggatgagctgcaaatctgttgccatagcacttgctttaagtgcgagatatgtaagcagccacttgagaatctccaagccggggactcgatatggatatatagacagaccatccactgcgagccttgttacagtaagattatggctaaatggatcccttag

SEQ ID NO: 133516 - DNA, 1941 bp, synthetic construct
  misc_feature 1..1941: note = Description of Artificial Sequence: Synthetic coding sequence
  source 1..1941: mol_type = other DNA
atgagcaatgttacactccggaagatgtctccaacgggcaacgaaatgaaatcaactacacagggcaccacccgcaaacagcaggattttcacgaggtaaacaaaagacgcaccttcctccaagataacagttggatcaaaaaacgacccgaagaagagaaggacgaaaactacggacgggtggtgctgaataggcacaattcccatgacgccctcgatcggaaagtgaacgagcgcgacgtaccaaaggcaaccatctccaggtactcctcagacgacaccctggatcgaatttctgatagaaacgatgcagcaaagacgtataaggccaatacgctggataaccagctcactaatcgctccatgtccatgttcagatccctggaagtaacaaaactgcagccgggtggttcgcttaacgctaatacttcaaacaccatagcgtccacatccgccacgacacctgtgaagaagaagagggaaccaggagttcacccacccatccccccaaagcccagctcccctgtgtctagcccgaaccagctcaggcaagataaccgacagattcacccaccaaagccaggggtctatacagaaacaaaccgctccgctgaacgaaacatccgtagtcaagatctagataatattgtcaaggtcgccacaagcctgcagcgttcagataaaggggaggagcttgataacctcatcaaaatgaacaagagcttgaacagaaatcaggggctcgattctctttttcgagcaaaccctaaagtcgaggagcgagaaaagcgggctaagagcctggagtcattaatatacatgtctacccggacagataaggatgggaagggaatccaatctttggggagtccgattaaagtgaaccaacgtacggacaagaatgaaaaaggtcgtcagaatctcgagtccgtagcaaaagtcaacgcacggatgaataaaacgagtaggaggagcgaagatttggataatgccaccgaagtgaacccgaagggccacgaaaataccactggaggacagtccctcgataacttgatcaaagtcactccggaggtgaaaagatcaaaccaaggcagtaaagaccttaacaactttatcaaggtctaccccggaacagagaaaagtaccgagggaggtcagagcctggactcccttattaaagtgacgcctgaaaggaatagaactaaccagggaaatcaggatctggagaatctgatcaaggtaattcctagcgcaaacaagagttctgagcaaggcttggacgaacacattaatgtgagcccaaaagccgtgaagaatactgatggaaaacaggacctggacaaactgattaaggtcaacccagagatctttactaacaatcaacgaaaccaggacctcgccaacttaatcaaagtgaaccccgcagttattcgaaacaatcagtctcaagatctggacaaccttattaaggtaaaaccttcggccctcagaaatacaaatcgcgatcaaaatctggagaacctgatagaagtgaacagtcacgtgtccgagaataaaaacgggtcttccaacactggtgccaagcaggctggaccgcaagatactgtggtctatacacgcacatacgtagagaactcaaagagcccgaaagacggctatcaagagaacatttcaggtaaatatatccagacagtgtactccacaagcgatcggtcagtgattgagcgggacatgtgcacctattgtaggaaacccctgggtgtcgagaccaagatgattctggacgagctgcagatctgttgtcattccacctgcttcaagtgcgagatttgcaaacagccactggaaaacctgcaagcaggagactccatctggatctacagacaaaccatccattgtgaaccctgttactccaaaattatggccaaatggatcccctag

SEQ ID NO: 133517 - DNA, 2148 bp, synthetic construct
  misc_feature 1..2148: note = Description of Artificial Sequence: Synthetic coding sequence
  source 1..2148: mol_type = other DNA
atggcccgcgagctttaccatgaagaattcgctcgggccgggaagcaggccggattgcaggtgtggagaatagagaaactggagctggtacccgtcccccagtcagcccacggcgatttttatgtgggcgacgcatatcttgtgttgcatactgctaaaactagccgaggcttcacgtaccacctgcacttttggttgggaaaggagtgctctcaggacgagtcaactgctgcagcaatctttacagttcagatggatgattatctgggcgggaagccggtgcagaatagggagctccagggctacgagtctaatgacttcgtcagttactttaagggtggtttgaagtacaaggcaggtggcgtggccagtggactcaatcatgtcttgaccaacgacttgaccgcgaagcggctgctccatgttaaagggaggcgggtagtccgcgctaccgaggtccccctcagttgggattcatttaataaaggagattgttttatcattgaccttggcacagagatttaccagtggtgcggcagctcctgtaataagtatgagagattaaaagcgaaccaggtggccacgggaattcgctataatgagcggaaggggcggtctgagttgatagtggtagaggagggctccgagccgtctgaactgatcaaggtgctaggagagaagccagagctgccagatgggggcgacgatgatgacatcatagcagacatcagcaacaggaagatggcgaagctgtacatggtttccgatgccagcggcagtatgcgagtcaccgtagtcgctgaagaaaaccccttttcaatggcgatgctcttaagcgaagaatgcttcatcctggaccacggagctgctaagcagatcttcgtgtggaagggcaaagatgctaatccacaggagcgaaaagctgcgatgaaaacagccgaggaatttttacagcagatgaattattccaaaaatacccagattcaggtgttgcccgaaggcggagagacgccaattttcaaacaattctttaaggactggagggacaaagaccagtcggatggcttcggcaaagtctacgttactgagaaagtcgcccagatcaagcagatcccattcgatgcctctaaactgcactctagccctcaaatggcagcacagcacaatatggttgatgacgggagcgggaaggtggagatctggagggttgaaaacaacgggaggatccaggttgaccagaacagttacggcgagttttatgggggcgactgttatataattctctacacgtacccgagaggccagataatctacacctggcagggcgccaacgccacccgcgatgagctgaccactagcgccttccttaccgtgcagctggacaggagcctcggcggacaggcagtacagattagggtgtctcaagggaaagaacccgtgcacctcctgagcttatttaaggataagccattaataatctataaaaatgggacatctaagaagggtggtcaagctcctgcccctcccacccgtctgtttcaggtgaggaggaatctggcgtctatcactagaattgtcgaggtagacgtcgacgcaaactctctgaactcaaacgatgtattcgtgctgaagctgccacagaatagcggctacatctgggtgggtaaaggtgcctcacaggaggaggaaaaaggggccgaatatgtggctagtgtactgaaatgcaagacgctgagaattcaggaaggtgaagaacccgaagaattttggaacagcctgggcggtaagaaggattaccagacttctccactcctagagactcaggccgaggaccatcctcccagactttatgggtgtagtaacaaaactgggagattcgtcattgaagaaattccgggcgaatttacccaggatgacctcgctgaggatgacgttatgctgctagatgcttgggaacagatatttatatggatcggaaaggacgccaacgaggtcgagaaaaaggagtctctgaagagcgcaaaaatgtatctcgaaacagatccctctggcagagacaagcggaccccgatcgtgatcataaagcaagggcacgagcccccaaccttcacgggatggttcctcggatgggattcatctaaatggtag

SEQ ID NO: 133518 - DNA, 1407 bp, synthetic construct
  misc_feature 1..1407: note = Description of Artificial Sequence: Synthetic coding sequence
  source 1..1407: mol_type = other DNA
atggcaaaattgtatatggtgtccgatgctagcggatctatgcgggtgacggtggtcgcagaagaaaatcccttctctatggccatgcttttatcagaggaatgttttatcctcgaccacggcgccgccaagcagatcttcgtatggaaggggaaggatgccaacccccaggagcgcaaggcagcaatgaagacagccgaggagtttctgcaacagatgaattacagcaagaacactcagatacaggtactgcctgagggtggcgagactcccatttttaaacagttcttcaaagattggagggacaaggatcaatccgacgggttcgggaaggtctatgtaactgagaaagtggcccagatcaaacaaattcccttcgacgcctccaagctgcacagcagtccccagatggccgctcagcacaatatggtggacgacggctctggcaaagtcgaaatatggcgcgtcgagaataacggcaggatccaggtcgatcagaattcttacggggaattctatggtggcgattgttatatcatcctttacacttaccctagaggccagatcatctacacatggcagggtgccaatgccactcgggatgagctgacaaccagcgcctttctcaccgtccagcttgataggtccctgggcgggcaagccgtccaaatacgcgtctctcaaggaaaggaacctgtccacctgctcagcttgttcaaagataagccattgattatttacaaaaatggcacctccaaaaaaggtggacaggccccagcgccaccgacaagactgttccaagtccgccggaacttggcctcaattactaggattgtggaagtggacgtggacgcaaactccctaaattcgaatgacgtcttcgtcttaaagctcccacagaactcgggttacatctgggttggcaaaggggcgtctcaagaggaagaaaagggggctgagtatgtggcttccgtcttaaagtgcaagactctaagaatccaggaaggagaggagcctgaagaattctggaacagccttggaggcaaaaaagactaccagacaagcccgctcctcgagacacaggccgaggatcatccaccaagactgtatggatgtagcaacaagactgggagatttgttattgaggaaattccaggggagttcacgcaggatgacctcgcagaagacgacgttatgcttctggatgcctgggaacagatcttcatttggatcggtaaggatgccaacgaagttgagaagaaagaatctctgaagtctgccaaaatgtacttggagacagacccatccggaagagataagaggacccctatcgtgatcattaaacagggtcacgaaccaccaacttttacaggctggttcctgggttgggatagcagcaaatggtag

SEQ ID NO: 133519 - DNA, 1407 bp, synthetic construct
  misc_feature 1..1407: note = Description of Artificial Sequence: Synthetic coding sequence
  source 1..1407: mol_type = other DNA
atggcgaagctttatatggttagcgatgcgagtgggtccatgcgcgtgactgtggttgcagaagagaatccattcagtatggctatgttgttgtctgaagagtgttttatcttagaccatggtgcagctaaacagatcttcgtgtggaagggcaaggatgccaacccacaggaacgcaaagccgcgatgaagacagcagaggaattcttgcagcagatgaattacagcaaaaatacgcagattcaggtccttcccgagggtggggagaccccaatctttaaacagttctttaaagattggcgagataaggaccagtctgacggatttggtaaggtatacgtaacggagaaggtggcccagatcaagcagatcccctttgacgcctcaaaactccactccagtccccaaatggctgcacaacacaatatggtggacgacggatctgggaaagtggaaatctggagagtcgagaataatggaaggattcaggtcgaccagaactcttatggtgagttctatggcggagattgttacatcattctctacacatatccacgaggccaaatcatttacacatggcagggcgccaatgccacccgggatgagctcacaacttccgcatttctgactgtacagctggacagaagcctgggcggccaggcagtgcagattagagtctctcagggcaaagaacctgtccacctgctcagtttgttcaaagataaacccttgattatttataagaatggtacaagtaagaagggtgggcaggctccagccccacccaccaggctattccaagtaaggcggaacttggcctccataacgcgtatagttgaggttgatgtggatgcgaacagcttgaattccaacgatgttttcgttcttaagcttccccaaaattcagggtacatttgggtaggcaagggcgcctcccaggaagaggaaaaaggcgccgaatacgtagccagcgtgttaaagtgtaagacattacggatacaggagggcgaggagccagaggaattctggaattctttgggtggtaaaaaagattaccagaccagcccattactggagacccaggcggaagatcaccccccaaggttgtacggctgcagcaataagactggccgctttgtcatagaagaaattcctggcgaattcacacaggatgacttagcggaggatgatgtgatgttgctcgacgcgtgggaacagattttcatttggattggaaaggacgccaatgaggttgaaaaaaaagaaagcttaaaatccgctaagatgtaccttgaaaccgatccaagcggccgcgacaagcgtacacccatagttatcattaaacaggggcacgaaccaccaacatttaccggttggtttctgggatgggattccagcaagtggtag

SEQ ID NO: 133520 - DNA, 3864 bp, synthetic construct
  misc_feature 1..3864: note = Description of Artificial Sequence: Synthetic coding sequence
  source 1..3864: mol_type = other DNA
atggaacctatctatcccttcgcccggccccagatgaatacgcgttttccttcctctagaatggttcccttccatttcccacccagtaagtgtgccctgtggaatcccactccgaccggagattttatttacctacatctcagttattacaggaacccaaagcttgtggtaacagagaagaccatccggttggcgtaccgtcacgcaaaacagaataagaagaattccagttgcttcctgcttggatctctcactgcagatgaagatgaagagggcgtgaccctaacagtggatcgcttcgacccaggccgagaggtccctgagtgtctcgagattactcctactgcttccctcccaggagactttctcatcccatgcaaggttcacacccaggaactgtgctctagggaaatgatcgttcactcagtagatgacttctcgtcagcccttaaggccttacagtgtcatatctgttccaaggactccctggactgtggaaaactgttgtccttaagggtacacatcactagccgggaatcacttgattccgtcgagttcgatctccactgggcggctgtcacacttgcgaataatttcaaatgtaccccagtgaagccaattccaatcataccgactgctctggcaagaaacttgagcagtaatctgaacataagccaggtacagggcacttataaatatggatacttgaccatggacgaaactcgaaaacttctcctactcctggaatctgatcctaaggtatactccctgcctctggtgggtatatggttaagcggaatcacccacatttactcgccacaagtttgggcctgttgcctgagatacatcttcaacagcagtgttcaggaaagagtttttagtgagtcaggcaatttcattatagtgttatacagtatgacgcacaaagaaccggagttttacgagtgttttccatgtgatggtaagattcccgactttagattccaactcctcacatcaaaagagaccctacaccttttcaagaacgttgagcccccagataagaaccctatccggtgtgagttaagcgcagagtcacagaatgcagagaccgagttcttctctaaagcctcaaagaacttcagtatcaaacgcagtagtcagaagctaagttcaggcaaaatgcctattcacgaccacgactcaggcgtagaggatgaggatttttcacctcggcctatcccatctccccatccggtatctcaaaagatctccaaaattcagccatcagtgccggagctcagtctggtcttggacggcaactttatcgaatccaaccccctccctacgcccctggagatggtcaataacgaaaacccacccctcatcaatcatctcgaacatctcaagccgctgcagcctcaactatatgatgaaaagcactcacccgaggtagaagcaggcgagccatcgctgcgtggcattccaaaccagctaaaccaggataagcctgcacttctacgacattgcaaagtgcgccagccccctgcttataagaaggggaaccctcacactcgtaatagtattaagccaagctctcataatggaccgagtcacgacatcttcgaaaagctacaaacagtgagcgctggtaatgtccagaatgaagagtaccccatccgcccatctactttgaattctagacagtctagcctggccccacagtcccagccccatgactttgtgttttctccacataattcagggaggcctatggaactgcagattcccaccccccctttgccatcttattgctctaccaacgtttgccggtgttgccagcaccactcccacatccaatattcacccctaaactcatggcagggcgcaaataccgtgggctcaattcaggacgtccaatcagaggccttacagaaacattctctttttcacccctccgggtgtcccgctctttattgcaacgccttttgctcaagctcttcccccattgccctccgtccacagggagatatgggctcgtgctccccccacagcaatattgaaccttcccctgtggccaggccgccgagtcacatggacctctgtaatccgcagccttgcacggtgtgcatgcacacacccaaaacggagtctgataatggtatgatggggttgtccccagacgcctacaggtttttaactgaacaggaccgtcagctgcggttacttcaggcccagattcagagactcttagaagcacagagcctgatgccttgcagccctaagacaactgctgttgaagatactgttcaagccggaagacaaatggaactggtatcagtcgaggctcagagttcaccaggtctccacatgcgcaaaggggtgagcatagcagtgagcaccggggccagcctgttctggaacgctgctggagaggatcaggaaccagattcacaaatgaagcaggacgacactaagatttcaagcgaggatatgaatttcagcgtggacataaataacgaagttacatctctgcccggctcagcctcatccttgaaggcggtggatatccctagtttcgaagagtctaacattgctgtggaagaggagtttaatcagcccctgtcagtgtcaaactcgtcgctggttgtgagaaaagaacctgatgtgccagtcttcttcccctcaggtcagctggcagagagtgtctccatgtgcttgcagaccggtcccactggcggagcctctaataattccgaaacgtcagaggagcctaagatcgaacatgtaatgcagccactgttgcaccagccttccgacaatcaaaagatctatcaggatctcttggggcaggtcaaccatctactaaactcaagctcgaaggagacagagcagccgagtactaaggctgtcatcatcagtcatgaatgcaccagaactcagaatgtgtaccatacgaagaaaaagacacaccactcccgcctcgtcgataaggactgtgttttgaatgccacgctcaaacagcttagaagtctgggagtcaaaatagactctcccacgaaagtgaagaagaacgcccacaatgtcgatcatgctagcgtactggcatgcatctcccctgaggcagttatttctgggttaaactgcatgagcttcgcaaatgtgggaatgagcggcctgagcccaaacggggttgatctctctatggaggcgaatgccattgcgctaaagtacttgaacgagaaccagctttcccagctcagcgtgacgcggagtaaccagaataattgtgatccattctctctattacacattaacaccgaccgctcaacagtgggattaagtctcatttcccccaacaatatgagcttcgccactaagaagtacatgaaacgatacggtttactgcagtcctctgacaacagtgaggacgaggaggaacctccagataacgccgacagcaagagcgagtacctgctcaaccagaacctacggtcgataccagaacagttgggaggccagaaggagccctccaagaacgaccatgagattataaattgttcaaactgtgaaagcgtcggaacaaatgcagatacgccggtgctgaggaacatcactaacgaagttttgcagaccaaagctaaacagcagctaacggagaaaccggcgttcctagtgaaaaatctgaaacccagtccagccgtgaatctgagaaccggcaaagccgaatttactcagcatcccgagaaagagaacgagggcgatataacgatctttcccgaatctctgcagccgagcgaaacgctgaagcaaatgaattccatgaattctgtgggcaccttcctggatgtcaagagacttcggcaactccccaaactattttag

SEQ ID NO: 133521 - DNA, 3864 bp, synthetic construct
  misc_feature 1..3864: note = Description of Artificial Sequence: Synthetic coding sequence
  source 1..3864: mol_type = other DNA
atggagcctatctatccgttcgcccggcctcagatgaatacacgctttccctcctcaagaatggtgccttttcacttcccaccttcaaagtgcgcactgtggaacccaactcccacaggcgattttatctatttacacctttcttactacagaaatccaaagttggtggtaactgaaaagacaatcaggctggcgtatcggcatgccaagcagaataaaaagaactctagctgctttttgttgggtagtttaaccgcggatgaagatgaggaaggagtcacactaactgttgatcgctttgaccctggacgtgaggtgcctgaatgcctcgagattacccctacggcgtctcttcccggcgatttcctgatcccatgtaaggtgcatactcaagaattgtgcagtagagaaatgatcgtgcacagtgttgatgacttctctagtgcccttaaagcgctgcagtgccacatatgttccaaggatagtttagactgtggaaagttgctctctctgcgtgtgcacataacctctcgtgaaagtcttgatagcgtcgagttcgacctgcactgggccgcagtgaccctggctaacaattttaagtgcacccccgtaaagcctattccaattattcccacagcacttgcgcgtaatctgtctagtaacttaaacataagccaggtacagggcacctacaaatatggctatttgacaatggacgaaaccaggaagctgcttttactgcttgaatccgatcctaaggtttacagtctgcctcttgtcggcatttggctgagcgggattacgcatatttatagtcctcaagtgtgggcctgctgtctgaggtatattttcaattcctcggtgcaggagcgggtgttttccgagtccggcaactttattattgtgctgtattccatgacccacaaggagccagaattttatgagtgcttcccttgcgacggtaaaataccagatttcaggttccaactgctgacatctaaagagacgctgcacctgttcaagaatgttgaacctcctgataagaacccaatccgctgcgagctgtctgccgagagccagaacgccgaaacagagtttttctctaaagcaagcaagaacttttcaataaaacgaagctctcaaaagctgtccagcggcaagatgccaatacacgatcatgatagtggggttgaagatgaagactttagtccacggccaattccttcacctcaccctgtttcccaaaagatcagcaaaattcagccctccgtccccgaattgagcctggtgcttgatggcaacttcatagagtcaaaccccctgcctacacctcttgaaatggtgaacaacgagaacccccccctaataaatcatctggaacacctcaaaccgcttcaacctcaactgtatgatgagaagcacagtccagaggtcgaagctggagaacctagccttcgggggatccccaaccagcttaatcaagacaagccagcactgctcagacattgcaaggtacgccaaccccccgcctataagaagggaaatccccacactcgaaatagtatcaagccctcttctcataacggacccagccacgatatcttcgaaaaactgcagacagtctccgccggcaacgtgcagaatgaggaatatcctatccgtccctcaactctgaatagtcgccagtctagtctggcaccacaaagccagccccacgactttgtcttctcgcctcataattctggcaggcctatggaacttcagatccctactcctccactcccctcctattgctccacaaatgtgtgtcggtgctgccaacatcattcccatatacagtactccccactgaattcctggcagggcgcaaacactgtggggagcatccaggacgttcagagtgaagctttgcagaagcacagcctcttccatcccagtgggtgtccagccttgtattgcaatgctttctgctcatctagcagccccatagctttacgaccccagggagatatggggtcctgctccccccacagcaacatagaacccagtcccgtggcgcgcccgccaagccacatggacttgtgcaacccccagccgtgcactgtttgtatgcacacaccaaagaccgagagcgataatggaatgatgggactttctccggacgcctatcgcttcctgaccgagcaagataggcagctgcggcttctgcaggcacagatccagcggctcctggaagcacagtccctaatgccttgtagcccaaagacgacagccgtggaggatacagtgcaggcggggcgccaaatggaactcgtcagtgtggaggcacagagtagccctgggcttcacatgcgcaagggcgtgtctatcgctgtttccacaggtgctagtctgttctggaacgcagccggggaggaccaggaacccgactcgcagatgaagcaggatgacaccaaaatctcttccgaggatatgaacttcagcgtcgatattaacaacgaagttacatccctgcccggctctgccagcagcctgaaggccgttgatatcccaagcttcgaagagtctaacatcgccgtggaagaggaattcaaccagcccctgagcgtttccaactcctctctggtcgttagaaaagagccagacgtccctgtctttttcccctctggacagctggccgagagtgtcagcatgtgtctccagaccggccccactggcggggcatcaaacaattctgaaaccagtgaggagcctaagatcgaacacgtgatgcagcccctactgcatcagccatccgacaaccaaaaaatctaccaggatcttttggggcaggtcaatcatttacttaactcatcttctaaggagaccgagcagcccagcacaaaagctgtaatcatctctcatgagtgtactagaacccagaacgtctaccataccaagaaaaagacgcaccactccaggctcgtggacaaagattgtgtacttaacgctaccttgaagcagctgcggtccctgggcgtgaagatcgactcccctaccaaagtgaaaaagaatgctcacaacgtggaccacgcaagcgtcctggcatgcatcagtcccgaggccgtgattagcgggctgaattgtatgagttttgctaacgtggggatgagtggcttgagtcctaatggagtggatcttagcatggaggccaacgcgattgcgcttaagtacctcaacgaaaatcagctatcacagctttccgtcacccgttctaatcagaataactgcgaccccttcagtctcctgcatattaataccgaccgtagtaccgtcgggctgagcctgatctctcccaacaacatgtcctttgcgaccaaaaagtacatgaagcgctatggcttgctgcagtctagcgataattctgaagacgaagaggagcctcctgataatgccgacagcaagtcggaatacctgctcaatcagaatttgcggtctattccagaacagcttggcgggcagaaagaaccttccaagaatgaccacgagattataaactgtagtaactgtgagtccgtggggaccaatgcagatactcctgtattgagaaatatcactaatgaggtgttacagactaaggccaagcagcagctcacggaaaaacctgccttcctagtaaagaatctgaagccctctccagcggttaatctgagaacgggcaaagctgagttcacccagcatcctgagaaagaaaatgagggagacattactatctttccggagagtctacagccctctgagacgctcaaacaaatgaactccatgaacagcgtggggacgttcctcgacgtgaagcgactgcgtcaactgcctaagctcttttag

SEQ ID NO: 133522 - DNA, 3864 bp, synthetic construct
  misc_feature 1..3864: note = Description of Artificial Sequence: Synthetic coding sequence
  source 1..3864: mol_type = other DNA
atggaacccatatatccgtttgcccgccctcagatgaacactagatttccctctagccgcatggttccattccacttccctccaagcaaatgtgcattgtggaaccctaccccaactggcgactttatttacttgcatctcagctattacaggaacccgaaactggtggtgactgagaagactatcagactggcttatcgccacgccaaacagaacaagaaaaatagcagctgctttttgttgggatcactgactgccgacgaggatgaggagggggtgactctcacagtagataggttcgatccggggagagaagtgcctgagtgtctcgaaattactccgacagcaagcctgccaggtgatttcttgataccatgtaaggtccacacccaggaactctgcagcagggagatgattgtccatagcgtggacgatttctctagcgcgctcaaagccctccagtgccatatatgctctaaggatagcctggactgcggcaagcttctgtcgttgagagtgcatataacatccagagaaagtctggattctgtcgagtttgatttgcactgggctgctgtaacgctcgccaataactttaagtgtactcctgttaagccaatccctattatccccaccgcactggctcggaacctcagctccaacctgaacatttcacaggtacaaggtacatacaagtacggctacctgaccatggatgagacgagaaagttactgctgctgttggagtccgacccaaaggtgtacagcctgccactcgttggaatttggctgtctggcattacgcacatttactcacctcaggtctgggcctgctgcctgcgctatatcttcaactcctccgtccaagaaagagtgttctctgaatcaggcaacttcatcatcgtgctgtacagtatgactcacaaagaacctgagttttacgagtgtttcccatgcgatggtaagatccccgatttcaggtttcagttgctgacatcaaaagagaccctacatctgtttaaaaatgttgagcccccagataagaacccaatacggtgtgaactgagtgctgagtcccagaacgctgaaaccgaattctttagtaaagcaagtaagaatttttccataaagaggtctagccaaaaattgagttcaggcaagatgcccattcacgatcatgattcgggagtggaagatgaggatttctcaccgcgccctatcccctctcctcaccccgtgagtcagaagatatccaaaatccagccaagtgtgcctgagttaagcttggtgctcgacggaaacttcattgaatccaatcccctcccgacaccgctcgaaatggtcaacaacgaaaaccctcccctgatcaaccatctggaacacctcaagccactgcagccacaattgtatgacgagaaacactcacccgaggtcgaagccggagagccttccttacgcgggatccccaaccaactgaaccaggacaagcctgcgctcttgcggcactgtaaagtgaggcagcctcccgcgtacaaaaaaggtaacccacacactagaaattcaatcaaaccctcctcgcataacgggcctagccatgacatcttcgagaagctgcagactgtgtccgccgggaacgttcagaacgaagagtatccaattagaccgagcaccctgaacagtcgacaaagttccctggcgccgcagtcacagcctcatgattttgttttctccccccacaattccgggagacctatggaactccagattcccacaccccccctgcccagctattgctctacaaatgtctgccggtgttgccaacaccactcacacatccagtattcccctctaaactcttggcagggcgccaacacagtgggtagcattcaggacgtccagagcgaggctttacagaaacactctctgtttcacccaagtggctgccccgccctgtattgcaatgctttctgttcctccagcagcccgattgctctccgcccacagggcgatatgggtagttgttctccacatagtaatatcgagccatctcctgttgcaaggcctccgtctcatatggacctctgtaatccccaaccctgcaccgtttgcatgcacacacccaagacagagagcgacaacggaatgatggggctgagtccagacgcttatcgcttcctcactgagcaggaccgacagctgcggctgctgcaggcacaaatacaaagactgctggaggctcaatctctaatgccatgttcgcctaagaccacagccgttgaggacaccgtgcaggctggacgtcagatggagctggtgtcagtcgaggcccagtctagcccggggctgcacatgcgaaaaggggtctcaattgccgtgtctacgggggcttccctgttttggaacgctgccggggaagaccaagagccagatagccaaatgaagcaggacgatactaagatttcatcggaggatatgaatttctctgtggatatcaacaatgaggtgaccagccttcctggctcagcaagttcccttaaagccgtggacatccccagcttcgaggaatccaacattgccgtagaagaggaatttaaccagccattgagcgtcagcaacagttctttggtggtgaggaaagagccggacgtccccgtgttcttcccttccggccaattggctgagtccgtctccatgtgtctgcagaccggcccgactggaggcgcctcaaataactctgaaacgagtgaagagcctaagatcgaacatgtaatgcagcccctgcttcaccagccatcagataatcagaagatctaccaggatctcttgggccaagtgaaccatttgctgaacagttcctccaaggaaaccgagcagccgagcaccaaagccgtaataatttcgcacgagtgtactcggacccaaaatgtgtaccacactaaaaaaaaaactcaccattctcgtctcgttgacaaggactgcgtcctgaacgccactttaaaacaactacgcagccttggagtgaaaatcgattcaccaacaaaggttaagaaaaacgctcacaacgttgatcacgcatctgttctcgcatgcatcagtcccgaagctgttatcagcggcttaaattgtatgagcttcgccaatgtcggaatgtctggactgagtccaaatggcgtagacctgagcatggaggcgaacgccatcgcactgaagtacctcaatgaaaaccagctcagtcaactctccgttaccaggagtaaccagaataattgcgacccgttttcactgctgcatatcaatacagatcgctccaccgtcggccttagcttgataagccctaacaatatgagctttgcgactaaaaaatatatgaaacgatatgggctgctgcagtcaagtgataactcagaagacgaagaggagccaccagataatgctgacagtaaatctgagtatctgctgaatcagaatctcagatccatccctgagcagcttgggggccagaaggagccctccaaaaacgaccatgagataattaactgttctaattgtgagtctgtcggaactaatgctgatacaccggtccttagaaacattacaaatgaagtcttgcagaccaaagccaaacagcagctgacagaaaaacctgcttttctggtaaagaacctgaagccgtctccggcggtcaatctgcggacaggcaaagctgagtttacacaacatcccgaaaaggagaacgagggggacatcacaatcttcccggagtctctgcagccatcagaaacactgaaacaaatgaactcaatgaattctgtgggtactttccttgacgtgaaacgattgcgccagcttcctaaactgttctag

SEQ ID NO: 133523 - DNA, 633 bp, synthetic construct
  misc_feature 1..633: note = Description of Artificial Sequence: Synthetic coding sequence
  source 1..633: mol_type = other DNA
caactgtacgatgagaagcatagccctgaggtggaagccggtgagccgtcactgcgtgggatccctaatcagctaaatcaggacaaacccgcattgctgcgtcactgcaagccttgcacagtttgcatgcataccccaaagaccgaatccgacaacggaatgatgggtttgagtccagacgcctaccgctttctgacggaacaggacagacagttgaggcttctgcaggcacaaatacagaggctcttggaggcccagtccctgatgccatgtagtccgaagacaacggctgttgaagacactgttcaggcggggcgccagatggaacttgtaagcgtcgaagcacagtcatcacctggactccacatgcgaaagggtgtcagcatagctgtgagtaccggcgcttctctgttctggaatgccgctggggaagatcaggagccagacagccagatgaagcaggacgataccaagatctcatccgaagacatgaatttctccgtagacattaataatgaggtcacttccctgcccggctccgcctcgtcattaaaagcagttgatatccccagctttgaggaatctaacattgctgtggaggaggagttcaaccaacccctgtccgtctcatag

SEQ ID NO: 133524 - DNA, 3867 bp, synthetic construct
  misc_feature 1..3867: note = Description of Artificial Sequence: Synthetic coding sequence
  source 1..3867: mol_type = other DNA
atggagccgatataccctttcgctcggccacaaatgaacacacgatttccctcaagcagaatggtgcctttccatttccctccttccaaatgcgcactttggaacccaacgcctacaggagacttcatatacctgcatctgtcgtattaccgcaatcccaagctggtggtgacagaaaagacaatccgtttggcctatcgccacgctaagcaaaacaagaaaaacagcagttgtttcctcttgggctcactcacggctgacgaagatgaggagggcgtgaccctcacggtcgataggttcgatccgggacgcgaagtgcccgaatgcctggaaattacacctactgcaagtcttcccggcgatttcctcattccctgtaaggtccacacccaggagctgtgctcgcgcgagatgatcgtacattcagtggacgatttctcctccgcattaaaggcactccagtgccatatttgctcgaaggattcgctggattgtgggaagttattgtccctgagagtgcacattacctctcgcgagtcactggattccgtagagttcgacctgcactgggccgccgtgacccttgcaaacaacttcaagtgtacacccgtgaaaccaataccaattattcctacggctctcgctaggaacctgtcgagtaacctaaatatcagtcaggtccaaggtacctacaaatacggatacctgaccatggacgaaacaaggaaattactcctcttgctggaaagtgatccaaaggtctacagcctccctcttgtgggtatctggctctccggcatcacccacatttactctccgcaggtatgggcttgttgcctccggtacattttcaatagtagcgtgcaggagagggtcttctctgagtccggcaacttcatcattgttctgtactccatgactcacaaggagcctgagttctatgagtgttttccttgtgatgggaagattcccgatttccggttccagctcctaaccagcaaagagacactccatctgttcaaaaacgtggagccgccagacaagaaccctatcagatgcgagctaagtgccgaaagccagaacgccgagacggaattcttttctaaggcctccaagaacttttccatcaagcggtcatcccaaaaactgtcttctggcaagatgccaattcacgaccacgatagcggagtggaagacgaggatttcagtcccaggccaatcccaagtccacacccggtcagtcagaaaatctccaaaattcagccctcagtccctgagctgtccctggtgctggacggtaactttatcgagtccaacccactgcctacacccctagagatggttaacaacgagaacccacccctgatcaatcatttggaacacttgaaacccctacaacctcagttgtacgacgaaaaacacagtccggaggtagaggccggagaaccatcattacgaggaatccctaatcaacttaaccaggacaaacccgccttgctgagacactgcaaggtaaggcagcctccagcatataagaaaggtaatccacacactcgcaactcaatcaagccctccagccacaacggccccagccacgacatattcgaaaagcttcagacagtgtccgcaggtaatgtccagaatgaggagtacccaattagaccttccactctgaacagccgccagtcgtctttagccccacaaagccagccccacgatttcgttttctctccacacaattcaggacgccctatggaacttcagataccgaccccgcccctgccgtcctactgttccacgaatgtatgtcgatgctgccagcaccattcacatattcagtattcaccactcaacagttggcagggggccaatactgtcggatcaatccaggacgtccagtcagaggctctgcagaaacactcgcttttccacccttcaggttgtcctgctctttattgtaatgccttttgtagctctagctctccgatagctctccgcccacaaggggacatgggaagctgtagcccgcattctaacatagagcccagccccgttgcaaggccgccttcccacatggacctctgtaatccgcagccctgtactgtctgtatgcacacacccaagacggagagcgataatgggatgatgggtttaagtccagatgcttaccggtttctgacggagcaggatagacagctccgtttactccaagcacagatacaacggctgctagaggctcaaagcctgatgccatgtagccccaagactacggccgtggaggacactgttcaagccggccggcagatggaactcgtgagcgtcgaagcccagagctccccggggctccacatgcgaaagggcgtgtctatcgccgtctcgaccggtgctagcctgttctggaacgcagccggagaagaccaagaaccggatagccaaatgaagcaggacgacacaaaaatttcaagcgaggacatgaacttttctgtcgacatcaataacgaggtcacctccctgccgggatccgcgtcgtcacttaaagccgtggacattccctcttttgaagagtccaatattgcggttgaggaggaattcaaccagcccctgtctgtgtccaacagctcttcgctcgtcgtcaggaaggaacccgatgttcctgtattcttcccttctggacaattggcagaaagcgtttccatgtgccttcagaccgggcctacagggggggcctctaataattccgaaacatctgaagagcccaagatagaacatgtcatgcagcctttactgcatcagcccagcgataatcagaagatatatcaagacctgctggggcaagttaatcatctgctcaactcctcctccaaagagaccgaacagccctcgacgaaggccgtgatcatcagccatgaatgcacacgaacacagaacgtatatcacacgaaaaagaagacacaccactccagattggttgataaggattgcgtgctcaacgccaccttgaaacaacttaggagccttggcgttaaaatcgatagtccaaccaaggtgaagaaaaacgctcacaatgtggatcacgctagcgtgctcgcttgcatttctccggaggctgtgatcagcgggctgaactgcatgagctttgcgaatgttggcatgtccggcctgagcccgaacggggtggacttaagcatggaggccaacgctatcgctctcaaatacttgaatgaaaatcagttgtctcaattgtctgtcacacgttcaaatcagaataattgcgatccattctctttattgcatattaacactgataggtcaaccgtcggactttcgttgatcagccctaataatatgtccttcgccacaaagaaatacatgaagcgctacggcctgttacaatcaagcgacaattccgaagacgaggaggagcctcctgataatgctgacagtaagagtgagtacctgctgaatcagaacctgcgatctatccccgaacagctcggggggcagaaggaaccttccaaaaacgaccacgaaattattaactgtagcaactgtgaaagtgtggggacaaatgcagataccccagtattgagaaacattactaatgaagtgcttcagacgaaggccaagcaacagttgacagagaaaccagcattcctggtgaagaatttgaagccctcgccagctgtgaatcttcgaaccggtaaagctgaattcactcagcatccagagaaagagaatgaaggagacattacgatctttcctgaatctctgcagccgtctgagacactaaagcagatgaactctatgaatagcgttggcacctttctggatgtgaaacgcctgaggcaactgcccaagctcttctag

SEQ ID NO: 133525 - DNA, 606 bp, synthetic construct
  misc_feature 1..606: note = Description of Artificial Sequence: Synthetic coding sequence
  source 1..606: mol_type = other DNA
atgagtttcgctaccttgaggcccgctccaccgggccgatatctttatcctgaagtatctcccctgtctgaagacgaagaccgcggttcagacagttccggatccgacgaaaagccatgtcgtgtccatgctgctagatgtggattgcaaggagcgcgccggcgtgccggaggcaggagggcaggaggaggaggccccggggggagacccgggagggagcctcgccaacgtcacacagcaaatgccagggaaagagacagaacaaactccgtcaataccgcttttacagctctgcgcacccttatccctacggagcctgctgatcgtaagttgtccaagattgagaccctgcgcctggcatcaagttatatcagccatcttgggaatgtgctgctagctggtgaagcttgcggagacggccaaccctgccattctggtcccgcatttttccatgccgcccgcgccggttccccgccccctccacctcctcctcccccagcaagggacggtgaaaacacccaaccaaaacagatctgtactttttgtctctctaatcaacggaagctgagcaaggaccgagaccggaagacagccattcgctcctag

SEQ ID NO: 133526 - DNA, 642 bp, synthetic construct
  misc_feature 1..642: note = Description of Artificial Sequence: Synthetic coding sequence
  source 1..642: mol_type = other DNA
atgcagctacctctggccctgtgtctggtttgcctcctcgtgcataccgcattccgcgtggtggaaggccaaggctggcaggcatttaaaaacgatgcaactgagattatacctgaactgggcgagtacccagaaccacctcctgaactggagaacaacaaaaccatgaatagggccgagaatggggggcgtccgccccaccatccctttgaaacaaaggacgtgtctgaatactcctgccgggaactgcatttcactcgatatgtaaccgatgggccttgccgatcagccaagcctgtcaccgaactggtgtgctccggtcagtgcggaccagcccgtcttcttccaaatgctatcggcaggggaaagtggtggagaccgtccggcccagacttccgttgcattcctgatcgctaccgggcccagagggtgcagttgctctgtcccggcggcgaggctcccagggctcgtaaagtgaggctggtggcttcttgcaaatgtaagcgcttaaccagattccacaaccagagcgagcttaaggacttcggcaccgaggccgcgcgccctcagaagggaaggaagccaaggcccagagcacgctccgccaaggcaaaccaggcagaactggagaacgcgtattag

SEQ ID NO: 133527 - DNA, 906 bp, synthetic construct
  misc_feature 1..906: note = Description of Artificial Sequence: Synthetic coding sequence
  source 1..906: mol_type = other DNA
atggccatgttagtgctcgttccaggaagagtgatgagacccctcgggggccaactctggcgtttcctgcctaggggtctagagttctggggccctgctgaaggcaccgctcgggtcttgctgcggcagttctgtgcgaggcaggccgaagcttggagggcatccggccgcccaggctactgtctggggacccgccccttgagcaccgccagacctccacccccatggtcccagaaggggcccggtgatagcacccgcccttctaagcctggtcctgttagctggaagagtttggccatcactttcgccattggcggggccttgttagcaggtatgaaacacgtgaagaaggagaaggctgagaaattggaaaaggagaggcagcgccacatcggaaagccactgcttggcgggcccttctctctgactactcacaccggtgagcggaaaacagataaggactatttgggccagtggcttctgatctacttcggatttacccattgccctgacgtgtgcccagaggagcttgaaaagatgatccaggtcgtcgatgagatcgattccattactactctccctgacctgactcctctgtttatatcgatcgaccccgagcgtgatacgaaggaagccattgcaaactatgtgaaagagttctctccaaaactagtcggcttgaccgggacccgggaggaggtagaccaggtcgccagggcctatagggtgtactatagccctgggcctaaagatgaagatgaggattatatcgtagatcatactataatcatgtatctcatcggaccggatggtgaatttcttgattacttcggacaaaacaagcgcaagggagagatagctgcgagtatcgcgacacacatgcgcccctataggaagaaaagttag

SEQ ID NO: 133528 - DNA, 813 bp, synthetic construct
  misc_feature 1..813: note = Description of Artificial Sequence: Synthetic coding sequence
  source 1..813: mol_type = other DNA
atggcaatgctggtgttggtgcctggccgggtcatgcgccccctgggcggccagctgtggcgttttctgccccgcggcctcgagttttgggggccggccgaaggcacagctagagtgttgctccggcagttttgcgcccggcaggccgaagcctggcgcgcaagtgggcgacccggctactgtcttggtacccgacccttgagtacggcccgccctccgccgccttggtctcaaaaagggcctggcgattccacccgcccttctaagcccgggcctgtgagctggaagagtctcgcaatcaccttcgcgattggcggtgcgctgctggctggtatgaagcacgtcaagaaggagaaggccgagaaacttgagaaggagcgacagcgacatatcgggaagcccctgcttggcggacccttctctctgacaacacacaccggcgagcggaagacagacaaggactacctcgattcgataaccaccctacccgatttgaccccacttttcatatccattgatccagagagggacacgaaagaggcaatcgccaactatgtgaaggagtttagccccaaactggtcggcctcacagggactcgggaggaggtcgatcaggtggccagagcatatcgggtttactacagtcctggcccgaaagacgaggatgaggactacatcgtggaccacacgataatcatgtacctgataggccctgacggtgagttcctagactactttggccagaataaacgaaaaggagaaatagcagcgtctatagccacccatatgagaccatacagaaagaagagttag

SEQ ID NO: 133529 - DNA, 801 bp, synthetic construct
  misc_feature 1..801: note = Description of Artificial Sequence: Synthetic coding sequence
  source 1..801: mol_type = other DNA
atgctgttgctgactagatcccctaccgcatggcatcgactgtctcagctcaagccccgcgtcctcccggggaccctgggtggccaggctctgcatctgcgtagttggctgctctcacgccaaggtcccgccgaaaccggcgggcaggggcaacctcagggaccagggctaagaacccggctgctgattactggcctgttcggggcagggctcggcggtgcgtggctggctctgcgggccgagaaggaacggttgcaacagcaaaaacgtacagaggcacttagacaggcagccgtaggacagggagactttcatcttttagatcacagaggccgcgctcgatgcaaagctgacttccggggccagtgggttcttatgtatttcggatttacgcattgccccgatatctgccccgatgaattagaaaagctagtgcaggtggtgcgacaactcgaggccgaacctggcttgcctccagtgcagcccgtgttcataaccgtggatcctgagagagacgacgtcgaggcaatggcccgatatgtgcaggactttcatccccgactcttgggcctcaccgggagtacaaaacaggttgcccaggcctcacactcctaccgggtgtactacaacgcaggacctaaagatgaggaccaggactacatagtggaccattctattgcgatctatctgctcaaccctgatgggctgttcacagactactacgggcgtagtagaagcgcagagcaaattagtgattcagttcggagacatatggcagcctttcggagtgtcctgtcctag

SEQ ID NO: 133530 - DNA, 801 bp, synthetic construct
  misc_feature 1..801: note = Description of Artificial Sequence: Synthetic coding sequence
  source 1..801: mol_type = other DNA
atgctcctgctgaccagatccccaaccgcctggcatcggctctctcagctcaaaccccgggtactcccagggactctcggcggacaggctctccacctgaggtcttggctgctctcgagacagggaccagcagaaacaggcgggcagggccaaccacaggggccaggattgcggacccgccttttaattactgggcttttcggtgccggtctggggggagcctggctggccctgcgggccgagaaggagcgactgcagcagcagaagagaactgaggctctgagacaagcagccgtggggcagggagatttccatttactcgatcataggggtagagcccgttgtaaagccgatttccgaggtcagtgggtactaatgtactttgggttcacacattgcccagacatctgtcctgatgagctagagaagctcgttcaggtggttcgacaacttgaggccgagccaggcttgccccccgttcaaccagtgttcataactgttgatccagaacgagatgacgtagaagccatggccaggtacgtgcaagacttccaccccaggctcctcgggctgaccggcagcactaagcaagttgcacaagcctcccactcttaccgggtgtactataacgcagggcctaaggatgaagaccaagactacattgtcgatcattcaattgcgatctatctgctcaaccccgatggcctgttcacagactattatggacggagccgcagtgcggagcagatctcagattccgttcgaagacacatggccgctttcaggagcgtgctatcctag

SEQ ID NO: 133531 - DNA, 411 bp, synthetic construct
  misc_feature 1..411: note = Description of Artificial Sequence: Synthetic coding sequence
  source 1..411: mol_type = other DNA
atgctcctcttgacccgctcaccaactgcctggcaccgcctcagccagctcaaacccagagtgctgcctggcacgcttggcggccaggccctacatctgaggtcctggctactgtctaggcagggtccagccgaaactgggggccagggccagccacagggccccggcctgagaaccaggcttctgatcactgggttgtttggagctgggctaggcggtgcttggctggctctcagggcggaaaaggagcgacttcagcagcagaagaggaccgaggctctgaggcaggccgcggtaggccagggtgatttccatctgctggaccatcgggggcgtgccagatgtaaagctgatttcaggggacaatgggtcctgatgtacttcggttttacccactgcccagacatatag

SEQ ID NO: 133532 - DNA, 411 bp, synthetic construct
  misc_feature 1..411: note = Description of Artificial Sequence: Synthetic coding sequence
  source 1..411: mol_type = other DNA
atgctcctcctgactcgcagtcccactgcctggcaccgcctgagccaactgaaaccaagagtgcttccggggaccctgggcggacaggcgctgcacctgcgatcctggctgctgagcagacaaggcccagcagagactggcggtcagggtcagccccaaggccccggactgcggacccggttgttgattacaggccttttcggagcggggctaggaggcgcgtggcttgccttgagagcagagaaggaaagattacagcagcagaagaggaccgaagcactccgacaggcggctgttgggcagggggactttcacctgttggatcacagggggagagctaggtgcaaggctgactttagaggccaatgggtgttgatgtactttggatttacacactgtcccgatatttag

SEQ ID NO: 133533 - DNA, 801 bp, synthetic construct
  misc_feature 1..801: note = Description of Artificial Sequence: Synthetic coding sequence
  source 1..801: mol_type = other DNA
atgctcctgctcaccaggagtcccacggcatggcatcgcctaagtcagctgaaaccccgggttttaccagggacactgggtggtcaggctcttcatctgcggagctggctgctcagtcggcaggggcccgctgaaaccggagggcagggacagccgcaggggccagggcttcgtaccaggcttctaataaccgggctgttcggggccggtcttggcggggcctggctggctctgcgggccgagaaggagcggctgcagcagcagaagcgtaccgaagcccttcgccaggctgccgtggggcagggtgacttccatctgctggaccacaggggcagggcgagatgcaaggccgatttccgcggtcagtgggttctgatgtactttggcttcacacattgtcccgacatctgccctgatgaattggaaaaattggtgcaggtcgttcggcaactcgaagccgagccaggattaccacctgtgcagccagtgttcattacggtggatccagaacgagatgacgtcgaagctatggccaggtacgtgcaggatttccatccaagactgctgggtctgactgggagcactaaacaggttgcccaggcctctcactcgtatagagtctactataatgcaggtccgaaggatgaggaccaggattatatcgtcgatcacagtatcgctatttacctgctcaatcccgacgggctgttcaccgattattatggcagatcccgcagcgccgaacagatcagtgacagcgtgcggagacatatggcggcttttcgaagtgtgctctcttag

SEQ ID NO: 133534 - DNA, 801 bp, synthetic construct
  misc_feature 1..801: note = Description of Artificial Sequence: Synthetic coding sequence
  source 1..801: mol_type = other DNA
atgctgctccttacccggtcccctacagcctggcaccgacttagccaacttaaaccacgtgttctgcctggcacccttggcggacaggccttacaccttaggtcctggttattgtcgcgccagggcccagctgaaactggaggccaggggcagccccaggggcccgggctcagaaccagattgctcattacggggcttttcggggcggggctgggaggcgcatggctggctctgcgcgcggagaaggagcgcctgcagcaacaaaaaaggaccgaagcactgagacaggccgcagtgggtcagggcgacttccacctactggatcatagagggagggcgcgctgtaaagccgatttccgtggacaatgggtacttatgtactttggcttcacacactgccctgatatttgccccgatgagctggagaaacttgtacaggtcgtcagacagctcgaggctgaaccaggacttccccctgtgcagcccgtgttcattactgttgatcccgagcgagatgacgtcgaggccatggctaggtatgtacaggactttcaccctcgcctgctcggcctgacagggtcaactaagcaggtggctcaagcttcccacagctacagagtatattataacgccggacccaaagatgaggaccaggattatatagtcgaccactccattgcaatatatctcttgaatccggacgggttgttcacagattactacggaagatccagatcagccgagcagatctcagactctgttcgtaggcacatggccgcgtttagatcggtgttgtcttag

SEQ ID NO: 133535 - DNA, 1047 bp, synthetic construct
  misc_feature 1..1047: note = Description of Artificial Sequence: Synthetic coding sequence
  source 1..1047: mol_type = other DNA
atgcccaggagcttccttgttaagaaggtcaaactggacgccttttctagtgcagatctcgagagcgcttacgggcgcgctagaagtgatttaggtgcccccctgcatgacaagggttatctgtctgattacgtcggcccatcctccgtctacgacggcgatgccgaggctgcccttctgaagggacctagccctgaacctatgtacgcagcagcagtgcgaggagagctggggcctgctgcagccggcagcgcgccaccccccacacctcgcccagagctcgctacggccgccgggggttatataaacggtgatgccgctgtgagcgaagggtatgccgcagacgccttttttattactgatggtaggtctaggcgaaaggccagtaatgccggtagcgccgcggctcccagtaccgcttcggcagccgctcccgacggcgatgccggcgggggaggcggtgcaggcggtaggtctttgggatcaggtcccggcggtcggggtggaactcgtgccggagccggcacagaggcaagagctgggccaggcgccgcaggagcaggcggacgccatgcttgcggcgaatgtggaaaaacctacgctacttcttctaacctgtctcgacataagcagacccacagatcacttgactcacaactggccaggcgttgtcctacctgtggtaaggtttatgtgtctatgcctgccatggccatgcacctgctcacacacgatctgcgacataagtgtggagtgtgtggcaaagcatttagccggccatggctgttgcagggccatatgaggagtcatacaggcgagaagccctttggatgtgcacactgcggtaaggctttcgcggaccgtagtaacctgcgagcccatatgcagactcattccgctttcaaacacttccagtgtaagaggtgcaaaaaatcttttgcacttaagagttacctaaacaagcattacgaatccgcatgtttcaaggggggtgctgggggacccgccgcacccgcccctccacagctgagtccagtgcaggcctag

SEQ ID NO: 133536 - DNA, 4893 bp, synthetic construct
  misc_feature 1..4893: note = Description of Artificial Sequence: Synthetic coding sequence
  source 1..4893: mol_type = other DNA
atgctgaagtgtatccccctctggcgctgcaacaggcacgttgaatccgtcgacaagagacattgcagcctacaggctgtccccgaagagatctaccgatatagcaggagcctcgaggaattgttattggacgcgaaccagctgcgggagttacctaaacccttttttcgcctccttaacctgagaaaactcggtttatctgataatgaaatccagaggcttcctcccgaagtcgccaattttatgcagttggtggagttagacgtcagccgaaacgatatcccagagatccctgaatcaattaagttctgcaaggcactagagattgctgactttagcggaaatcccctatcccgtctgcccgacgggtttacacaactgcggtcacttgcacacctcgctctgaatgatgtcagcctccaggcccttcctggagacgtggggaacctggctaacctggtgacactggagcttcgggagaatttacttaagtccctgccagcatcattgtcttttctcgttaagctcgaacaactggatttgggtggtaacgacctggaagtgctgcctgacacactgggcgctctgcccaaccttagggaactctggttggataggaatcagttgagtgccctgcccccagaactcggcaatcttcggcgcttagtctgtctcgatgtgtccgaaaatcgactcgaagaactccccgccgagctgggtgggctcgtgttgctgaccgaccttctccttagccagaacctgctaaggagactacctgacggcatcgggcagctgaagcagcttagtatcttaaaagttgatcagaacagattgtgcgaggtcacagaggccatcggggactgcgaaaacctctcagagctgattctgaccgaaaacctgctcatggcactgccgcgatctttgggcaagcttacgaaattaaccaatctcaatgttgatagaaatcatcttgaggcattaccacctgagattggcgggtgtgtggcactgtccgtgctatcactccgcgacaacagactggccgttctgcccccagaattggcacataccacggagctgcacgtgttggatgtagccggcaaccgcctacaatccctgccattcgcactgacgcacttgaatctgaaagcattatggctcgctgagaaccaggcccaacctatgctgagattccagaccgaagatgacgcaaggacaggcgagaaagtcctcacctgctatctgctcccccaacagccccccccctctttggaggacgctggccagcaggggtccctgtctgaaacttggtccgatgcccccccttcccgtgtatcagtcatacaattccttgaagcccctattggagatgaagatgcagaggaggcggccgcagagaaacgaggcttgcaacggcgtgctaccccacaccccagtgagttaaaagtgatgaaacgatcaatcgagggaaggagaagcgaggcttgtccctgtcagcccgatagtgggagccccttgcccgccgaggaggaaaaacgcctgagcgcggaaagcggcttgtcggaggattcccgcccttctgctagcacggtgtcagaagctgaacctgaaggtccctccgcagaggctcagggaggctctcagcaagaggctactaccgctggcggggaggaagacgccgaggaggattatcaggagccaaccgtgcactttgccgaagatgcactactcccgggtgatgatcgcgagatcgaggaaggacagcccgaggcgccttggactctgccgggcgggcggcagcggctgatcaggaaggacacgccacattacaaaaaacatttcaaaatatctaagttgccacagccggaggctgttgtggctctcctccagggcatgcagcctgacggggaagggccagtggcccccgggggctggcataatgggcctcacgccccttgggcaccacgggcccagaaggaagaggaagaggaggaggagggttccccccaggaggaagaagttgaggaagaggaagagaacagagctgaggaggaggaggcttccaccgaggaggaggataaggagggggcggtcgtttccgctccctcagtgaagggagtgagtttcgaccaggccaacaatttactgattgagcctgcaagaatcgaggaagaggaacttacattaacaatcctgcgacaaacaggcgggctcgggatttcaatcgcaggcggcaaagggagcactccttataaaggagacgatgagggaatctttatctctcgcgtgtccgaggagggaccagcagcgagagccggggtaagagtgggggataaactgctcgaagtgaacggagtggccctgcagggtgccgagcaccacgaggccgtggaagccctgcggggcgcaggcaccgccgtccagatgagggtgtggagggagagaatggtggagccggagaacgcagtgaccatcacaccattgcgtcctgaagacgactattcacctagggaacggcggggtggaggccttaggttaccactgctacctcctgagagcccagggccattgcggcagagacatgttgcgtgcctagccagaagtgagaggggactcggcttttccattgctggcgggaaaggcagcactccatatcgcgccggtgacgcgggaatcttcgtctcaagaatcgccgagggaggcgcagcccatcgcgccggcacgctgcaggtgggcgacagggtgctgtcgataaacggggtagatgttaccgaggctcgacatgatcacgctgttagtctcctcaccgctgcttcacctacgatcgctctcctcctcgaacgcgaggctggcggacccttacccccgtcccctctcccacatagtagcccccctaccgcggccgtggccacaacctccattacgaccgcgactcctggggtcccaggcctcccctcacttgcgccaagtcttctcgcagccgcattggagggaccctacccagttgaggaaatacgactgcctagggcagggggccctttggggttatctattgtgggcgggtctgaccacagttcacatcccttcggtgtgcaggagcctggggtgttcatttctaaggtcctgcctcggggcttggccgcacgcagcggcttgcgagtgggtgatcggattttggccgtgaatggacaggatgtgcgtgacgccacccatcaggaggcagtgagtgcacttcttaggccctgcctggagctgagtcttctggtgcggagggaccctgcccctcctggactgagggaactttgtatccagaaggccccaggagaaaggctcggaatcagtattagaggaggagcacgcggacatgcagggaatcctcgggaccctaccgatgagggtatttttatatccaaggtaagtcctactggcgctgctggtagggacgggagattacgggtgggactccgattactagaggtcaaccagcagtccctgttgggtctgacacacggagaggctgtccagcttctgcgctcggtgggggacactttgaccgtgttggtttgtgacggttttgaggcgtccactgatgcagcgcttgaggtgagcccaggggttatagccaatccgttcgctgccggcattggccacagaaacagccttgagtctatttcaagtattgaccgagaactcagccctgaggggccaggcaaggaaaaagaattacctggccaaacccttcactgggggccggaggctaccgaggccgccggacgcggattacaacccctcaaactggattatcgcgcactcgcggcagtccccagtgcagggagcgtgcagcgggtaccgagcggcgcggcaggtggtaaaatggctgagtctccttgcagtccatcagggcagcagccaccctcccctccttctccagatgagcttccagccaatgtgaaacaggcatacagggcatttgctgcagtacccaccagtcatcccccagaagatgcaccagctcaacccccgactccagggcctgccgcctcccctgagcaattgtcgttccgggagcggcagaaatattttgagctggaggtccgcgttccacaggcagagggtcctcccaaacgcgtgagcttggtcggtgctgatgatttaaggaaaatgcaggaggaggaggcacggaagcttcaacagaaaagagcccagatgcttagagaggcagctgaggctggggcagaagccaggttggcccttgatggagaaacattaggcgaggaggagcaggaagacgagcagccgccgtgggcctcgccgtcccctacgtctcgccagagccctgcctcgcctcctccgctaggaggaggggcaccggtccggaccgctaaagcagagcggaggcaccaggaacggctgcgggtgcaatcaccagaacctcctgctcccgaacgggccctgagccccgcagagctaagggcgcttgaagctgagaagagagcactgtggagagcagccagaatgaagagcctggagcaagatgccctgcgcgcccagatggtgctctcacgttctcaggagggacgcggaactcgaggtcctctggagcgcctcgccgaggctccctctcctgcccccactccgtcccccacgccggtggaggatctcggcccccaaaccagtactagccctggccggctctccccagattttgcagaggagctgcggtccttggaaccctcccccagtcccgggccgcaggaagaggacggagaagtggccttagtgctattggggaggccctccccgggtgcggtgggcccggaagacgtcgctctctgtagctcccgaaggccagtgcggccagggaggcgcggtctgggacccgtacctagctag

SEQ ID NO: 133537 - DNA, 4650 bp, synthetic construct
  misc_feature 1..4650: note = Description of Artificial Sequence: Synthetic coding sequence
  source 1..4650: mol_type = other DNA
atgcaacttgtcgaactggatgtgtcaagaaatgatattcccgaaattccagagagtattaaattctgtaaggcactggagattgcagacttttctggaaatccacttagcaggctgcccgatggtttcacgcagcttcggtctctagcacatttggcgctcaatgacgtatcgctgcaagctctccccggcgacgttgggaacctggctaatttagtcactctcgaattgcgagagaatcttctgaagagccttccagcatctctgagctttctcgttaagcttgaacagctcgacctcgggggtaatgatctggaggtcttaccggatacacttggcgcactccctaacctcagggagctgtggctggatcgcaaccagttgtcagcccttccccctgaactgggtaacttaaggcggttagtgtgcctcgacgtgtcagagaatagacttgaggaactgcccgctgagctgggaggactggtcttgctgaccgatctgctactgagtcagaatttgctgaggcggctcccagacggaatcggacaactcaaacagctgtctattctgaaggtggatcaaaataggttgtgtgaggtgaccgaggccatcggtgactgtgagaatctgtccgagctgattcttaccgagaatctactgatggctctgccacgttcattgggaaagctgacaaagctaactaacctgaatgtggatagaaatcatttggaggccctgcccccagaaattggagggtgcgtggccctctccgttttgtctctgcgcgataaccgtcttgcagtgctccccccagaactggctcacacaactgaactgcacgtgttggacgtagcaggcaacagattgcagtctctgccattcgcccttacccatctcaacttgaaagcattatggctggccgagaatcaagcccagccgatgctgcgatttcagaccgaagacgatgcccggacaggcgagaaagtcctgacatgctatctactcccccagcagccaccaccaagcctggaagacgctggccaacagggctccctgagtgagacgtggtcagatgctccccctagccgggtctctgtcatacagttcctcgaggctcctatcggagatgaagacgctgaggaggctgccgccgaaaagagggggctgcagaggcgagccacaccccacccctccgagctcaaagtcatgaagcgaagtatcgaaggccgccgcagcgaagcctgcccctgccagcccgactcaggctcaccccttccggctgaagaggagaaacgtctatccgctgagtcagggctttcagaggacagcagaccttctgccagcactgtttctgaagcagagcccgagggcccgagtgccgaggcccagggaggctcgcaacaagaggcaaccacagccggcggtgaggaggacgccgaagaggactaccaggagcccactgttcatttcgccgaagacgcccttttgccaggagacgaccgtgagatcgaagagggccagcctgaagcaccatggacattgcccggtggcaggcagcgcctgattcggaaggatacaccccattacaagaagcattttaaaatctccaagctccctcagccggaagccgtggtcgccctgctgcagggcatgcagccggacggcgaaggacctgtggctccaggtgggtggcacaatggacctcacgccccctgggcgccgcgggcccagaaggaagaagaagaggaagaagaaggctctccccaggaggaggaagtagaggaggaggaggagaacagggccgaagaagaagaggccagcactgaagaggaggacaaagagggagcggtggtttcagcgccatcggtgaagggcgtgtcttttgaccaggccaataacctgctcatcgagccggcacggattgaggaggaggagttaactcttacaattctccggcaaaccggcggtctgggcatttctattgctggaggtaaaggatcaactccctacaaaggcgatgatgaggggatttttatttcccgggtctccgaggaaggacctgccgctagggctggggttagggtgggagacaaacttcttgaagtcaatggggtcgctttacagggggcagagcatcatgaggctgtagaggctctacgtggtgcaggcacagcagtgcagatgcgggtctggagagagagaatggttgagcctgagaacgccgtgactatcacccccctgaggcccgaagacgactactcaccccgcgagaggcggggaggcggcctccgattgcctttgctcccgcccgaatcaccggggccactcagacaaagacatgttgcgtgtctggctcgatccgagcggggcttaggatttagcatagcaggcggaaagggttctactccctaccgagccggggatgcaggtatttttgtgtcacgcatcgctgaagggggtgcagcccatagagcggggaccctgcaggtgggggaccgtgtgctatccataaacggtgtggacgtgactgaggcccgacatgaccacgcagtttcccttctgacggccgccagtcctacgattgccctgttgctggagagagaagccggaggcccactgcccccttctccccttccgcactcctcacctcctaccgccgcggttgcaactacttcgataaccacggccacgcccggggtccctggactcccttctctggcccccagcctccttgcggctgcactcgaagggccctatccagtggaagagatcagattacccagagctggaggcccgttaggcctttcaatcgttgggggctccgaccactccagtcaccctttcggcgtccaagagcccggggtctttattagcaaggtattgccccggggtctcgccgctaggagcggccttagggtgggagatcgcatccttgcagtgaacggccaagacgttcgcgacgcaactcatcaagaagcggtgagtgccttgttgcgcccatgtctggagttatcactgttagtcagaagggatcccgctccgccaggtctgagggagctctgtattcaaaaggccccaggtgagcgtttagggatcagcattcgcggcggggctcggggacatgccgggaatccacgcgaccccaccgatgaggggattttcatctccaaagtctctccaaccggggccgccggcagagacggacggctgcgagtgggcctgcgtctgctagaggtgaatcagcagagtctgcttggcttaacgcacggagaggcagtgcaattgctgaggtcagtgggtgatacactcactgtgctggtgtgtgatggctttgaggccagtacagacgctgccctagaggtcagcccgggtgtgattgcaaacccttttgctgcaggaataggacaccgtaatagcctggagagcatcagttccattgaccgcgaactttcccccgaaggaccgggcaaggagaaggaactgcctggacaaacactccactggggccctgaagctaccgaagcggcaggaagaggcctgcagccactgaagttggactaccgagccttggctgcagtgcccagtgcagggtcagtccaacgggtgccctccggggcagccggaggaaagatggccgagagtccctgctccccatcgggccagcagcccccttctccccccagtccagacgagttacctgccaacgttaagcaagcatatcgcgctttcgctgccgttcccaccagccaccctcctgaggacgcgcctgcccagccgcctacgcccgggcccgccgctagccccgagcagctcagcttccgcgagagacagaagtatttcgagctggaagtgcgcgtgccacaggctgaagggccccccaagagggtgagcctcgtgggcgcggacgatctgcggaagatgcaggaggaggaagcacgtaagcttcagcagaagcgcgcccaaatgctgcgcgaggcggctgaagctggagcagaggctcgcttggccctggacggggagacactgggcgaggaagagcaagaggatgaacaaccaccatgggcttccccctctccaacaagcaggcagtcacctgcatcccctcccccccttggcgggggcgcccccgtaagaacagctaaagccgagcggcgccaccaggaaagattgcgcgttcaatcaccggaaccacccgcccctgagcgagctctgtcaccggccgaattgagggcactggaggcagaaaaacgcgccctgtggcgagcagcacggatgaagtcgctggaacaggatgcactgagggcacagatggtcctttcgcggtcccaggaaggccgcggcactaggggaccactggagcggctcgcagaagctcccagccccgcccccacaccttcacctacaccagtggaggatctcggaccccaaacttctaccagccctgggagactctccccagactttgcagaggaactacgaagtctggagccctcaccaagtcctggaccacaagaggaagatggggaagtagctcttgtcctcttgggacgcccctctcccggcgctgtggggcccgaagacgtggccctatgttccagcaggcgccccgtgcgccctgggcggcgaggactcggaccagtccctagttag

SEQ ID NO: 133538 - DNA, 2268 bp, synthetic construct
  misc_feature 1..2268: note = Description of Artificial Sequence: Synthetic coding sequence
  source 1..2268: mol_type = other DNA
atgcaaccggacggtgaagggcccgtcgctccaggtgggtggcacaatggaccccacgctccgtgggcgccgagagcccaaaaagaggaagaagaagaggaggaaggcagtcctcaagaggaggaggtggaagaggaggaggagaatagggcagaagaagaagaggcaagtactgaagaggaggataaagagggtgccgtcgtttcggctccctcagtcaaaggagtgtctttcgatcaggctaacaatctcctcattgaacccgcgcggattgaggaggaggaattgactctgaccattctgcggcagactggcggtctgggcatctctattgccgggggtaaggggagtacgccttacaaaggcgacgatgagggcatatttattagtcgcgtatcagaggaggggccagcggcaagagcaggcgtgcgggtgggagataaactcctggaggtcaacggagtcgcgttacaaggcgcagaacaccacgaggccgttgaagccctgcgcggtgccggaacagctgttcagatgcgggtctggagggagcgcatggtggagcccgagaatgcagtgaccattactcctctaagacccgaagatgactatagccccagagaacgaaggggagggggtttgaggctcccacttctccccccagagtccccaggcccattgcggcaaaggcatgttgcgtgccttgctcgctcggaacggggtttggggttttcaatcgctggaggcaagggttctactccatacagggctggggatgcagggatctttgttagtaggatcgccgagggcggtgcagctcatagagccggcaccctgcaggttggcgaccgcgtgctgtcaattaatggcgtggatgtcacagaggccaggcacgaccacgccgtctctctgctcaccgccgccagtcccacaattgcactactgctagaaagggaagccggtggtcctcttccgccctctccgttgcctcatagttctccccccacagctgccgtggcaacaactagcatcactactgcaacgcctggcgtgccaggtctcccgtctctggccccttccctgttggctgctgctctggagggcccctaccccgtggaggaaatacgcttgcctcgtgcaggcggccctctcggactcagcatcgttggaggcagcgaccacagttctcatccttttggggtacaggagcctggcgtttttatcagcaaagtactcccccgtggattggccgcccggagcggcttgagggtgggagacaggattttggctgtgaacggacaggatgttcgtgatgccactcaccaggaggccgtgtccgcactcctgaggccctgcctggagctatctctcctggtgcggagagatccggccccacctgggctgagggaactatgcatccagaaagctcccggggagagactgggtatatccattcgaggaggcgcaagaggtcacgccggcaaccctagagatcctacagatgagggcatatttatatccaaggtgtcacccaccggggcagctggcagagacggaaggttgcgagttggcttacgtctgctggaggtgaatcagcagagccttctcggactgacacacggcgaagctgtgcagcttctccgatcagtgggagatactcttactgtgttagtttgcgatggattcgaggcaagcacagacgccgcgctcgaggtttcccccggggtcatcgccaaccctttcgcggccgggatcggccacagaaattcactggagagcatcagctcaattgacagagaactgtcacccgagggccctggaaaggagaaggaactccccgggcagaccttgcattggggccctgaggccacggaagcagcgggccgcggtttacagcctctgaaactggattacagagcattggccgccgtgccctccgctggttctgtgcagcgggtgccctcaggagccgctgggggtaaaatggctgaaagcccgtgctcaccctcaggacagcagcccccaagtccaccttctcccgatgagcttccggcaaatgtcaaacaggcgtaccgagcctttgctgcggtaccaacatcacacccccccgaagatgcacccgctcagccgcctacaccaggaccggccgcgtccccagagcagctgagtttcagagagagacagaaatacttcgaattggaggtcagagtgcctcaggccgagggaccccttaggccgggaagacgtgggcttggaccagtcccctcgtag

SEQ ID NO: 133539 - DNA, 4968 bp, synthetic construct
  misc_feature 1..4968: note = Description of Artificial Sequence: Synthetic coding sequence
  source 1..4968: mol_type = other DNA
atgctgaaatgcatacccttgtggaggtgcaatcgtcatgtcgagagcgtggacaagcgccactgttcactgcaagctgtaccggaggaaatttacagatattctagatccttagaggaactcttgttggacgcaaaccagctgagagagttgcctaagcctttttttcggcttctgaacctgcgaaagttaggcctctctgacaatgagattcaaagacttcctccggaggttgctaacttcatgcagttggtggagctggatgtatctagaaatgacataccagagataccagagtccattaagttctgtaaagctctggagatcgccgatttttccggaaacccactgagccggctgccagatggcttcacgcagctgcgctcactggcgcacctagctctgaacgatgtgagccttcaagccctgccaggagacgttggaaacctggctaacctcgtgactttggaactcagagagaatctgctcaaatctctgcctgcttctctgtcctttctcgtcaaacttgagcaattagatctaggtggaaacgacctggaagtgctgcccgataccctcggtgccctccccaatcttagggaactctggctggatcgaaatcagctctcagcactaccccctgaacttggtaatctcagacgcctggtatgtcttgacgttagtgagaataggctggaagagctgccagcagagctcggcggtttagtcttacttacagatcttctactctcacagaacctgcttagacgacttccggacggaattggacagctgaaacagttgagtattttgaaggtcgaccagaacaggctgtgtgaggtaacggaggcgattggggactgcgaaaacctgtcagagctcatccttacagagaacctgctaatggccttgccacgttcgcttggaaagcttactaagctgacgaatctgaatgtcgatcgtaatcatttggaagctctgcctccagaaatcggcgggtgcgtcgccttatccgttctgtccttgagggacaacaggcttgccgtcctcccgcctgagctggcccacaccactgagttgcatgtgctcgatgttgcagggaacagactccaaagcctaccctttgctttaacacacttgaacctcaaagctttatggctggccgagaatcaggcccaaccaatgctcagattccagactgaggacgacgcgcgaaccggtgaaaaagtgcttacatgttatttacttcctcagcagccccctccgtcccttgaggatgctggacagcagggcagcctgtctgaaacgtggtccgatgcccctcctagtcgggtatccgtcatccaattccttgaggcaccaatcggggatgaggatgctgaagaagcagcggccgagaagagaggcctgcagaggagggccacacctcatccttccgaactgaaggtgatgaagaggagcatcgagggccgcagatcggaggcctgtccatgtcaacccgacagtggaagtccgcttcccgctgaagaggagaagcgtctctccgcggagtcaggtctgagcgaggattcccgtccttccgccagtaccgtgtcagaggctgagcccgagggcccgtctgccgaagcccaggggggcagccagcaggaggccaccacagcggggggagaggaggacgccgaagaggattaccaggagcccacagtgcacttcgccgaggatgccctactgcccggagacgatagagagattgaggaggggcagcctgaagcgccttggacgctgccaggaggacggcaaagactgatccggaaagacaccccacactacaagaaacatttcaagattagtaaactcccccagccagaggccgtggttgctctgttacaggggatgcagccagacggcgaaggtccagtcgcgcccggtggctggcacaacgggccgcacgccccgtgggcaccccgggcccagaaggaggaggaggaggaagaagaagggtccccacaggaagaagaggttgaggaagaggaagaaaacagggccgaagaagaggaagctagcacggaggaagaagacaaggagggggcagtagtgtccgccccttctgtgaagggcgtgagcttcgatcaggctaacaacctgttgatagagcccgccaggattgaggaggaggagcttaccctcactatcttacgtcagactgggggtcttggcataagtattgctggaggaaaaggcagtaccccctacaaaggagacgatgagggtattttcatctctcgggtgtccgaagagggacctgctgctcgcgctggggtcagagtaggcgacaagttgttagaagtcaatggcgttgccttacagggagccgagcaccacgaggcggtcgaggccttgcgtggggccgggacagctgtgcagatgcgggtgtggagggagcgcatggtcgaaccagagaatgcggtgaccatcactccgcttcgccccgaagacgattactctccgagagagaggcggggcggggggctgaggctgcccctactgccccctgaatccccagggccattgcgtcaacgccacgtcgcctgtctcgcacgttcagagaggggcctggggtttagcatagcaggcggcaaagggtctactccgtaccgcgctggagatgcggggattttcgtgtcaaggatcgctgagggtggggcagcccacagggcgggtaccctgcaggtcggtgatagggtgctgtctattaacggggtggatgtcaccgaggctaggcacgatcatgccgtgtctctgctgactgccgcctcccccactatcgctttgctgctggaacgcgaggcgggtgggcccctgcctcctagccctctaccccatagctctcccccgacagccgcagtcgcaacaacctcaataacaaccgccaccccaggggttcccgggctgccctcgcttgctccctcgttgctggctgccgcattggagggaccctatcccgtggaggaaattaggctgccgagagctggagggcctctcgggctttcaatagttggtggctctgatcattctagtcatccttttggagtgcaggagccaggcgtcttcatttcaaaagtgctgccacgggggcttgctgcgaggagcggtctaagagttggggaccggattctggccgttaacggacaggatgtgcgggacgcgactcaccaggaggccgtgtcagctctgttgaggccttgcctcgagttgtcccttttagtgaggagagatcctgccccgcccggtcttcgcgagctttgtatccagaaggcccccggagaaagattgggcatttcaatccgcggaggagcccgcgggcacgccgggaatccaagagatccgactgatgagggcatattcatatccaaagtgtccccaacgggggctgccggtcgtgacggccggcttcgggtgggccttaggttgctcgaggtaaaccagcaaagcctgttggggctcacacacggagaggctgtgcaactactgcgatctgtgggcgacacccttactgtacttgtgtgtgacggctttgaagcctccactgatgctgccctggaggtgtctcctggcgtgattgccaacccttttgccgcgggcatcggacatcgaaactctctggagagcattagctcgatagaccgagagttatcccccgaggggcctggaaaggaaaaggaactgccaggccagaccctccactgggggccggaagctaccgaggctgctggccgcggccttcaaccgctgaagctcgactaccgggccctggccgcagtgccttctgcaggaagcgtccaaagagtgccatcaggggcagcaggcgggaaaatggccgagagtccatgcagccccagcgggcaacaaccaccaagccccccgtctcctgacgaattacctgcaaacgtcaagcaagcataccgcgccttcgcagccgtgcccaccagccatccacctgaagacgcacctgcccagcctcctacacccggccccgcagcatccccagaacaactgagtttccgggaacgacagaaatatttcgaattggaggtgcgtgtaccacaggccgaaggtcccccgaaaagagtgtctcttgttggggcagatgatcttaggaagatgcaagaagaggaggcccgcaaactccagcagaagagggcccagatgttgcgcgaggccgccgaagccggcgcggaggcacgacttgcgctggatggcgagactctgggtgaggaggagcaggaagatgaacagcctccttgggcttctccaagtccaacttctagacagagcccagctagcccaccacccctgggtgggggagcccctgtgcgcaccgctaaggcggaaagacggcatcaagagagattgcgagttcagtctccggaaccaccagcgcccgaacgggccctgagccccgccgagttacgtgcactggaagcagagaagagggcgctctggcgcgccgcaaggatgaagtccttggaacaagatgctttaagggcccagatggtcctgtcaaggtctcaggaaggcaggggaactagaggcccattagagcggctggcagaggcgccttctccagcaccaacaccaagtcctaccccagtggaagacctggggccccagacctcaacatctcccggtcgactgccgctatccggcaagaagttcgattaccgggccttcgcagccctccccagcagtcggcctgtgtacgacatacaatcccctgactttgctgaggagctgaggagcttggagccttcaccatctcctggcccccaggaagaagatggagaagtcgctttggtgctactgggtcggccctcacctggtgctgtgggacccgaggatgtggcattatgctcctccagacggccggtgcgcccagggcggagagggctcggccccgtcccttcctag

SEQ ID NO: 133540 - DNA, 2427 bp, synthetic construct
  misc_feature 1..2427: note = Description of Artificial Sequence: Synthetic coding sequence
  source 1..2427: mol_type = other DNA
atgtggtttttcgcccgggaccccgtgcgggacttcccctttgagttgatccctgagcccccagaaggaggcctgcccggtccctgggccctgcatcgcggcaggaagaaggctacgggctctccagtctccatttttgtgtatgatgtgaaacccggggccgaggagcaaacccaggtggccaaggccgcttttaagcgcttcaagacactgcggcacccgaatatacttgcatatattgacggtctggaaactgagaaatgcttacacgtagttaccgaggcggtaacccccctcggaatatatctgaaggcccgcgtagaggccggaggtctgaaagagctcgagatatcttggggactgcatcagatcgttaaggccctgagttttctagtcaatgactgttctctgatccataacaacgtatgcatggcagctgtgttcgtagatagggccggggaatggaagctgggcggtctcgactacatgtactctgctcagggtaatggagggggacccccaagaaagggaattccagagctagagcagtatgatccaccggagctcgcggactctagcggtagggtggtacgcgagaagtggagtgcagatatgtggagattaggttgccttatctgggaggtcttcaacggccccctgcccagagcagcggcccttcggaacccgggtaagatcccgaagaccctggtcccccactattgtgaactagtgggtgctaatccgaaagtccgacccaaccccgctcgattcctgcaaaactgccgggccccaggcggctttatgagcaaccggtttgtcgagacaaacctcttcctcgaggaaatccaaattaaggaacctgctgaaaaacaaaagttctttcaggaactgagcaagtcactggatgctttccctgaagacttctgccgccacaaggttctccctcagctgctgactgcattcgagtttggaaatgccggcgcagtagtgctcacgccactgttcaaagttggaaagttcctttccgccgaagaatatcagcaaaagatcattccggtggtggtcaagatgttctcctctacagatcgggccatgcggattcgtctcctgcagcagatggagcaatttatccagtatcttgacgagccaacggtgaatacgcagatctttccgcatgtggtgcacgggtttctcgacactaatccagcgataagagagcaaaccgttaagtctatgttacttctcgcaccaaagctgaatgaagctaatctgaatgtggagttgatgaaacattttgcccgcctgcaggcgaaagacgaacaagggcccatcagatgtaataccacggtttgcttaggcaagatcggatcctatcttagtgcatccacgcgacaccgcgtgctgacttccgctttttcccgcgctaccagggacccctttgcccctagccgtgtcgccggggtgctgggctttgcagctacccacaatctgtattccatgaatgattgcgctcaaaagatcctacccgtgttgtgcgggctgacagtggaccctgaaaaatccgttcgagatcaagccttcaaggccatcaggtcgtttttatcaaaactggagtccgtgtccgaggacccaacccaactagaggaggtggaaaaggatgtgcatgccgcatcatcccccgggatgggaggggcagcagcctcctgggccgggtgggcagtgaccggggtatcctctctgacaagtaaattgatcaggagtcaccccacaacagcccccaccgaaacaaatatcccccagcgccccactccagagggagtgcctgctcccgcccccacacctgtgccggcaaccccaaccacttcagggcattgggaaactcaggaagaggacaaggacaccgcggaagatagctctaccgccgaccgatgggacgatgaagactggggctccctggaacaggaggccgaaagcgtgctggcccagcaggatgattggagtaccggcggccaggtcagtagggcttcccaggtctcaaattcagatcataaatcttcgaagtcgcctgagagtgattggagttcttgggaagctgagggttcttgggagcaaggctggcaggagccgtcatctcaggaacctccgccagatggaacacggctggctagcgagtacaactgggggggtccagaatcatcagacaaaggcgatccattcgcaaccctgagcgctcggccaagcacacaaccccgccccgacagctggggggaggataattgggagggtcttgagaccgacagtagacaggtaaaggcagagcttgcaagaaagaagcgcgaagaacgcaggagggaaatggaggcaaagagggccgagcgcaaagtagccaagggccccatgaagttgggggcccgcaaactggattag

SEQ ID NO: 133541 - DNA, 2346 bp, synthetic construct
  misc_feature 1..2346: note = Description of Artificial Sequence: Synthetic coding sequence
  source 1..2346: mol_type = other DNA
atgtggttctttgccagagatcctgtgagggactttccattcgagttgatccctgaaccaccagaaggtggtctacccggaccgtgggccctgcatagaggtcgcaaaaaagccacagggtccccagtgagcatctttgtctacgatgttaagcccggcgctgaagagcaaacacaggtggccaaagccgcttttaaaaggttcaagaccctaagacatccgaatatcctcgcatatatcgacggactggaaactgaaaagtgtttgcatgtcgttaccgaggccgtcacacccctgggcatctaccttaaagcacgcgtcgaagccggagggctcaaagaactggaaattagctggggattgcaccaaatcgtcaaagctctctcattcctggttaacgactgctcacttattcacaataatgtgtgcatggcagctgtcttcgttgaccgagccggcgagtggaagctggggggcctcgactacatgtactccgcacaaggcaatggaggagggcctcctaggaagggaattccagagctcgaacaatacgatcccccagaactcgctgatagcagcggtcgcgtggtgagggaaaagtggagcgctgatatgtggcggctcggatgcctgatctgggaagtgtttaatggtccactcccccgggccgccgcgttacgtaaccctggcaagatccctaaaaccctggtgccacactattgtgaactggtcggggcgaacccaaaggtccgcccgaatcccgcaaggttccttcagaattgcagggcacccgggggatttatgtctaatcggttcgttgagactaacctcttcttggaggagattcagatcaaggaaccggccgagaaacaaaaattctttcaggagctgtccaagtcactggacgcgttccccgaagatttttgtcgccataaggtgctgccgcaactactcactgccttcgaattcgggaatgctggagccgtggtgctaacaccattatttaaggttgggaagtttctttctgctgaagaataccagcagaaaatcattcccgttgtcgtgaagatgtttagttcaaccgaccgggctatgcgcattagactgcttcagcagatggagcagttcattcagtatctcgacgaacccacggtgaacacccagatctttccgcacgtcgtgcacggattcctagataccaaccctgccataagggaacagacagttaagtcaatgctgctgctggccccgaaactgaacgaagccaatctgaatgtggagctgatgaaacactttgctaggctccaggcgaaagacgaacagggtccgatcagatgcaataccaccgtgtgcctcgggaagattgggtcatacctgtcagcgtccacgaggcatcgcgtactgacttctgcattttcccgggctaccagggacccattcgccccctccagggtcgcaggagtgctgggcttcgccgccactcataatttgtattcaatgaacgactgcgcccagaagattcttcccgtgctctgcggactgactgtagatccagaaaaaagcgtgcgtgaccaggccttcaaggcgatcaggtcctttctgagcaagctcgagagtgtgtcagaagatcctacccaactagaggaggtggagaaggatgttcacgcggccagctcacccggtatgggtggggctgccgcttcatgggctggctgggcagtgactggagtatcatctctcacatcaaagctaattaggtctcaccccactactgctcccactgagacaaatattccacagaggcccactcccgagggcgtgccagccccggccccaacccccgtgccagcaacacctacaaccagcggtcattgggaaacacaggaagaagataaagacaccgcagaagactcttctacggcagaccgatgggacgacgaggactggggaagtctggaacaggaggcggagtccgtgcttgcccagcaagacgactggtcaacagggggtcaagtctcacgagcatcacaggtgtctaattcagaccataagtcgtctaagagtcctgagtccgattggtccagttgggaggccgagggatcttgggaacagggatggcaggagccaagttctcaagagcccccgcccgacggcaccagactggcaagcgagtacaattggggtggaccagagtcctctgataaaggggatccattcgccaccttgtcggcccggccaagtacacaggaccggagccggttgtcctggccaggtagatcagcccggagcggcgggggcagatggcgacctaatgcaccacgggggcggtggccccgcgctccgtag

SEQ ID NO: 133542 - DNA, 2124 bp, synthetic construct
  misc_feature 1..2124: note = Description of Artificial Sequence: Synthetic coding sequence
  source 1..2124: mol_type = other DNA
atgtggttcttcgcccgcgacccggtgagggattttccatttgagctgattcccgagccccccgaaggcgggctgcccgggccctgggcattacacagggggaggaagaaagcaactggctccccagtctccatctttgtatacgacgttaagcccggagccgaggagcagacccaggtcgccaaggcagcatttaagaggttcaagaccctgcggcatcctaatatcctggcatacatcgatgggctcgagactgaaaagtgcctgcacgtggtgactgaagctgtcaccccactggggatttatttgaaagcccgcgttgaggccggaggactgaaggaactagagatctcctggggtctgcaccaaattgtaaaggccctcagctttctggttaatgattgcagcctgatccacaacaacgtgtgcatggccgccgtgtttgttgaccgtgctggggagtggaaattaggcggactagattacatgtatagcgctcagggcaacggaggaggtccccctcgcaagggaataccagagcttgagcagtatgacccacctgagctggctgactctagcgggcgggtcgtgagggagaagtggtcggcagacatgtggcgcctgggttgcctgatctgggaagtgttcaacgggccactgcccagggcagccgctctgcggaatcccggtaaaatccccaaaacattggtcccccactactgcgagttagtcggcgcaaacccgaaagtacgaccaaatcccgcacgattcttacaaaactgccgggcaccaggaggattcatgtccaatcggtttgtggagacgaatttattcttggaggagatccaaatcaaggagccggcggaaaagcagaaattttttcaggaactaagtaagtcactggatgccttccctgaagatttctgtcggcataaggtactgccccaactactcactgcctttgagtttggcaatgccggcgccgtcgtgctgacaccgctcttcaaagtaggcaagtttctgagcgccgaagagtaccagcagaagatcatcccagttgtggtgaaaatgttttcttcaactgatcgagctatgagaattcgtttgcttcagcagatggaacagttcattcaatatttggacgagcccacggttaacacccagatttttccacatgtggttcatggattcctagataccaacccggctattcgcgaacaaaccgtcaaatcaatgctgttgctcgcgccaaagttgaatgaggcaaacttgaatgtcgagttgatgaaacatttcgcacggctgcaggccaaggatgaacaaggaccaattagatgtaacacaactgtatgcctgggcaaaattggtagctatctatcagcctcaactcgccaccgggttctgaccagcgcgtttagcagagccactcgagacccatttgccccttcccgcgtcgccggggtgcttggtttcgcagctacacacaatctgtatagcatgaatgactgtgcgcagaagattctccctgttctatgtggcctaactgtggatcctgagaaaagtgtacgcgaccaggctttcaaggccatcagatccttcttgtcaaaactggaaagcgtatctgaagacccaacgcagctagaggaggtggagaaggatgttcacgcagcttctagccctgggatgggtggggcagcagcttcatgggcagggtgggccgttacaggtgtgtctagcctcacttcgaaactcattcgatcccatcctactacggcacctactgagacaaacattcctcagcgccccactcccgaggggcactgggagactcaggaacctccacctgatgggactcggctcgcctctgagtacaattggggaggccccgaatcctcagacaaaggtgatccctttgccaccttaagcgcccgccctagcacacaaccccgccctgactcatggggcgaagacaattgggagggcctcgagacagattctcgccaagtcaaggctgagctggcaaggaagaagcgggaagagcggagacgagagatggaggcaaagagagccgagaggaaggtggctaaggggcctatgaagctcggcgccagaaaactagactag

SEQ ID NO: 133543 - DNA, 1071 bp, synthetic construct
  misc_feature 1..1071: note = Description of Artificial Sequence: Synthetic coding sequence
  source 1..1071: mol_type = other DNA
atgtggttttttgcgcgagatccagtcagagactttcccttcgagcttatacccgaacctccagagggcgggctcccagggccctgggcattgcacaggggaagaaaaaaggctaccgggtcccctgtgtctatcttcgtgtatgatgtgaaacctggcgcggaagagcaaactcaggtggctaaagctgcattcaagcgcttcaagacactaaggcatcccaatattctcgcctacattgacggtctggagaccgagaagtgtctccacgtagtgactgaagcagttacaccgctgggtatctacctgaaagcaagagttgaggctggaggccttaaggagctggagatctcttggggcttgcaccaaatcgtgaaagcgttatctttcttggtgaatgactgtagcctgatccataataacgtttgcatggctgccgtcttcgtggatagggctggagagtggaagttgggaggactggactacatgtactccgctcaaggaaatggaggaggtccaccaaggaaaggcattcctgaattggagcagtacgaccctcctgagttggctgattcctctggccgggtggtgcgcgagaaatggtctgcagacatgtggcgactggggtgcctgatttgggaagttttcaacggacctcttccgagagccgccgctctgcggaaccctggaaagatccctaaaacacttgtgccccactactgcgagctcgtgggggccaacccaaaggtccgtccaaaccccgccagattcctgcagaactgccgcgctccaggcggtttcatgtccaacaggtttgtagagacaaacttgtttctggaggagatccagccaaaggatcctagactaaaggaatttcttccccagcctccccccctctttcttccccccttacaacctcaggcaactggccggcggaggcggcgaactcggacacagcagagaacagcagcattgctgacagacgggacgacaaagaccggcgctgcctggagcagacgcccgagcttgtgttggccatcaaggactacaggcgcaccaggggctaagtag

SEQ ID NO: 133544 - DNA, 2376 bp, synthetic construct
  misc_feature 1..2376: note = Description of Artificial Sequence: Synthetic coding sequence
  source 1..2376: mol_type = other DNA
atgtggtttttcgcccgagatccagttcgggactttccattcgagctgattcccgaaccacctgagggaggactgcccgggccatgggccctgcataggggtcgcaagaaggctaccgggagcccagtgagcattttcgtgtacgacgtcaagcccggagcagaggaacagactcaagttgctaaagctgcctttaagcgatttaagactttaagacatccgaacattctggcctacatcgatggcttggagactgagaagtgcttgcacgtcgtaacagaggccgtgacacccttaggtatttatctgaaagctagggtcgaggcaggcggtcttaaggaactcgagataagctggggtctgcatcaaatagtgaaggcactaagtttcttggtcaacgattgttctctcattcataataacgtgtgtatggcagctgtgtttgtggatagggccggggagtggaaactagggggtttggattacatgtattcggcccagggtaacgggggtgggcctcctcggaaggggattccagaactggagcaatacgaccctcccgagttagctgattcctctgggagggttgttcgcgaaaagtggagcgcagatatgtggaggttaggctgcctgatctgggaagtttttaacgggccactgccacgcgccgccgcactacggaatcccggcaagatccctaaaacactggttcctcactattgcgaattggtcggggcgaatcctaaagtgcgtcctaatcctgcacggttcctgcagaattgtcgtgcccccggaggtttcatgtccaacagatttgtcgagactaatctctttcttgaagaaattcagattaaggaacccgctgagaaacagaaattttttcaggagctgtctaaaagccttgatgccttccctgaggacttttgccggcataaggtgctgccacagctgctgaccgcgtttgagttcggcaacgcaggtgcagtggtcctcaccccgctgttcaaggtaggcaagttcctgagtgcagaggaatatcagcagaagatcatccccgtggtggtgaagatgttttcatcaaccgaccgagccatgcggatacgcctgctgcaacaaatggaacagtttatccagtatttggacgaaccaacagttaacacccagatcttcccacacgttgtccacggctttttagatacgaatcctgctatacgtgaacagaccgtgaagtcaatgctcctgttggcccccaaattgaacgaggctaacttgaatgttgagctaatgaagcacttcgctcgtctgcaggcaaaggatgagcagggaccaatccgttgtaataccaccgtttgcctgggcaagataggtagctatctgtcagccagcaccaggcatcgcgtgttaacttcagctttttctagggcaacacgagatccttttgctccttccagagtggccggtgtactgggtttcgcagctactcacaacctgtatagcatgaacgattgtgcccagaagatcctgcctgtgctctgtggattgaccgttgaccccgagaaatctgttcgggaccaggcatttaaggccataaggtcatttctctcaaagctggagtcagtgtcagaggaccccacccagttagaggaagtcgagaaggacgtccacgccgcatcttcccctggtatgggaggggccgcagctagctgggctgggtgggccgtgacgggcgtcagctctctgacttctaaactcataaggagtcatccaacaactgctcccacggagaccaacatcccacagaggcccacccccgagggacattgggagacgcaggaggaagataaggataccgccgaagactcgagcaccgcagatcgctgggatgatgaggactggggaagcttagagcaggaagcagagtcagttcttgcgcagcaggatgactggtccaccggtggacaggtgtctcgggccagccaggtttccaacagcgaccacaaatcaagtaaaagccctgaaagcgactggtctagttgggaggccgagggctcctgggagcaaggatggcaggagccaagctctcaggagcctccaccagatggtacgaggctggcaagcgaatacaactggggcggccctgaaagttcagacaagggcgatcctttcgccaccctctcggctaggccctcaacacagccccgaccagattcatggggggaggacaattgggagggattggagaccgatagtcgacaggtaaaagcagaacttgcgcgaaagaaaagagaagaaaggcggagggagatggaagccaaacgggctgaaagaaaagtcgcaaaagggcccatgaaattgggggccaggaagctggactag

SEQ ID NO: 133545 - DNA, 2343 bp, synthetic construct
  misc_feature 1..2343: note = Description of Artificial Sequence: Synthetic coding sequence
  source 1..2343: mol_type = other DNA
atgtggttcttcgccagagatcccgtccgagattttcctttcgagttaattccagaaccacctgaagggggcttaccaggaccctgggcactgcataggggccgcaaaaaagctactggaagccctgtatcgatcttcgtgtacgacgtgaagcctggtgcggaggagcagacgcaggttgccaaggccgctttcaagaggttcaagacgttaagacacccaaatatcttggcctacattgatggattggaaactgagaagtgcctacatgtggttacagaggctgtgaccccactggggatctatttgaaggcacgtgtggaggccggaggactcaaggagcttgaaattagctggggcctgcatcagatagtgaaagcactgagctttctagtgaacgattgttccctcatccataataatgtgtgtatggctgccgtgtttgtcgaccgagccggcgagtggaagctgggggggctagattacatgtatagcgctcaaggaaacgggggcggcccgccaaggaagggcatccctgagcttgaacagtatgatcctcccgaacttgctgacagctcgggccgtgtcgttcgagagaaatggagcgcagatatgtggagactggggtgtctcatttgggaagtcttcaatgggcctctccctcgagctgccgcattgcgaaaccccggaaaaataccgaaaactctggtgcctcattactgtgaactggttggggctaacccaaaggtgcggcctaaccccgccaggttcctccagaactgtagggccccgggagggttcatgtcgaacagattcgtggagaccaatcttttcctggaggagatacaaataaaggaacccgccgagaagcagaagtttttccaggagctgtccaaaagtcttgacgctttccctgaggatttttgtaggcacaaggttctgccacaactgcttacagctttcgagttcggcaatgccggcgctgtcgtcctgacccccctgtttaaggtcgggaagtttctttctgctgaggagtaccagcagaaaatcatccccgttgtcgtgaagatgttttccagcacagaccgagcaatgcggattaggctgctccagcaaatggaacagtttatccagtatttagacgagcctaccgttaatacccaaatctttccccatgtggtgcacggattcctggacaccaacccagcaatacgggaacaaacagtcaagagcatgctactgttggcgcctaaactaaacgaggctaatcttaatgtggaactgatgaaacactttgcaagattacaagccaaggatgaacaggggccaatccggtgcaatactaccgtgtgtctaggtaagatcggctcatatctgagcgcttccacaaggcaccgtgtccttacgtccgctttcagccgggcaacaagagacccttttgctccgtccagggtcgcaggggtcctcgggttcgccgctacccataacctctatagtatgaatgattgcgcacaaaaaatcctgccagtattgtgcggtctgactgtcgaccccgaaaaatctgtgagggatcaggctttcaaggccatcaggtcttttctaagcaaactcgaaagcgtcagtgaggaccctacacagctggaggaagttgaaaaggatgttcacgccgcttctagcccaggaatgggaggcgcagcagcaagctgggctggttgggccgtgaccggagtgagttcattgacctcaaaactcatccgctcccacccaactaccgctccaacagagactaatattccacagaggcctaccccagaaggggtccccgccccagcacctacaccggtaccagccacacctacaacctcaggccactgggagactcaggaagaagataaagatacagcagaggactcctccacagcagatagatgggatgacgaggactggggatcgctggaggaggccgaatcggttctggcccagcaggatgattggtctacaggaggccaggttagcagagcttcacaggtgtctaacagcgaccataaatctagcaaatcacctgagtcagattggagctcttgggaggccgaaggatcttgggaacagggctggcaggagccctcatcacaagaaccccctcccgatggaaccaggctggcgagtgagtacaattggggtggccccgagtccagcgataaaggggatccctttgccaccctgtcagcccgaccgtctacccaagatcgctctaggttgagctggccaggtcggtccgcgcggtccggtggcggccgctggagaccaaatgcaccacgagggcggtggcccagagctccctag

SEQ ID NO: 133546 - DNA, 2124 bp, synthetic construct
  misc_feature 1..2124: note = Description of Artificial Sequence: Synthetic coding sequence
  source 1..2124: mol_type = other DNA
atgtggtttttcgcacgagaccccgtgcgtgatttcccttttgagcttattcctgagccccccgaagggggcctccccggaccatgggctctccaccgcgggcgaaagaaggccactggttcccctgtcagtatatttgtctatgacgtgaaacccggagccgaggagcagactcaggttgccaaggctgcatttaagaggttcaagactcttaggcatcccaatattctggcctacatcgacggtctggagacagagaagtgtctgcacgtcgtaacagaagccgttacgcccctcgggatctatttgaaggcccgggtagaggctggtgggctaaaggagctggaaatttcatgggggctacaccaaattgtcaaagctctgtcattcctcgttaacgattgcagcctgatccacaacaatgtgtgtatggcagccgttttcgtggacagagccggggagtggaaattgggaggcctggactatatgtacagtgctcagggtaatggcggtggacccccacggaagggaatacccgagttggagcagtacgacccgccagaattagccgattcgtccggtagggttgtgagggaaaagtggtccgctgacatgtggagactgggctgtctcatttgggaggtttttaacggacctctccccagggccgccgcgctcaggaatcccgggaagatacccaaaactttagtgccccactactgtgagctcgttggagctaaccctaaggtgaggccgaatccagctcgtttcttacagaactgccgggcccctgggggattcatgtcaaaccgattcgttgaaaccaatctcttcctggaagagatacagatcaaggagcctgccgaaaaacagaaattcttccaggagctgtccaagtcacttgatgcctttccagaagatttttgtaggcacaaggtcttaccccagctgttgaccgccttcgaattcggcaatgccggcgccgtggtgctgactcctcttttcaaagtgggcaagttcctttccgccgaggaataccagcagaagatcatcccagttgtggtgaaaatgttttcatctaccgaccgcgctatgcggattagattactgcagcaaatggagcagtttatacagtaccttgacgagcccaccgtgaatacacagattttcccccacgtggtccacggctttctagataccaacccagctattcgagaacagaccgtcaagtctatgcttctcctggcacccaaactcaatgaagccaatctcaacgtggaattgatgaaacacttcgctagattgcaggcgaaggacgagcaggggcctattagatgcaatacaacagtctgtcttgggaagattggctcatatctgtccgcgtccacccgacaccgagtccttacatcagctttcagcagggccaccagagacccttttgccccatcccgagttgcaggtgtactgggctttgccgccacgcataacctctacagtatgaatgactgcgctcagaagattctgcccgtcctttgcggattaacagtggatcctgagaagagcgtcagagaccaggcatttaaggccatccgcagctttctcagcaagctggagtctgtgtctgaggaccctacccagctggaagaggttgagaaagacgtgcacgccgcatcctctccaggcatgggcggagcagccgcatcatgggccgggtgggctgttacgggcgtgtcaagcctaacatcgaaactcatccggagccatcctacaaccgcacccacggaaaccaacatcccacagcgccctacccctgaaggccattgggaaacccaggagccacctcccgatggcaccagattagccagcgagtataattggggcggtcccgagagttctgataaaggcgatccatttgccaccttgagtgcccgtccctccacccagcccagaccggatagctggggagaggataactgggagggactggagaccgacagtcggcaggtgaaggctgaacttgccagaaaaaaaagagaagaacggaggcgcgaaatggaggcgaagcgggcagaacgaaaggtcgccaaagggccaatgaagttaggagctcggaagctcgactag

SEQ ID NO: 133547 - DNA, 2364 bp, synthetic construct
  misc_feature 1..2364: note = Description of Artificial Sequence: Synthetic coding sequence
  source 1..2364: mol_type = other DNA
atgtggtttttcgcacgtgaccccgtgcgcgatttcccatttgagctgatccctgagcctccagaagggggactgccaggaccctgggcactgcacagaggtaggaaaaaggccaccggcagccctgtgtccatcttcgtctatgatgtcaagccgggggccgaagaacagacccaggtcgcaaaagcagccttcaaacgctttaaaaccctgcggcaccctaatatcctcgcatacatcgacggactggaaactgaaaagtgcctccatgtcgtgacggaagctgtcactcctctggggatttatttaaaagctcgtgtggaggcagggggcttaaaggagttggaaatcagctgggggttgcatcaaatcgtaaaggccctttccttcctcgtgaatgattgctccctcattcacaataatgtgtgcatggcggccgtgtttgtcgatcgggccggtgagtggaaactcggggggctcgattacatgtatagcgcccagggtaacggaggggggccgcctcgcaagggcattccagaactcgagcaatacgatcctccggaattggctgactcctccgggcgcgtggtgagggagaagtggtctgccgacatgtggagactgggctgtctgatttgggaagtgttcaatggaccattgcctcgagctgcagcacttcgtaatccaggcaaaatcccaaaaactcttgtccctcattactgcgaactggtgggagcaaacccaaaggttagacctaacccagccagattcttgcagaactgcagagcacccggggggttcatgtccaatcgttttgtggagaccaatttattcttggaagaaattcagatcaaagagcccgcggaaaaacagaaatttttccaagaacttagcaagtctcttgatgccttcccagaagacttctgcagacataaggtacttcctcaactcctgacagcgtttgagttcggcaacgcaggcgcagtggtgctgacccctctgttcaaggtcgggaagtttctgtccgcagaggaatatcagcagaaaataattcccgtggtcgtgaagatgttctcttctacagaccgggccatgcggattagactattacaacaaatggagcagttcatccagtaccttgacgagccaaccgtgaatactcagatattcccccatgtggtgcatggatttcttgacactaatcccgccatccgcgagcaaacagtgaaaagcatgctcttgctcgcaccgaaactaaacgaagccaacttgaatgtggagctgatgaagcacttcgcgcgactccaggcaaaagacgaacaaggtccgattcgctgtaacacaaccgtctgcctggggaagatcggcagttacctttctgcttctacgagacacagggtacttacctcagctttctccagggcaacacgggacccatttgccccgtcacgggtggccggtgttctggggtttgcagccacccacaacctgtactcaatgaacgactgcgcccagaaaattctccctgtactgtgtggcctgacagtcgatcccgagaaatctgtccgcgaccaagccttcaaagctataaggagtttcttatcaaaattagagtccgtaagtgaggatccaacgcagttagaagaggtggaaaaagatgtgcatgcagcatcatcccccggaatggggggagcagcagcaagttgggccggttgggccgtcacaggggtaagttccttaacgagcaaactgatcagaagccacccaacgactgcacccacagagaccaatataccacagcggcctacccctgagggcgttccagcgccagcccctacccccgtccctgccacacccaccacatcagggcactgggagacccaggaggaagataaagacaccgctgaggatagctctaccgccgaccgctgggatgacgaggattggggctccctcgaacaggaggccgaatccgttctggcacagcaggatgattggtccacaggcggacaggtgagccgggcttcgcagtctccgaccggcgcagctggcaagctgcgagctccaggcaatcgggcaggcaggtcccaggcacctcgctcacacttgctgacggtccacgggtggcctgcctccattactggagttgcgcagtctcccgctactcgagccactccgagtctgccatgcctgcacgttccagcccctagcagaggtcagacacttggagtgaggactaccggccgcgcttcccgacttacggtcgaccgatcccgtctctcttggccgggacgaagtgcgaggagtggcggaggccgatggaggcctaacgcacctaggggacgttggcctagggctccctag

SEQ ID NO: 133548 - DNA, 663 bp, synthetic construct
  misc_feature 1..663: note = Description of Artificial Sequence: Synthetic coding sequence
  source 1..663: mol_type = other DNA
atgatcaaacccaaatggggaggattggtttgggcacaatggcatggtccactggctcggccatctggtacactgccattcgcgtctagtatgccatctcccgtcgacgccagtagtgctgatgggggaagcggcctgggcagccaccgccgcaagcgcacaaccttcagtaaaggccagttactggagctggaaagagcatttgcagcttggccataccccaatatctcgacccatgagcatcttgcctgggtgacatgtctgcccgaagccaaagtgcaggtatggttccagaagagatgggccaagatcatcaaaaacaggaagagcggcatcctcagccccggttccgagtgtccacagagctcatgctcactgcctgacacattacagcaaccctgggaccctcagatgcctggacagccccctccctcaagcggaacccctcagcgtacaagtgtgtgccgtcacagctcgtgccccgctcccggtttgtcccccagacaggggtgggagggcgctaaggccgtcgccccttgggggtcagcgggcgcgtcagaggtgcacccgtcgctcgaacgtgccacaccacaaacaagcctaggttccctgtccgacctgatttacgctctggcaatcgttgtgaacgtcgatcacagctag

SEQ ID NO: 133549 - DNA, 651 bp, synthetic construct
  misc_feature 1..651: note = Description of Artificial Sequence: Synthetic coding sequence
  source 1..651: mol_type = other DNA
atgggtggatccggtgtcggcaccgcctggcacggccccttggcccgaccgtctggaactcttcctttcgcatcgtctatgccatcgcccgttgatgcctcctcggccgacgggggaagcggactgggcagccataggcgtaagagaacaacgttctccaaaggccagcttttggagttggagcgcgcatttgccgcctggccttatcccaatatctcaacccacgaacacctggcatgggtgacctgtctcccggaagccaaagttcaggtgtggttccaaaagcgttgggccaaaatcatcaagaatagaaagtcaggtatactttcaccaggatctgaatgtccacagtctagctgctccctccccgacaccttgcagcagccttgggaccctcagatgcctggacagccacctccctcctcggggactcctcagcggacatcagtgtgtcggcactcgagctgtcccgcccccgggttgtctcccagacagggatgggaaggcgccaaagctgtcgcgccttggggttccgccggcgctagcgaggttcacccatctctggagcgagcaacacctcagacgagtctcggatctttgtcagacctgatctacgctttggccatcgtcgtgaacgtagaccattcttag

SEQ ID NO: 133550 - DNA, 648 bp, synthetic construct
  misc_feature 1..648: note = Description of Artificial Sequence: Synthetic coding sequence
  source 1..648: mol_type = other DNA
atgatgaccacaggctggacgggactctgcctcccgcctgtgaatccaagcagagtcagcagctcctcactcgaaacctccaccactgagagcatctttgcgcacgacggcgggagtggcctgggctcacataggcggaaacgcaccacttttagcaaaggtcaactactcgagttagagagggcctttgcggcatggccttaccccaatatcagtacacatgaacatcttgcctgggttacatgcttgccggaagccaaggtccaggtgtggtttcaaaagcggtgggcgaagatcattaagaatcgcaagagcggcattctcagtcctggttcggagtgtcctcagtccagctgtagtctaccagacacactccagcagccatgggacccacagatgccaggccagccaccccctagcagcggcactcctcaaagaacgagcgtctgcaggcatagtagttgccctgcccctgggctgagtcctcgacaggggtgggagggagctaaggcagtcgctccatggggcagcgctggagcatcggaagtacacccaagcttggagagggccacaccccagaccagtttgggaagtctgtccgatctgatttatgctctcgccattgtggtgaatgtggatcactcctag

SEQ ID NO: 133551 - DNA, 648 bp, synthetic construct
  misc_feature 1..648: note = Description of Artificial Sequence: Synthetic coding sequence
  source 1..648: mol_type = other DNA
atgatgaccactggctggactggcctgtgtctaccacccgtcaatccctctagagtctcttccagttcgttggagacaagtaccacggagtctatctttgctcacgatggggggagcggactcggcagtcaccggcgcaagaggaccacattctctaaaggacaactactggaactcgaacgagcctttgccgcttggccatatccgaacatttcaactcacgaacatcttgcatgggttacctgcctcccagaggccaaggttcaagtctggtttcagaagagatgggctaaaatcattaaaaacaggaaatcaggaattctcagtccagggtccgagtgcccccagtcttcttgttctcttcccgacaccctgcagcagccctgggacccacagatgccaggccaacccccaccgagcagcggaacaccacaaagaacaagcgtgtgccgtcattcctcctgtccagcacctggattgtctcctcgccagggctgggagggagcgaaagccgtggccccctggggctccgccggagcttctgaggtgcacccttcacttgagagagcaacacctcaaacatctctggggtccttgtccgacctgatttacgctctcgccattgtcgttaatgtggaccattcttag

SEQ ID NO: 133552 - DNA, 1212 bp, synthetic construct
  misc_feature 1..1212: note = Description of Artificial Sequence: Synthetic coding sequence
  source 1..1212: mol_type = other DNA
atgtccggacgcgttggcgacctttctccacggcagaaagaggccctggcaaagttccgtgagaacgtacaggacgtgctgccagctctgcctaatccagatgactatttccttcttcgatggcttagagcaaggtctttcgatctgcagaagtccgaagcaatgctccggaagcacgtcgaatttagaaagcagaaggacattgataatattatatcgtggcagcctcctgaggtgatccagcagtatctgagcgggggtatgtgcgggtacgacctggacggttgtcccgtctggtatgatattataggacccttagacgctaaggggcttctcttcagcgcctcaaagcaggacctgctgagaaccaagatgcgggaatgcgaactgctgctgcaggaatgtgcccaccagactaccaaacttggtcggaaagtcgagaccataaccataatctatgattgtgaggggctggggttgaaacatctgtggaagcccgcagtagaagcatacggggagtttctgtgtatgttcgaagagaattaccccgagactctgaagagactcttcgtagtaaaagctccaaaactgtttcctgtggcatacaacctgattaaaccatttctgagcgaggacacgcgcaaaaagataatggtgctgggagccaactggaaagaagtattattaaaacatatcagtccagatcaggtacctgtcgagtatggcggaacaatgaccgatccggacggaaacccaaaatgcaaatctaaaatcaactacggaggagacatcccgcgcaagtattatgtacgggaccaggtcaaacagcaatacgagcattccgtgcaaattagtcgggggtccagtcaccaggtagaatacgagattctgtttcccgggtgcgtcttgaggtggcagttcatgtctgatggcgcggatgtggggttcggaatatttctgaagacaaaaatgggggaacgacagagagcgggcgaaatgactgaggtgttgccaaaccaaagatacaacagtcacctggtgccagaagacggcacactcacttgctccgaccctggtatctatgtgctcagatttgacaacacctattctttcatccacgctaagaaggttaacttcacggtggaagtccttctgccagataaagctagcgaagaaaagatgaagcaactcggcgccggcaccccaaaatag

SEQ ID NO: 133553 - DNA, 963 bp, synthetic construct
  misc_feature 1..963: note = Description of Artificial Sequence: Synthetic coding sequence
  source 1..963: mol_type = other DNA
atgtctggtcgtgtgggagacctgtcgccacgtcagaaagaggctcttgccaaattcagagagaatgtgcaggacgtcttaccggccctgcctaatcctgacgactatttcctgcttcggtggcttcgtgctcggtcatttgacctgcagaaatccgaggccatgctaagaaagctgggccgtaaagtggaaaccataacaataatctacgactgcgaaggcctgggactcaaacacttgtggaagcccgcggtagaggcatatggagagtttctgtgtatgttcgaagagaattaccccgagactcttaagaggctattcgtcgtcaaggcccctaagctgttccccgtggcttacaatctaataaagccatttcttagcgaggacactcgcaaaaaaattatggtgctgggggccaattggaaggaggtgctgcttaagcacatcagccccgatcaggtgccagttgagtacggcggaacgatgaccgacccggacggcaatcctaaatgtaagagtaaaataaattatggtggtgacataccccgaaagtactacgtgcgggaccaggtcaagcagcagtatgagcactctgtccagatttccagaggatcttcccatcaggtggagtatgagatactgtttccaggttgtgtgctgcggtggcagttcatgtcggacggggccgacgtgggtttcggcatctttctcaaaaccaagatgggagagcgtcaaagagcaggagaaatgacagaagtgttgcccaatcaacgctacaactcccacctcgtgcccgaagatgggacgttgacctgctctgacccgggcatttacgtgctgaggttcgataatacctactcttttatacacgcgaagaaggtaaactttaccgtggaggtattgctccccgataaagcatctgaagaaaagatgaagcagctgggtgccggcactcccaaatag

SEQ ID NO: 133554 - DNA, 990 bp, synthetic construct
  misc_feature 1..990: note = Description of Artificial Sequence: Synthetic coding sequence
  source 1..990: mol_type = other DNA
atgctccggaaagttatccagcagtatctgtcgggtggtatgtgtgggtacgatcttgatggctgtcctgtttggtatgacatcatcggcccactagacgctaaaggcttgctgtttagcgctagcaaacaggatctgctgcgtactaagatgcgtgaatgcgagttactcttgcaagagtgtgcgcatcaaactactaagctggggcgcaaggtcgaaacgattacgataatatatgactgcgagggcttgggactgaagcatctctggaaacctgccgtcgaggcgtatggtgaatttctatgtatgttcgaggaaaattacccagagactctgaagagattatttgtggtaaaggcccctaagctgttccccgtggcctataatctgatcaagccatttttgtccgaagatacaaggaagaagattatggtgctgggcgcaaactggaaagaagtactgttgaagcacatatcccctgatcaagtgccggttgaatacggcgggacaatgacagacccagacggtaaccctaaatgtaaaagcaagatcaactatggtggcgatataccccgcaaatactacgtaagggatcaggtaaagcagcagtacgagcactccgtgcagatttccagaggtagctcacaccaggtggaatatgagatcctcttccctgggtgcgttctacgctggcaatttatgagcgacggtgccgacgtgggcttcgggatcttcctgaaaacaaaaatgggtgagcgtcagcgtgcgggcgaaatgaccgaggtactgcccaaccagcggtataacagtcacctggttccagaggacggaactcttacatgtagtgaccctggtatctacgtgctgagattcgacaacacttatagtttcatccacgctaaaaaagtcaatttcacagttgaagtcctactgcccgataaagcaagtgaggagaaaatgaagcaattgggggccggcactccaaagtag

SEQ ID NO: 133555 - DNA, 1179 bp, synthetic construct
  misc_feature 1..1179: note = Description of Artificial Sequence: Synthetic coding sequence
  source 1..1179: mol_type = other DNA
atgtcaggtcgcgtgggagatctctcccctcggcagaaagaggcgctggcaaaattcagagaaaatgtgcaggacgtccttcctgcattgccgaatcccgacgattactttctgctgcggtggctgagagctagatccttcgatctgcagaagagcgaggcaatgttgcgtaaacatgtggaatttcggaagcagaaagacatcgataacattatttcctggcaacctcctgaggtgattcagcagtacctcagcggaggtatgtgcgggtacgatctcgacggttgtccagtctggtatgatatcattggaccattggatgctaaaggcctcctatttagtgcctccaagcaagatcttttacggaccaagatgcgagagtgcgagttgctgcttcaggagtgtgctcaccagacgactaaattgggacgcaaggtggagactattactataatttacgactgcgagggcctcggactcaaacatctttggaaacctgccgtcgaggcctacggggaatttctttgcatgtttgaagagaactaccctgagaccctgaagaggttgtttgtcgtgaaagctccaaaattgttcccagtggcatacaatttaataaagccctttttaagtgaggacacccgtaagaagattatggtcttgggtgcaaattggaaagaggtgctcctgaagcatattagccccgatcaggtgccagtagagtacggaggcaccatgacggacccagatggtaatcccaagtgtaaaagcaaaatcaactacggcggagatatcccaaggaaatattatgtcagggatcaagtgaaacaacagtacgaacactctgtgcagatatctcgcggatctagccaccaggtggaatatgaaatcttgttccccggatgtgtgctgcgctggcaattcatgagtgacggggctgatgtggggttcggtatcttcctgaaaaccaagatgggggaacgccagcgtgctggggaaatgactgaggtgttgcccaatcaacggtacaattctcatctggttccggaagacggcactctcacatgttcagatcctggaatttgcaagtatctgtgtttaggaaacgcgctgaagccccacgttcagctcagcgcctgtgaagttccactacccccatggatcttcgggagtgagtgttag

SEQ ID NO: 133556 - DNA, 1119 bp, synthetic construct
  misc_feature 1..1119: note = Description of Artificial Sequence: Synthetic coding sequence
  source 1..1119: mol_type = other DNA
atgtccaaggcttttggattgttgcgacagatctgccaatctattctcgcagagtctagtcaatcacctgcggacctggaagaaaagaaggaagaagactccaatatgaaaagagaacaaccccgtgaacgaccgagagcttgggactaccctcatggtctggtaggattacataacataggtcagacttgctgtttgaatagcctgatccaagtatttgtaatgaacgtagactttacaaggatcttgaagcggatcacagtgccccgaggcgcggatgaacagcgtaggagtgtgccgtttcagatgttgttgctgctggaaaaaatgcaggacagccgccagaaggccgtccggccactcgagctggcttactgtttgcagaagtgtaacgtccccctatttgtgcaacatgatgccgctcagctgtacctcaaactgtggaatctgattaaggaccagataacagacgtgcacctggtcgagcgtttacaggcgctgtacaccattcgggtgaaagactccttgatttgtgtcgattgtgctatggagagctcaaggaacagttcaatgctaaccctgcctctcagtctgttcgatgtggatagcaaacccctgaaaacactggaggacgccctccattgcttttttcagcctagagagttgtcctcaaagtccaagtgcttttgcgaaaactgcggaaagaaaacccgagggaagcaagtgctcaaactcacccatctgcctcagacactgaccattcacctgatgagatttagtattaggaacagtcagacaagaaaaatatgccacagcctgtatttcccacagtccctcgatttctcacagattctcccaatgaaacgagagtcctgtgatgctgaagagcagtctggcgggcagtacgagctctttgcggtcatcgcccatgtgggaatggccgatagcgggcactactgcgtgtacattcgaaacgcagtggacggtaaatggttttgctttaatgattctaacatatgcctggtgtcttgggaggatattcagtgtacttacgggaaccccaattaccactggcaggagaccgcatatctgctcgtgtatatgaagatggagtgttag

SEQ ID NO: 133557 - DNA, 1062 bp, synthetic construct
  misc_feature 1..1062: note = Description of Artificial Sequence: Synthetic coding sequence
  source 1..1062: mol_type = other DNA
atggagttccgcaagaccatggatattgatcatattctggactggcagcccccagaagtgatacagaaatacatgccaggcggcttatgtggctatgaccgggatggctgccctgtctggtacgatattattgggcctctcgatcccaaggggctgttatttagtgtgaccaagcaggatctgctaaaaacgaaaatgcgggattgtgagaggattcttcacgagtgtgatctacaaactgaacggttaggcaagaaaatcgaaaccatcgtcatgattttcgactgcgaaggtctaggcttgaaacatttctggaaacctttggtggaggtctatcaagagtttttcggcttgttggaggaaaactaccctgaaacccttaagtttatgctgatcgtcaaagcaaccaaactcttccctgtcggatataatctgatgaagcccttcctgagcgaagacacccgacggaagattattgtcttggggaataactggaaagaagggctcctgaagcttatttcccctgaagaactccccgcccaattcggtggaaccttgacagaccccgacggcaacccaaaatgcctgacgaagataaactacgggggagaaattcccaaaagtatgtacgtccgcgatcaggtgaagacgcagtatgaacatagcgttcaaatcaacagaggctcctcccatcaggtcgagtacgaaattctgtttcctggatgtgtgctcagatggcagttcagtagtgatggcgccgatattggattcggcgtgtttctgaagacaaagatgggcgagagacagagagccggagagatgacagacgtcctgccttcccagaggtacaatgcccatatggtgccagaggacggtaatttgacatgcagcgaggccggcgtgtacgtcgagagcgagagcgggaagtcctgctgtcatctgcccgttataatttgcagtcacgagctgcagaattcgcactctaattctcaggttatggcgtatcaaatggtacgcaaatgcaagttgtcacggcctctgcctctgcccgcatcgaactag

SEQ ID NO: 133558 - DNA, 1026 bp, synthetic construct
  misc_feature 1..1026: note = Description of Artificial Sequence: Synthetic coding sequence
  source 1..1026: mol_type = other DNA
atggagttccgcaaaaccatggacatagatcatatcttagactggcagcctccggaggtcatccagaagtacatgccaggagggctgtgtggctacgatcgtgacggatgtccggtgtggtacgacattatagggccgctggaccctaaggggctgctgttctctgtgaccaagcaagatctcttaaagacgaagatgcgagactgcgagaggatcctccacgagtgtgacctgcaaacagaacgactgggaaagaagattgaaaccatcgtcatgatctttgattgcgagggcttgggccttaaacacttctggaaacctcttgtggaggtatatcaggagttctttggactgctggaggaaaattatcctgaaaccttaaagtttatgctcatagtgaaagccactaaactcttcccagtcgggtacaatttgatgaagccatttctctctgaggatacacgtcgtaaaattatcgtgctcggcaataactggaaggagggactgctgaaactcatttcccccgaagagctgcctgctcagtttggaggaacactgactgatcctgatggaaaccccaagtgcctgaccaaaatcaactatggtggcgaaatcccaaaaagtatgtatgtgagagaccaggtgaaaactcaatatgagcactccgtgcagattaaccgcggttcatcacatcaggtggagtacgagatcctgttccctggctgcgtacttaggtggcagttttcctccgacggagccgacatcggttttggcgtgtttcttaagacaaaaatgggcgagagacagagagccggcgaaatgactgacgtcctgcccagtcaacgctacaacgcacacatggtgcccgaagatggaaatcttacatgcagcgaggccggagtgtacgtccttaggtttgataacacatactcattcgtgcacgctaaaaaggtttctttcacggtggaggtgctcttgccggacgagggcatgcagaaatatgacaaggaactcacccccgtatag

SEQ ID NO: 133559 - DNA, 972 bp, synthetic construct
  misc_feature 1..972: note = Description of Artificial Sequence: Synthetic coding sequence
  source 1..972: mol_type = other DNA
atggtgatccagaaatacatgcctggtgggctttgcggttacgatcgcgatggttgtcccgtctggtatgacatcataggtcctctggacccgaagggcctccttttcagcgtgaccaagcaggacctcctgaaaactaagatgcgcgattgcgagcgcatcctccacgagtgtgacctgcagacagaaaggttgggtaagaagatcgagaccattgtaatgatattcgattgtgagggattggggcttaagcatttctggaagcctctggtcgaggtatatcaggaatttttcgggctcttagaggagaattatccggagactctaaagtttatgttaatcgtgaaggcgactaagctgttccccgttggttacaatttgatgaagcctttcctgtctgaagacacaaggcggaaaatcattgtcctagggaataattggaaggagggactcctgaagctaatctctcctgaggagttgcctgcacagttcggagggaccctaactgaccctgacgggaaccccaaatgtctaaccaaaattaactacgggggcgaaatccctaaatcgatgtacgtccgagatcaggtgaagacacagtacgaacacagtgtgcagatcaaccgggggtcatcacaccaagtggagtatgaaatattattcccgggctgcgtcctccgctggcagtttagcagcgacggggccgacattggctttggggtctttttaaagacgaagatgggagagagacagagagccggagagatgaccgacgtgttacctagccagcgctataatgcccacatggtgcccgaggacggaaaccttacctgctctgaggctggcgtatacgtgctccgttttgacaacacctatagctttgtgcacgccaagaaagtctcattcaccgtcgaggtgttgctgccggacgagggtatgcaaaagtatgataaggaactaacaccagtgtag

SEQ ID NO: 133560 - DNA, 972 bp, synthetic construct
  misc_feature 1..972: note = Description of Artificial Sequence: Synthetic coding sequence
  source 1..972: mol_type = other DNA
atggtgatccagaagtacatgccaggtgggttatgtgggtatgaccgggacggctgccccgtgtggtatgatatcattggtcccctggaccccaaggggctgctgttctccgtgacaaagcaggacctgcttaagactaaaatgcgggattgtgaacgtatcctccacgaatgtgatctacagacagaaaggcttggtaagaaaattgaaacaatcgtcatgatcttcgattgcgagggattgggactgaagcacttctggaaacctctggtcgaggtctaccaggagttctttgggctactcgaggagaattaccccgagaccctcaaatttatgctcatcgtgaaggccactaagctgtttccagtgggatacaatctcatgaagccgttcctgagtgaggatactaggagaaagattatcgtgctggggaacaattggaaggagggattgctcaagctcatttcacccgaggagctacctgcccagtttggcggaactcttaccgacccagacggaaacccaaaatgcctgacaaaaattaattacggaggagagattccaaaaagcatgtatgtcagagatcaggtcaagacccagtacgagcattccgtccaaatcaaccggggtagcagtcaccaggtggaatacgagattctgtttccaggctgtgtgctgcgctggcagtttagctcggacggcgccgacatagggtttggtgtgttcctgaaaacaaaaatgggcgaacgccaacgagccggggagatgaccgacgtgctcccctctcagcgctataacgcacatatggtgcctgaagatgggaacctcacctgttctgaggcgggcgtctatgtgctgcggtttgataacacgtatagcttcgtccatgctaaaaaagtttccttcacagtggaagtgctgcttcctgatgaaggaatgcagaagtacgataaggagctcaccccagtctag

SEQ ID NO: 133561 - DNA, 1221 bp, synthetic construct
  misc_feature 1..1221: note = Description of Artificial Sequence: Synthetic coding sequence
  source 1..1221: mol_type = other DNA
atgagctcccgggttggagatctatctccacagcaacaggaagcacttgcacggttccgggaaaacttacaggacctgctgcccatcctcccgaacgctgacgattactttctcttaagatggctgagggctcggaactttgatctgcagaagtctgaagatatgttgaggaggcatatggaatttagaaaacagcaggatttagacaacatcgtaacctggcagccccccgaagtgatccagctatacgattctggcgggctctgtggatacgactatgaaggttgtcctgtgtatttcaacataatcggctctctggaccccaagggcctcttgctgtccgctagcaagcaggatatgatccggaaacgtattaaggtttgtgaactcctactgcacgagtgcgaactccagacacagaaactgggccgaaagattgagatggccctcatggtttttgacatggaggggctctcccttaagcacctctggaaaccagcagtggaggtgtatcagcagttcttctccatcctggaagccaactatcccgagacattgaagaacttaattgtgattagggccccaaagctttttccagtcgcgtttaatttggtgaagagctttatgagcgaagagaccagacgaaaaatcgtgatccttggcgataattggaaacaggaattgaccaagtttatttctcctgaccagctccctgtggaattcggcggaaccatgacagatccagatggaaatccgaagtgtttgacaaaaattaattatgggggcgaggttcctaagagctattacctgtgtgagcaggtcagactccagtatgagcataccaggagcgttggcagaggttctagtctgcaggtcgagaatgagatcttattcccggggtgcgttcttcggtggcagttcgcgtctgacggcggcgatatcggcttcggcgtctttctgaaaacgaagatgggcgaacaacaatccgctagggaaatgacagaggtgcttcctagccaacgatacaatgcccatatggtgcccgaggacggctctctcacctgcctacaggcaggagtgtacgtgttgcgcttcgacaatacttactcccggatgcacgctaagaagctgagctacactgttgaagtccttttacctgacaaggcgagtgaagagactctgcagtctctgaaagccatgcgccccagccccacacaatag

SEQ ID NO: 133562 - DNA, 1083 bp, synthetic construct
  misc_feature 1..1083: note = Description of Artificial Sequence: Synthetic coding sequence
  source 1..1083: mol_type = other DNA
atgtcatcgagggtcggcgatctcagtccccaacaacaggaggccctggcacggtttagagaaaatcttcaggacctcctacctatattgccaaacgcagatgactattttttactgcggtggctgagagccaggaatttcgatcttcagaaatccgaagatatgctccgtcgccacatggaatttaggaaacaacaggatctggataatatcgtgacatggcagccaccagaagttatccagctgtacgactccggaggtctctgcggatacgattacgagggctgccccgtgtactttaacattattggtagcttagatccaaaaggactcctcctgagtgcctctaagcaggatatgatccgcaagcgtataaaggtttgcgagctactattgcatgaatgtgaattgcaaactcaaaaactgggacggaagatcgagatggctctgatggtcttcgacatggagggtctgagcctcaaacacttgtggaagccagctgtggaggtgtaccaacagtttttcagcattcttgaggctaattaccctgagaccctcaagaacttgatcgttataagggcccccaaactctttcccgttgctttcaatctggtaaaaagcttcatgagtgaagagacaaggagaaaaatcgttatactgggagataactggaagcaggagctgacaaagtttattagtccagatcaattgcccgtggaattcgggggcactatgactgatccagacggaaatcccaaatgtctcaccaaaattaattatggtggagaagtgcccaagtcatattacctgtgcgagcaggtgcggctccagtacgagcacaccagaagcgtcgggcgcggatcatcgctgcaagtggagaatgagattctgttccctggctgcgtgctccgatggcaatttgcttctgacggaggggatatagggttcggagtgtttctgaagaccaaaatgggcgagcagcagagtgctcgggagatgactgaagtccttcccagtcagcgctacaacgcccacatggtacctgaagacggatccctcacctgcttgcaggccggggtgtag

SEQ ID NO: 133563 - DNA, 1083 bp, synthetic construct
  misc_feature 1..1083: note = Description of Artificial Sequence: Synthetic coding sequence
  source 1..1083: mol_type = other DNA
atgttgcgccggcacatggagttcaggaagcaacaagacttggataatattgtcacctggcagccgcccgaggttatacagctgtatgactcaggcggcctatgcggatatgattatgaggggtgtcctgtgtacttcaatataatcggctctctggaccctaagggactcctgctctcagcaagcaagcaggacatgatcagaaagagaatcaaggtatgcgaactgctcctccatgagtgcgagctgcagacccaaaaactaggaaggaaaatcgagatggctctgatggtatttgatatggagggactgagtttgaagcacttatggaaaccagccgtggaagtctaccagcagtttttcagcatcctggaagcaaactacccagagacactgaaaaacctgatagtgatacgagcgccgaagctgttccccgtggccttcaatctagtgaaatccttcatgagtgaagagacacgccgaaagatcgtgatcctaggggataactggaagcaggagctgaccaagttcataagtccggaccagttacccgttgagttcggtggcaccatgaccgaccctgatggtaatccaaaatgtctgacaaaaattaattatggaggtgaagtgcccaaatcatattacctgtgcgaacaggttcgccttcagtatgaacacactcggtccgtggggcgcggcagctcgcttcaggttgagaatgaaattctgtttcctggttgtgtgctccgttggcagttcgctagtgacggcggcgatatcggcttcggggtgttcctgaaaaccaagatgggcgaacagcagagcgcaagggaaatgacggaggttctccctagccagcggtataatgcacacatggtcccagaggatggctcccttacctgtcttcaggcaggggtgtacgtccgaggcttgtgtagtctgataacgtcgccaagtctccagatgtcttgtgcatccactactcccaccgcaggttgcatgccaaggagtagcgccactctgtggaggtgttgttttccgacacgtccgctgcgacggcggtgtcgcgtgagtcggagatag

SEQ ID NO: 133564 - DNA, 1176 bp, synthetic construct
  misc_feature 1..1176: note = Description of Artificial Sequence: Synthetic coding sequence
  source 1..1176: mol_type = other DNA
atgctgatgacaacctcatcttgtgccgggtgcgaattggagacactgacatgtcggaaccccaagacctgttctgaagggccgaaatcaccccaacctacctcatgcccacacgcactacgggcatggcacatggagtttaggaagcagcaagacctcgacaatattgtgacctggcaacctcctgaagtgatccaactctatgatagcggggggctgtgtggctatgactatgaaggctgtccagtgtacttcaatatcatcggtagtcttgaccctaaaggcctcttgttatccgcatccaagcaagacatgatccggaaaaggatcaaagtgtgtgagctcctgctgcacgaatgtgagttgcagacccagaagctcggacgcaaaatagaaatggcattaatggtgttcgacatggagggcctgtctttgaaacatctctggaagcctgcggtggaggtgtaccagcaattcttcagcatcttagaggcgaactaccccgaaactctgaaaaatctgattgtaattcgggctcccaaactgttccccgtggcttttaatctggtcaagtcatttatgtccgaggagacacgacgaaaaattgtcattctaggggacaattggaagcaagagctgacaaagtttatatctccagaccaactcccagtcgagttcgggggcacgatgaccgacccggatggaaacccaaagtgtcttaccaaaatcaactatgggggagaagttccgaagtcttactacctgtgtgaacaggtgcggctgcagtatgagcatactcggtcagtgggccggggcagttccttgcaggtcgaaaacgaaattctgttccccggttgcgtgctcaggtggcaattcgcgtccgacgggggagacatcggcttcggggtcttcttaaagaccaaaatgggcgagcagcagagtgctagagaaatgactgaggtgctgccctcacagcggtataatgcacacatggtgccggaggacggttctctgacatgcctgcaggctggagtctatgttttgagattcgacaacacctactctcgcatgcatgcgaagaaactttcgtataccgttgaggttctcctgccagacaaagcctcagaagagaccctgcagagtttaaaggcaatgcgaccctcccctactcagtag

SEQ ID NO: 133565 - DNA, 2256 bp, synthetic construct
  misc_feature 1..2256: note = Description of Artificial Sequence: Synthetic coding sequence
  source 1..2256: mol_type = other DNA
cccgcggctgccgccagtagtctggaaagggaaactgagcggtttagagaacttttattatatgggcggaagaaggacgctcttgagtctgcaatgaaaaatggtctgtggggacacgccctgttattagcatctaagatggactccagaactcacgccagggtaatgaccaggtttgcgaacagcctacctattaacgatcccttgcagaccgtgtatcagctcatgagcggtcgcatgcctgccgcatctacctgctgcggggacgaaaaatggggcgattggaggccacacctggccatggtgctgtctaatctgaataataatatggatgtcgagtctcgtaccatggcaactatgggcgatacgttggcctctcggggcttgctggatgctgcccatttctgctatttgatggcccaggcgggtttcggggtgtatacaaagaagaccaccaaactggtcctgatcggaagtaaccactccctgccgttcctgaaattcgcgacaaacgaagcgattcagcgcactgaagcctacgagtacgcacagtctctcggtgcagagacatgtcctctgcctagctttcaagtcttcaagtttatctatagttgcagactggcagagatgggacttgccactcaggctttccactattgcgaagcaatcgccaaatccatcctgactcagcctcatttgtactcacctgtgttgataagtcagctcgtgcaaatggcctcacagttaagactgttcgacccccaacttaaggagaaacctgaggaggaatctctggcagcccccacatggcttgtgcatttgcagcaggtggagcgtcaaatcaaagagggagctggggtctggcaccaggacggcgcactcccccagcagtgccctggtactcccagctcagagatggaacagctcgatagaccaggtctctctcagccgggcgcactcgggatcgcaaatcctttgcttgctgtgccagcaccctcacccgaacacagttccccatccgttagacttttgccaagcgcaccgcaaactctccctgacggacccctcgcaagtccagcgcgtgtacctatgttccctgtacccctgccacccggccctctagagccaggccccggctgtgtcacccccgggccagccctgggctttttagaaccatccgggcccggattgcctcctggcgtgcctcctctgcaagagaggcgtcacttgttacaggaggcccgatcccctgatcctggaatcgttccacaagaggctcccgtcgggaactctctttccgagctatccgaagaaaacttcgatggaaagtttgcgaaccttacccccagtagaacagtccctgactcagaagctccaccagggtgggatagagcagactccgggccaacccagcctccattgtcgctgtctcctgcccccgaaactaagagacccggacaggcagccaagaaagagacaaaagaaccaaaaaagggagaatcctggttttttcgttggctccccggcaagaagaaaacagaggcttacctgcccgacgataagaacaaatcaatagtgtgggatgagaagaagaaccagtgggtgaacctcaacgagccagaagaggagaaaaaagcccctcccccgccccccacgtctatgcctaaaacagtgcaggcagccccacctgctctgccaggtcccccgggagctccggtgaacatgtattctcggcgggctgccgggactcgtgctaggtatgttgacgtgctaaatccctccggcacccagcgcagcgaacccgcccttgctccggccgacttcgttgctccgctggcccccttacccatcccctcgaatttattcgtgcccacccctgacgccgaggaaccgcaactaccagatggaaccggtagagaggggcccgctgcagcacgcgggctggcgaacccagaacctgctccagagcccaaggttctctcctctgccgcatcactgccaggatctgagttaccctcttcaaggccagagggcagccaggggggcgaactaagcaggtgtagcagcatgagctctctgtctcgagaggtgagtcagcacttcaaccaggctccaggtgatctcccggctgccgggggccctccttctggggcaatgcccttctacaaccctgcccagctggctcaagcatgtgcaacaagtggatcctcacgacttggaaggatcgggcagagaaagcaccttgtactgaactag

SEQ ID NO: 133566 - DNA, 6480 bp, synthetic construct
  misc_feature 1..6480: note = Description of Artificial Sequence: Synthetic coding sequence
  source 1..6480: mol_type = other DNA
atgccaggacttgatcggccactctctcgccagaacccacatgatggagtggtcacacccgctgcttccccctcgttgccacagccgggtctgcaaatgcctgggcagtggggccccgtgcaaggcggaccacagccctccggccagcataggtctccatgtcctgaaggccctgtgccctcaggtgtgccatgtgcaacatctgtaccccacttcccaaccccatctatactccaccagggaccaggacacgaacaacattctcccctggtcgcgccgccggcagctttgccatctgatggcagagacgaggtttcacacctgcaatcggggtctcatctcgccaacaatagcgaccctgagtctaccttcaggcaaaacccaagaattgtcaaccactgggcctcccccgagctccgccagaaccctggagtgaaaaatgagcacagacctgctagtgcgttggtgaatcctctggctcggggcgactccccagagaatagaactcaccatccactcggggccggagctgggtctgggtgtgctcccctggaagcagactccggcgctagtggtgcactggccatgttcttccagggtggcgaaaccgagaatgaagaaaacctgtccagcgagaaggccggactgtcgggtcaggccgattttgacgacttctgttcatcacccgggctgggcaggccaccggcccctacccacgtgggagctggctcactttgccaggcactcctacccggtccaagtaatgaagctgctggagatgtttggggggacaccgcatcaactggtgtgccagatgcttcaggaagtcagtacgaaaacgtcgagaatttggagttcgtgcaaaaccaggaagtattgcccagcgaacccttgaatctcgatccgagcagccccagtgatcagttcaggtatggaccgcttccaggacctgccgtcccaagacacggtgctgtgtgccataccggcgctcctgatgctaccctgcatacagtgcacccggactccgtttctagtagttatagctctaggagtcacggtcgactatctggatccgcccgaccacaagagttggtgggcacctttatccagcaagaagtgggtaaaccagaagacgaggcgtccggctccttctttaagcagatcgattcctcacctgtcggtggagaaacagatgagaccactgttagtcagaattatcgcggctcagtgagccagccaagcacaccctccccccctaaacctaccgggatctttcagacatctgctaatagttcttttgaacctgtgaaatcacacctggtcggggttaaaccctttgaggccgatcgcgccaacgtggtgggagaagtgcgagaaacctgcgtcaggcagaagcagtgtcgaccagccgcagcattaccagatgccagcccgggcaatttggagcagccaccagacaatatggaaacgctttgtgcaccacaagtctgtcctctccccttgaacagcaccaccgaagcagtgcatatgctgccgcatgcgggcgcgcctcccctggacaccgtataccccgcccctgagaagcggccctctgcacgcactcaaggcccggtcaagtgtgagtccccagccaccacactgtgggcacaatccgagttgccggacttcggggggaatgttctcttggcgcctgccgctccagccctttatgtatgcgccaagccacagcctcctgtcgtccagcctcccgaggaggctatgagcggacagcagagcaggaaccctagcagcgctgctcctgtacaatcacgagggggtatcggggcctccgagaatctggaaaatccccctaagatgggggaggaggaggcactccagagtcaggcctctagcggatacgcatcactgcttagttcaccccctacagagtcacttcagaacccccccgtactgattgcacagcctgaccactcctataacttggcccagccaattaacttctcagtttcattatcaaattctcacgagaagaaccaaagctggcgagaggccttggtgggtgatcgacccgccgtaagttcttgggccctgggcggggactcgggtgaaaacacgtccttgtcaggtataccgacctcatccgtgctaagcctatccctgcccagctctgtggcccagtccaattttccacagggatcaggcgccagtgagatggtgtcaaaccagccggcgaacctgctcgtgcaacccccttcccagccagtacccgaaaatctggtgccagaatcccagaaagatcggaaggccggaagcgccctgccaggtttcgcaaactcacccgcaggaagcacgtccgtggtgctggtaccccctgcccatgggacactggtaccagacggaaataaagccaatcatagttctcaccaggaggacacatatggggccctggactttaccctgagtaggactttggaaaaccccgtcaatgtttacaaccccagtcattctgattccttggcatctcagcagagcgtcgcatcccatccccgccagagcggccctggcgctcctaacctcgataggttctatcaacaagtgacaaaagacgcacaggggcagccgggcttggagcgggcccagcaggaattggtccctccacagcagcaggcatctcctccacagttaccaaaagctatgttctcggaacttagcaaccctgagtccctgcctgctcaagggcaggcccagaactcggctcagagcccagcctcactcgtgctagtggacgccggccagcaactgcccccgcgccctccccagtcatccagcgtgagtctagtcagtagcgggtccgggcaggccgctgtaccctcagaacagccctggcctcagccagtcccagcactcgcccccggccccccaccacaggacctggctgcctactactactataggccattgtatgacgcatatcagccacagtactcccttccctatccacctgaacccggtgctgccagcctatattaccaggacgtctatagtctttatgaaccgaggtaccgaccttacgatggcgctgcatcagcctacgcacagaactaccggtatcctgagccagaaaggcccagctcaagggcctctcacagttccgaacgcccaccaccccgccaaggctacccagaaggttactattcctcaaaatccggctggtctagtcaatctgactactatgcctcctactacagtagccagtacgactacggagacccaggccactgggaccgatatcactacagcgcccgagtgcgtgacccccgcacctacgacagacgttactggtgcgacgctgagtatgacgcttatcgcagggaacactcggcctttggcgaccgaccagagaagcgagataacaactggcgttacgacccgcggtttaccggttcatttgacgacgatccagatccgcatcgggatccttacggggaggaggtggataggcgctctgtccactcggagcactcagctagaagcctacattccgcgcatagcctggcctccaggcggtcatctctgtcttcccacagccaccagtcgcagatttatagaagccacaatgtggccgcagggtcgtacgaggctccccttccccccggctcgttccacggagactttgcctacggaacctatcgcagcaactttagtagtgggcctggcttcccagagtacggttaccctgccgatactgtgtggcccgccatggagcaggtatccagcagacccactagccctgaaaagtttagcgtgccgcatgtctgcgcccgttttggccctgggggtcagctgatcaaggtgatccccaacctcccatctgaggggcagccggccctggtggaggttcactcaatggaagcactgttacaacacactagcgagcaggaggaaatgcgagcgttccccggacccctagctaaagacgacacccacaaggtcgacgttatcaacttcgctcagaacaaagctatgaaatgtctgcagaacgagaacttaatcgacaaagagagcgcttctttgctgtggaactttattgtcctgctctgccggcaaaacgggacagtagtcggcaccgatatagccgagctattgcttcgagaccacagaaccgtctggctgcccgggaagtcacctaacgaggccaatctgatagatttcacgaacgaagccgtggaacaggtagaagaagaggaaagcggggaggcccagctgagtttcctcactggagggcccgctgctgccgcctcctctctcgagcgcgagaccgaacggttccgggaactattactatacgggaggaaaaaagatgccttggagagcgccatgaaaaacggcctctggggtcacgccctgctgctcgcctctaaaatggattctagaacgcatgcccgcgtgatgactcggttcgcaaatagcctcccaattaatgatcctctccagacagtataccagctaatgagcggaaggatgccagcggcctctacgtgttgcggcgacgaaaaatggggagactggcggccgcacctggctatggtgctttccaatctaaataataatatggacgtggagagccgaacaatggccactatgggggatacactggcctcgcgaggcctgttggatgctgcccacttttgctatctgatggcacaggcaggtttcggggtctataccaagaaaactaccaagctggtgctgatcggatccaatcacagtctgccctttttaaaatttgcgacgaacgaagccatccagaggacagaagcttacgagtacgcacagtctctgggagcggagacttgccctctgccctctttccaagtgtttaagttcatttactcctgccgcttggccgaaatggggttagcaactcaggcctttcactattgcgaggccatagccaaaagcatactgactcaaccacacctgtacagccccgtgctcatttctcagttagtgcaaatggcttcccagctcagattattcgacccccaactgaaagagaagccggaggaagaatctcttgccgcacctacttggttggtacacctgcaacaggttgaaagacagatcaaggaaggagccggggtctggcaccaagatggagccctgccacaacagtgcccgggcacgccctcttctgaaatggagcagctcgataggcctggactcagccagcccggcgcactgggcatagccaatccactactggccgttccagcaccgtcacctgagcacagcagcccttcggtgaggcttctgccttccgccccgcagactttgccggatgggcctctggcctctcctgcgcgcgtgcccatgttccccgtacccctgccgccaggcccactggagccagggccaggctgtgtgacacctggccccgccctgggattccttgagccctctggcccaggcctgccgcctggtgtaccacctctgcaggagaggcgccatttgttgcaggaggccaggtctccagatccagggatcgtgccacaggaagccccagtcggaaattcgctgtccgagctgtccgaggaaaattttgacggaaaatttgcgaacctcaccccttcgcgaacggtgccagattctgaggcacctccagggtgggatagagccgacagtggcccaacgcagccgcccctgtccctgagtcctgcgcccgaaactaaaaggcccggacaggcagccaaaaaggagacaaaagaacccaaaaagggagaaagttggttctttcggtggctgccagggaagaagaaaaccgaagcatatctgccagatgacaagaacaagagtatagtttgggacgagaaaaaaaaccagtgggtcaacctaaatgaacccgaagaagagaaaaaggccccacctcccccccccacatctatgcctaaaacggtgcaggctgccccccctgccctcccaggcccccctggtgctcccgttaatatgtattccaggcgtgcagccggaacgcgtgccaggtatgttgatgtcttgaacccttccggaacgcagcgctcagagccggccttggcacccgcagatttcgtcgccccactggcacccctacctatcccctccaacctttttgtgcccactcccgacgctgaggaaccacagctgccagatggcaccggccgagagggtccagccgctgcccgcgggctggctaatcccgagcccgcgccagaaccaaaggtgctgagttctgccgcctctctccccggaagcgagttgcctagctcccgccctgaagggagccaggggggagaagcccccggagacctacccgctgcggggggtccgccatccggcgccatgccattctataacccagcccaattggctcaggcatgtgcaacttccggatcgtcccgactcggaaggatcggacagagaaaacacttggtgcttaactag

SEQ ID NO: 133567 - DNA, 7074 bp, synthetic construct
  misc_feature 1..7074: note = Description of Artificial Sequence: Synthetic coding sequence
  source 1..7074: mol_type = other DNA
atgcagccccctccccagaccgtccccagcggtatggctggaccaccccccgcaggcaatccccggtctgtgttttgggcctctagcccttacaggagacgcgctaacaacaacgccgccgttgctccaactacttgcccgcttcagccagtaacggatccgttcgccttctcccggcaggctcttcagtccacgccccttggaagcagttcgaagtcatctccacctgttctgcaggggccagcgcccgcaggattctctcaacaccctggtctgttagtgcctcacacccacgccagagattcaagccagggcccgtgtgagccacttcctggccctctaactcagcctagagcccacgccagtcctttcagcggcgctctcacaccaagcgcaccaccgggaccagaaatgaaccgctccgcggaggtgggcccatcctctgaacctgaggtgcagactctgccgtacttgccccactatattcccggtgtggatccggagacatcccacggaggccaccctcacgggaatatgcctggcctggacagacctctgagccgccagaacccacacgacggtgtggtgacccctgctgcatccccatcattacctcagccaggccttcagatgcctggtcagtggggacctgtgcaaggtggaccccagcccagcggccaacatcgaagcccctgcccagaggggcccgtgccttctggtgttccatgtgctacctctgtcccacatttcccaacgccatccatcttacaccaggggcccggccatgaacaacattcgccactggtcgccccaccggctgccttgcctagcgatggccgcgatgaggtgagccatctgcagtctggctcacacctggccaataacagcgatccagagagcacgttccgccagaacccccggattgtgaatcattgggctagccctgagctgcgccaaaatcccggagtgaaaaatgaacacagaccggcatccgctcttgtgaatcctctggcccgaggcgactccccagaaaatcgaacacatcatccgctgggtgctggcgctgggtccgggtgtgcccctcttgaggccgactccggcgcatccggtgccttagccatgtttttccaagggggagagaccgaaaacgaggaaaacttaagctccgaaaaggccggactgtccggccaagccgactttgatgatttctgttcgagccctgggttgggaagacctccggcgcctactcatgtgggggcaggcagcctgtgtcaggcccttcttcccggtccctcaaacgaggccgcaggggatgtgtggggggataccgctagtacaggggtcccagatgccagtggttcccagtatgagaatgtggaaaacctggaatttgtgcagaaccaggaggttttgccctcggaacccctaaatttagacccgagcagcccttctgatcagttcaggtatgggcctttacctggaccagccgtgccccgacacggggcagtttgtcacacaggggccccagacgccacgctccacaccgtgcaccccgacagtgtctcatcttcttatagcagccgtagtcacggacgactgagtgggagcgcacggccccaggagctcgtggggaccttcattcagcaagaggtcggcaaacccgaagacgaggcgtcaggttcattctttaaacagattgattcgtcaccggtgggcggggaaactgatgagacgaccgtctcacagaactatcgcggatcagtgtctcaaccgtctacgcccagccctccaaaaccaacaggaatctttcagacgagcgctaactccagcttcgagcctgtgaagtcccatttggtcggcgttaagccctttgaagccgatagagcaaatgttgtgggtgaagtgcgcgagacttgtgtacgccagaagcagtgtagacccgccgcagctttgccagacgcctcccctggaaatctcgagcagccccctgataatatggaaacattgtgcgcaccacaggtgtgccccctgcctcttaatagcactaccgaggccgtgcacatgctgccacacgccggagcccctcccctggacactgtttaccctgcccccgagaagcgaccatctgccagaacacagggcccagtcaagtgtgagagccctgctacaacgctgtgggcccagtccgagctgcctgacttcggcgggaacgttttgctggccccggcggcccctgcactctacgtgtgcgcgaaaccgcaacctccagtagtgcagccacctgaggaggccatgtctggacagcagtcacggaacccctccagtgccgctcccgtgcagagtcggggcggcatcggcgcctcagagaatctcgagaatccgcctaagatgggcgaagaggaggccctacagagccaggccagcagcgggtatgccagtcttctatccagtcctcccaccgagtctctgcaaaatccgccagtgctcatagcccagcccgaccacagttataacttagcacagccaatcaacttctccgtatctctgtctaattctcacgaaaagaaccagagttggcgtgaggcgttagtaggcgatcgtcctgctgtctccagttgggctctgggcggcgactctggagaaaatacctcgctgtcaggcattccaacatctagtgtcctcagtctttctctgccatctagcgtggctcagtcaaacttccctcaggggagtggcgctagtgaaatggtgtccaaccagcccgccaatcttctggtccagcccccttcccagcctgtgcccgagaatctcgttccggaaagtcaaaaagatcgcaaagcagggagtgcactgcccggttttgccaattcaccagctgggtcaacaagtgtggtgctggtgccccctgcccacggcaccttggtgcccgatggaaacaaggcaaatcattccagccatcaagaggatacatacggagccctggacttcacactgagccgtactttggagaacccagtgaacgtgtataacccatctcattccgatagcctcgcgagtcagcagtctgtcgcttcccaccctagacagtctgggcccggcgctcctaatctggatagattctaccagcaggtgacaaaggacgctcagggacaaccaggtctggagagggcacagcaagaactggttcctcctcagcagcaggcgtcaccacctcagctcccgaaggcgatgttcagcgagctttcaaatccagaaagccttccggcgcagggacaagctcaaaatagtgctcagtccccggcttctttagtgctggtagacgcaggtcagcagctgcctccccgacctccccagtcgtcctctgtaagtttagtgtcctctggaagcgggcaggccgctgtccctagcgaacagccctggccccaacccgtcccagccctggcccccgggcctccgccacaagacctggcggcctactactattaccggccgctgtatgatgcctatcagccacaatattctcttccgtaccctcccgagccaggggccgcctcactgtactatcaagatgtttacagcctgtacgaaccaaggtaccggccctacgacggcgcggcctccgcatacgcacagaactaccgttatcctgagccagaacgcccctcatctagagcatcacactcatcggaacgaccacctccccggcagggctatccggagggctattatagcagcaagagtgggtggtcttctcagagcgactactatgctagttattattcgtcacaatatgattatggtgaccctggccactgggatagatatcactacagcgcaagggtaagagatccccgaacgtatgaccggcgttactggtgcgatgcagaatacgacgcctacaggcgggaacactccgcttttggagaccgtccggagaagcgagacaataattggaggtatgatccacggttcaccggctcatttgacgacgatccagatcctcatcgtgacccctatggagaggaggttgacaggaggagcgttcacagcgagcacagtgcccgctctctgcattcagcccatagtttggctagtagaagaagtagcttgtcttcacactctcaccagtctcaaatctatagaagccataatgtggccgctggcagctatgaggcccctctgccacccggctctttccacggggactttgcctacgggacttatcgctctaacttctcatcgggccctggttttcctgaatatggatatcctgctgacacggtctggcccgcgatggagcaagtgagctccaggcccacctcccccgagaaattttccgtgccacacgtctgtgccagattcggtccaggtgggcagctgattaaggtaatcccgaatctgccctccgagggccaacctgcactggtcgaagtccatagtatggaggcgctgctccagcacaccagcgagcaggaggagatgcgggcttttcctggtcctctcgccaaggacgatacccacaaagtggacgtgattaatttcgctcagaacaaggctatgaaatgtctccagaacgaaaaccttatcgacaaagaatctgctagcctcctgtggaatttcatcgttctcttgtgtcgccagaacggtactgttgtcggcacagacatcgcggaactgctgctacgtgatcacaggactgtgtggttaccaggaaaatcaccaaatgaggcaaatctcatcgacttcactaacgaagctgtggagcaggttgaggaagaggaaagtggtgaagcccagttaagcttcctgacgggaggccccgcagccgcggccagttcactggagcgagagactgagcgattccgagagctgttgttatatggccggaaaaaggacgccttggaaagtgctatgaaaaatggcttgtgggggcatgcgctactgctggcatccaagatggatagtagaacccacgctcgtgtgatgacccggtttgctaatagtctgcctataaacgatccactacaaacagtctatcaactcatgtcaggaaggatgcctgctgcttctacgtgttgcggggatgaaaagtggggtgattggcgccctcacctggccatggtcttgtctaaccttaacaacaacatggacgtcgaaagccggacaatggcaaccatgggggataccctagcatcgcggggtttactggacgcagcccatttttgttatcttatggctcaagctgggtttggtgtgtacacgaagaagacgacaaaactcgttttaatcggaagtaaccacagtctccccttcttgaagttcgccacgaatgaggccatccaacgcacagaggcatacgagtacgctcagagcttgggagccgaaacctgccccctgccaagttttcaagtatttaaatttatctatagctgcaggctagccgaaatgggccttgcaacacaggcgtttcactactgtgaagcaattgctaagtccattctgacgcagccacacctctattcacctgtcctgatctctcagctcgtccagatggcgtcgcaactgcggcttttcgatccacagctgaaagagaagccagaggaggaaagcctcgcggcacctacatggcttgtgcacctgcagcaggtggaaagacagattaaagaaggggcaggcgtttggcaccaggacggagctctgcctcagcagtgccccgggactcccagcagcgagatggagcaactggatcgccctggcctgtcccagccaggcgccctggggatagccaaccctcttctggcggtacccgccccctcccccgagcactcttcaccctccgtcaggctgctgccctctgccccacagacacttcccgatgggccgctcgccagcccagcaagagtccccatgtttcctgtgcctctgcccccagggccactggagcccgggccaggttgtgttacacctgggccagctttaggctttcttgagcctagcggtcccggtctccccccgggtgtcccacccttacaggaaaggcgccatctcctccaggaagctcgctcccctgatcccgggattgtccctcaggaagctcctgtcggaaactctctgagtgaactctccgaggagaacttcgatggcaaatttgctaacctgactccgagccgcaccgtgccagatagcgaagcgcccccaggctgggatcgggctgactcaggtccaacccagccacccctttccctgagccctgcccctgaaaccaagcgacctggccaagccgccaaaaaggaaacaaaggaacccaagaagggcgagagttggtttttcagatggttgcccggcaagaagaaaactgaagcctacctccctgatgacaagaacaaatccatcgtgtgggatgaaaaaaagaatcagtgggtgaatctcaacgaacctgaagaagaaaaaaaagcacctcccccccctcccaccagcatgcccaagacagtgcaggctgccccaccagccctgcccggtcctccgggggccccagttaacatgtactcacggcgggccgcaggaaccagggcgaggtacgtggacgtgctgaacccatctggaacccagcggtccgaaccagctctcgcccctgcagattttgtcgccccactcgcacctctgcccatcccctcgaacctgtttgtccccacccccgacgctgaagaacctcagctcccagatggtaccggtagggaagggcccgctgctgctcgggggcttgccaacccggaacctgcccctgaacccaaggtgctgtcctcagccgcatccctgcccggctctgaactgccaagttctaggcccgaaggcagccagggtggagagttgagtcgttgcagcagtatgtcaagcctgtcaagggaggtttcacaacacttcaatcaggcccctggggacctcccagcagcaggaggcccacctagcggagcaatgccattctacaatcctgcccagcttgcacaagcttgtgcaacctctgggagcagtcgattgggcaggataggacaaaggaagcatctcgttttaaattag

SEQ ID NO: 133568 - DNA, 1158 bp, synthetic construct
  misc_feature 1..1158: note = Description of Artificial Sequence: Synthetic coding sequence
  source 1..1158: mol_type = other DNA
atggatctgctgcccacttcgatactgctggcaagcctatggatctgcagccacctacacccccctggagtatcagtggatttgccgcctaccagcatactgctcgtttcgttgtggatttgcagccatttacacccacccggtgtttcagtagatcgaccccccccaccgtcctcatggtgcctctgtggaagtcctcctacttcaatcctgctcgttagtctttggatttgttccccacctcccagtagctggtgcctctgcggctccgccccgactagcattctgttagtgagtctttggatctggagattatggggcctgacagaaggagaatcgtggtttttccgctggctgccgggaaagaagaaaacagaggcctacctgcctgatgacaagaataaaagcattgtgtgggacgagaaaaaaaatcagtgggtaaacttgaacgagcccgaagaagagaaaaaagctccgccaccaccccctacaagcatgcccaaaacggtccaggcggctcctcctgctctgcccgggccaccaggagctcccgtaaacatgtatagccggcgcgccgccgggactcgagcgaggtatgttgacgtgctgaatccatcaggcacccagagatccgagcctgccctcgctcctgcagacttcgtcgcacccctcgcgccactacctatacccagtaatctgttcgtccccaccccggtgtcatcagttcggcctcaggggagaagtgggagaaacgatgggctattggccttgtcaagtccggacgcagaagaaccacagctgcccgacggcacggggagggaggggccagccgcagccagaggcctggctaatcctgagcctgctccagagccaaaagtgctgagcagtgcagcatctctgccaggaagcgagttaccatcctctaggcctgagggcagtcaagggggcgagttgagtaggtgttcctcgatgagctccctgtccagagaagtgagccagcactttaatcaggcacctggcgatttgccggcagcgggcgggccgcccagcggagctatgcctttttacaatcccgctcagctggcccaggcatgcgccacgtctgggagttcacgcctcggacgcatcggtcaacggaagcatctggtgctgaattag

SEQ ID NO: 133569 - DNA, 6405 bp, synthetic construct
  misc_feature 1..6405: note = Description of Artificial Sequence: Synthetic coding sequence
  source 1..6405: mol_type = other DNA
atgccaggcctggacagacctctgtctcggcaaaatccacatgacggagttgttaccccagctgcctccccctcactcccgcagcccggcctgcaaatgccaggacagtggggcccagttcagggaggcccccagccttcaggccagcatagaagtccgtgtccagagggacccgtacccagcggggtgccctgcgcgacatccgtgcctcactttccaaccccatcaattctccaccaagggcccgggcatgagcagcactcgccacttgtagccccccctgccgcgctgccatcagacggtcgggacgaggtgagtcatcttcagtcagggagccacctagcaaacaactccgatcccgagtctaccttcaggcagaatcccaggatagtaaatcactgggcaagccccgagctgagacaaaaccccggcgtgaagaacgagcaccgaccagcctccgcgctcgttaacccattggcgaggggggatagtcctgaaaataggacacatcaccctttaggcgccggagctggctctgggtgcgcacccctcgaagcggactcaggggcatcaggtgctttggcgatgttcttccagggtggcgagaccgagaatgaagaaaaccttagttccgaaaaagccggattgagtggccaagccgatttcgacgatttttgctcctcgcctgggctaggccgcccccctgcccccacacatgtcggtgctggaagcctgtgtcaggccctcctcccgggaccaagcaacgaggcggcgggcgatgtatggggtgataccgcgtctactggcgtcccagatgcctccggcagtcagtacgagaatgtagagaacctggaattcgtacagaaccaagaggtgctcccgtctgagccgcttaatctcgatcccagctcgccatccgatcaattcaggtacggacctctgccagggccagcggtccctaggcacggtgcagtgtgtcataccggggctccggacgccactctgcacaccgttcaccccgactcagtttcctcttcctactctagcaggtcccatggacgcctcagcggctctgctagaccccaggagttagtaggcacttttattcaacaagaggtaggaaagccagaggatgaggcctccggcagtttctttaagcagattgattcctcacctgtggggggcgaaacagacgagactacagtaagccagaattaccgtggctccgtgtcacaaccttcaacacctagcccccccaagcctaccggcatcttccagacttctgcaaacagctccttcgagcccgttaagagtcatctagtgggcgtgaaaccgttcgaggcggacagggcaaatgttgtcggcgaggttcgggagacgtgtgtgcggcagaagcagtgtagacctgctgctgccctgcctgacgccagtcctgggaacctggagcagccaccagataacatggagacactgtgtgcccctcaggtgtgccctctacctttgaattcaaccacagaagccgtgcatatgctgccacacgccggggcccctccgctagacacagtgtacccagccccagagaagaggccgtctgccagaacacagggacccgtgaagtgtgagagcccggcaacaaccctgtgggcacagtccgagctgcccgactttgggggcaacgttcttctcgcccctgcagccccggccctgtatgtctgtgccaagcctcaacctccagtcgtgcaaccacctgaggaagcgatgtctggacaacaaagccgaaacccatccagtgcagctcctgtgcagtcccgcggcggaattggcgcctccgagaatctcgagaatccgcccaaaatgggtgaggaagaagcgctgcaatcgcaggctagctctggttatgcctcactcctatcatccccaccaacagagtctcttcagaacccacctgtcctgatcgcccaaccagaccactcttacaaccttgcccagccgatcaatttcagcgtcagcctgtctaatagccatgagaagaatcaatcgtggcgcgaagctttagtgggggatcgacccgctgtatcatcctgggcactcggaggggacagcggcgagaacaccagcctgagcgggattcctacctcctccgtgctatccctcagtctcccttcttcagtagcacagtcgaacttcccccaggggtctggagcgagcgagatggtgagcaaccagccagcaaacttgctagtccagccgccatcccagcccgtgccagaaaatctggtaccagaatcacaaaaagatcggaaggccgggtctgcactccccgggtttgccaactccccggcggggagcaccagcgtggtgctggtccccccggctcacggtactttggttcctgacggcaacaaagcgaaccactcatctcaccaggaggacacctacggggccctggacttcaccctgtctagaacactcgagaaccctgttaacgtttacaacccttctcactctgattcattagcatcccagcagtcagtcgcctctcacccgcgacagagtggccccggcgcccctaacttagaccggttctaccaacaggtgactaaggacgctcaaggacaacctggcctggagcgcgcacagcaagagctcgtgccccctcagcagcaggcctctccaccccagctccctaaagccatgttcagtgagctgagcaatccagaatcattgcccgcgcaaggtcaagctcagaactctgcacaatctccagccagtttggtgctggtggacgcgggacaacaactgccaccaagaccaccccaatcatcaagtgtgagtctcgtgagctcaggttccggtcaggctgccgtgccgtccgagcagccttggccccaacccgttccggctctcgccccgggcccccccccgcaggaccttgcagcgtactactattaccgaccactgtacgatgcttatcagcctcagtacagtttaccttaccctccagaacccggagcagccagtctgtactaccaagacgtgtacagtctttacgagccgcgctacagaccttacgacggggcagcctccgcttatgcacagaattaccggtatccggaacctgagaggccatcaagccgcgcgtctcattcctccgaacggcccccccctcggcaggggtaccccgagggctactactcgtcaaagtcaggatggtcatctcagagtgattattatgcaagctactacagcagccagtatgactatggggaccccggacattgggatagatatcactactctgcccgggtgcgcgatccgaggacatatgaccggcgatattggtgcgatgccgagtacgatgcataccgacgagagcattcagcgttcggcgaccgtccagagaaacgagacaacaattggcgctacgacccacgctttactgggtccttcgatgatgatcccgacccacacagagacccctatggcgaagaggtggatcgtagaagtgttcacagcgaacattccgcccgaagtttgcattccgctcattctttagccagccgaagatcatccctttcatcacatagccaccagtctcagatttacaggtcccacaatgtcgctgcgggtagttacgaggctcctctgcccccgggatcttttcacggtgactttgcctacggcacctaccggtctaatttctcttccggaccaggatttcctgagtacggctacccagccgatacggtgtggcctgccatggagcaagtctcctctcgccccacatctcctgaaaagttttctgtgcctcacgtatgtgcccggttcgggcccggaggacagctgattaaggtgattccaaacctgcccagtgagggacagccggcacttgtggaagttcattccatggaagcgttgctccagcataccagtgagcaagaagagatgcgggcatttcccgggccgctagctaaggatgacacacataaggtggacgtcatcaacttcgcgcagaataaggccatgaagtgcctccagaacgaaaatcttatagacaaggagtccgcctcactgctgtggaatttcattgtccttctgtgccgccagaatggcactgtggtgggcactgatattgctgaactgctcctgagagatcaccgtacggtgtggctgccgggaaaatcccctaacgaggctaacttgattgacttcactaacgaagcagtagagcaggtggaagaggaggaatctggagaagcccagctctcattcctgactggcggcccagccgcagcggcatcttcattggaacgcgagaccgaacgtttcagggaactcctcctctatggccgaaagaaggatgccctggaatcagccatgaagaacggcctgtggggccatgcgttactgcttgcgtcaaagatggattctagaacccacgcccgggtcatgacccgctttgctaactctcttcctattaatgaccccctccagacagtctaccagttgatgagcgggaggatgcccgcggccagtacatgctgtggagacgagaagtggggggattggcgaccccacctggcgatggtgctatcaaacctgaataacaatatggacgtagaatcacggaccatggctacaatgggcgacacactcgccagtcggggcctactggacgccgcgcatttctgctatctgatggcacaagcaggcttcggcgtttacacaaagaaaacaactaagcttgtgctgatcggaagcaaccattctctccctttcctcaagtttgccaccaatgaagcaattcaaagaaccgaagcctatgagtatgcacaatctcttggggcagagacttgtcccctgccaagtttccaggtattcaagtttatttactcatgcagactcgcagaaatgggcctggccacccaagcatttcattactgtgaggcgatcgccaagtcgattctgacgcagcctcacctgtactccccagtcctgatctctcagttagttcagatggcttctcagctcagactcttcgacccgcaacttaaggagaaacccgaggaggagtcactcgccgctcctacctggctcgtgcatctgcaacaggtggagaggcaaatcaaggaaggcgccggcgtgtggcatcaggatggtgctcttcctcaacagtgtccaggcactccgtcatccgaaatggaacagttagaccgaccaggcttaagccagcctggagccctcggaatcgctaatccacttctcgctgtgcctgctccctcccctgagcattcatcaccttcggtgcgactccttccgtctgcccctcagaccctacccgacggcccattagcgtcgccagccagggttcccatgtttcctgtgcccctcccacccggccctctcgaacctgggccagggtgcgttacacccggcccagcccttggctttctagagcctagtgggccaggtttgcctcccggtgtacccccactgcaagagcgtcggcatttactgcaagaagctaggagcccagatcctggtatcgtgcctcaggaagcccctgtcggaaactctctctcagagctctctgaggaaaactttgacggaaagtttgctaacctgaccccttcaagaaccgttccggatagtgaagctccccctggatgggatagagctgacagcggcccaacccaaccccctctttccttgtctccagcccctgagactaaaagacctgggcaggcggccaaaaaggaaaccaaagagccgaaaaagggtgaaagctggttctttcggtggctgcctgggaaaaaaaagaccgaggcatatctccccgacgacaagaacaaatcaatcgtctgggatgagaagaaaaatcaatgggttaacctgaacgaaccagaggaagaaaagaaagcccctccccccccaccaacttccatgccaaaaacagtgcaggcagccccgcccgctctgcctgggccacccggagccccagtcaatatgtatagccgcagagccgcaggcacacgagccagatacgtggacgttctcaaccccagcggaactcaacggagcgagcctgcccttgctcccgccgacttcgtggcccccctcgcacctttgcccatcccttcaaatctgtttgtgccaactcccgatgcagaggagcctcaactgcccgatggcaccggtagagaagggccagcggcagcccgggggctggcaaatcccgagcccgcaccagaacctaaagctccaggagatttgccagccgctggaggtccacctagcggcgcaatgccattctacaaccccgcacaattggctcaggcttgcgctacgagcggttccagccggctaggtagaatcggtcagcgcaagcatctcgtgctgaattag

SEQ ID NO: 133570 - DNA, 423 bp, synthetic construct
  misc_feature 1..423: note = Description of Artificial Sequence: Synthetic coding sequence
  source 1..423: mol_type = other DNA
atggatttgttaccgacatctatccttctcgcctcactgtggatctgttctcaccttcaccctcccggagtctcagttgacctgccaccgacctccattctactggtctccctatggatttgctcccacctacaccccccaggggtgagcgtcgataggccgcctccgcctagtagttggtgcctttgcgggtctccccctacatccatcctcttggtcagcctgtggatttgctcacccccccccagttcctggtgcctgtgtggaagtgcaccgacaagcatccttctggttagtttgtggatctggcggctttggggcctcacagaagtggggcacgttgaattcgtcttcctgccatggctcatcagctggaacatcatgtttagcaaacttttcagctgtttcttgtacctgggttag

SEQ ID NO: 133571 - DNA, 2205 bp, synthetic construct
  misc_feature 1..2205: note = Description of Artificial Sequence: Synthetic coding sequence
  source 1..2205: mol_type = other DNA
atgttctcagagctgtctaatccagaatcgttgcccgcgcagggccaggcacagaactcagcccagagtcccgcttctctcgtgcttgtagatgccggccagcagctccctcccaggcccccacagagcagctctgtctccctagtgagttcaggcagtggccaggcagctgtgccctccgagcagccctggccacagccagtgcccgctctggctccagggccaccgccacaggacctcgccgcctattattattatcgacctctgtatgatgcctaccagccccagtactcgctgccttatccacctgagcccggggcagcgtctttgtattatcaggacgtgtattccttgtatgagccaagatatagaccttacgacggcgccgcatccgcttacgctcagaactacaggtatcctgagcccgagcgcccctcatccagggcatcgcactcttccgaacggccccctcccagacaagggtatcccgaaggctactacagctcaaaatctgggtggagtagccagtctgactattatgcgtcctattactcctcacagtatgactatggagatcccggtcactgggaccggtaccattacagtgcccgtgttcgggacccgcggacctacgatagacgctattggtgtgacgccgaatatgacgcttatcgcagagagcatagtgcattcggcgatcggcctgaaaaaagagataacaattggaggtatgatcctcgctttaccggcagcttcgacgatgacccagacccccacagggatccatacggtgaggaggtggacaggcggagtgttcactccgagcacagcgccagatcacttcactccgcccatagtcttgccagtagacgaagctctctatcctctcactctcatcaatcgcagatctatagaagccataacgtggcagcgggatcctacgaggcgccattgccccccggtagtttccatggcgactttgcctatggcacatatagaagcaatttctcttccggcccaggattcccagagtacggttatcgcccggctttaggtttcctggagccatcaggacccggcctgcccccgggggtgcccccgttgcaggaaaggcgacacctgttgcaagaggccagaagccctgatccaggcattgttccacaggaagcgccagtcggaaattccctgtcggagctgtctgaggaaaatttcgatgggaaattcgcaaacctgacccccagtcggaccgtgccggattcagaggctcctcccggctgggaccgtgctgactcaggacccacacaaccccctctgtcattaagcccagctcctgagaccaagaggccaggacaagcagccaagaaagagaccaaggaacctaagaagggcgaatcctggttcttccgctggttgcccggcaaaaaaaagactgaggcttatctgcccgatgataagaataagtctattgtgtgggacgaaaagaaaaaccaatgggtgaatcttaacgaaccagaggaggaaaagaaggcccctccccccccccctacatcaatgcctaagacagtgcaggcggcacccccagcacttcccggacccccaggggcgcctgttaacatgtactctcgacgagcagccggtacccgcgcccggtatgttgatgtgctgaaccctagcggaacacagagatccgagcctgcacttgccccagccgatttcgtcgcccccctggcccctctgcccattccatccaatctgttcgtcccaaccccggtgcgcccacagggtcgtagcggccgaaatgacgggctacttgctttaagcagcccagacgccgaagagccccagctgccagacgggactggtcgggaaggtcctgcagccgcgcgaggtctggcaaatccagaacccgcaccagagccaaaagtgctgtcaagcgcagccagtctgccgggctcagaactccctagtagtcgacccgagggctctcagggtggtgagctcagcagatgttcctccatgtcatctctcagtcgcgaggtttcgcaacatttcaatcaggcccccggcgacttacccgccgcgggcggccccccaagtggggcaatgcctttctataaccccgctcaactggcgcaggcctgtgctacatctggcagttcccgactgggtcggatcgggcagcgcaagcacctcgtgctgaattag

SEQ ID NO: 133572 - DNA, 5184 bp, synthetic construct
  misc_feature 1..5184: note = Description of Artificial Sequence: Synthetic coding sequence
  source 1..5184: mol_type = other DNA
atgttttttcaaggcggagagacagaaaacgaggagaacctcagctccgagaaagccggcctttctggtcaagccgacttcgatgacttctgttctagtcctggcctcggaaggccacccgccccaacccacgtgggagccggatctctctgtcaggccctgttacccggtccaagtaacgaggcagccggggacgtttggggagacactgcatcaaccggggtacccgacgcttcaggctctcagtacgagaatgtggagaacctcgagtttgtgcagaatcaggaggtgctgccttccgaacctttaaacctcgacccctcttccccaagcgaccagttcagatacggaccacttcccggccccgccgtgcctcggcatggtgcagtctgccacaccggggcccctgacgccacattgcatactgtgcatccagattctgtgagcagttcctacagctccaggagtcatgggcgccttagtgggagcgccaggccccaagagcttgttgggacattcatccagcaggaggtgggtaagcccgaagatgaagcgagcggctcatttttcaaacagatagatagtagccccgtcgggggcgagaccgatgagactaccgtcagccagaactatcgaggaagtgtttcccagccatcaaccccaagcccaccaaaacctacaggaatcttccagacatctgcgaacagctctttcgagccagtgaagtcacatctggtaggtgtgaagccctttgaagcggatcgtgccaacgtggtcggcgaagtgagagagacttgcgtccgacaaaaacagtgccggccagccgctgctcttccggatgccagccctggtaatctcgagcagccgcctgacaacatggagaccctttgcgctccccaggtttgtccactgcccctgaactcaaccaccgaagccgtccacatgctgcctcacgcgggggctcctcctctggatactgtctaccccgctccggagaagaggccgagcgctagaactcagggccccgttaagtgcgagagccctgcgacgacgctctgggcacagagcgagctcccagattttggcggaaacgttctgctggcacccgccgctcccgctctctatgtgtgtgctaaaccccaacctcctgtagtgcaaccccccgaagaagctatgagcggccagcaaagtcgcaatccctcatctgccgcccccgtacagtcgaggggcggcatcggggcttctgagaacttggagaacccccccaagatgggcgaagaggaagcgctccagtcccaagtgacaaaggacgcacaggggcagcctgggcttgaaagagcccaacaagagttggtgcccccccaacagcaggcttccccccctcaattgcctaaagctatgttcagtgagttgagcaatcctgagagcctgccagcacaggggcaggcacagaactcagcacagtccccagcgtcgctggtgttagtcgacgcggggcagcagctccccccacggcctccccagtcaagcagtgtctctttagtgtcttccggctccggacaggccgcggtgcccagcgagcagccatggccgcagcccgttcccgccctggcccccggcccccctccccaagatctggccgcctattattattatagacctctgtatgacgcctaccagccccagtacagcctgccctaccctccagaaccaggcgccgcctctttatattaccaggacgtttattcgctatacgaacctaggtatcgcccttatgacggggccgcatcagcatacgcacaaaactatcgctatccggaaccggaacgaccttcctctcgagcgtcacattcttccgaaagacctccaccgcgacaggggtacccagaaggatactactcgtccaaatcagggtggagttctcagagcgactactacgcctcttactattctagccaatacgattacggagaccctggacattgggataggtaccactactccgcacgagttcgggatcctaggacttatgatcggaggtactggtgcgacgcagagtatgatgcctaccggcgggaacactccgctttcggagaccgccccgagaaacgagataataactggagatacgaccctcggttcacgggtagctttgacgacgatcccgatcctcaccgtgatccctatggagaggaggtcgaccgcaggagcgtccactccgagcattctgcaaggtccttacacagcgcgcacagtctcgcgagtcgtaggagctctctaagttcacatagtcatcagtcccaaatctatcgctcacataacgtcgccgctggctcctacgaggcccccttacctccaggaagttttcacggggactttgcatatggtacctataggtccaatttctcctcaggcccaggctttccggagtacggctatcctgccgatactgtttggcccgctatggagcaggtgtcctctcgcccaaccagcccagagaaattctctgtaccacacgtctgtgcccggttcggacctggcgggcagctgataaaagtgatccctaacctaccctccgagggacagcctgcactcgttgaggtgcatagcatggaagccttgttgcagcacacatccgagcaagaggagatgcgagctttcccaggccccttggccaaggatgacacgcataaggttgacgtgataaatttcgcccagaacaaagcaatgaagtgccttcagaatgaaaatcttatcgataaggaatccgcttcactgctctggaacttcatcgtgctcctgtgcaggcagaatggcactgtggttgggacagacattgcagagctcctccttcgggaccaccgaaccgtgtggctgcccggtaagtcccccaacgaagcaaaccttattgacttcacaaacgaggcggttgagcaggtggaggaggaggagtcgggggaggcacagctctcattcttgaccggaggcccagcagccgccgccagttccctggaacgggaaaccgaacgcttccgcgagctgcttctatacgggcgtaagaaggacgcccttgagtctgcaatgaagaatggcctctggggccacgcactgctcctcgcttcaaagatggacagcaggacacacgctcgcgtgatgaccagattcgccaattccctgcccataaacgatccactgcaaacggtgtatcagctaatgtctggcaggatgccagctgctagcacctgttgtggcgatgaaaagtggggggattggcggccacacctcgccatggtgctttcaaatctaaataataacatggacgtggagtcccgcactatggcaactatgggagatacgttagcctcaaggggcctcctagatgcagcccacttctgctacctcatggcccaggcagggttcggcgtgtataccaagaaaaccactaaactggtccttatcggaagcaatcattccctgcccttcctcaagtttgccacaaacgaggcaattcagaggaccgaggcatatgagtacgcccagtctctgggagctgagacctgccctctgccgagcttccaagttttcaagttcatttactcgtgtagactcgctgagatgggtcttgccacacaggctttccactactgtgaagcaatagctaaatctatactcactcagccacacttgtacagcccagttctgattagtcagttggtgcagatggcaagtcaactgcgcttgtttgacccacaactgaaggagaagccagaggaagagtcactggccgccccgacctggctggttcacttgcagcaggttgagaggcaaattaaggagggcgccggcgtttggcatcaagatggcgccctgccacaacagtgtcctggtactccttcgtccgaaatggaacagctggatagacccggcctaagccagcccggggcccttggcatagcaaatcccctcctggccgttccggcccctagccccgagcattcttctccatctgtaagactcctgccatctgctccgcaaaccttgcccgatggccctctcgcatccccagctcgcgttccgatgtttccagttcccctaccacccgggcccctcgagccaggaccaggttgtgtgacccctggccccgctcttggctttttagagccatccggacctgggcttcctcccggcgtgccaccccttcaggaaagacgacatctgttgcaggaggcacgatctcccgatcccggaattgtgccccaagaggccccggtaggaaattctctcagcgaactctctgaggaaaactttgatggaaagtttgcgaatttaacaccatctaggaccgtacccgattcggaggcccctcctggatgggaccgtgccgacagtggacccacgcagcccccgctgagcctgagcccagcgcccgaaacaaagaggcctggccaggctgccaagaaggaaacaaaggagccaaaaaagggcgaatcctggtttttccgatggcttccaggtaagaagaagacagaggcttacctgcctgacgataaaaataagtcaatcgtctgggacgaaaagaagaatcagtgggtcaatcttaacgagccagaggaggagaaaaaagctccccccccaccgcccactagtatgccaaaaacagttcaggccgcccctccagccctgcccggacctccgggggctcccgtgaatatgtacagccgccgtgccgccggaacgcgcgccagatacgtcgacgtcctgaacccatctggcactcagagaagcgagcctgccctcgcaccggccgattttgtggcccctctcgctcctctccccatcccatcaaacctgttcgtccctaccccagacgccgaggaaccccagctcccagatggtacaggacgggagggccccgctgcagcaaggggactcgccaaccctgaaccggcccccgaaccaaaagttctgagtagtgccgccagtttgcctggctcagagctgccttcctccagaccggaaggctcccaaggcggagaggctcccggcgatttacctgctgccggaggtccgccctcgggcgccatgcctttttataaccctgctcagctcgcccaggcctgtgccacttccgggtccagtcggctaggaagaataggtcagagaaagcacctcgtgctgaattag

SEQ ID NO: 133573 - DNA, 6465 bp, synthetic construct
  misc_feature 1..6465: note = Description of Artificial Sequence: Synthetic coding sequence
  source 1..6465: mol_type = other DNA
atgcccgggttggaccgacccctttcaaggcaaaatccacatgatggggttgtaacgccagcagcaagcccttccctacctcagcccggactgcaaatgcccggacaatgggggcctgtgcagggaggtccccaaccgtctggccaacatcggagtccgtgccccgaaggaccagtgcctagtggtgtcccatgtgccacttcagtgccgcattttcctaccccctcgatattacatcagggaccgggccacgagcagcatagccctctcgttgccccacccgcagctctgccaagtgatgggcgggatgaagtgagccacctgcaaagcggtagccaccttgcaaacaacagcgatcccgaatctacatttaggcaaaaccctcggatcgtcaaccactgggctagtccagagttgaggcagaatccaggcgtgaagaacgagcacagacctgcttccgctttagtgaaccctctggcgcgaggggattccccggagaatagaacccatcatcccctcggcgccggagctggctccggctgtgctcctctggaggcagactcaggcgcctccggtgcattggcgatgtttttccagggcggcgaaaccgagaatgaagagaatctgagtagcgagaaggcgggcttaagcggccaggcggactttgatgacttttgttcttctcctgggctgggacgcccaccagcgccgacacacgtgggcgccgggtcactgtgtcaagcactgctaccagggccctcaaacgaggcagccggcgatgtttggggtgacacagcttcgacaggagtgccagatgctagcggatcccagtacgaaaatgtggaaaacctagagttcgttcagaatcaggaagtcctgccttctgagcctctgaacctggaccctagttctccaagcgaccagtttcggtacggccctctgccaggccccgcagtgccccgacatggtgcggtgtgccatacaggggcgccagatgccacactgcacactgtgcacccggattctgtgtcaagcagttatagttcccggtctcacggcaggttgtcaggtagtgcccgccctcaggagctggttggcaccttcattcaacaggaagttggaaagccagaggatgaagcgtcaggatctttctttaaacagatagatagctcccctgttgggggagagactgatgagacaacggtgagccaaaattaccgtgggtccgtatcacagccaagcactcccagcccacctaagccaacaggaatattccagacgtccgcaaacagttctttcgaaccagtcaagtcccacttagtgggcgtgaaaccttttgaggccgatcgagcgaatgtcgtcggtgaggtgcgcgaaacctgcgtccgacagaaacagtgccggccagccgccgccctccccgatgccagtccaggcaatctggaacagcctcccgataacatggagacgctttgcgctccgcaggtctgtccgctgccactaaatagcactacagaggccgtgcacatgttgcctcatgcaggagccccccccctagatacagtgtaccctgctccggagaaacgcccttctgctaggacacagggtcctgtaaaatgtgagtctccagctactactttgtgggcacagagtgagttaccagactttggcgggaacgtcctgctggcccccgccgcccctgctctctacgtgtgcgcaaaacctcagccacctgtggtgcagcctccagaggaggcgatgtctggccagcagagtcgaaatcccagcagtgccgcccccgtccagagcagggggggcatcggagcatccgaaaatctggagaacccccccaagatgggagaggaggaggccttgcagtcccaggcttcaagcggatatgcctctctcttatctagccccccgacggagtcccttcagaatccgcctgtcctgatcgcccaaccagatcacagctataacctcgcccagcccatcaacttttccgtctctctgagtaactctcatgaaaagaatcaaagctggcgggaagccttggtgggagacaggcccgctgtgagctcctgggccctaggcggcgattccggggaaaacacctctctgagcggaattcctacatcatctgtgctcagcttgtccctgccctctagtgtggcccagtcaaatttcccccagggatccggagcttccgaaatggtctcgaaccaaccagcaaacctgttggtccagccccccagtcagccagttccagagaacttagtacccgaatctcaaaaggatcggaaggcgggcagcgctctgccgggtttcgctaactcccctgccggcagtacaagcgtggttctggtcccacccgctcacggcaccctcgttcctgacggcaacaaggcaaaccacagttctcaccaggaggatacatacggagctctcgacttcaccctcagtcgaaccctggaaaatcctgtcaacgtgtacaatccatcccatagcgactccctggcgtcacagcagtctgtggcgagccacccccgccagtctgggcccggggcacccaacttggaccggttctaccagcaggtcactaaggacgctcagggccaaccaggcctcgagcgcgctcagcaggaactggtgccccctcaacaacaagcctcccctcctcagctgccaaaagcaatgttctccgaactgagtaatcctgagtccttgcctgcccaaggccaagcccagaacagtgcccagtccccagcctctctggttttggtagatgccggtcaacagcttccgccccggccacctcagtcgtcctccgtgtctcttgtttcctcaggttccggacaggcggccgtcccctctgaacagccctggccgcaaccggtcccggctctggctcccgggccacctccccaagacttggcggcctattattactataggcccctgtatgacgcgtaccagccacaatacagcctcccttatcctcctgagcccggcgccgcctccctgtactatcaggatgtgtactcactgtatgagcctagataccgcccttatgatggggccgccagtgcttatgcccagaattacagataccccgaaccagaacgccctagctcccgcgccagccactcctctgagagacctcccccgaggcagggctaccctgagggttactactcaagcaagagtggctggagttcacagtcagattattatgcatcttattactctagtcagtacgactacggcgatcctgggcactgggatcgctaccactactctgccagggtgagggatcccagaacctacgataggaggtactggtgcgatgctgaatacgatgcctaccggcgggagcattctgcgttcggcgacaggccagaaaagcgtgataacaactggaggtatgaccctcgcttcaccggatccttcgacgatgaccccgaccctcacagggatccttatggcgaagaggtggataggagaagcgtgcacagtgagcattcagccagaagtcttcactccgcccactcccttgcatctagacggtccagcttgtcgagccactctcatcagagtcagatctaccgtagtcacaatgtggcagccggaagttacgaggctcctcttccgcccggaagcttccatggtgatttcgcttacggcacttatagatcaaacttctcatccgggcccggtttccccgagtacgggtatcccgccgacactgtgtggcctgccatggagcaggtttcatcacgccccacatcccccgagaaattttcagtcccacatgtgtgtgcccgttttggcccagggggacagctaatcaaggtaatccccaacctgccctccgaagggcagcctgccctcgtcgaggtccacagcatggaggccttgctgcagcacacatcagaacaggaagagatgcgagcattccctggtccccttgctaaagatgacacacacaaagttgatgtcattaatttcgcccagaacaaggctatgaagtgcctccagaatgaaaatctgatcgacaaggaaagcgccagtctcctctggaactttattgtcttactgtgcaggcaaaacggcaccgtcgtggggaccgacatcgccgagttacttctccgcgaccatcgtacagtttggctccctggcaagagccccaatgaagccaacttgattgattttaccaacgaggcagtggaacaggttgaagaggaggagtcaggggaagcccaattgtcattcctgacgggaggccctgccgccgcggccagttccctggaacgagagaccgaacgattccgggagcttctattgtacggcagaaaaaaagacgccctggagagtgcaatgaaaaatggactttggggccatgctctgctgctcgcatccaagatggacagtcggacccacgcccgggtcatgaccagatttgccaacagcctcccaataaatgacccgctgcaaacagtataccagttgatgagcggtagaatgccggccgcctcaacttgctgtggagatgagaaatggggcgactggcggcctcatctggccatggtgctgagtaatctgaacaacaatatggacgtcgaatccaggacaatggctacaatgggggacacactggcctcacggggactgcttgacgccgcccatttttgctaccttatggcacaggccggttttggagtgtacaccaaaaagaccactaagctggtgttgataggtagcaatcactcgctgcccttcctgaaatttgccaccaacgaggccattcagcggacagaggcatacgagtacgcgcaatcattgggcgccgagacatgccctcttcctagtttccaggtgttcaagttcatctatagttgtagactggccgagatggggctggcaactcaggcttttcactattgcgaggctatagcaaaatctatccttacacagccccacctgtatagccccgtgctcattagccagctggtccagatggcaagccagttaagactgtttgatccacagctaaaggagaagccagaagaagagtctttagccgcaccgacctggttggtgcacctgcagcaggtagaacgacagattaaagagggcgctggcgtctggcaccaggacggcgcactgccccagcaatgccctggcacccccagctcagagatggagcagctggaccgtcccgggctgtctcagcccggggcactgggcatcgcaaatcccctgctcgccgttcctgcgcctagtccagaacactccagcccatccgtcagactcttgccctctgcgcctcagacattgccagatggcccgctggcctcccccgcaagggtgccaatgtttcccgtgccactgccacctggccctctggaaccaggtcccggctgcgtgacccctggcccagccctcggcttcttggaaccctccgggcccggcctgccccccggggtaccacctctccaagaacgacggcatctcctacaggaagcacgcagccccgacccaggtatcgttccccaggaggcaccagtggggaactctctctccgagttatccgaagaaaatttcgatggaaaatttgctaacttgacgccaagccgcacagtgcccgactctgaggccccacccggctgggaccgggcagatagcgggccaacccagccccccctttccctgtctccagcgcccgaaacaaagagacctgggcaggcagctaagaaggaaactaaagaaccgaagaagggagaatcctggttcttccgctggctacctggtaaaaagaagacggaagcttatttacctgacgataaaaacaagtctattgtctgggatgagaaaaagaaccagtgggtgaatctgaatgagccagaggaagagaagaaggctcctcccccaccgccaaccagtatgccgaaaaccgtccaggccgcccctccagccctcccgggccctccaggtgcacctgtgaatatgtattctaggcgcgctgccggcacccgcgctcgttatgttgacgttctcaacccaagtggcacacagcgaagcgagcctgccctggctccagctgattttgtggctccactggcaccactacccatcccaagcaatctgttcgttccaacccccgacgccgaggagccacaactgccagacggtaccgggcgagagggcccggccgccgctagagggttggcaaaccccgaacccgccccagaaccgaagcttagccggtgcagctccatgagcagcctcagccgtgaagtgtctcaacactttaaccaagcgcccggtgatttgcctgccgctggaggacctcccagcggagcaatgccattctataacccagctcaactggcccaggcctgcgcgacaagcggcagtagtcgactcgggcgtattgggcaacggaaacatctggtactgaactag

SEQ ID NO: 133574 - DNA, 1521 bp, synthetic construct
  misc_feature 1..1521: note = Description of Artificial Sequence: Synthetic coding sequence
  source 1..1521: mol_type = other DNA
tgaagtgctttcggggatcggcctgagaagcgtgacaacaactggcgctatgatccccgtttcaccgggtcctttgatgacgaccctgacccacatagggacccctacggggaagaggtagatcgtaggagtgtgcacagcgagcacagtgctaggtcgctgcactcggctcactctctcgcatctcgcaggtcttcgttgagtagccactcacaccagtcacaaatttacagaagccacaatgtggcagctgggtcgtatgaagcacctctcccgcctggttcctttcatggggacttcgcatacgggacataccgcagcaatttcagctcagggcctggcttccccgagtacggctaccccgcccttggtttcttggaaccttctgggccagggctaccaccgggggttccaccactccaggagaggcgacatctcctccaggaagctcggtcccccgaccctggtatcgtgccgcaggaagcacctgtgggaaactcactgtccgaattgtctgaggaaaactttgatggaaagttcgctaatcttacacccagcagaactgtccctgactctgaagctccccctggttgggacagagctgatagcggcccaacacagccaccgctcagtctgagcccagcaccggaaacaaagaggcctggacaggccgccaagaaggagacaaaggaacccaaaaagggagagtcttggttttttagatggctgccagggaaaaagaaaaccgaagcttatctgcctgatgataagaacaagtcgatcgtgtgggacgaaaagaaaaatcagtgggtgaatctgaatgaacccgaggaggaaaagaaggcgccacccccgccacctacatctatgcctaaaactgtccaggccgccccgccagctctcccaggccccccaggggcccccgtgaatatgtatagccgcagggccgccggaaccagggcgcggtatgtggatgtgctgaatccttctggcactcaacgctccgagccagcactggctccagctgatttcgtcgcgccgttggcaccactgcctattcccagtaaccttttcgtgcctactccagtgcggccgcagggcagatccggtcgcaatgatgggctgcttgcgctctcaagccctgatgctgaagagccgcagctacccgatgggaccggacgtgagggaccggccgccgcgcgaggcctcgctaaccctgaacctgctcccgagcccaaagtgctctcttcagccgctagcctgcctggaagtgaattgccgtcttctcggccagagggctcccagggaggggagctatcccgctgtagtagcatgtcgagcctatctcgagaggtttcccaacattttaaccaggcccctggagacctccccgccgctggtggacctccatctggggcgatgcccttttacaaccctgcccagctcgcccaggcttgcgccacaagcggttcatcgcgactcggacggatcggacagcgcaagcacctggttttgaactag

SEQ ID NO: 133575 - DNA, 3180 bp, synthetic construct
  misc_feature 1..3180: note = Description of Artificial Sequence: Synthetic coding sequence
  source 1..3180: mol_type = other DNA
gcgcgggtgcgcgatcctcgaacttacgacaggaggtattggtgcgatgctgagtatgatgcttatcgccgggagcacagcgcctttggggataggccggaaaagagagacaacaactggagatacgaccctagattcaccggaagctttgatgatgacccagatcctcatagggacccttatggtgaagaagtggaccggcgttctgttcacagtgaacactctgcccgaagtctgcactccgcccatagcctggcgagtaggcggagcagcctgtcttcccactcccatcaatcccaaatttaccggtctcacaacgtggcagccggctcttacgaggcaccactgcctccgggatcatttcatggggacttcgcttatgggacgtatcgttctaatttcagctccggacccggatttccagagtatggctacccagccgacacggtgtggcctgccatggaacaggtgtcttctcggcccacgagccctgagaaattcagcgtcccacatgtgtgtgctaggtttgggccaggtgggcagctcatcaaagtgatcccaaaccttccctccgagggtcagcccgccctggtggaagttcactctatggaggctctgttacagcatactagcgaacaggaggagatgcgcgcatttcccggacctctggctaaggatgacactcacaaggttgacgtcataaactttgctcaaaataaagccatgaagtgcctgcagaatgaaaatctaatcgacaaagaatccgcatctctcctatggaatttcatcgttttactctgtcgccaaaacggtaccgttgtcggcaccgatatcgctgagctcttactgagggaccaccgcacagtttggctccccggaaagtctcctaatgaggctaacctgatcgatttcacgaatgaggctgtggagcaggtggaagaggaagaaagcggagaagcccagctgagcttcctgacgggcggccctgcagcagcagcgtcttctctggaacgcgaaacagaacgtttccgggaactcttgctctacggaagaaagaaggatgccctggagtctgctatgaaaaacggcctctggggtcatgcccttctcctcgcttccaagatggacagcaggactcacgcccgagttatgacgcgatttgcgaactctctgccaatcaatgaccctcttcagactgtgtatcaactgatgtctggccggatgcccgcagctagtacatgctgcggagacgaaaaatggggagattggcgaccccatctggccatggtgctttccaacttgaataacaatatggatgtggaatcaagaactatggccacaatgggagacacactggcgagtaggggactgctggacgcggcccatttttgctacctgatggcacaggctggattcggtgtttacacaaagaagactactaaattggtgctcattggtagcaatcatagtctgccgttcctgaaatttgccacaaatgaagcgatacagcgaactgaggcctacgagtatgcccagagcctgggggctgaaacatgccctcttccttcattccaggtatttaagtttatttactcttgccggcttgctgaaatggggctcgcaacccaagcattccactactgcgaggcgatcgctaaatccatcctgacgcaaccccacttgtactcgcccgtgcttatttcccagttggtacagatggcctcacagttaaggctcttcgaccctcaactcaaagagaagcctgaggaggagtcactcgccgcgccaacgtggttagtgcatctccagcaagtagagcggcaaattaaggagggcgcaggggtgtggcaccaagacggggccttgccccagcagtgtccgggaactccttcctccgagatggagcaactggataggcctggtcttagccagccaggtgctctcggcatcgccaaccctctacttgcagttccagctccttctcctgaacactcaagtcctagtgtgaggcttctgccatctgccccccagacattaccagatgggcctcttgcctccccagctcgggttcctatgttcccagtccctttgcctccgggaccgttggagcccggacctggctgtgtaacccctggcccagccctggggtttctcgaaccttccggcccaggtttacccccgggggtgccccctcttcaggaaagacggcacctccttcaagaagcacgcagccctgaccccggcattgttccacaggaagccccagttggcaactcgctaagtgaactgtcagaggagaactttgatggcaaatttgcgaacttgacaccttctcgaacagttcctgactcagaggccccaccaggctgggacagagccgactctggtccgactcaacctcctttaagcctgtcccccgcccccgaaacaaagaggcccggccaggcagccaaaaaggagaccaaagagcccaaaaagggcgagagctggttcttcaggtggctgcccggcaagaagaagacagaggcctatctccccgatgataaaaacaagtcaatcgtctgggatgaaaagaagaatcaatgggtaaacctaaacgagccggaggaggagaagaaggctcccccgccccctccaactagcatgcccaagaccgttcaggccgctccgcctgcccttcctggcccgccaggagcacctgttaatatgtatagccgaagggcagccggtacccgggcaagatatgtggatgttttgaatccaagtggcacgcagcgctctgagcctgctcttgcccccgccgatttcgtggcacccctggctccactacctatcccttccaacctgttcgtgcctactcctgacgctgaagaaccccagcttccagatggcactggtagggaaggacctgctgccgcccggggtctggccaatcccgagccggcgcccgagccgaaggtcctctccagcgcagcctccctcccaggtagtgagctaccttctagtcggccagaaggcagccaaggcggggaagcacccggagatcttccagcagccggcggacctccgtctggggctatgccgttctacaatcctgcccaactggctcaagcatgcgccacctcagggtctagtcgactgggacggattggacagaggaaacacctggtgctcaattag

SEQ ID NO: 133576 - DNA, 603 bp, synthetic construct
  misc_feature 1..603: note = Description of Artificial Sequence: Synthetic coding sequence
  source 1..603: mol_type = other DNA
atgccaaaaaccgtacaggccgccccgcccgcccttcccgggccacccggcgcgccagtaaacatgtacagtagaagggcagccgggacaagagccaggtacgtggacgttctgaatccctcaggaactcagcgtagcgagcctgcactggctccagccgatttcgtcgccccccttgcccctttgcccatcccaagtaatttgttcgttcccacgccagtgagtagtgtccgcccccaaggacgttctggaagaaatgacggcctcttagccctttcaagccctgacgcagaggagccccagttgcccgacggaacaggacgtgaaggacccgccgctgcgcgcggtctcgcaaatcctgaaccggcgcctgagcctaaagtgctaagctcggccgcttctctgccaggaagcgagctgccctctagtcggcccgagggtagccagggtggcgaggccccaggtgacctgcccgctgctggcggaccccctagcggagcaatgccgttctataatcccgcacagctagcccaggcctgtgcaacctctggttcctctcggctaggtaggattgggcagaggaagcatttagtgctgaactag

SEQ ID NO: 133577 - DNA, 924 bp, synthetic construct
  misc_feature 1..924: note = Description of Artificial Sequence: Synthetic coding sequence
  source 1..924: mol_type = other DNA
atgagcatgattcttagcgcctcagtgatacgggtccgtgacggccttccgctgtccgcctctactgactacgaacagtccacaggaatgcaagagtgtcggaaatacttcaagatgttgtcccgcaagctggctcagctgcccgaccgctgcaccctcaagacaggtcattataatatcaacttcatttctagcctgggtgttagttacatgatgctgtgtaccgagaactaccctaatgtgcttgccttctctttcttggatgagctgcagaaggagttcataacgacgtataacatgatgaaaaccaatactgccgtccgaccctattgctttatagaatttgacaacttcattcagcggaccaagcagaggtacaacaacccaagatctctctccaccaaaattaacctttccgacatgcagactgaaatcaagttacgccccccataccagatatctatgtgtgaactcggctccgccaatggagtaacgagcgctttttccgttgattgtaagggcgccggaaaaatcagtagtgcgcaccagcgcctcgagccagcaactctgagtgggattgtggggtttattttaagccttctgtgtggggctctgaatctgatccggggtttccatgccatagagtcacttttacaaagcgatggtgatgactttaactacattattgcattttttctgggcaccgcggcttgcctctatcagtgctacttattagtttattacacaggctggaggaacgtaaaaagttttcttacatttggcctgatttgcctttgcaacatgtatctgtacgagctgcgcaatttatggcaacttttttttcatgtaacagtgggggcttttgtcacattgcagatttggctcagacaggcacaaggcaaagctccggattatgacgtgtag

SEQ ID NO: 133578 - DNA, 330 bp, synthetic construct
  misc_feature 1..330: note = Description of Artificial Sequence: Synthetic coding sequence
  source 1..330: mol_type = other DNA
atgagtatgatactttcagcttctgtgattcgcgttcgggatggcctgccactgagtgcctccacagattatgagcagtccaccggaatgcaggaatgcaggaagtatttcaaaatgctgtcacgcaagctggcacagcttcctgatcgctgtaccttaaagacggggcactataacataaactttatcagttctttgggtgtatcgtacatgatgctgtgcactgaaaattacccgaacgttctcgcgtttagctttctcgatgagctccaaaaagaattcatcactacctataacatgatgaaaaccaacactgccgttaggccatag

SEQ ID NO: 133579 - DNA, 870 bp, synthetic construct
  misc_feature 1..870: note = Description of Artificial Sequence: Synthetic coding sequence
  source 1..870: mol_type = other DNA
atgagtatgatcctctctgcctcggtgattcgggtccgagatggactaccgcttagtgcgagcactgactatgagcaatccacaggcatgcaggagtgccgaaagtatttcaagatgctgtctcgtaagctagcccagctgcccgaccgctgcacactgaagacggggcactacaatataaactttatcagctccttaggggtgagctacatgatgctatgcacagagaactaccccaacgtgctcgccttctcttttctggatgaattacagaaggaattcatcacgacctacaacatgatgaaaacaaacaccgccgtgagaccttattgcttcatcgagtttgacaatttcatccagaggaccaagcagcgctacaataatcccaggtctctgtccacaaagatcaacctgtctgatatgcaaacagaaatcaagctcagaccaccttatcaaattagtatgtgcgagctgggaagtgccaatggggtgactagtgctttcagcgttgactgtaagggtgccggaaagatatcctcagcgcaccagagactggaacccgctaccctgtcaggtatcgtgggcttcattctgtcattgctgtgcggtgctctgaacttgatccgcggttttcacgcgatcgagagcctgctgcagtcagatggggacgatttcaactacattatcgcctttttcctaggaaccgccgcctgcctataccagtgctacttacttgtgtactataccggttggcggaatgtaaaatcttttctgacctttggactgatttgcctgtgtaacatgtatctatacgagttgaggaacctttggcagttgttcttccatgtgaccgtgggtgcctttgtttag

SEQ ID NO: 133580 - DNA, 417 bp, synthetic construct
  misc_feature 1..417: note = Description of Artificial Sequence: Synthetic coding sequence
  source 1..417: mol_type = other DNA
atgtcaatgatcctgtcagcgtcagtaattagggttagagatggtctgcctctgtcggcgtcaactgactatgagcagagcacaggcatgcaggagtgtcggaagtacttcaagatgttatctagaaaactggcacaactcccggaccggtgcaccttgaagaccggccattataacatcaatttcatttcctccttaggtgtgtcatatatgatgttgtgtacggagaactaccccaatgtactggctttcagcttcttagacgaactgcagaaggaatttatcactacttataatatgatgaaaaccaacaccgcagtgcggccctactgttttatagaattcgacaacttcatccagagaacgaagcagcggtacaataacccaaggagtctttcaacaaagataaatctgtag

SEQ ID NO: 133581 - DNA, 657 bp, synthetic construct
  misc_feature 1..657: note = Description of Artificial Sequence: Synthetic coding sequence
  source 1..657: mol_type = other DNA
atgagcatgattctgtcagcctccgtgatcagagttcgagacggactgccactctctgctagtactgattacgaacaatccacgggcatgcaggagtgccggaagtactttaagatgctttcacgcaaactcgcacagctgcccgatcgctgcactctaaaaacaggccactacaatattaactttatctcgtcattgggagtcagctatatgatgctgtgcacggaaaactatccaaatgttctggcttttagttttttggatgagctacagaaagaatttatcacaacatataacatgatgaaaaccaatacagccgtgcgcccctattgcttcatcgaatttgacaattttatacagcgaacaaaacagagatacaacaatccacgaagcttgagcacaaaaatcaacctgagcgacatgcagacggaaatcaagttaaggccgccatatcagattagcatgtgtgaactgggaagtgcaaacggagtaactagcgccttctctgttgactgcaaaggggctggcaaaattagtagcgctcatcaacgactggaacccgccactctgagtggaatcgtgggtttcatcttgtcgttgctctgcggtgcgcttaacctgattagaggatttcacgctatcgagagtctcctgtag

SEQ ID NO: 133582 - DNA, 306 bp, synthetic construct
  misc_feature 1..306: note = Description of Artificial Sequence: Synthetic coding sequence
  source 1..306: mol_type = other DNA
atgtctatgatcctcagcgcctccgtcataagagtgcgagatggcctccccctgagcgctagcacagattatgaacaatcgactggcatgcaggagtgcagaaagtattttaaaatgctgagcagaaagcttgcacagcttcctgatagatgcacgctgaaaacaggacactataacatcaattttattagttcccttggggtgagctacatgatgctgtgcacggaaaattaccccaacgtactcgccttttcctttcttgacgaactacagaaggagtttatcacaacttacaacatgatgtag

SEQ ID NO: 133583 - DNA, 924 bp, synthetic construct
  misc_feature 1..924: note = Description of Artificial Sequence: Synthetic coding sequence
  source 1..924: mol_type = other DNA
atgtcaatgattttatccgcttctgttattcgggtgcgtgatggcttgccgctctccgcctccacagattacgaacagagcaccggaatgcaagaatgccgaaagtacttcaaaatgctgtctaggaagctggcacagctccctgatagatgcaccttgaaaacgggccactataatatcaactttatctcttccttgggagttagctacatgatgttatgtacggagaattatcccaatgtattggctttttctttcctggatgaactgcagaaagagtttattacaacatataacatgatgaagactaatactgccgtgcgcccctattgcttcattgaattcgacaattttatccagcgcacaaagcaacgctacaacaatcctcggtctctgtcgaccaagatcaatctgagcgatatgcagaccgagatcaaacttagacccccataccaaattagtatgtgcgagcttgggtcggccaacggggtgacttctgccttctctgttgattgtaagggagctggaaagatttctagcgctcaccagagactcgagcctgccactttgtcggggattgtgggcttcatcttatccctactctgcggcgcgctgaacctcattcgaggatttcacgctatcgagagcctacttcaatccgacggagatgacttcaattacatcattgcttttttcctggggacggcggcgtgtttgtatcagtgctatcttctggtatactacactggctggcggaatgtgaaatcttttctgactttcggcctgatctgtctatgcaatatgtacctctatgagctgcgcaacctttggcagctatttttccatgttacagttggtgcctttgttactcttcagatatggttgcgccaagcccaaggaaaagcacccgattacgacgtttag

SEQ ID NO: 133584 - DNA, 2298 bp, synthetic construct
  misc_feature 1..2298: note = Description of Artificial Sequence: Synthetic coding sequence
  source 1..2298: mol_type = other DNA
atgaccacctatcttgaattcattcaacaaaacgaagagagggatggcgtgcggttcagttggaacgtttggccctcgtctcggttggaggcaacaagaatggttgtccccgtggcagccctgttcacccccctcaaagagcgcccggacctcccacccatccagtacgagcccgtgctgtgttcccggaccacatgtcgggcggtattaaaccccttatgccaagtggattacagggccaagttgtgggcttgcaatttctgctaccagcggaaccaattcccaccctcatacgctggaatctccgaactgaaccagcctgccgagttactccctcagttcagcagtattgagtacgttgtgctgcgcggcccccagatgccccttatctttctgtacgtcgtggacacttgcatggaggacgaggacctccaggccctcaaagagagcatgcagatgagcctcagtttgctcccccctaccgccctagtcggcctcatcactttcggcagaatggttcaagtacatgaactcggctgcgagggtatctctaagagctacgtcttcagaggcactaaggatctgtccgccaagcagctccaagagatgctgggattgagcaaggtgcctttaactcaggcaacccgcggaccccaggttcaacagccaccgccatcaaaccgttttcttcagcccgtgcaaaagatcgatatgaatctcaccgacctgcttggggaactgcaacgcgacccttggccggttcctcagggtaagcgaccccttcgctcctccggggtggccctctcgatcgccgtgggactcctggaatgtacgtttcccaacacaggggcccgcatcatgatgttcattggcggaccagccacccagggcccgggtatggtcgtgggcgatgagctgaagactcctatccgatcctggcatgacatcgataaagataacgctaaatacgtcaagaaaggcacaaaacacttcgaggcactggccaacagagccgccaccaccgggcatgtgatcgacatctacgcatgtgcccttgaccagactggccttctggagatgaagtgctgtcccaacctcacgggggggtatatggtgatgggagattcttttaatacatcactgtttaagcagacgttccaacgggtgttcactaaagatatgcatggacagtttaagatgggttttggtggcactctggagatcaaaacttcacgagaaatcaagatctccggcgcaatagggccatgcgtatctttaaattctaaggggccctgcgtcagcgagaatgaaataggcacaggcggaacttgtcagtggaagatctgtggcctctcccctacaacaaccctcgcaatttatttcgaagttgtgaaccagcacaacgccccaatcccacagggtggcaggggcgcaattcaatttgtcacacagtaccagcacagctccggccagcggcgcatccgcgttaccacaattgcgcgcaattgggcagacgctcagacccagatccaaaacatcgccgcctctttcgaccaggaggccgcggcaatcctaatggcccgcctagcaatctatcgggcagaaaccgaggaaggaccagacgtactcagatggttggaccgccagctaatcagactgtgccagaagtttggggaatatcacaaagatgatccgagtagtttcagatttagtgagacctttagcctataccctcagttcatgttccacctgaggagatcatccttcttacaggtctttaacaatagtcccgacgagagcagttactacaggcatcacttcatgcggcaggaccttacacagtctctgattatgatacagcctattctttatgcttactctttttccggtccaccagagcctgtcttgctcgactctagttccatacttgctgatcgaattctgctgatggatacctttttccaaatcctcatataccatggtgagaccatcgcccagtggcgcaaaagtggatatcaggatatgcctgaatacgagaatttcaggcacctgttacaggcacccgtcgacgatgcccaggagattttgcatagtaggttcccgatgccaagatacattgacactgagcacggagggtctcaggcgcggtttttgctgtccaaagtgaaccctagccaaacccataataatatgtatgcctggggtcaggaatcaggcgccccaattctgacggacgatgtgtcactgcaggttttcatggaccatctgaaaaaactggcagtgtcatctgccgcttag

SEQ ID NO: 133585 - DNA, 1992 bp, synthetic construct
  misc_feature 1..1992: note = Description of Artificial Sequence: Synthetic coding sequence
  source 1..1992: mol_type = other DNA
atgcccctcatattcctgtatgttgtagacacttgtatggaagacgaagaccttcaggctctaaaggagagcatgcagatgtctctcagtctgctgcctccaaccgccctggttggactgatcacctttggccggatggttcaggtgcacgaactagggtgtgaggggatatccaagtcctatgtgttcaggggaaccaaggacctgagtgccaagcagctgcaagagatgctggggctgtccaaggtgcctcttacgcaggcaacgcgagggcctcaggtccagcaacccccaccatcgaatcgctttctccaacctgtgcagaagatcgatatgaatttaaccgatcttctgggcgaactccagcgcgatccatggcctgttcctcagggcaaaagaccactgaggtcaagcggagttgccctgtctattgctgtggggcttctcgagtgcacattccctaacacaggagcccgaatcatgatgtttatcggcggacccgccactcagggtcccggtatggttgttggggacgaactgaagaccccaattcgttcctggcatgatatcgataaggataacgcgaagtacgtgaaaaagggaactaaacattttgaggctctcgcaaaccgcgcagccaccactggccacgtgatcgatatctacgcatgtgctctcgatcagaccggtctgcttgaaatgaagtgctgtcctaacctgacagggggatatatggtcatgggcgacagttttaatacatctttgtttaaacagactttccagagggtattcacaaaagacatgcacgggcagttcaagatgggctttgggggcacactggaaattaagacctctagagagatcaagatctccggggcaataggcccttgcgtgtcccttaactctaagggcccttgcgtgtcagaaaatgaaattggcacaggcgggacctgccaatggaaaatctgtgggctgtcccccacaactacactggcaatttatttcgaggttgttaaccagcataatgcaccaataccccagggcggaaggggcgctatccagtttgtcacacagtaccagcacagcagcgggcagcgtcggatacgggttaccaccatagcgcgcaattgggccgatgcgcaaacacagatccagaatatcgcagcaagcttcgaccaggaggccgcagccatcttaatggctcgtctcgctatctaccgcgccgaaaccgaagaggggccagacgttttaagatggcttgacagacaactcattcgcctgtgccaaaagttcggcgagtaccataaggatgatcctagcagcttccggttctctgagacatttagtctctaccctcagcgtcgggatttccccaagactagcggcgagatcctcgaaaatcaggagaaggcccggagtgcatgtctgaaattcatgttccacttaaggcggagtagttttctccaagtttttaataacagtcctgacgagagctcttactacaggcaccacttcatgaggcaggatcttacacagagccttatcatgatacagccaatactgtatgcatacagctttagcggcccccccgagcccgttctgctcgatagcagcagtattctcgcagacaggattctgctgatggacacgtttttccagatcctgatctaccacggcgaaacgattgcgcagtggcgaaaatcaggataccaagacatgccagaatatgaaaattttcgacaccttctgcaggcaccagtggacgatgcacaggagatattgcatagtcggttcccaatgcccaggtacatcgacactgagcacggtggctctcaggcacgcttccttttgtcaaaggtgaacccatcacagacccacaataacatgtacgcctggggacaggagagcggagcccccattctgacagacgacgtgtctttgcaggtgttcatggaccaccttaagaagcttgccgtgagctcagccgcctag

SEQ ID NO: 133586 - DNA, 1692 bp, synthetic construct
  misc_feature 1..1692: note = Description of Artificial Sequence: Synthetic coding sequence
  source 1..1692: mol_type = other DNA
atgcttgggctatctaaggtacctctaacacaggctacacggggaccgcaggtgcagcagcctcctccgtcaaacagattcttgcagccagttcagaaaatcgacatgaatctcacagatctcctgggagaactgcagcgcgacccttggccagttcctcaagggaagcgccccctcagatcttcaggcgttgcactaagcattgccgtcggattgctcgagtgcacctttccaaacacaggcgctagaatcatgatgtttatcgggggacccgcaactcaggggcctggcatggtagtgggcgacgaacttaaaacaccgatacggtcatggcatgatatcgacaaggataacgccaagtacgtgaaaaaagggacaaaacactttgaggctttggcaaatcgagcagccacgacgggccatgtgatcgatatatacgcttgcgccctagaccagactgggctcttggaaatgaagtgttgtcccaacctcactggagggtatatggtcatgggggactcatttaacacctctctcttcaaacagaccttccagcgggtctttactaaggacatgcacggtcaattcaagatgggcttcggagggaccctcgagattaaaacctctagagagattaagatttctggtgcgatagggccatgcgtcagcttaaattccaagggaccgtgcgtgtcggagaatgaaattggtactggaggaacatgtcagtggaaaatctgcgggctctcacctacgacaactctggcaatctatttcgaggtggtcaatcagcacaatgcgcctatcccacagggcgggaggggcgctatccaatttgtgacacagtatcagcattcttcaggccagcgtcgcattagggtgacaacaattgcacgaaactgggctgatgcccagactcaaattcagaacattgccgcatcttttgatcaagaagctgctgccatccttatggcccggctcgctatttaccgggctgaaacagaggaggggcctgatgttcttaggtggctcgacaggcagctgatcaggctgtgtcaaaagttcggcgaatatcacaaggatgatccctcatcctttcggttcagcgaaacattctccctgtacccacagtttatgtttcatctccgcagaagcagcttcctgcaggtttttaacaattcaccagatgagtcctcctattataggcaccatttcatgcgacaagacctgacccagagtctgatcatgatccagccaatcctctacgcgtacagtttcagtggaccccctgaaccggtactgctggactcgtccagcattctggctgaccgcatcctgctgatggataccttctttcaaatactgatctaccacggtgaaacgatcgctcagtggaggaaatccgggtaccaagatatgcctgagtacgagaacttcagacatctgcttcaggcacccgtggacgatgcccaggaaatcttacatagtaggttcccaatgcccagatatattgataccgaacacggcggaagccaggcgaggttcctcctgtccaaagtgaatccatcacagacccacaacaatatgtatgcatggggtcaggagagtggtgccccaatcctgacggacgacgtatcactacaggtcttcatggatcatctgaagaagctagcggtgagtagcgcagcctag

SEQ ID NO: 133587 - DNA, 2211 bp, synthetic construct
  misc_feature 1..2211: note = Description of Artificial Sequence: Synthetic coding sequence
  source 1..2211: mol_type = other DNA
atgaccacataccttgagtttattcaacagaatgaggaacgcgacggcgtgcgcttctcttggaacgtgtggcctagttcccgactagaagccacccgaatggtggttcccgttgccgcattatttactcctctgaaggagagaccagacttaccacccattcagtatgagcccgtgctctgtagccgaacaacttgtagagctgtgctgaacccattatgtcaggtcgattatcgggctaagctgtgggcctgtaatttctgttaccagcgaaatcagagagggccccagatgccccttatctttctgtacgtggttgacacttgcatggaggacgaggatttgcaggcactgaaggaaagcatgcagatgtctctgtctctcctgcctccaacagcgcttgtcggactaattacttttggcaggatggttcaagtgcatgagctcgggtgtgagggcattagtaagtcctacgtcttcaggggcaccaaggacctctccgcgaagcagcttcaagagatgcttggtttgtcgaaggttccgctcacacaggccacccgcgggcctcaagtccagcagccgccaccgagtaaccgtttcctacagccagtgcagaaaatcgatatgaatttaacagatctgcttggggaactgcagcgcgacccttggcccgttccacagggaaagcgccccctgcggagctccggggtagccttgtcgatcgctgtcggactgctggagtgtaccttcccaaacactggagcccggatcatgatgttcattggaggccctgcaactcagggaccggggatggtcgtcggagacgagctgaaaacgccaattcgcagttggcacgatattgacaaagataacgcgaagtatgtgaagaagggtaccaagcactttgaagcactcgccaaccgcgctgccacgacaggccatgtgatcgacatctacgcgtgtgccctggatcagacaggacttctcgagatgaaatgttgtcctaacctgactggaggatacatggtgatgggagactcgtttaacacctccctgtttaagcagacctttcagagggtgttcacaaaagacatgcacgggcagtttaaaatgggttttgggggcacccttgaaatcaagacaagtcgagaaatcaaaattagtggcgctattggtccctgcgtttcactgaattccaaaggtccctgtgtaagtgaaaacgaaatcggcacaggcggcacatgccagtggaagatctgcggactttcacctacaaccacactcgccatttactttgaggtggtgaaccagcacaacgcacctattccccagggcgggagaggcgctatccagttcgtaacacagtatcagcacagctccgggcagaggcggattcgcgtcactacgattgcgaggaactgggccgacgcacaaacccagatccagaacatagccgcgtccttcgatcaggaagcagcagcaatcctgatggcacgcttagctatctaccgtgctgaaacggaggaaggcccagacgtactgcgctggctggatcgtcagttaatccggttgtgtcaaaagttcggggagtaccataaagacgatccgagcagcttccgcttctctgagaccttctcactgtaccctcagttcatgttccatctgcgcagaagctccttcttacaggtcttcaacaatagccctgacgaaagtagctattacagacaccatttcatgaggcaggatttgacacagtcactgatcatgatccagccaatcctctacgcgtactcgttttccgggccccctgagcctgttctgctcgacagctcttctatactggctgatcgcattcttctgatggatacttttttccaaatcctgatttatcacggcgagacaatcgcacaatggagaaagagcgggtaccaggacatgccagaatacgagaatttcaggcacctgttacaagcgccagtggatgatgctcaggagatccttcactctcgtttcccaatgccacggtacatagacacagagcacgggggctcccaagctcgcttcctcttgtctaaagttaacccatctcagacgcataataacatgtatgcttgggggcaggaaagtggtgctccaatcttgaccgacgacgtgagcttgcaggttttcatggaccatctgaaaaaattagctgtgagctcggcagcttag

SEQ ID NO: 133588 - DNA, 510 bp, synthetic construct
  misc_feature 1..510: note = Description of Artificial Sequence: Synthetic coding sequence
  source 1..510: mol_type = other DNA
atgacaacttacttggaattcatccagcagaatgaggaaagggatggggtgcggttcagctggaatgtgtggcccagctccagacttgaagcaacaagaatggtggtgcccgtggcagcccttttcacccccctcaaagaaaggccggatttaccccccatacagtatgaaccggtcctgtgttccaggacaacatgcagagctgtattgaaccccctgtgccaagttgactaccgggcaaaattgtgggcgtgtaacttctgctaccagagaaatcagtttccaccatcttatgctggcatttccgagctcaatcaaccggccgagttattgccacagtttagtagcatagagtacgtcgtcctccggggcccccagatgccgctgatatttctctacgtagtcgatacgtgtatggaagacgaagacctgcaggctctgaaggagtccatgcagatgagtctttctcttttgccaccaacagccctcgttggcctgatcacattttag

SEQ ID NO: 133589 - DNA, 285 bp, synthetic construct
  misc_feature 1..285: note = Description of Artificial Sequence: Synthetic coding sequence
  source 1..285: mol_type = other DNA
atgacgacatacctggagtttattcagcagaacgaggaaagggatggagtgcgcttcagttggaacgtatggcctagtagtcggcttgaagctactaggatggtggtgccagtcgcagctctgtttacacctctgaaggaaaggcccgacctccccccaatacagtacgaacccgtgctgtgcagcaggactacatgtcgcgcggtgctgaaccctctttgccaggtcgactaccgtgcaaagctgtgggcatgcaacttctgctatcagcggaaccaggtgtag

SEQ ID NO: 133590 - DNA, 423 bp, synthetic construct
  misc_feature 1..423: note = Description of Artificial Sequence: Synthetic coding sequence
  source 1..423: mol_type = other DNA
atgactacttatctagagttcatccaacagaatgaggagagggatggagtgagatttagctggaatgtgtggccctccagtcgattggaagccacacggatggtggtgcctgtagcagcactgtttaccccgctgaaggagaggccggacctcccccccatccagtacgagcccgtattgtgttcacgtaccacatgcagagcggtgttgaaccccctttgtcaggtggactatagagccaagctctgggcttgcaatttctgctatcaacgcaaccagttcccaccctcgtatgccgggatctcagagctcaaccaacccgccgagctgttgccccagttttcaagcattgagtacgttgtactgcggggcccccaaatgcccctgatttttctctatgtcgtggatacttgtatggagtag

SEQ ID NO: 133591 - DNA, 123 bp, synthetic construct
  misc_feature 1..123: note = Description of Artificial Sequence: Synthetic coding sequence
  source 1..123: mol_type = other DNA
atgacaacttatctcgagtttattcaacagaacgaggaacgcgacggcgttaggttcagctggaacgtatggccttcgtctcgtctcgaggctacacgtatggtcgtgcctgtagcagcatag

SEQ ID NO: 133592 - DNA, 2304 bp, synthetic construct
  misc_feature 1..2304: note = Description of Artificial Sequence: Synthetic coding sequence
  source 1..2304: mol_type = other DNA
atggcaacttatttagaattcatccaacagaacgaagaaagggatggagtccgcttctcgtggaatgtgtggccaagcagtaggctggaggcaactcgcatggtggtccccctggcgtgtctgctgactccactgaaggagcggcccgatctgccccctgtgcaatacgagccagtcctgtgttccaggcctacctgcaaagccgtcctgaatccactttgtcaagtcgactaccgcgcaaaactttgggcctgcaatttttgctttcagcgcaatcaatttcccccagcgtacggggggatatcagaggtgaatcaacctgccgaactcatgccacagttcagcaccatcgagtatgtaatccagcgaggggcacagagtccactgatattcctgtacgtagtcgacacatgcctggaggaggatgatctgcaggctctgaaggagtctctacagatgagcttgtcattactgccacctgatgctctggtgggtctgatcacctttggccgcatggtacaggtgcatgagctgagctgcgaagggatcagcaagagttatgtgtttcgaggcaccaaagacttaaccgccaaacagattcaggacatgcttggccttaccaagcctgccatgcctatgcaacaagctcgccctgcccaaccccaagagcaccccttcgctagcagccgctttctccagcccgtacacaagatcgatatgaacctgaccgatttgctgggagagttacagagagacccctggccagtgactcagggaaagcgacctctgcgatccacgggagtagcactgtctattgccgttggtctgctggagggcacttttcctaatacaggggcccgcattatgctattcacaggaggccctcccactcaaggccctggtatggtggtgggagacgagctgaaaatacccattaggtcctggcatgatatcgaaaaggacaacgcgcgattcatgaaaaaggcgaccaaacactacgagatgctcgccaacagaactgccgccaacggtcattgtatcgacatatacgcttgcgctctcgaccagaccgggctgttagagatgaagtgctgcgccaatctgacaggggggtacatggtgatgggcgatagttttaatacttccctgtttaagcagaccttccagcgtatctttacaaaagattttaatggtgacttccggatggcctttggagccaccctagatgtcaagacaagccgcgaactcaagattgccggtgccattggaccctgcgtgagtctgaatgtaaagggaccctgtgtgagtgagaatgagctgggcgtcggcggcacttcacaatggaaaatctgcggcctggatccaaccagtacactgggtatttacttcgaggtggtgaaccaacacaatacgcccattccccagggaggaagaggggcaattcagtttgtcacccactaccagcacagctccacccaacggaggattagagtcaccaccatcgcccgtaactgggccgacgtgcaatcccagctgaggcatattgaggctgctttcgatcaggaggcggctgctgtgctgatggcccggcttggcgtgttccgagctgagagtgaggaagggcccgacgtactgaggtggttagaccgacagttgatccggctttgccagaagttcggccagtacaataaagaggaccctacatcttttcggctgtcggacagtttcagtctgtaccctcagttcatgttccaccttaggcgaagtcccttcctgcaagtgtttaacaatagccccgatgaatctagttattaccggcaccatttcgccagacaagacctcactcaatccctgatcatgatccagcctattctctacagctacagtttccatggaccacccgaaccagtcctcttggattctagctccatactagcggatcgcatactcttaatggacacgttttttcagatcgtcatttaccttggcgagacaattgctcagtggcgcaaggccggctaccaggacatgcccgagtacgagaacttcaaacacctgctccaggcccctctggatgatgcacaggagattctacaggcacgattcccaatgccccgctacattaataccgaacacggtgggtcccaggcaagattcttactatccaaagtaaatccttcgcagacacacaataatctgtacgcatgggggcaggagactggtgcacccattttgaccgacgatgtgtccctccaagtgttcatggatcacctgaagaaactggccgtcagctccgcctgttag

SEQ ID NO: 133593 - DNA, 2304 bp, synthetic construct
  misc_feature 1..2304: note = Description of Artificial Sequence: Synthetic coding sequence
  source 1..2304: mol_type = other DNA
atggccacatacctggagtttatccagcaaaacgaggaaagagatggtgtccgcttctcgtggaatgtttggccatccagtcggttagaggccacgcgcatggtggtcccactggcatgtttgctgacccctcttaaagaaaggcctgaccttccaccagtgcagtacgaaccagttctgtgtagcagaccaacctgcaaagccgtcttaaatccattgtgccaggtcgattatcgtgcgaaactttgggcatgcaacttttgcttccaacgtaaccagttccccccagcatatggtgggatcagtgaagtgaatcaacccgccgagcttatgccgcagttttctaccatagagtacgtgatacagcgcggggctcagtcgcccctgatattcctgtatgttgtggacacctgcctggaggaggacgacttgcaggcacttaaagaatccctgcaaatgagtttgagtctactgccccccgacgcgcttgtcggcttaatcacatttggcaggatggtccaggtgcacgagctgtcctgtgagggtatatcaaaatcttacgtgtttcggggcacgaaggatctgactgccaaacagatccaggacatgctgggtctgactaagcccgctatgccgatgcagcaagcccggccagctcaaccccaggaacacccattcgcttccagccgattcttgcagcccgtgcacaagatcgatatgaacttgacggacctcctaggggagctacaacgtgacccatggcccgtcacccagggcaagcggcccctgcgctctactggggtagcattgtctatcgccgtcggtcttctcgaagggacttttcccaacaccggagcccggataatgctgtttacgggaggaccgcctacacagggccccggaatggtcgtgggcgacgaactaaaaatccctattcgaagctggcatgacattgaaaaggataacgcaaggtttatgaagaaagccaccaaacattatgaaatgctcgccaataggaccgcagctaatggccattgcattgatatttacgcctgcgctttggatcagacgggcctgctcgagatgaaatgttgtgccaaccttacaggtggctatatggttatgggggactcgttcaatactagcctgttcaaacagactttccagcggatttttactaaagatttcaatggcgacttccgtatggcttttggagccactctggacgtgaagaccagcagggagctgaaaatcgcaggagctataggcccctgtgtgtcactaaacgtgaaagggccctgtgtgagcgagaacgagttgggagtcggaggtacaagccagtggaagatctgcgggctggacccaacctctactctgggaatttactttgaggtcgtgaatcaacataacacgccaatcccacagggggggaggggtgccatacagtttgtaactcattaccagcattcatctactcagcgtaggataagggtcactacgattgcccggaattgggctgacgtccagtcacagctgcgacacatcgaggcagcgtttgaccaagaagccgcagctgtcttaatggcacggcttggagtgttcagggcagaaagcgaagagggcccggatgtcttgcgatggctggaccgacaactgatacgcctgtgtcaaaaatttggccagtacaacaaagaggacccaacctcattccgactcagcgactctttcagtctgtatccgcagtttatgttccacttgcggcgtagtccattcctgcaggttttcaataacagcccggacgagagcagctactacaggcaccattttgcccgacaggatttaacacaatccctgattatgatccagcccatcctgtattcttacagctttcatggtccacccgagccggtattgctggacagtagcagcattctggctgatcggatcctgttaatggataccttcttccagatcgttatatacctcggggaaaccatcgcacaatggagaaaggcaggctaccaagatatgcccgagtatgagaactttaagcatctgttacaagctccattggatgacgcacaggagatcctccaggcccgcttccccatgcctcgatacatcaacactgaacacggcgggtcacaggctaggtttctgctctcaaaggttaacccaagtcagacgcataataacctttatgcctggggacaagaaacaggtgctcctatacttactgatgacgtctcgctccaggtgtttatggatcacctgaagaagctggcggtcagctcagcctgttag

SEQ ID NO: 133594 - DNA, 2304 bp, synthetic construct
  misc_feature 1..2304: note = Description of Artificial Sequence: Synthetic coding sequence
  source 1..2304: mol_type = other DNA
atggcaacatacctcgagttcatccagcagaacgaggagcgggatggtgttcggttcagttggaatgtgtggccttcttctagactggaagcaacacgaatggttgttcctttggcctgcctgctcaccccgttgaaggaacgccccgatctacccccagtacagtatgaaccagtgctgtgctcacgacccacatgcaaggccgttctgaatcccctttgccaggtagactatcgcgctaaactgtgggcctgtaacttttgcttccagaggaaccagtttccccccgcatatggaggtatttccgaggtcaatcaacctgccgaactgatgccgcagtttagcaccatcgaatacgtgatccagcggggggcccaatcgcctctcatctttctgtatgttgtcgacacttgccttgaggaagatgacctgcaagccctcaaggaatccctgcagatgtctctatccctactcccccccgacgcgcttgtgggacttatcacattcggaagaatggtccaggtgcacgagctgtcatgcgaaggaattagcaaatcctacgtgttccgcggaactaaggatctgacagccaagcaaattcaggatatgctcggactgacgaaacccgccatgccaatgcagcaggcaaggcctgcccagccacaggagcaccctttcgccagcagccgattcctgcagcccgtgcataagatagatatgaatctgacagacctgctgggggagcttcaacgcgatccgtggcctgtgacacaaggaaagagacccctgaggagtaccggcgttgcattgtccatcgccgttggactcctggagggtacttttcctaacactggcgcaaggatcatgcttttcacaggtggcccaccaacacagggacctggaatggtcgtaggagacgagctgaaaataccaatcagatcatggcacgacatcgagaaggacaacgccagatttatgaagaaagccacaaagcactacgaaatgctggccaatagaaccgctgctaatggccactgcatcgacatctacgcatgtgcactcgatcaaaccggcctgctggaaatgaagtgctgtgccaatctgactgggggatatatggtgatgggagacagtttcaacacctctttgtttaaacagaccttccagcggatttttacaaaggactttaatggcgactttcgaatggcctttggcgctacattagatgtcaagacctccagggagctaaagatcgcaggggccatcgggccctgcgtcagtttgaacgttaagggcccttgcgtttccgaaaacgaacttggagtcgggggaacgagccaatggaagatttgtgggctggaccccacctcaacactgggcatatatttcgaggttgtaaaccagcacaatacccccattcctcagggtggacgcggcgccatccagtttgtgactcactaccagcacagttcaacacagcggcggatacgcgtaaccaccatcgcccgaaattgggctgatgtgcagtcacagttgcggcatattgaagctgcattcgatcaggaggcagctgccgtattaatggcccgccttggggtgtttcgcgccgagtctgaggaaggtcctgacgtccttaggtggcttgatcgccagctcatccggctgtgccagaaatttggccagtataataaagaggatcctaccagctttcgactgtccgactcattttccctgtaccctcagttcatgttccatttgcggagaagtcctttccttcaggtatttaataactcgcccgacgaatccagctattataggcatcatttcgcacgccaagatcttacacaaagtttgatcatgattcaacccatcctgtacagctatagcttccatggcccgcctgaaccagttttgctcgattcctccagcattctggcagatcgaatactgctaatggatacattcttccagatagtgatatacctgggagagacaatcgcacagtggcgaaaggcaggataccaggacatgccagagtacgagaattttaaacacctgctgcaggccccactggacgatgcccaggagatactgcaggcacgcttccccatgccgcggtatatcaacacagaacacggggggtcccaggcacggtttctgctgtctaaggtgaatccgagccagacccacaataatctgtatgcttggggacaagaaactggggctccaatcctcacagacgatgtgtctctgcaagtctttatggaccacttaaagaaattggcagttagtagtgcgtgctag

SEQ ID NO: 133595 - DNA, 2304 bp, synthetic construct
  misc_feature 1..2304: note = Description of Artificial Sequence: Synthetic coding sequence
  source 1..2304: mol_type = other DNA
atggcaacctatctggaatttatacagcaaaatgaggagagagatggcgtccggtttagttggaatgtttggccatctagccggcttgaggctacccgcatggtagtgcctctagcctgcctgctgacacccctgaaggagcgtcctgacctgccccccgtccaatacgaacccgtgctgtgtagtcgccctacatgcaaagctgtattgaatcctctatgtcaggtggactatagagctaagctgtgggcctgtaacttctgcttccagagaaaccagtttccgccagcctacggcggcatcagtgaggtcaaccaaccagcggaactgatgccccaattctccacaattgagtacgtcattcaaaggggggctcagtcacctttaatcttcctctatgtcgtggacacttgtctggaggaggacgacctccaggctttaaaggaaagccttcagatgtctctttctctgttaccccccgacgctttggtggggctaatcacattcggcaggatggtgcaagtgcacgaactatcttgtgaaggtatctcgaagagctatgtgtttagaggcaccaaagatctgaccgccaaacagattcaagatatgctagggctcactaagccggccatgccaatgcaacaggcccggcccgcacagccacaagagcacccctttgcatcatctagatttttacagcccgtgcacaagattgacatgaatctcaccgacctgctcggcgaattgcagcgcgacccatggcccgtgacacagggcaagcgacctctgagaagtactggggttgcactcagtattgccgtgggcctgctggagggaacttttccaaatacaggagcccgtatcatgctgtttactggtggtccccccacccaaggtcccggcatggtggtcggtgatgaactcaagattcccattcgtagttggcatgacatagagaaagataatgcccgattcatgaagaaagctaccaaacactatgagatgttggctaatagaactgcagccaatggccactgtatagacatttacgcctgtgcgttggatcaaaccggcctgctggaaatgaaatgttgtgcgaacctgacaggtggttatatggtaatgggagattcttttaatacgtccttgttcaaacagacctttcagcggatattcacgaaggacttcaatggggacttcagaatggcatttggagcaaccctggatgtcaagactagtagagaactgaagattgctggcgcaataggaccatgcgtcagtctgaatgttaagggtccctgcgtgtcagagaatgaactgggtgtcggcggaacaagccagtggaagatttgcggcctggatcctactagcactttgggcatttacttcgaggtggttaatcagcacaacactccaatcccccagggcgggcgaggggccatccagtttgtcactcactatcagcactcctctacacagagaagaattcgcgttacaactatcgctagaaactgggccgacgtgcagtcccagctccggcacattgaggcggcctttgatcaagaggcagctgctgtgcttatggccaggcttggtgtgtttcgggccgaaagcgaggaagggccagatgtactgcggtggctggaccgacagctcattcgcctctgccagaagtttggccagtataataaagaggaccccaccagttttaggctgagtgattcattttctctgtacccccagtttatgtttcatctccgacggagtccattcctgcaggtgttcaacaacagcccagatgagtcatcttactatcggcatcatttcgccagacaagacctgacacagagcctgatcatgatccagcctatactatattcttattcgtttcacggtcctcctgagccagttctcctggattcatcttctatcctggccgatcggattcttcttatggacactttcttccaaatcgtcatctaccttggcgagaccatcgctcagtggcggaaagcagggtatcaagatatgccagaatacgagaacttcaaacatctgcttcaggcacccctcgatgacgcgcaagaaatccttcaagccaggttccctatgccacgctatattaacaccgagcatggaggctcccaggccagatttctcctgtctaaagtaaacccatctcaaacgcacaataatctgtacgcttgggggcaggaaacgggggccccgatcctgacagatgacgtctctctgcaggtgttcatggatcacctgaaaaagctagctgtgagctcagcctgttag

SEQ ID NO: 133596 - DNA, 741 bp, synthetic construct
  misc_feature 1..741: note = Description of Artificial Sequence: Synthetic coding sequence
  source 1..741: mol_type = other DNA
cagcggcggattagggtgacaacaattgctcgcaattgggctgacgttcagtctcagttgcgacacattgaggctgccttcgaccaggaagcagctgctgtcttgatggcacgcctgggcgttttccgcgccgaatctgaggaagggcctgacgtgctgcggtggctggataggcagctgatcaggctttgtcaaaagttcggccagtacaacaaagaagaccccacaagcttcaggctcagtgatagcttttcactctacccgcagtttatgttccacctgcgacgaagtccctttctgcaggttttcaataactcacccgacgagagctcatactaccgtcatcacttcgcaagacaggacctgacacagagcctcattatgattcaaccaattttatacagctactcttttcacggaccccctgagacaatcgcccaatggagaaaagccgggtatcaggatatgcccgaatacgagaacttcaagcacttactgcaagccccccttgacgacgctcaggagatcctccaggctagattccctatgccccgctacatcaatacagagcacggagggagccaggctaggttcctcctgagtaaagtcaacccgtctcagacacacaacaacctgtacgcctggggccaggaaactggagccccgatacttacagatgacgtgtctttgcaggtcttcatggatcacctgaagaagctggccgtgtcatctgcatgctag

SEQ ID NO: 133597 - DNA, 996 bp, synthetic construct
  misc_feature 1..996: note = Description of Artificial Sequence: Synthetic coding sequence
  source 1..996: mol_type = other DNA
atggcaacatatctcgagttcatccagcagaatgaggagagggacggggtacgctttagctggaacgtctggccttcctcgcgtctggaagccacccgcatggtcgtgccgctggcatgtctgttgaccccattgaaagagcgcccggacctgcctccagtccaatacgagcccgtcctgtgtagtcgcccgacatgtaaggcggttcttaaccccctgtgtcaggtggactatcgtgccaagctgtgggcctgtaatttttgctttcagagaaaccagttcccgccagcgtacgggggcataagcgaggtcaatcagcctgctgagctgatgccacagttctctacgattgagtacgtgattcagcgcggcgcccagagtcctttgatctttctgtacgtcgtggatacctgcctcgaagaagacgatctgcaagctctgaaagagagcttgcagatgtccttgagcctgctgcctcctgacgcactggtgggattgattactttcggaagaatggtccaagttcacgaactctcttgtgaaggcatcagtaaaagctatgtgtttcggggcaccaaggatttaactgccaagcagattcaggacatgcttgggttaaccaaaccagccatgccgatgcagcaggcccgcccagcacagccccaagagcaccctttcgccagtagcagattcctacagcccgtgcacaaaatcgacatgaacctgaccgatctcctgggggaactccaacgggacccatggccggttacgcagggcaagcgccctctgcgctccactggcgtggcactgagcatcgctgttggccttctcgagggcacatttcccaatactggtgccagaatcatgctcttcacgggtggcccccccacgcaaggccccgggatggtggtgggcgacgagctcaagattccaattcggtcctggcacgatatcgagaaggataacgcccggtttatgaaaaaggcgaccaagtag

SEQ ID NO: 133598 - DNA, 1200 bp, synthetic construct
  misc_feature 1..1200: note = Description of Artificial Sequence: Synthetic coding sequence
  source 1..1200: mol_type = other DNA
atggccgagcgcaggcgccacaagaagcgcatccaggaggtcggagagccttctaaagaggaaaaggcagtcgccaagtacctgaggtttaattgtcccacaaagtccacgaatatgatgggccatagagttgactactttatcgcttccaaagctgtagattgtttactcgactctaagtgggccaaggcaaagaagggcgaagaggctctgttcaccacccgtgagtccgtagtggactattgtaacaggttgctgaagaaacagttttttcaccgcgcactgaaggtcatgaagatgaaatacgacaaagacattaaaaaggagaaggacaaaggcaaggctgaatccgggaaagaagaagataaaaagtcaaagaaagaaaatatcaaggatgaaaagacaaagaaagaaaaagagaagaaaaaggacggtgagaaagaagaaagtaaaaaggaagaaactcctggcacacctaagaagaaggagacaaagaagaagttcaagctcgaacctcacgacgatcaggtgttcctggatgggaacgaggtctatgtgtggatctacgacccggtgcattttaaaacgtttgtcatgggactgatcctggtgattgctgtgatagcagctacgctgtttcccctgtggcccgcagagatgagagtcggcgtgtattatctgagcgttggcgccggttgttttgtcgctagcattttactgctcgccgtggcgaggtgcatactcttcttgataatctggctcattacaggcgggaggcaccatttctggtttctccccaatcttacggccgacgtggggttcattgactctttccgtcccctgtacacgcacgagtacaagggcccgaaagccgatttgaaaaaagatgaaaagagcgagacaaaaaaacagcagaagtccgattcagaagagaaatccgactcggaaaaaaaagaggatgaggagggtaaggtggggcccggaaaccacgggaccgaaggtagcggcggcgaacgtcacagcgatactgactccgaccggcgggaagacgaccggagccagcattcgagcggaaacgggaatgactttgagatgataaccaaagaagagcttgagcagcagactgacggcgattgtgaagaagatgaggaagaagagaacgacggggaaacccccaagtcgtcacacgagaagtcctag

SEQ ID NO: 133599 - DNA, 1200 bp, synthetic construct
  misc_feature 1..1200: note = Description of Artificial Sequence: Synthetic coding sequence
  source 1..1200: mol_type = other DNA
atggccgagcgtcgcaggcacaaaaagagaattcaagaggtcggggagccatcgaaggaggagaaagctgtcgcaaaatatctccgtttcaactgccctaccaagtccactaacatgatggggcaccgggttgattatttcatagcatctaaagccgtggattgtctcctggactccaagtgggccaaagctaaaaagggggaagaggccttgttcacaactcgcgagagtgtcgtggattactgcaataggcttctgaagaagcaatttttccaccgggccctgaaagttatgaagatgaagtacgataaggacataaaaaaagagaaggataaagggaaagcagaatccggaaaggaggaagataaaaaaagcaagaaagaaaacataaaagacgaaaaaacaaagaaggaaaaggagaagaaaaaagacggggaaaaggaagaatccaagaaggaagagactcccggaactcccaagaaaaaggagacaaagaaaaaatttaagctcgaaccacacgatgatcaggtgttcctagatggaaacgaagtttacgtgtggatctatgacccagttcactttaaaacttttgtcatgggtctgatcttggtcatcgctgtcatcgctgcaaccttgtttcccttgtggcctgccgagatgcgggttggggtatactacttgagtgtgggagctggatgcttcgtggccagtattctgctgcttgcagtagcccgctgcattctgttccttatcatctggctcatcacaggaggccggcatcacttttggttcttacccaacctcaccgccgacgtggggttcatcgatagcttcagacccctctatacccatgagtacaaagggccaaaagccgatctcaaaaaagacgagaaaagcgagacaaagaagcagcaaaaatccgacagtgaggaaaaaagcgacagtgagaagaaggaggatgaggagggaaaagtgggcccaggaaatcacgggactgaaggctccggtggagaacggcattctgacactgactcagatcggcgcgaggacgaccgtagccagcatagcagcggtaacggcaatgacttcgagatgattacaaaggaggaactggagcagcagacagatggggactgcgaggaggacgaggaggaagagaacgacggcgaaacgccgaagtcgtcacatgagaagagctag

SEQ ID NO: 133600 - DNA, 372 bp, synthetic construct
  misc_feature 1..372: note = Description of Artificial Sequence: Synthetic coding sequence
  source 1..372: mol_type = other DNA
atggcagagcggaggagacacaagaagcgcatacaggaggtcggggaaccatcaaaggacgagaagtctgaaaccaagaagcagcagaaaagcgattccgaagagaagtctgattcggaaaagaaggaggacgaggaaggaaaagtcggcccaggaaatcatgggacagagggcagtgggggggaaagacattccgatactgactctgatcggcgggaggatgaccgatcccagcactcctcaggcaacggaaatgattttgagatgatcactaaggaagaattggagcaacagacagacggagactgcgaggaggatgaggaggaggagaacgacggagagactcccaagagtagtcatgagaagtcttag

SEQ ID NO: 133601 - DNA, 2283 bp, synthetic construct
  misc_feature 1..2283: note = Description of Artificial Sequence: Synthetic coding sequence
  source 1..2283: mol_type = other DNA
atggccggacagcagttccagtatgacgactcggggaacaccttcttctactttctgacctcgttcgtgggtctcattgtgatccccgccacatactacctctggccaagagaccaaaatgcagaacaaatcagattgaaaaatatcaggaaagtttatggtcggtgcatgtggtaccgtctcagacttctcaagccacagccaaacattatacccacagtgaagaaaatcgtcctccttgccggctgggccctgtttctcttcctggcgtataaggtatccaagacagacagggaataccaggaatacaacccgtacgaagtgctgaacctggaccccggcgcgacagtggcagaaattaagaagcagtatcgcctgctctcgttaaagtatcaccccgataagggaggtgacgaggtgatgttcatgcgcatcgcaaaagcttatgcggccctgaccgacgaagaaagccgaaaaaactgggaggagtttggcaatcccgatggcccacaggccacctcttttggaattgccctccctgcttggatcgttgatcaaaagaacagcatccttgtgctgctggtctacggcctggcatttatggtgatattacccgtggtggttggcagttggtggtacaggagcatccgttacagcggggaccaaatcttgatccgcacgacccagatctatacttattttgtttataagacacggaacatggacatgaagagactcatcatggttctggccggcgccagcgaattcgacccccaatataacaaggatgccacaagccgaccaacagacaatattctaattccgcagcttatcagagaaatcggctcaatcaacttgaaaaaaaacgagccccctttgacatgtccatatagtctgaaagccagggtgttgctgcttagtcacctcgcaaggatgaagatccctgaaacactggaagaggaccaacagtttatgctgaagaagtgtcccgccctgcttcaggagatggtcaacgtaatttgccagctcatcgtgatggccagaaacagagaggagagggaatttcgcgctccaaccctggcatctctggaaaattgcatgaagctcagccagatggctgtgcagggcctacagcagtttaagtcccccctgctacagctaccacatatcgaggaagacaacctgaggagggtctcaaaccacaagaaatataaaattaagaccattcaagatctggtgagtctaaaggagtccgaccggcatactcttctgcatttcctggaggatgagaaatacgaggaagtcatggctgtgcttggcagcttcccttatgtgacgatggatatcaagtcccaggtactcgacgatgaggactcaaataatatcacggtcggcagtctggtcactgtattggttaagctcacccgtcaaaccatggctgaagtgttcgaaaaggagcagtctatctgtgccgcggaggagcagcccgccgaagatggtcagggtgagaccaacaagaacagaactaagggcggatggcagcagaagtctaaagggcctaagaagacagcgaagtcaaagaagaaaaagcctctaaaaaaaaagcctaccccagttcttctgcctcagtcgaaacaacagaagcaaaagcaggcaaatggcgtcgtcgggaacgaggccgcggtcaaagaggatgaggaagaagtctctgataaaggatccgattcagaggaagaggaaacaaaccgggattcacagagtgaaaaggacgatgggagcgatcgggacagtgatcgggaacaggacgaaaaacaaaataaagacgatgaggccgagtggcaggagcttcagcagtcaatccagcggaaagagagggcgcttctcgaaaccaaatcaaaaatcacccaccctgtctacagtctctattttcctgaggagaagcaggagtggtggtggttgtacatagcagaccggaaggagcaaaccctcatctcgatgccgtatcacgtgtgcactctgaaagacactgaagaagtggaattaaaatttcccgcgcccggtaaacccggcaactaccagtatacagtcttccttcggtcagactcgtatatggggctcgaccagatcaagcccttgaaactcgaggtccatgaggcaaagcctgtaccggagaatcaccctcagtgggataccgcaatagaaggcgacgaagaccaggaagactccgagggtttcgaggactcctttgaagaggaggaggaagaagaggaggacgatgactag

SEQ ID NO: 133602 - DNA, 1254 bp, synthetic construct
  misc_feature 1..1254: note = Description of Artificial Sequence: Synthetic coding sequence
  source 1..1254: mol_type = other DNA
atgttcatgaggatcgccaaggcctacgcagccttgactgacgaggagtcacggaagaactgggaagagttcggaaacccagatgggcctcaggctacttctttcggaatcgcgttgcctgcctggatagtggatcagaaaaacagtatcctcgtgctgctggtgtacggactggcgttcatggttatattaccagttgttgtcgggtcctggtggtacagaagcatcaggtattcgggagaccagatcctgattagaacaacccagatatacacttattttgtgtataaaactaggaatatggacatgaaacgcttgatcatggttctggccggtgcttcggagtttgacccacaatacaacaaagacgcaaccagtcgccctacagacaatatcttgatcccacagctgattcgcgaaattggaagcataaaccttaaaaaaaatgaacccccactcacctgtccctactccctcaaagcaagagtgctgctgctgtcgcacctggctcggatgaagatcccggaaacgttggaggaagaccagcagttcatgctgaaaaaatgcccagcacttttacaggaaatggtaaacgtaatttgccagctgatcgtaatggcccggaatagagaggaacgggagttccgcgcccccactcttgcctccctcgagaattgcatgaaactctcccagatggctgtgcaaggcttgcagcaatttaagtcccccctcttgcaactcccgcacattgaggaggacaatctgagacgcgtgagtaatcacaagaagtataagataaagactattcaggacttagtctccttgaaagagtctgacagacataccctattgcactttctcgaagatgagaagtacgaagaggttatggctgtgctggggtcttttccctatgtgacaatggatattaaaagccaggttttggacgatgaggactctaacaacatcaccgtgggttccctggttactgtattggtcaagctgaccagacagaccatggcagaggtctttgagaaggagcagagcatctgcgcggccgaagaacagcctgccgaagatggccagggcgaaaccaacaagaatcggacaaaaggaggttggcaacaaaagtccaaaggacctaagaaaacagcaaaaaagaagaaagaaacatttaagaaaaaaacttacacatgcgcaatcactacagtcaaagcgactgagacaaaggcaggcaagtggtccagatgggaatag

SEQ ID NO: 133603 - DNA, 1137 bp, synthetic construct
  misc_feature 1..1137: note = Description of Artificial Sequence: Synthetic coding sequence
  source 1..1137: mol_type = other DNA
gagcacgaaagagaatttcgggccccaacacttgcctccctggaaaattgcatgaaactgtctcagatggccgtgcagggtctgcagcagtttaagtctccgctgctccagctcccccacatcgaagaagataacctgagacgagtatcaaaccacaaaaagtacaagataaagaccatccaagatctagtgagtctgaaggaatcagaccgccacactctgttgcactttctcgaggacgaaaagtatgaggaggtcatggcagtgcttgggtccttcccctacgtgaccatggacatcaaaagccaggtgctggacgacgaggattctaataatatcacagtggggagtttggtgactgtactcgtcaagctcaccagacagaccatggccgaagttttcgaaaaagaacagtccatctgcgctgcagaggaacagcccgcagaggatggccaaggggaaactaacaaaaaccgaacaaaaggtggctggcagcagaaaagcaaagggcctaaaaagacagccaagagcaaaaaaaagaagcccctgaagaagaaaccaacccctgtgcttctcccacaaagtaagcagcagaagcagaaacaagctaacggagtagttgggaatgaagccgccgtcaaggaagacgaggaggaggtgtctgataagggaagcgattctgaggaggaatggcaagaactccagcaatccatccagagaaaagagagggccttattggaaacaaagtcaaaaattacacaccctgtttactcattgtactttccagaagaaaaacaggagtggtggtggctgtatatcgccgataggaaggagcagacattaatctcaatgccatatcacgtgtgtaccttaaaggatactgaggaagtcgagctcaagtttccagcacccgggaagcctggcaattatcaatacaccgtctttttgcgcagcgactcatatatgggccttgaccagattaagccgctgaagttggaggttcacgaggccaaacctgtgccagagaatcatccacagtgggataccgcaatagaaggtgacgaggatcaagaggatagtgaaggattcgaggacagttttgaggaagaagaagaggaggaggaggacgatgactag

SEQ ID NO: 133604 - DNA, 2346 bp, synthetic construct
  misc_feature 1..2346: note = Description of Artificial Sequence: Synthetic coding sequence
  source 1..2346: mol_type = other DNA
atggttcgagtgcttaggtccatgtgtctaccgcagctctgctctcacatcctgtcagtctgcagcggcactacttccgatcgaaacgtttattcagtgccaggatcacagtacctgtacaaccaaccttcgtgttaccgcgggttccagactgtgaaacacaggaacgagaatacatgccccttgcctcaggaaatgaaggctttattcaagaaaaagacttatgatgaaaagaagacctacgatcaacagaagttcgattccgagcgggcggacgggacaataagctccgagattaaaagcgctcgcgggtctcaccacctttctatttacgcagagaattccctaaagtctgacggataccacaaacgcaccgataggaaatcaagaataatagcgaaaaacgttagtacatctaaacctgaattcgaattcacaacacttgacttccctgagcttcagggggctgaaaacaacatgagtgagattcagaaacaacccaagtggggacctgtgcattctgtgagcaccgacatttctctccttagggaggtggtcaagccagccgccgtactctcaaagggggagatcgtcgtgaagaacaacccaaacgaatccgtaaccgccaatgctgctactaactccccatcatgtactcgtgagctctcctggacacccatgggctatgttgttagacagacactaagcacagaattaagtgccgcccctaagaatgtcacatcaatgattaacctcaagaccatcgccagttctgccgatcctaagaatgtttctatacctagttccgaggcactaagtagcgacccttcctacaacaaagaaaaacatatcatccacccgactcagaagtcaaaggcgtcccagggtagcgatctggaacagaacgaagcgagccggaaaaacaagaagaagaaggaaaaatctacatcaaaatacgaggttctaacagtgcaggagcccccacgcatcgaagacgcagaagaatttcccaacttggccgtggccagcgagagacgcgatcgtatcgagactccaaagttccagagcaaacaacagccacaagataatttcaaaaataatgtgaagaagtcccagcttccagtccaactggatttaggtgggatgctgacggctctagagaagaagcaacatagccagcatgcaaagcagagttccaaacccgtcgtcgtgtctgttggtgcggttccagtcctgtcaaaagagtgcgccagcggcgaacgcggccggcgcatgtcacagatgaagaccccacataacccgctggacagctcagcaccattaatgaagaagggaaaacagcgtgagatacccaaggcgaagaaacctactagtctcaagaaaattatacttaaagagagacaagagagaaagcaacgactgcaggaaaacgccgtttcacctgcttttaccagtgatgatacacaagatggcgaatccgggggagacgatcagttcccggagcaagccgaactgtctgggccagaaggcatggacgagctcatctccaccccttcggtcgaggacaaatctgaagagccacctggcacagaactgcagcgcgatactgaggcgagccatctcgcaccgaaccacactactttccccaagatccattctagaagatttcgggactattgcagccaaatgttgagtaaggaagtcgatgcctgcgttactgacctcctgaaggaactggtgagattccaggaccgcatgtatcagaaagacccggtgaaggccaagaccaaacggagattggtcttgggtttgagagaagtgctcaaacacttaaaactgaagaagctgaagtgcgtcatcatcagtcctaattgtgaaaaaatccaatccaaaggaggcttagatgataccctccataccatcattgattacgcctgcgagcaaaatattccatttgtgttcgctctcaatcgcaaggcgctagggcgttcactcaacaaagccgtgccggtgtcggtggtgggcatcttttcctatgacggtgcccaggaccagtttcacaaaatggtggaactcaccgtagcagctcgccaggcttataaaacaatgcttgagaacgtgcagcaggagctggtcggcgagccacggccccaggcgcctccatccctccctacccaaggcccgagctgtcccgcggaagacggtccacccgcactgaaggaaaaggaggaacctcactatatagaaatctggaagaagcacctggaggcatattccgggtgtacacttgaactggaagaatccctggaggcctctacaagtcagatgatgaacctcaacctgtag

SEQ ID NO: 133605 - DNA, 2565 bp, synthetic construct
  misc_feature 1..2565: note = Description of Artificial Sequence: Synthetic coding sequence
  source 1..2565: mol_type = other DNA
atggcctcggaagggcctagggaaccagagtctgagggtatcaaactgagcgcagatgtcaagccattcgtcccgcgcttcgctgggctgaacgtggcctggctcgaaagctccgaagcatgtgtcttccccagcagcgctgctacctactaccccttcgtccaggagcctccagtgactgaacagaaaatttatacagaggatatggcatttggcgcatctactttcccgccccagtatctgtctagtgagattaccctccacccgtatgcctacagcccttacacactggacagcacccagaatgtctattcagtacctggtagtcagtatctgtataaccagcccagctgttacaggggctttcagactgtcaaacaccgtaacgagaatacatgtcctttacctcaggagatgaaggctctgtttaagaaaaagacctacgacgagaaaaaaacctacgaccaacagaagttcgacagcgagcgagcagatggaacaatctcctctgagatcaaaagcgcccggggctctcatcacttgtctatttatgccgaaaattcacttaaatctgacggttatcacaagcgtacagacaggaagtcccggatcattgctaagaatgtatcaacttccaaaccagaatttgagttcaccaccctggactttcccgagctgcagggggctgagaacaatatgtccgagattcaaaagcagccaaagtgggggccagttcatagcgtcagtaccgatattagtctgctgcgcgaagtagtgaagccagctgcagttctgagcaagggcgagatcgtggttaagaacaaccccaacgaaagtgtgactgctaacgccgcaactaattccccctcctgcaccagagaactgtcgtggaccccaatgggctacgtagtgagacagaccttatcaaccgagctttctgcagccccaaagaatgtgacgtccatgataaacctgaagaccatcgcctcatccgccgatcctaagaatgtgtctattcctagttcagaggcgctttctagtgacccatcttacaacaaagaaaaacacatcatacaccctacccagaagtcaaaagcctcacagggctccgacctggagcagaatgaggctagccgcaagaacaaaaagaagaaagagaagtcaacctccaaatacgaagtccttacagtacaagagcctcctcgaatagaggacgcagaggaattccctaacctcgctgtcgccagtgagcgtcgagatcgaatcgagactccgaaatttcagtccaaacaacagccgcaggacaacttcaaaaacaacgttaaaaagagccaactgccagtgcagcttgacctgggcggtatgctgaccgcactagagaagaagcagcacagccagcacgccaagcagagttcaaagccagtcgtggtcagcgtaggcgcagtgccggtgttgtctaaggaatgcgccagcggtgagagaggcaggagaatgtcgcaaatgaaaacaccgcataaccccctggactcaagcgcacccctcatgaaaaagggaaagcagcgtgaaattcccaaagccaagaagcctacctcactcaagaaaataatcctgaaggagagacaggagcgaaaacagcggctgcaggagaacgctgtctcccccgcttttacatcagatgatacccaagatggtgaaagcggtggcgatgatcaattcccagagcaggccgagttgagcgggcccgaggggatggacgaactgattagcacaccatctgtagaggataaatcggaggagccccccggcacagagctacagagggacacagaagcctcgcacttggctcccaatcacaccaccttccctaagatccattcaaggcgcttcagggattactgcagccaaatgctgtctaaggaggtggacgcctgtgtcactgacctgcttaaagagctagtgagatttcaggatagaatgtatcagaaggaccctgtcaaagctaagactaaacgccggcttgtgctgggccttagggaagtcctcaagcacctgaagctgaagaaactgaagtgcgtaattatcagtcctaactgcgagaagatccagtcgaagggcgggctggatgatacactgcataccataatcgattatgcctgtgagcagaatatcccttttgtcttcgccctcaacaggaaggcgttggggaggagcttgaacaaggcggttcctgtgagcgtggtgggaatattctcatatgacggggcgcaggatcagtttcataaaatggttgaactcactgttgcagcccgacaggcttacaagactatgttggaaaatgttcagcaagaacttgtgggcgagccacggccccaggctccaccctccctcccaacacagggaccctcttgccccgcagaggacggaccgccggctctgaaggagaaggaggagcctcattacatcgaaatttggaagaaacatctggaggcctattcaggctgcaccttggagttagaggagtcccttgaagctagcacaagtcagatgatgaacttaaacctgtag

SEQ ID NO: 133606 - DNA, 2583 bp, synthetic construct
  misc_feature 1..2583: note = Description of Artificial Sequence: Synthetic coding sequence
  source 1..2583: mol_type = other DNA
ccggccagtaggcgaccggcagccggcctacgagatgccgctagttctgcccctcgggggatggcctctgaaggcccaagggagcccgagtcagaaggaatcaagctctccgctgatgtcaaaccattcgtgccccgttttgcaggcctgaacgttgcctggctggagagcagcgaagcctgtgtgttccctagctccgccgccacttattatcctttcgtgcaggaacctcccgtgaccgagcaaaagatttacactgaggacatggccttcggtgcctctaccttcccaccacaatatctcagctcagagattacgttacatccttatgcatacagcccttataccctggactccacgcagaacgtatattcggtgcccggctcacagtacctctacaaccaaccctcatgctaccgaggcttccagactgtgaagcacaggaatgagaacacatgccctctgcctcaggaaatgaaggcactgtttaaaaagaagacttacgatgagaagaaaacgtatgatcaacaaaagttcgattctgaacgggccgatggcactattagttcagagataaaaagtgccagaggcagccatcacctgtctatctacgcagaaaacagtttaaagtctgacggataccataagcgaacggatagaaagagtaggatcattgctaagaatgtttctacgtccaagcctgagttcgagtttaccaccctggatttccccgaactacagggcgccgaaaacaacatgtcagagatccagaagcaacctaaatggggccctgtgcattctgtgtcgaccgatattagccttctgcgggaagtcgtcaagcctgcagctgtcctctctaaaggagaaatcgtggtgaaaaataatcccaatgagtccgtcctgatgccgttaccaatacttttacatgtgcaggagactttatctactgagctcagcgcagctcctaaaaacgtgacctctatgatcaacctcaaaacaatagccagctctgccgatcccaaaaacgtgagcattccctcctcagaagctttgtctagcgatcccagctacaataaggagaagcatataattcacccgacccagaagagcaaagcctcacagggatctgatctcgaacaaaatgaggcctctagaaagaataagaagaagaaggaaaagtccacttcaaagtacgaggtgcttacggttcaagagcctcccaggattgaagatgctgaggagtttccaaacctcgccgtggctagcgaacggcgggaccgcattgaaacacctaagttccagtctaagcagcagcctcaggacaattttaagaataacgttaagaagagccagctgccggttcagttggacttaggcgggatgttgacggcactggagaagaagcagcactcccagcatgcaaagcagtcctctaaaccagttgtagtgagcgtgggcgctgttcccgtgctatcaaaagaatgtgcctcaggagagagggggagacgaatgagccagatgaagaccccgcataacccgctcgattcttccgccccattaatgaagaagggaaagcagagagaaatcccgaaagctaagaaacctactagtctcaaaaaaattatcctaaaggaacgtcaggaacggaaacagaggctccaagagaacgccgtttcgcccgcatttacctccgacgatacacaggacggagagtccggaggcgacgaccaatttcccgagcaggcagaactgagcggacctgaggggatggacgaattaatttccaccccgtctgttgaggacaagtccgaagagccgcctggtaccgaactgcagagggatacagaagcctcccatctcgccccaaatcacactacattcccaaaaatacattcccgaagatttagggattattgcagccagatgctgagcaaggaggtggatgcatgcgtgacagatttgctgaaggagctggtgagattccaggacagaatgtatcagaaggaccctgtcaaggcaaaaaccaaacgccggcttgtactggggctgcgtgaggtgctgaaacacctcaaattaaagaaattaaagtgtgtgataattagtccgaactgtgaaaaaattcaatccaaaggaggcctggacgatacgttacacacgatcattgactacgcctgtgagcagaatatccccttcgtttttgctctgaatcggaaggcgctggggcggtctcttaacaaggctgtacccgtctccgttgtcggtatcttcagctacgacggagcccaggaccaatttcataaaatggtcgagcttactgtggctgctagacaggcttacaaaactatgttagagaacgtccagcaggaacttgtgggggaacccagacctcaggcgccaccctccctacctacacaggggcctagctgccctgccgaggacgggcctccagcactcaaagagaaggaggagccccattacatcgagatatggaaaaaacaccttgaggcatactcaggatgtactctcgagctcgaggaatcactggaggcatccacctctcagatgatgaatctgaacctgtag

SEQ ID NO: 133607 - DNA, 828 bp, synthetic construct
  misc_feature 1..828: note = Description of Artificial Sequence: Synthetic coding sequence
  source 1..828: mol_type = other DNA
ggcacaatatcatccgagatcaaatctgctcgcggctcgcaccatcttagcatctatgccgaaaactcactgaagtctgacggttatcacaagcgtaccgatcgcaaatcccgaattattgcaaagaacgtctctacatcgaaacccgaattcgagttcaccactctggattttcccgagctgcaaggtgccgagaacaatatgtccgagattcagaaacagcccaagtgggggcccgtccactccgtctccacagacatctccctgctgagggaggtggtgaaacctgccgccgtgctgtctaaaggtgaaatagtcgtcaaaaataacccgaacgagtcagtgacagccaacgctgccacaaacagcccgagctgcacaagagccgatccgaagaatgtcagcataccctcctctgaggccctgagctctgatcctagctacaataaggagaagcacataatccaccccactcagaaaagtaaagcttcgcaaggttccgatctggaacagaatgaagccagtcgaaagaataaaaaaaaaaaggagaagtccacaagtaaatacgaggtgcttaccgtacaggaacccccacgtattgaggatgccgaggagttccccaaccttgccgtcgccagtgagagacgcgaccggatagagacccctaagttccagagtaagcagcaaccacaggataacttcaagaataacgtcaagaaaagccaactgcccgtgcagctggacctaggcggcatgctgactgcactggagaagaaacagcactctcagcatgctaagcagagcagtaaacccgtggtagtgtcatag

SEQ ID NO: 133608 - DNA, 183 bp, synthetic construct
  misc_feature 1..183: note = Description of Artificial Sequence: Synthetic coding sequence
  source 1..183: mol_type = other DNA
atgccactcccaattcttttacacgttcaggaacagattctaaaaatgttggtttatcacttactgaagctgtaccttaggatcttacccacaacaaagaaaaacaccctcttcatcctgcccaagagtcttaaacaccataaggtcgtcaccctaaacaaaatgaagcctcaggaacgatag

SEQ ID NO: 133609 - DNA, 2361 bp, synthetic construct
  misc_feature 1..2361: note = Description of Artificial Sequence: Synthetic coding sequence
  source 1..2361: mol_type = other DNA
atggcctttggcgcctccacctttcctccacagtatttgtcatccgagatcactctccatccatacgcatattccccttataccctggactctacccaaaacgtgtactcggtgccaggctctcagtacctgtacaaccagccatcgtgctatcgcggatttcagacagtcaagcacaggaacgaaaatacctgcccgctgccgcaagaaatgaaggctttattcaaaaaaaaaacctatgatgaaaaaaaaacctacgaccagcaaaaattcgattccgagagagcagatggcactatttcttccgagattaagtcggctcgtggctctcaccacctgtcgatttatgctgaaaactccctcaagtccgatggataccacaagaggactgacaggaagtctcgcataatagcaaagaatgtgtctacgagcaagccagaatttgaatttactaccctcgatttccccgaactacagggagcagagaacaacatgtccgaaattcaaaagcagcctaaatggggccccgtacactccgtctccacagatatcagcctactgagagaggttgtgaagcccgcagccgtgttaagtaaaggggaaatcgtcgtcaagaataatcccaacgagtcggtgacggcaaatgctgcaaccaactccccctcgtgcactcgggagctgtcatggacaccgatgggctacgttgttaggcagacgttgagcacagagttgagcgcagcgcctaaaaacgtcactagcatgatcaatctcaaaacaatcgcttcctcagcagatcccaagaatgttagtatcccatcctctgaagcactgagctccgatccttcctataacaaggagaagcacatcatccacccaactcagaagtccaaggcgtcgcagggctccgaccttgagcagaatgaggcctctagaaagaacaagaaaaaaaaagagaaaagcacatccaagtatgaagttctgaccgtccaagagcctccacgaatcgaagatgccgaggagttccccaacctcgcggtggctagcgagcgccgtgatagaatagaaaccccaaaattccagagcaagcaacagccacaggataactttaaaaacaacgtgaagaaatcacaactgcccgtccaactcgacctcggtggaatgcttacggcgctcgaaaagaagcagcactcacagcatgccaagcagtcttcaaagccagtcgttgttagcgtaggggccgtgcccgtcctctcgaaggagtgcgcctctggcgaacgcggcaggcgtatgtcacagatgaagaccccccataaccctttggactcaagcgctccactcatgaagaaaggaaagcagcgcgagatccccaaagctaagaagccaacttccttaaagaagattattctaaaagaaaggcaagagagaaagcagaggctgcaggagaatgccgtgagcccagcgtttacttctgatgacacacaggatggggagtccggcggagatgatcagtttcccgaacaggctgagctgtctggccctgagggcatggacgaacttatctccaccccatcagtagaagacaaatctgaagagccccctggcactgagctgcagagggatacagaggcttcccacctggcgcctaatcataccaccttccccaaaatccattctcgccgcttccgggactactgtagccagatgctgtcaaaggaggttgatgcctgtgttaccgacctcctgaaagaacttgtgaggtttcaggatcggatgtaccaaaaggatccagtgaaagccaagacaaagaggcgtctggtcctgggattacgcgaagtcttaaagcacctcaaattaaagaagttgaagtgcgttatcatcagtccaaactgcgagaagatacagtccaaaggaggactggatgatacgctccacacaatcatagattatgcctgtgagcaaaacatcccatttgtgtttgctctgaaccggaaggcgcttggcaggtcgctgaataaagccgtgcctgttagcgtggttggtatttttagttacgatggagcccaggatcagtttcataagatggtcgaactgaccgtcgctgcccgccaagcctataagactatgttggagaacgttcagcaggaactagtgggcgaacctcgtccacaagccccgccgtccctacctacacaaggtcccagttgtcctgctgaggatggcccacctgccctcaaggagaaggaggaaccccattacattgagatttggaagaagcacttggaggcctactctgggtgtacacttgagctggaggagtctctcgaggccagcaccagccaaatgatgaacctgaatctgtag

SEQ ID NO: 133610 - DNA, 747 bp, synthetic construct
  misc_feature 1..747: note = Description of Artificial Sequence: Synthetic coding sequence
  source 1..747: mol_type = other DNA
atgcaaacatgtccactggcattccccgggcacgtgtctcaggcgctcggcacccttctattcctggccgcctcactctccgcacagaacgagggctgggacagtccaatttgtacggagggcgttgtgagtgtttcttggggggagaacacagtgatgagctgcaatattagcaatgccttctcgcatgttaacattaagctgcgcgctcacgggcaagaatctgctattttcaacgaggtcgctcctggatattttagtagggatggctggcagttgcaagtacagggaggcgtagcgcagctcgtgatcaaaggcgcacgggattcccacgcaggactgtacatgtggcatttggtgggccaccagcggaataataggcaggtcaccttggaagtgtccggggctgagccacagagcgctcccgacaccgggttttggcccgtgccggctgtggtaaccgctgttttcattctgctggtggctctggtgatgtttgcctggtaccgatgcagatgcagtcagcagaggcgggaaaaaaagttcttcttattggaaccccaaatgaaagtggccgctcttcgggctggcgcgcagcagggcctgtcccgagcgtcggccgagctctggacccctgattctgagccaacccctcggccactggcactggtgttcaaaccatctccattgggagccctcgaactccttagtccccagccattattcccctatgctgcagacccctag

SEQ ID NO: 133611 - DNA, 888 bp, synthetic construct
  misc_feature 1..888: note = Description of Artificial Sequence: Synthetic coding sequence
  source 1..888: mol_type = other DNA
atgctgcagggccccggttcacttctcttgttgtttttagctagccattgctgtctgggaagcgcaagagggctctttctgttcggtcaaccagatttctcatacaaaagaagcaactgcaaaccaattcctgcaaaccttcagctgtgtcacggtattgaataccagaatatgcgacttcccaatctgctgggacatgaaaccatgaaagaagtcctggagcaagccggggcatggattccgttggttatgaagcagtgccacccagatacgaagaaatttctgtgctctctgtttgctcctgtctgcctggatgaccttgatgagaccatccagccctgccattcactctgtgtacaagtcaaagacaggtgtgcacccgtgatgtctgccttcgggttcccctggcccgacatgctggagtgtgaccggtttcctcaagataacgatctatgtataccgctggcatcttccgaccacttgctcccagccactgaggaggcccctaaggtatgcgaagcgtgtaaaaataagaatgacgatgacaacgacataatggagacgttgtgtaagaatgactttgccttaaagattaaggttaaagagattacctacataaatcgggataccaagatcatcctggagactaagtctaaaaccatatacaagctcaatggtgtctcggaacgggacctgaaaaagagtgtgctctggctgaaggattcacttcagtgtacatgcgaggagatgaatgacattaacgccccatacctcgtcatggggcaaaagcaaggcggtgagttggtgatcaccagcgtcaagcgctggcagaagggccagagggaattcaagagaatatctcgcagcattcggaagttgcagtgctag

SEQ ID NO: 133612 - DNA, 312 bp, synthetic construct
  misc_feature 1..312: note = Description of Artificial Sequence: Synthetic coding sequence
  source 1..312: mol_type = other DNA
atggccagtaggtgggccgtgcaattgctactggtagcggcatggtcaatggggtgtggcgaagcgctgaaatgttacacttgcaaagagccaatgacttccgccagttgtaggacgattacgcgctgcaagcccgaggacacagcctgcatgactacgctggttaccgtggaagccgaataccccttcaatcagagcccagtggttacacggagctgttccagctcatgtgtggctacggacccagacagtattggggcagcgcacctgatcttttgctgcttcagggatctgtgcaacagcgagctgtag

SEQ ID NO: 133613 - DNA, 636 bp, synthetic construct
  misc_feature 1..636: note = Description of Artificial Sequence: Synthetic coding sequence
  source 1..636: mol_type = other DNA
atgatcagcagaatggaaaaaatgaccatgatgatgaagattctcattatgttcgccttgggcatgaactattggtcatgttcaggattccccgtctatgattacgacccatcttccttaagagacgccctctctgcctcagttgtgaaggtgaacagccagagcctgagcccctacctgtttagggcattccgctctagcttgaagcgcgtggaagtgctggatgagaacaacctagtcatgaacctggaatttagcattagagagaccacctgtagaaaggactccggcgaagatcctgccacatgtgcatttcagagagactactacgtctccactgccgtttgcagaagtacagtcaaagtgtccgcccaacaggtgcagggcgtgcacgccaggtgctcttggtcatcttctacatccgagtcatacagctccgaggagatgattttcggggacatgctcggcagccacaagtggcgaaacaactatctgttcggcttgattagtgatgaatccatctccgaacagttctatgaccgaagtctgggcattatgcggcgggtccttccacccggtaataggcggtaccctaaccataggcacagagctcgcatcaacactgattttgaatag

SEQ ID NO: 133614 - DNA, 636 bp, synthetic construct
  misc_feature 1..636: note = Description of Artificial Sequence: Synthetic coding sequence
  source 1..636: mol_type = other DNA
atgatctctagaatggaaaaaatgactatgatgatgaaaatacttatcatgtttgccctgggaatgaactactggagctgctctgggtttcccgtatatgattatgatccatccagcctgagggatgccttgtctgctagcgtggttaaagtaaactcccagagtctgtccccttatctattccgcgcattccgatctagcctgaagcgcgtcgaagtgctcgatgaaaataacctggtaatgaacctggagttcagtatccgagagactacctgtaggaaggactccggcgaagaccccgccacttgcgctttccagagagactactatgtgtctaccgccgtgtgcaggagtacagtgaaagtcagtgcccagcaggttcagggcgtccacgcaaggtgtagttggtcatctagtaccagtgaaagttatagttccgaagaaatgatcttcggagacatgctgggcagccacaagtggagaaacaactaccttttcggcttgatctccgacgaatctatttctgagcagttctatgatcggtcactgggcattatgaggcgagtgttgcctccaggcaacaggcgataccccaaccatcgacatagagcgcgaattaacaccgactttgaatag

SEQ ID NO: 133615 - DNA, 366 bp, synthetic construct
  misc_feature 1..366: note = Description of Artificial Sequence: Synthetic coding sequence
  source 1..366: mol_type = other DNA
atggctccccgccctctgctgttgctcttgcttctcctgggggggtccgcagcaagaccagcccctccaagggcccggagacattctgatggcacatttacctccgaactgagccgcctgcgcgaaggtgctcggctgcagcgactcctgcagggccttgttggtaaacgatccgagcaggatgctgaaaattctatggcttggacacgcttgagtgcagggctcctgtgtccctccggctctaatatgccaatcctgcaagcttggatgcctctggatggaacatggagtccatggttacctcctggccccatggtcagtgagcctgccggggccgccgcggagggaacgcttcgccctaggtag

SEQ ID NO: 133616 - DNA, 1323 bp, synthetic construct
  misc_feature 1..1323: note = Description of Artificial Sequence: Synthetic coding sequence
  source 1..1323: mol_type = other DNA
atgcgtccacacctttcacccccgctgcaacagctgctacttccagtcctgttggcttgtgcggctcactccaccggagcccttccccgcctctgcgacgtgctacaggtgctctgggaggagcaagatcagtgtctgcaagaattatccagggagcagacaggagatcttgggaccgaacaaccggtgccaggatgcgaggggatgtgggataatattagttgctggccaagttcagtcccaggcaggatggtcgaggtggagtgtccgaggtttttgaggatgctcaccagtcggaacggaagtcttttccggaactgcacccaggatggttggtccgagactttccctagacctaaccttgcttgcggcgtcaacgtaaacgattccagtaatgaaaaaaggcattcctatcttctcaagctgaaagtcatgtacacagtggggtattcttcaagtttggtcatgctgctggtcgctttgggcatcctgtgcgctttccggaggctccactgcacacggaattacatccacatgcatctgttcgtgtccttcatactgagagccctgtctaacttcataaaggatgcggtgctgttcagtagtgatgacgtcacttattgtgatgcacaccgcgccggatgtaagcttgtaatggttctgtttcaatactgcataatggccaattactcctggctcctcgtagaaggtttgtatctgcacacgctcctggctatttccttcttcagcgaaagaaagtacctccaggggtttgtggcattcggttgggggtcacctgcgattttcgtcgctctgtgggcaatagcaaggcactttttagaagatgttggctgttgggatattaacgctaatgccagtatctggtggattattagaggccccgtgatcctttctatcctaattaacttcatcctgttcatcaacattttgcggatattgatgcggaagctgcgcacacaagaaactcgtggcaacgaagtctctcactacaagcgcctagctcgttcgactctcctccttattcctctgttcggaatccattatatcgtgttcgcattcagccctgaggatgctatggaaattcaactgttcttcgaactagctctcggcagctttcaagggctggtggtagctgtattgtactgctttcttaatggcgaggtgcagctggaggttcaaaaaaagtggcagcagtggcacttgcgagagtttcctttacacccagtcgcatctttctctaattccaccaaggcatctcatctggagcagtcccagggaacatgccggacaagtatcatctag

SEQ ID NO: 133617 - DNA, 288 bp, synthetic construct
  misc_feature 1..288: note = Description of Artificial Sequence: Synthetic coding sequence
  source 1..288: mol_type = other DNA
atgaagctacttatggtactgatgcttgcagcgctcctcctccactgttatgccgattccggctgcaagctgctggaagatatggtcgaaaagactataaattcagacatttctatcccagagtacaaagaactgctccaggagttcatcgatagcgacgctgccgccgaggctatgggcaaatttaagcagtgctttctgaaccagagtcataggaccctgaagaatttcggcttaatgatgcataccgtgtacgactccatctggtgcaatatgaagagtaactag

SEQ ID NO: 133618 - DNA, 1746 bp, synthetic construct
  misc_feature 1..1746: note = Description of Artificial Sequence: Synthetic coding sequence
  source 1..1746: mol_type = other DNA
atgccggcccctcgtgctagagaacagccaagagtccctggggagcgtcagcccctcctgcctcggggcgccagagggccaaggaggtggcgtcgggccgccggagcagcagtgttgctcgtggaaatgctggagcgggccgctttcttcggagtcaccgccaacctcgtcctttacctgaacagcacgaattttaattggactggagaacaggccactcgagccgctttggtgtttctgggggcctcgtacctccttgcacctgtgggtggatggcttgctgatgtttatctgggaagatatagagcggttgccctgtctctgctactgtacctggctgcctcgggcttactccccgctaccgccttcccagacggccggagctctttttgcggagaaatgcccgccagccccctcggtcccgcctgccccagtgcaggctgtccgcgttcctccccttccccctattgtgcacccgtgctctatgcaggcctgcttctgctcggtcttgcagctagttccgtccggtcaaatctcacttcctttggcgctgaccaggtgatggacctgggtagagacgccacccggaggtttttcaattggttttactggagcatcaatttaggcgcagttctaagcttgctggtagttgccttcatccagcagaatatctcttttctactggggtacagtattccagttggatgcgttggtctagcgtttttcatcttcctctttgcgacccccgtcttcattacgaagccaccgatggggagccaggtctcttcaatgctgaaattagctttgcagaattgttgcccacagctgtggcagcgccacagcgcacgcgatcggcaatgcgccagagttctggcagacgagcgatcacctcagccgggtgcatctcctcaggaggacattgccaacttccaggtcttggtgaaaatcttgcctgtgatggttacacttgttccttactggatggtctattttcagatgcagtcgacctacgtcctgcagggccttcacctccatatccctaacatcttcccagcaaaccccgccaatatcagtgtggctctccgggctcagggctcaagctatacgatacctgaggcctggcttctcctcgccaacgtggtggtggtgttgattctggtgcccctgaaggataggctgattgatcccctgctactgagatgtaaattactcccttctgccttgcagaagatggccctggggatgtttttcgggtttacatccgttatcgtggcaggagttctagaaatggaaaggttacactatatacatcataacgagaccgtatcgcaacagataggcgaggtcctgtacaacgccgcccctctgtctatatggtggcaaatcccccaatatctgttgataggtatttcggagatttttgcgagtattcccggacttgaatttgcttactccgaggcacctcgctccatgcagggagccatcatgggcatctttttctgcctgagcggagttgggtctctgctcggaagcagtctcgtagcactactgtcactccccggcgggtggctgcattgtccaaaggacttcgggaatattaataactgtagaatggatctctacttttttttattggcaggtattcaagccgttactgcgctcctattcgtgtggatagccggccgctacgagcgcgcgagccagggccctgctagccatagccggttttcgagggataggggttag

SEQ ID NO: 133619 - DNA, 363 bp, synthetic construct
  misc_feature 1..363: note = Description of Artificial Sequence: Synthetic coding sequence
  source 1..363: mol_type = other DNA
atgaagctcctcatggtcctgatgctggcggctttgagtcaacattgctacgctggctccggctgccccctgctggaaaacgtgatttcaaaaaccatcaacccgcaggtgtcaaagactgagtacaaagaattgttgcaggaatttattgatgacaacgctaccactaacgccattgacgaactgaaggaatgtttcttgaaccaaaccgacgaaacattgtctaacgtggaggttttcatggttattagcttctcatcgtataaattatttaaatctccggaccagggccaagtgggaagctccttccttaccgataacgccaaagctacaagtgaacaggcattttcatacattggttag

SEQ ID NO: 133620 - DNA, 315 bp, synthetic construct
  misc_feature 1..315: note = Description of Artificial Sequence: Synthetic coding sequence
  source 1..315: mol_type = other DNA
atgaaattggcagccctgctgggcctctgcgtagccttgtcatgtagcagtgccgccgcattcctcgtgggttcggccaaacctgttgcccagcccgtggcggcgctcgaatccgccgccgaagccggagcggggaccctagcgaacccactgggcactctcaatccactcaaactcctactttccagtctggggatcccagtgaatcacttgatagagggtagtcagaagtgtgtcgcagagctgggcccgcaggcagtcggagcggtgaaggctctgaaagcccttctgggtgccctgacagtgtttggctag

SEQ ID NO: 133621 - DNA, 282 bp, synthetic construct
  misc_feature 1..282: note = Description of Artificial Sequence: Synthetic coding sequence
  source 1..282: mol_type = other DNA
atgaagctcgtgaccatcttcctcctggtgactattagtctgtgtagttacagcgccactgctttcctcattaataaagtaccactgcccgtggataaattggctcccctgccactggacaacattctgccctttatggatcctcttaaacttttgctcaaaacccttggcatcagtgtcgaacacctcgtggagggactccgtaagtgcgtgaacgaacttggccccgaggcctccgaagccgtgaaaaagctgctcgaagccttaagtcaccttgtctag

SEQ ID NO: 133622 - DNA, 1854 bp, synthetic construct
  misc_feature 1..1854: note = Description of Artificial Sequence: Synthetic coding sequence
  source 1..1854: mol_type = other DNA
atggccgaggcgaaaacgcattggctgggagccgctctatccctcatccctctaatatttcttatttccggagctgaggctgcatctttccagcgaaaccagcttttacagaaggaacccgacctaaggctggagaacgtccagaaatttccctcaccagaaatgataagggcactagaatacattgagaatcttcgccaacaggcacacaaagaggagtcatctccagactataacccttaccaaggggtctccgtgcccctgcagcaaaaagagaatggggatgagagccatctcccagagcgagactccctcagtgaggaggactggatgcgtatcatcctggaagcgctacggcaggccgagaacgagccgcagagcgcccccaaggagaataaaccctacgcgctgaacagcgaaaaaaattttccaatggatatgagtgacgattacgagactcagcaatggccggagaggaagctcaaacacatgcagttcccccctatgtacgaagaaaacagccgggacaatccgtttaaaaggaccaacgagatagtggaagagcagtacacccctcagagtcttgcaacccttgaatccgtgtttcaggagctgggaaagctaacaggcccaaataaccaaaaacgggaaaggatggatgaagagcagaagctctacaccgatgatgaagacgatatctataaggccaataatatcgcatatgaggatgtcgtgggcggtgaagattggaaccctgtcgaggagaagatagaaagtcagactcaggaggaggtgcgcgactcaaaggagaacatcgaaaagaacgagcagatcaatgatgagatgaagcggagcggacagcttgggatacaggaggaagatctgcgcaaggagagcaaggaccagctgtcagacgacgtcagcaaggtgatcgcttatctgaagcggctagtgaatgcagctggcagcggaagactgcaaaacgggcaaaacggggagcgcgcaacacgcttatttgaaaaacctctggactctcaatctatttaccagctaattgaaattagcaggaatctgcaaattccccccgaggacctcattgaaatgcttaagaccggtgaaaaacctaacggtagcgttgagccagagcgtgagctcgacctgccagttgacttggacgatattagcgaggcggacctggaccacccagacctgtttcagaatcggatgttgagcaagtctggctaccctaaaaccccaggccgggctgggactgaagccctgcccgacgggctgtctgtcgaagacatcctcaatttactgggcatggagtccgccgctaatcagaagacctcctacttcccaaatccatacaatcaggaaaaagtcttgcccaggctaccgtacggcgccggccggtcccgttcaaaccagctccccaaggcggcatggattccccacgtcgagaaccgccagatggcgtatgagaacttgaatgataaggaccaagaacttggcgagtacttggcccgtatgctggttaagtaccctgagattattaattccaaccaggtcaaacgcgtcccagggcagggctcttccgaagatgacttacaggaggaagagcaaatcgaacaggctattaaagagcacttgaatcagggctcttcacaggaaactgataagctggcaccagtaagtaagaggttccctgttggaccaccaaaaaatgacgacacaccaaatcgtcagtactgggacgaggatcttctgatgaaggttctggagtacttgaatcaggagaaagccgaaaaagggcgcgaacacatcgcgaagcgggcgatggaaaacatgtag

SEQ ID NO: 133623 - DNA, 435 bp, synthetic construct
  misc_feature 1..435: note = Description of Artificial Sequence: Synthetic coding sequence
  source 1..435: mol_type = other DNA
atggccgaggccaaaacacactggctcggtgcagcgctgtctttgatcccattaatctttctcatttcaggagctgaggccgcatcattccaaagaaaccaactcctgcagaaggagcccgacctgagacttgagaacgttcagaagttcccgagccccgaaatgattagggcccttgagtacattgaaaacctgcgtcaacaagcccacaaggaggagagtagtcccgattacaacccctatcagggagtttctgtccctctccagcaaaaggagaatggtgatgagtcacacctgcccgagcgcgacagtctgagtgaagaggactggatgaggatcattctggaagcactgaggcaggccgaaaacgagccccagtctgcgcctaaagaaaacaagccgtacgctctcaactctgagaagaattttccatag

SEQ ID NO: 133624 - DNA, 378 bp, synthetic construct
  misc_feature 1..378: note = Description of Artificial Sequence: Synthetic coding sequence
  source 1..378: mol_type = other DNA
atggctgaggccaaaacccattggcttggcgcagctctgtcactgattcccctcattttcctaattagtggggcagaggccgcctcttttcagcggaaccaattgctgcaaaaagagccggacctccgactggaaaatgtgcagaagttcccttccccagaaatgatccgagctcttgagtacatcgagaatctccgacagcaggctcataaggaggagtcgagcccggactataatccttatcaaggagtttccgtgcctctgcagcagaaggagaatggagacgaatctcatctccccgaacgggactcgctgtctgaggaggattggatgagaatcatactggaggctctcagacaagccgagaacgaaccatag

SEQ ID NO: 133625 - DNA, 1434 bp, synthetic construct
  misc_feature 1..1434: note = Description of Artificial Sequence: Synthetic coding sequence
  source 1..1434: mol_type = other DNA
atggctgaagcgaaaacccactggttgggagccgccttgtctcttatcccactcatctttctcattagcggcgcggaggccgcgagcttccagagaaaccagcttctgcagaaggagcctgacctaaggctcgaaaacgttcagaaatttcctagtccagagatgattcgggccttagaatacatcgagaacctgagacagcaggctcataaagaagagtcttctccggattataacccttaccaaggggtttctgtgcccttgcagcaaaaggagaatggtgatgagagccacctgcccgaacgcgactccctgcggggagaggactggaatcccgtggaagaaaaaatcgagagccaaacccaggaggaagttcgagattccaaagagaacattgaaaagaacgaacagatcaacgatgaaatgaagcggtctggccaactggggatacaagaggaagatctccgcaaagagagcaaagaccagctgagcgatgacgttagcaaggtgattgcatacctcaagcgactggtgaatgcagctgggtctggacgtctgcagaacggacagaacggtgaaagagctacacgcctgttcgagaagcccttagactctcaatcaatttatcagctcatcgaaatcagcagaaatttgcagattcccccggaggacttaatcgaaatgctaaaaaccggggagaaacccaacggcagcgtcgaacccgaacgggaactggatctacccgtggatctggacgatatcagtgaggcagatctggatcaccctgatttattccagaaccggatgctctctaaaagtgggtaccccaagacacccggtcgcgccggcaccgaggctctaccagacggcttgagcgtggaagacatcctcaacttgctcgggatggagagtgctgctaatcagaagacctcatactttccaaatccttacaaccaggaaaaagtgctcccacgactcccttacggtgccgggagatcgcgatccaatcagttgcccaaagccgcctggattcctcacgtcgagaatagacagatggcatacgaaaaccttaatgataaggaccaggagctgggtgaatatctcgcacgcatgctggtgaaatatccagagatcattaactctaaccaggttaagagagtgcctgggcagggatcatcagaggatgatcttcaggaagaggagcagattgaacaggcgattaaagaacacctgaaccagggctcctcgcaggagacagacaaattagccccagtcagcaagaggttcccagtcggacctccaaagaacgatgacacacccaatcgccagtattgggatgaagaccttctgatgaaagtgctcgagtacctgaaccaggaaaaagctgagaagggcagagagcacatcgctaaaagagctatggaaaatatgtag

SEQ ID NO: 133626 - DNA, 390 bp, synthetic construct
  misc_feature 1..390: note = Description of Artificial Sequence: Synthetic coding sequence
  source 1..390: mol_type = other DNA
atggagccttcgcagtgtgtagaagagctcgaggacgacgtgttccagcccgaagacggcgagcccgtaacacagcccggatcgctattaagtgccgacctgtttgcacaaagcctcctcgattgccctctttcgaggctccaactgtttcccctgacccactgctgtggccctggcctgcgccccactagccaggaagataaggccacccagacactgtcacctgcgtcacctagccaaggcgtgatgcttccctgcggcgtgacagaagagccacagcgattgttttacgcccctgcagagcctaagagctgcgtggtggcagacccccctctccctgcacagccctgctttgagtggaggagagagcaagaacggggcaggccttag

SEQ ID NO: 133627 - DNA, 711 bp, synthetic construct
  misc_feature 1..711: note = Description of Artificial Sequence: Synthetic coding sequence
  source 1..711: mol_type = other DNA
atggctgccattcaagatggtctcgcaaaaggggagaacgacgagactgttagtaatactttgaccctcactaacggactcgaacgccgtaccaagacatacagcgaggacaacttcgaggagctccagtatttccccaatttctacgctcttctgaagagtatcgatagtgagaaagaagctaaagaaaaggaaaccctgatcaccataatgaaaactctgattgacttcgtcaagatgatggttaagtatggtacaatctctcccgaggaaggcgtctcatacttagagaacttggacgaaatgatcgctctccaaacaaaaaataagctggagaaaaatgcaacggataatattagtaaattgtttcccgcccctagtgaaaaatcgcatgaggaaacagatagcaccaaggaggaggccgctaagatggagaaggaatacggaagtctcaaggactctacgaaagatgacaacagcaatcctggcgggaaaacagacgaacccaaaggtaaaacagaagcctacctcgaggctattcggaaaaacatcgaatggctgaagaaacatgacaaaaagggcaacaaagaagactacgatctgagcaagatgagggactttattaacaaacaggccgatgcctacgtggagaagggaatcttagataaagaagaagcggaagctataaagcggatttactcctctctctag

SEQ ID NO: 133628 - DNA, 174 bp, synthetic construct
  misc_feature 1..174: note = Description of Artificial Sequence: Synthetic coding sequence
  source 1..174: mol_type = other DNA
atggccgccatccaggatggattggctaagggggagaacgacgagaccgtgagcaacactttgaccctcacaaatgggcttgagaggcgtaccaagacttattctgaggacaactttgaagagctgcagtattttcccaacttctatgcacttctgaaatccatagactcctag

SEQ ID NO: 133629 - DNA, 990 bp, synthetic construct
  misc_feature 1..990: note = Description of Artificial Sequence: Synthetic coding sequence
  source 1..990: mol_type = other DNA
atgtctgctttcgacacaaacccctttgctgacccagtggacgtcaatccattccaggatccatcggtgactcagctgactaacgccccacaaggaggcctggccgagttcaaccctttttcagaaaccaacgcggcgacaacagtgcctgtgacacagttgccaggctcctctcagccggcggttcttcagcctagtgtcgagccgacccaaccaacgccccaggccgtggtgtccgccgcccaggcaggactcctgcgccaacaggaagaactggacaggaaagcagcagaattggagcggaaggaacgcgagctgcaaaataccgtggcgaacttgcacgtcagacagaacaactggcctcctctgccttcttggtgtccggtgaaaccttgtttctatcaggacttttccacagagattcctgccgactatcagaggatctgtaagatgctatattacctgtggatgctgcacagtgtgaccctgttcctcaatctcctggcgtgcctggcatggtttagcggcaatagttctaagggtgtggatttcggtctcagtatcctttggtttctgatctttacaccgtgcgcttttctgtgctggtaccggcctatctataaggcatttcgtagcgataactcattttcctttttcgtgttcttctttgtgtttttttgccagattgggatctacataatacagttggttggaatccctgggttgggcgattctggctggattgccgccctgagtaccctcgataaccacagtctggcgatctctgttatcatgatggtggtggcagggttctttaccctctgcgccgtgctgagtgtctttctacttcaaagagtgcatagcctgtatcgccgaaccggggcttcctttcagcaagcgcaggaggagttttctcagggaatttttagcagcagaacatttcaccgtgcagcctcctccgccgcacagggcgcttttcagggtaactag

SEQ ID NO: 133630 - DNA, 864 bp, synthetic construct
  misc_feature 1..864: note = Description of Artificial Sequence: Synthetic coding sequence
  source 1..864: mol_type = other DNA
atgtccgcctttgacactaacccttttgcagacactaacgccgccacaactgtccccgttactcagctgcccggctccagtcagcctgctgtgctgcagccatccgtagaacctacacaacccaccccccaggccgtagttagcgctgcacaggcaggactcctgaggcagcaggaagagctggatcgaaaagctgctgaacttgagagaaaggagcgagaactgcaaaacacggtggccaatctacacgtccgtcagaacaactggccgccactgccttcatggtgccccgtaaagccctgtttttaccaggatttttcaactgaaattccagcagactaccagcggatttgcaaaatgctctattacctgtggatgctccattccgtaaccctgtttctgaacctgttggcctgtttggcatggtttagcgggaactcctcaaaaggggtagatttcgggctgagcattttatggttcctgatatttacaccttgtgccttcctttgctggtacaggccaatctataaagcattccgctcagacaattccttcagtttctttgtttttttctttgtcttcttctgtcagataggaatttacataatacagctcgtgggcatacccggccttggagacagtggttggattgcagctttatccacactggacaaccactcactggctattagtgtcatcatgatggtggtggcaggctttttcaccctgtgtgctgtgctgtccgtttttctcctgcagcgggtgtctggcgtgggccgagccgactccaaatgggaggaggccggtaaccggttcctgcctctgcctagagacgtattccaccactgcagttgggcctcctag

SEQ ID NO: 133631 - DNA, 1044 bp, synthetic construct
  misc_feature 1..1044: note = Description of Artificial Sequence: Synthetic coding sequence
  source 1..1044: mol_type = other DNA
atggcacaatctcgggatggtggaaatccattcgccgagccatcagaactcgacaacccgttccaagaccctgccgtgatccagcaccggccatccaggcagtatgctactttagacgtgtacaacccattcgagacacgggagcctcctccggcttatgaaccccctgctccagcacctttgcctcccccttctgcaccttcactgcaaccgagccgaaaactcagtcctaccgagcccaaaaattatggtagctacagtacacaagcgagcgcggcagcagcaaccgcagagcttctaaagaaacaggaagagcttaatcggaaggcagaggagctcgaccgccgcgaaagagagctgcaacacgccgcactcggaggcaccgccacacgacagaacaactggcccccccttccaagcttttgccccgtgcagccgtgcttttttcaagatatcagtatggaaatcccccaggaatttcaaaaaacggtctcaacaatgtactacctctggatgtgctcaacactggctcttctcctcaactttctagcttgcctcgcctccttttgtgtagagaccaacaatggcgccggattcggcctctcaattttgtgggtgctgcttttcacaccctgctcattcgtttgctggtacaggccaatgtataaagcctttcggagcgacagctccttcaacttcttcgtgttcttctttattttctttgtgcaagacgtgttgttcgtgttacaggccataggtatcccggggtggggatttagcggatggatttcagcgcttgtcgtgcctaagggaaatacagccgtgtctgtgttaatgcttctggtagcgctgctgttcaccggcattgccgtgttaggcattgtgatgctgaagaggatccacagcctgtaccggcggactggcgcctcattccagaaggcacagcaggagtttgctgcaggcgtcttttctaatccggctgttagaaccgcggccgcaaatgccgccgctggggcagctgaaaacgctttcagagccccttag

SEQ ID NO: 133632 - DNA, 966 bp, synthetic construct
  misc_feature 1..966: note = Description of Artificial Sequence: Synthetic coding sequence
  source 1..966: mol_type = other DNA
atggcccagtcacgcgatggcgggaatcctttcgcggaaccatctgaacttgataatccattccagcctcctcccgcctacgaaccccccgctccagcacctctgcctccacctagtgcaccatctctgcagcctagcagaaagctcagtcccaccgagccaaaaaattacgggtcttactctacacaggccagcgctgctgccgctacggcagagttacttaaaaagcaggaggagttgaatcgaaaagcagaagagcttgatcgccgggagagagagctccagcacgctgctctgggaggtaccgctacacggcagaacaactggccccctcttccctcattttgccctgtccagccctgtttttttcaagacatttctatggagatccctcaggaatttcagaaaacagtcagtaccatgtactatctctggatgtgttcaaccctggctctgttactcaacttccttgcttgccttgccagcttttgtgtcgaaactaacaacggggcgggctttgggctgtctattttatgggtcctgctcttcacaccctgcagttttgtatgctggtacagacccatgtacaaggcttttaggtctgacagtagttttaatttcttcgtgttcttctttatatttttcgtgcaggatgtgctctttgtcctgcaggcaattggcatacccggctggggcttctctggctggatttctgcactcgtcgttccgaaagggaacaccgctgtgagcgtgctgatgctcctggttgcgttgctcttcactggcattgctgtgctgggcatcgtgatgttaaaacgaattcactctctctacaggagaacaggtgcgtcattccagaaagcgcagcaggaattcgcagcaggcgttttttcgaacccggcagtaaggaccgcggccgccaacgcggctgccggagcagccgaaaacgctttccgggccccttag

SEQ ID NO: 133633 - DNA, 690 bp, synthetic construct
  misc_feature 1..690: note = Description of Artificial Sequence: Synthetic coding sequence
  source 1..690: mol_type = other DNA
atgtctgagaaggagaataactttccacctcttccaaaattcattcctgtcaagccgtgtttttaccagaatttttctgacgagattcctgttgagcatcaggtcctggttaagcggatctatagactctggatgttttattgtgccacactgggagtcaacctaattgcatgtcttgcctggtggatcgggggagggtctggcacgaattttgggctcgcatttgtctggctgctcctgttcacaccatgtggctacgtgtgctggttccgcccagtgtacaaggcattcagagccgattccagcttcaacttcatggcattcttctttatctttggtgcgcaatttgtgctgaccgtgatacaggcaatagggttttccggctggggagcctgtgggtggctttcagcaatcgggttttttcagtactcacccggggcagccgtggtaatgcttttgccggctattatgttctctgtgagcgccgctatgatggcaatagccataatgaaggtgcatcgaatatataggggggctggcggcagtttccaaaaggcacagaccgagtggaataccggtacttggagaaacccgccatcccgtgaggctcagtacaataacttctctggcaactcattgcccgagtacccaaccgtcccatcttatccggggagcggccagtggccgtag

SEQ ID NO: 133634 - DNA, 588 bp, synthetic construct
  misc_feature 1..588: note = Description of Artificial Sequence: Synthetic coding sequence
  source 1..588: mol_type = other DNA
atgtcggagaaggagaacaacttcccccccctgcctaaatttatccctgtgaaaccttgcttctatcagaatttttctgacgagatccctgtggaacatcaggttctcgtgaaacgcatctatcgtctctggatgttttactgtgcaacgctaggtgtgaatctgatagcctgtctggcatggtggatagggggcgggtctgggaccaactttgggctggcgtttgtatggctgcttttgtttaccccatgtgggtatgtttgttggttccggccagtgtacaaggctttccggggctggttgtcagcgattggcttttttcagtacagccccggggccgctgtagtaatgctcctcccagcaatcatgttcagcgtttccgccgccatgatggccattgccatcatgaaggttcataggatctaccggggcgccggcgggagcttccaaaaggctcagaccgagtggaataccgggacatggaggaaccctcctagcagggaggcgcaatacaacaatttctccggcaactccctgcccgagtatcccaccgtaccctcctacccaggctctggccagtggccctag

SEQ ID NO: 133635 - DNA, 588 bp, synthetic construct
  misc_feature 1..588: note = Description of Artificial Sequence: Synthetic coding sequence
  source 1..588: mol_type = other DNA
atgatccagagacacattccagtatgtggcaggagccgtccttatcagcggggctgtgtcgtacaggcagggtcctctggcagccccggttggtctcacttcaagatcatatgtgggttggcacccgcaccttctgaggctgtgctgagcgcccggaacaattgcgagcataccggagggtgtaggctgcaacctgcgctggttggggaaacagagatgagcgagaaggagaataatttcccacccttgccaaagtttattccagtgaagccctgtttctaccaaaactttagtgacgagatccctgtggagcaccaggtgcttgtgaaaagaatttaccgactatggatgttctattgtgccacacttggggtcaacctaatcgcttgtcttgcttggtggattggcggcggctcagggaccaattttggattggctttcgtgtggctcctcctgttcaccccttgtgggtatgtctgttggttcagaccagtttataaggctttcagggctgactccagttttaatttcatggcgttttttttcattttcggagcccaattcgtgctaaccgtgattcaggcctag

SEQ ID NO: 133636 - DNA, 708 bp, synthetic construct
  misc_feature 1..708: note = Description of Artificial Sequence: Synthetic coding sequence
  source 1..708: mol_type = other DNA
atggcagagaaagtcaataatttcccacccctcccaaaatttatcccactgaaaccctgcttctatcaggatttcgaagcagacattccaccacagcatgtgagtatgaccaaacgcctatactacttgtggatgttgaattctgttaccttggccgtgaatctggttggttgccttgcttggctgatcggtggcggaggagcgacaaacttcggccttgctttcctctggcttatcctgttcaccccatgctcctatgtctgttggtttagaccaatttataaagcattcaaaaccgactccagtttctcctttatggcgtttttttttactttcatggctcagctcgtgatctccattattcaggccgtgggtattcccgggtggggagtgtgtggctggatcgcaaccatcagctttttcggcactaacattggatcggctgttgtcatgctgatccccacagtaatgtttactgtcatggcggtgttcagttttatcgcattgtcaatggttcacaagttttatcgggggtcgggtgggtccttctccaaggcccaagaggagtggaccaccggggcttggaaaaatccccacgtgcagcaagccgcacagaacgccgctatgggggcagctcagggtgctatgaaccaaccccagacccagtacagcgctacccctaactacacctattcaaacgagatgtag

SEQ ID NO: 133637 - DNA, 708 bp, synthetic construct
  misc_feature 1..708: note = Description of Artificial Sequence: Synthetic coding sequence
  source 1..708: mol_type = other DNA
atggctgagaaagttaacaattttccacccctacctaagtttattcctctgaagccatgtttctaccaggatttcgaagccgatatccctccccagcacgtcagcatgacgaagcgactgtactatctatggatgctcaattctgttacattagccgtaaacctggtgggttgtctggcttggctgatcggaggaggaggcgcgaccaatttcggcctcgcattcctttggttgattctgtttacaccatgtagctacgtgtgctggttccgccccatctataaagcatttaaaaccgactctagtttttcctttatggcctttttctttacatttatggctcagctcgtgatctccattatacaggccgtaggcattccaggctggggtgtgtgtgggtggatcgcaaccatttctttctttggaactaacattggaagcgcagtggtgatgctgataccaacagtgatgtttaccgtaatggctgtctttagttttattgcactctcaatggtccacaagttctataggggtagtggggggagcttttcaaaggcgcaggaagagtggactacaggggcctggaagaacccccacgtgcagcaagccgcacagaatgcagcaatgggagctgcccagggggcaatgaatcaaccgcaaacacagtatagtgccacgccaaactacacgtacagcaacgaaatgtag

SEQ ID NO: 133638 - DNA, 495 bp, synthetic construct
  misc_feature 1..495: note = Description of Artificial Sequence: Synthetic coding sequence
  source 1..495: mol_type = other DNA
atgtttctacctcgcctcagaggcaggtactcctccccagcctgccagcacgaccaggccccgctgctgcctctggacgtcactgactcatccttctccttcatggccttttttttcacatttatggctcagcttgtgatcagcatcattcaggctgttggcatcccagggtggggcgtctgtggctggattgccactatcagtttttttgggacaaacattggatctgcagttgtcatgctgattccaacagtcatgtttaccgtcatggccgtgttctccttcattgcactttccatggtccacaagttttatcggggcagcggtgggagtttctcaaaggcccaagaggagtggaccaccggcgcctggaaaaatccgcacgtacagcaagcggcccagaacgccgccatgggagcagcccagggcgctatgaatcaacctcaaacgcagtattcggccacacctaactacacctactccaatgagatgtag

SEQ ID NO: 133639 - DNA, 1083 bp, synthetic construct
  misc_feature 1..1083: note = Description of Artificial Sequence: Synthetic coding sequence
  source 1..1083: mol_type = other DNA
atgtttgtcgcgcgtagtatagccgctgatcacaaggatcttatacatgatgtctcgttcgactttcatggtagacgcatggccacttgctcttccgatcagagcgtcaaagtgtgggacaagtctgaatctggtgactggcattgcactgcctcgtggaagacccactctggctcagtgtggagggtgacctgggcgcaccccgagttcggccaggtgctcgcgtcatgctccttcgaccggactgccgccgtttgggaagagatcgtaggcgaatccaacgataaactcaggggccaatcccattgggtgaagagaacaaccctggtagactctagaacgagtgtaaccgatgtgaagtttgctccaaaacacatgggactaatgctagcgacgtgctctgcagatggaattgtgaggatatatgaggcgcccgacgtcatgaacctctcccagtggagcttgcaacacgagatctcatgcaagttgtcttgtagttgcatttcttggaatccatcatctagcagagcccattcacctatgatagcggtcggctcagacgattccagcccaaatgccatggcaaaggtacagatcttcgagtacaacgaaaatacccgcaagtatgccaaggctgaaacccttatgacagttaccgaccccgtgcatgacattgccttcgcacctaacctgggtagaagctttcatattctggcgattgccaccaaagacgtgcgcatcttcactctcaaacctgtcaggaaggagttgacttcatctggcggcccaacgaagttcgagatacacatcgtcgctcagttcgataatcataatagccaggtatggcgggttagctggaacataacaggaacagtgctggccagcagtggtgacgatggctgcgtgagactgtggaaagcgaactatatggataactggaagtgcacggggattctcaaaggaaacggctctccagtgaatggaagttcccagcaggggacttcgaatccatcacttgggtctacaatccccagtctgcaaaattctctgaacgggtcatctgccggccggaagcatagttag

SEQ ID NO: 133640 - DNA, 1266 bp, synthetic construct
  misc_feature 1..1266: note = Description of Artificial Sequence: Synthetic coding sequence
  source 1..1266: mol_type = other DNA
atgttcgtagcccggtcaattgctgcagatcacaaagacctgatacatgacgtctctttcgatttccacggtcgcaggatggccacctgttcgtcggaccagtcagtaaaggtttgggataaaagcgagagcggagactggcattgtacagcatcctggaaaactcactccggatcagtgtggcgtgtcacatgggctcatcccgaatttggacaagtacttgcctcctgcagcttcgaccggacagctgcagtctgggaggaaatcgtgggcgaatcgaacgacaagcttcgcggccagtcacattgggtaaaaagaacaacactcgtggactctcgcacttctgtcaccgacgtaaagttcgccccgaaacacatggggctgatgctggctacctgtagtgcagacggcattgttcgcatctacgaagctcctgatgtgatgaacctcagccagtggagcttgcagcacgaaatatcttgcaagctgagttgtagctgtatcagctggaaccctagtagcagcagagcccattctccaatgatcgccgtgggcagcgacgacagtagtcctaatgcaatggctaaggtccagattttcgagtacaatgagaacacaaggaaatatgctaaggccgagactctcatgaccgtcaccgatccggtgcacgatatcgccttcgccccaaacctcgggcgctctttccacattttagcgatcgccaccaaggacgtgagaatcttcactctgaagccggtgaggaaggagctgacgagttccgggggtcccaccaagtttgaaatccacattgtggcacagtttgacaatcacaactcccaggtttggagagtaagctggaacatcacggggaccgtactggcatcatctggggatgacgggtgcgtccgcctctggaaggcaaactatatggataattggaagtgtacaggcatcctcaagggcaacggaagccccgtgaatggttcttctcaacaaggcacctctaacccaagcctgggctcaacgattccttccctgcagaactccctgaacggctcaagcgctggaagatacttttttacgcctctggacagtcccagagccgggagcaggtggtccagctatgctcagcttttgccaccccccccaccaccactagtagagcactcttgtgatgcggatacagctaacctgcagtaccctcacccccgtagacgctacttatctaggcctctgaacccacttcccgaaaacgaggggatttag

SEQ ID NO: 133641 - DNA, 3075 bp, synthetic construct
  misc_feature 1..3075: note = Description of Artificial Sequence: Synthetic coding sequence
  source 1..3075: mol_type = other DNA
atgcccgccgctagaccccctgcggctggtttgcggggaatctcccttttcctggccctgctcctgggaagccccgcagctgctctcgaaagagatgctttgccagaaggcgatgcttctccgctgggcccatatctattaccatccggcgccccagagcgcggcagcccagggaaagaacatccagaagagcgggtggttactgcacccccaagttcaagccagtcggcagaagtgctcggcgaacttgttttggacggcacagcaccgtccgcacatcacgatattcccgccctgagtccactgctccctgaggaggcgaggccaaagcacgctttgcctccgaaaaagaaactccctagccttaagcaggtgaattcagcgcgcaagcaactgaggcctaaagcaacctcagccgcaaccgtgcaacgggctggttctcagcctgcatcccaaggcctggatctcctgagctcctcgacagagaaacccgggcctcctggagaccctgatccgatagtggctagcgaagaagcaagcgaggtgccattgtggctggacaggaaggagagtgctgtgcccaccactccagctccactgcagatttctccctttacctctcaaccctacgtcgctcacacattacctcagcgtccagagcccggtgagccaggtcctgatatggcccaggaagctccacaggaggatacgtctcctatggctctcatggacaagggcgaaaacgagctgaccgggagtgcatctgaagaatctcaagagaccacaacttccaccattattacgactacggtgatcaccaccgaacaggcccctgcactctgtagcgtgagcttctcaaaccctgaagggtatattgactcaagtgactaccctttgcttcccttgaataactttctggaatgcacctataacgtaaccgtgtacaccggttatggggtggaattgcaagttaaatctgttaacctgtcagatggcgaactgctctcaattcgaggcgttgatgggccaactttgacagttctggccaaccagactctgttagtagagggccaggtaattaggtccccaacgaatactatctccgtctattttcggacatttcaggatgacggacttggcacattccagctgcactaccaggccttcatgctgtcatgtaatttccccaggcgtccggattcaggagacgtaaccgtgatggatctgcattccggaggagtggcacatttccattgtcacttgggttatgaactgcaaggtgcgaagatgttgacctgtataaatgcttcaaagccccactggtccagtcaggagccaatttgtagtgctccatgcggtggagctgtccacaatgccaccatcggaagggtcttatctccttcctatcccgagaatacgaacggcagtcagttttgtatttggacaattgaggcaccagaaggccaaaagcttcacctgcattttgaacggctgctcctgcatgataaggataggatgactgtccactctggtcagacaaacaaaagtgcgttgctgtacgacagtttgcagacagagtcggtgccattcgaagggctcctgagcgaaggcaacactattcggattgagttcacaagcgaccaggcccgtgctgcctcaacatttaacattcgctttgaagccttcgagaagggtcattgttatgagccttatatccagaacggcaacttcacaacatcggatcccacctataacatcggtactatcgtggaattcacatgtgatcccgggcactcactggagcagggccctgctatcatcgaatgcatcaacgttcgggatccatactggaatgataccgagcctctgtgtcgggcaatgtgtggcggcgagctgagtgctgtagctggtgtcgtgctctccccaaattggccagaaccctatgtcgaaggcgaggactgcatctggaaaatacatgtaggagaggaaaagcgaatatttcttgacatccagtttctgaacctctcgaacagcgatattctgactatttatgatggcgacgaggtaatgcctcacatcctcgggcagtacttaggcaattcagggccgcaaaagctgtattctagcacgcctgatctcacgatccaatttcattcagatcccgccggactgatctttgggaaaggccaaggctttattatgaattatatcgaggtgtccaggaacgatagttgtagcgacctgccagagatccagaatggctggaaaactacgtcacacactgaactggttagaggcgcaagaataacctaccaatgcgaccctggctatgacattgtgggcagcgacaccttaacctgtcagtgggacctgtcctggtcctccgaccctcccttctgcgagaagattatgtactgcactgacccaggcgaggttgatcatagtacccggctgatatccgatccagtgctactcgtcgggactaccattcaatacacctgtaatccgggctttgttctcgaaggcagcagccttcttacgtgttattcacgcgaaacaggcacaccgatctggacgtcgcggctgcctcactgtgtgtccgaggagtccctagcctgtgacaacccaggcctcccagagaatggataccaaattctgtataagagactctatctgccaggcgagtctctgacattcatgtgctacgaaggctttgagcttatgggagaggtgaccatacgatgtatcctggggcaacccagccattggaacgggcctctgcccgtctgcaaggtgaatcaagactcctttgaacatgcacttgaagtggctgaggcagccgcagagacatccctcgaaggaggcaatatggctctggccatctttatccctgtcctgataattagcttgctgctgggcggcgcttacatttacatcacccgctgtaggtattactctaacttgcgtctgcccctgatgtattcacacccttattctcaaataaccgtggaaaccgagtttgacaatcccatttatgaaacgggtgagactcgcgagtatgaggtctccatctag

SEQ ID NO: 133642 - DNA, 2847 bp, synthetic construct
  misc_feature 1..2847: note = Description of Artificial Sequence: Synthetic coding sequence
  source 1..2847: mol_type = other DNA
atgcctgcagccagaccacctgccgccggactgcgcggcatcagccttttcttggctctgctcctgggcagcccagctgctgctctcgaacgtgatgccctgcctgaaggcgacgcctctccccttgggccctatctgttgcccagtggcgcccctgagcggggttctcccggaaaagaacacccagaggagcgtgtggtgacagctcctccttcctccagccagtctgcggaagttctcggagagctggtattggacggcacagccccatcagcccatcacgacatccctgcactgagcccattgctcccggaagaggccagacctaaacatgcactcccccctaagaaaaaactgccttcattgaaacaagttaacagtgcacggaagcagttacgaccgaaagccacatcggcagcgacagtgcagcgtgccggctctcagcccgccagtcaagggctggatctgctgtcctcgagcacagaaaagccagggccaccaggagacccagacccgatagttgccagtgaggaggcctctgaagtaccactctggctggatcggaaagaatcggccgtgccaaccacacctgctcctttgcagatcagtccattcaccagtcagccatatgtcgctcacacactgccgcaacgccctgagcctggtgagcccggacccgacatggcacaggaagccccccaggaggacacaagtccaatggccttgatggacaaaggcgagaatgaactgaccggctccgcttccgaggaaagccaggagactactactagcaccataatcaccactaccgtgatcacaactgaacaggcgcctgctctttgttcagtctccttttcgaatccagagggctatatcgatagttcagactatcccctgcttccactgaataacttcttagagtgtacgtacaacgtgacagtctacactggctatggcgtcgagctgcaggtgaaatctgtgaatcttagcgatggcgaactgctctctattaggggagttgacggtcctacattaaccgtgcttgcgaatcaaaccctgttggtcgaaggccaagtgatcaggtctcctacaaacaccatcagcgtttacttccgcacatttcaggacgatggattaggtacattccagctacactaccaagcctttatgttaagctgcaacttccctagacgacccgattctggtgatgtaaccgtgatggatcttcacagcgggggcgtcgcccattttcattgtcacctagggtatgagttacaaggggctaaaatgctgacatgcatcaacgcctccaagccacattggtcctcacaggagccaatctgttcagcaccatgtgggggagcagtccataacgctaccatcggccgcgtgctgagcccttcataccctgagaacacaaacggatcacagttttgcatctggaccatcgaggcacctgaaggacagaaactgcatttacacttcgagcggcttttgctgcacgacaaggaccggatgaccgttcatagtgggcaaaccaacaaatccgcacttctatacgactcactgcagacagagtccgtgccttttgaggggttgctctctgaaggcaacacgattaggatcgaattcacatcagatcaagcccgagccgcaagcacattcaatatacggtttgaggctttcgagaagggacattgctacgaaccatacatccagaatggaaacttcaccacctctgatccgacctacaatatagggaccattgtggaatttacctgtgaccccggtcattcattggaacaggggcctgcgattattgaatgcataaatgttcgcgatccgtattggaacgataccgagcccctttgtcgggcgatgtgtgggggtgagctttctgccgttgctggtgtggtactgtcgccgaattggccagaaccctacgttgaaggcgaagattgcatatggaagatccatgtcggcgaggaaaagagaatcttcttagatatccagtttctgaatctctcaaattctgacattctcacgatctacgatggagacgaagtgatgccacatatattagggcaatatcttggaaactcgggtccccagaaattatactcatcaactccagacctaaccatccagtttcactctgatcccgctggactaatttttggtaaaggacaggggttcattatgaactacattgaggtaagccggaatgactcctgttccgatctgccagaaatccagaacggctggaaaacaacctctcatacagaactggtccgtggagcccgcatcacctatcagtgcgacccagggtatgatatcgtaggcagtgatacacttacatgccagtgggatctgtcttggagcagcgaccccccattttgtgaaaagataatgtactgcacagaccctggagaggtggatcacagcactaggcttatctctgatcccgttctgttggtggggaccactattcagtacacttgcaacccaggattcgtgctcgagggctcgtccttgctcacgtgttactcacgggaaactggtaccccgatctggacctcaaggctcccccactgcgtccttgcagaggccgcagctgagacatccttggaaggaggcaatatggccctcgccattttcattcccgtgttgatcatctcgctactcctgggcggcgcgtatatctatattacccgctgccggtactattctaacctccgcctgccccttatgtatagtcacccgtatagccagattacagttgaaacagagtttgataaccctatctatgagacaggcgaaacaagagaatatgaagtatctatctag

SEQ ID NO: 133643 - DNA, 2850 bp, synthetic construct
  misc_feature 1..2850: note = Description of Artificial Sequence: Synthetic coding sequence
  source 1..2850: mol_type = other DNA
atgcctgccgccagaccacctgccgcaggcctgcgagggatttcgctgttccttgctcttctcctgggctcccctgctgcagccctcgaaagagatgctttgcctgaaggggatgcctcccctttgggtccgtatctgctgcccagtggggctcccgaacgggggtcccctggaaaggagcaccccgaggaacgggtcgttaccgcccctccaagcagttctcagagtgctgaggtgcttggtgaacttgtactcgacgggaccgccccctcagcacaccacgacataccagctctgtcacccctcctgccagaggaagctcggcctaagcatgccctgcctcccaagaagaaactcccatctttgaaacaggtcaattctgctcgcaaacagcttcgaccgaaagccacatccgctgccacagtccagagagctggatcgcagccagcgtcgcaagggctcgatttactctccagctctaccgagaaacccggcccccccggcgaccctgacccgatagtggcgtccgaagaagccagcgaggtgccattgtggctggataggaaggagagcgccgtccccactacaccggctcctttgcaaatttctcctttcacctcccagccttacgtggctcatacacttccccagagacctgagccaggggagcccggccccgatatggctcaggaagcccctcaggaagacacctcaccaatggctctgatggacaaaggggagaatgaactcaccggctccgcatcagaagaatctcaggagactacgaccagcaccattataacaaccaccgtgattacaacagagcaggcccccgccctgtgttctgtgagtttcagcaatcctgaggggtacatcgatagttcagactatccacttctgcctttgaataacttcttagagtgtacttataacgttaccgtgtatacaggctacggcgtggagctacaggtaaagtcggtcaatctctcagacggtgaactgctctccatccgcggagtagatggtccaaccctgacagtgctggccaatcaaaccttgctcgttgaaggacaagtgatcagatctccaacaaacacaattagcgtctattttagaactttccaagacgatggtcttggcacatttcagttgcactaccaggcctttatgttgagttgtaactttccccgaaggcctgactctggtgatgtaaccgtgatggacctccactctggtggtgttgcacactttcactgccacctggggtacgaactgcaaggggcgaaaatgctgacttgcatcaacgcaagtaagccacactggtcatcccaggagccaatctgtagcgccccatgcggcggggccgtccataatgctacaatcggacgagtactctctcccagctatccggagaacaccaatggatcacagttttgtatctggaccatagaggcacccgaggggcagaaactacatctgcacttcgaaaggttgctgctgcacgataaggatcggatgacagttcactctggacagacgaataagtccgctttattgtatgatagccttcaaactgaaagcgtcccgtttgaagggcttttaagcgagggaaacaccatccggattgagtttacatctgaccaagcccgggcagccagtaccttcaacatcaggttcgaggccttcgagaaagggcactgttacgagccgtatatccagaatgggaacttcaccacatccgatcccacttataatatcggcacaatcgtggagtttacatgtgaccccgggcactcacttgaacagggacctgcaattattgaatgcatcaatgtacgcgatccatactggaatgacacagaaccactctgtcgcgccatgtgcggtggtgagttaagcgctgtggctggggtggtcctcagtcccaattggcccgagccgtacgtggagggggaggattgcatctggaagatacacgtgggagaagaaaaacggatctttctggacatccagttcctgaacctatcgaattccgacatcctcaccatatacgacggtgatgaagtgatgcctcacatccttggccagtatctgggcaattcgggaccccagaagctatacagcagtacgccggacttaacaatccagtttcacagcgatcctgcaggattgatctttggaaaggggcagggatttatcatgaattacatcgaggtgtctaggaatgattcctgttcggatctaccagagattcagaacggatggaaaacaacctcgcacactgagctcgtaaggggggcccgcattacctatcagtgtgaccctgggtatgacatcgttgggtctgacacactcacatgtcagtgggatctcagctggtccagcgatccacctttttgtgagaagaccgaggagtccctagcctgcgataaccctggactgcccgaaaatgggtatcagatcttgtacaagcggctgtacctgcctggagagtctctgacctttatgtgttatgagggcttcgagctgatgggagaagtgacaattcgctgcattcttggccagcccagtcactggaacggaccattgccagtttgcaaggtggcagaagctgccgctgaaacttctctcgaggggggtaacatggctctagccatcttcattcccgtcttgatcatttccctactcttgggaggcgcatacatctacattactcgctgccgctactatagtaatttgaggcttccactcatgtacagccacccctattctcagattaccgttgagaccgagttcgataaccctatctacgagactggggaaactagagaatatgaagtatccatctag

SEQ ID NO: 133644 - DNA, 420 bp, synthetic construct
  misc_feature 1..420: note = Description of Artificial Sequence: Synthetic coding sequence
  source 1..420: mol_type = other DNA
atgtattgcaccgacccaggagaagtggaccacagcacacgactaatcagcgacccagtactacttgttggaaccactatacagtacacttgtaacccaggcttcgtgcttgagggctccagccttctgacttgttactctagagagactggtactcccatctggaccagccgcctgccacactgtgtgtcagaggaatccctggcctgtgataatcccggtctgccagaaaacggttaccagatcttgtacaagcggctgtatttgcccggagagtcgttaactttcatgtgttacgagggcttcgagctaatgggcgaggtgaccattagatgcatactgggacagcccagccactggaatggacctctcccagtgtgcaaggatgtggcaaccatcccaacttcagcttgtctgtag

SEQ ID NO: 133645 - DNA, 3042 bp, synthetic construct
  misc_feature 1..3042: note = Description of Artificial Sequence: Synthetic coding sequence
  source 1..3042: mol_type = other DNA
atgcccgcagcaaggcctcccgcagccggacttagaggcattagtttgtttcttgccctcctactcgggtccccagcagcggcactggagagggatgccctgcctgagggggacgcttcacccctgggaccttatctgctgcctagcggcgcccccgaacgcgggtctcctgggaaagaacatcccgaggaacgggtcgtcacggctccacctagttcatcccagtcagctgaagtgctgggcgagctggtgctggatgggactgccccatcagcacatcatgatatcccggcactctctccactgctgccggaggaagcccgcccaaaacatgccctccctccgaagaagaagctgccatccctcaaacaggtgaattccgcccgaaagcaattgaggccaaaggccacttctgctgccacggtacagagggcaggttcacagcccgcctcccagggattagacctgctgtcctcctctacggagaaacccggaccacccggggacccagacccaatagtggcctctgaggaagcctcagaggttcccctgtggctggatagaaaggagtcagctgtccccacaactccagcccctttacagatatctccatttaccagccagccatacgtggcccatactcttccccaacgcccagaacctggcgagcctggaccggacatggcccaggaggcccctcaggaggacactagccctatggccctgatggataaaggcgagaacgaacttaccggaagcgcatccgaggaatcacaagaaaccaccacctcaacaatcatcacaaccaccgtgattacaaccgagcaggcaccagccctgtgtagtgtcagttttagcaaccccgagggatatattgattcctccgactacccactgctgcctctcaacaactttctggaatgcacatataacgtgacggtttatactggatatggcgttgagttgcaggtcaaatcagtgaacctttcagatggcgaactgttatccatccgtggtgtggatggccccactctaacagttctggccaaccaaacactcctggtggaagggcaggtcatcaggtctcctactaacacgatcagtgtgtacttcaggacattccaagacgatggattgggcactttccaattgcattaccaggctttcatgcttagttgtaactttccaagacgcccagactctggagatgtgacggtgatggatctacatagcggcggtgttgcacacttccattgccatctcggctacgaacttcagggcgccaagatgctcacttgtatcaacgcaagcaagccccactggagtagccaggaaccgatctgttcagcaccttgcggcggcgctgtccacaatgcgacaatcgggagagtattgtcccctagctatccagagaacaccaatggatctcagttttgtatttggactattgaagcgcccgaaggacaaaagctgcatctgcacttcgaaagactcctgctacacgataaggacaggatgactgtgcacagcggtcagacaaataagagcgctctgctgtatgacagtctacaaactgaaagtgtgccgttcgaggggctcttgtcagaagggaacacaataagaattgaatttacgtctgaccaggcccgagctgcgagcacatttaacattcggtttgaggcgttcgagaagggtcactgttacgagccctacattcaaaatggaaactttacaacctccgaccccacctataacatcggaactatagtagaattcacatgcgatcccggacatagcctggagcagggaccagcgattatagagtgcataaacgtgcgggatccttactggaatgatacagagcctctgtgtagagccatgtgcggtggggagctatctgcagtggccggtgtggtgctgtcccccaactggcccgagccatatgtggagggggaggactgtatttggaagatccacgtgggagaggagaagaggatctttctggatatacagtttttaaacttgagcaacagtgatatcctgaccatctacgacggtgatgaggtcatgccacacattctcggccagtatttagggaacagcgggccacagaagctttacagctcgacacctgatttgaccattcagttccactcagaccctgccgggcttatctttggtaaggggcagggatttattatgaactatatcgaagtgtctcgaaacgacagctgtagcgatctgcccgagattcagaatggctggaaaacaaccagtcacacggaactggtgaggggagcaaggattacctaccagtgcgacccagggtatgatattgtgggtagcgatactctgacttgccagtgggacctctcttggagtagcgatcccccattctgtgaaaagatcatgtactgtacagatccaggtgaagtggatcatagtacacggctgataagtgatccagtgttgctcgtcggcacgactattcagtacacctgtaatccaggtttcgtcctggagggcagttcactgttgacctgctacagccgagaaacaggcacccccatctggacttctcggctcccccattgtgtgagcgaagaatccttggcctgtgacaaccctggtctgccagagaacggataccagatcttgtacaaacgcctctacttgccaggagagtcccttacgttcatgtgttacgagggctttgagctgatgggggaggttactatcagatgtatcctggggcaaccatctcattggaacggtcccctaccagtatgcaaggttgctgaggccgccgctgagacgtcactcgagggcggtaacatggccctggctatatttatacccgtgttgatcataagtctgcttctcggcggcgcttacatatacataacacgttgcagatactattccaatttgcggctgcccctgatgtacagtcacccatattctcagatcaccgtggaaaccgagtttgataaccctatttatgaaacaggcgaaacacgagaatatgaggtgagtatctag

SEQ ID NO: 133646 - DNA, 3072 bp, synthetic construct
  misc_feature 1..3072: note = Description of Artificial Sequence: Synthetic coding sequence
  source 1..3072: mol_type = other DNA
atgccggcagcccgccctcccgctgcagggttgcgcggcattagtctgtttctcgcactcctgctggggtccccagccgcagccctcgaaagggatgcactgccagagggggatgcctcaccattgggcccctacctgctaccatctggggcccccgagaggggctctccaggcaaggaacatcctgaggaacgcgtcgttacagctcccccatcgagctcccaatcagccgaggttcttggagagctggtcctagacggcaccgccccttctgcccaccacgacatccccgccctgtcccctctgttgcccgaggaggccagaccaaagcatgccctgcctcccaaaaaaaaactgccatccctgaaacaggtcaatagtgccagaaagcagttgcggcccaaagctacctcggcggccacggtccaacgagcaggttctcagcctgcatctcagggtctggatctgctaagctctagcacagaaaagcccggaccacctggagaccctgaccccattgtggcttctgaggaggctagcgaagttcctttatggctggatcggaaggagtccgcagttcctactacccctgcccccttacagatctcacccttcaccagccagccctacgtggcccacactctgccgcagcgtcctgagcctggcgaaccgggaccagacatggcccaggaggcccctcaagaggacacctcccccatggcactgatggataagggcgaaaatgaacttaccggcagcgccagcgaagaatcgcaggagacaaccacgtctacgattatcacgactaccgtgatcactacggagcaagcgccagctctgtgcagcgtaagctttagcaaccctgaaggatacatcgactcatctgactatccactgttgccgttaaacaacttcctagaatgcacttataacgtaaccgtgtatactggctacggagtggagctgcaggtgaagtccgtaaatttaagcgacggtgagttactgagtatcaggggcgtcgacgggcctaccctcacggtcctggctaatcagaccctccttgtcgaaggacaagttatccggtcccccactaatacgatatctgtttattttaggacgtttcaagatgacgggcttgggacttttcagctgcattaccaggcgttcatgctctcctgcaacttccccagacgccctgatagcggcgacgtgacggttatggatctccattccgggggcgtggcacattttcattgtcatcttgggtacgagttgcagggtgcgaaaatgctgacctgcattaatgcatctaagccacattggtctagccaggaacccatctgctcagccccctgtggtggagcagtacataatgcaacaataggtagagtgctctctcctagctatccagagaataccaacggatcacagttttgcatctggaccattgaagctcccgaaggtcagaagctgcatctgcacttcgaacgtctgctccttcatgacaaggatagaatgaccgtgcactcaggacagacgaataaatcagccctcctgtacgactccctgcaaaccgaaagcgtcccttttgagggtctgctgtctgaaggaaacacaattcgaattgaatttacaagcgaccaggctcgggccgctagtaccttcaatatccggtttgaggccttcgaaaaagggcattgttacgaaccgtatatacagaacggaaattttactacgtcagaccctacttataatataggaacgatcgttgagttcacatgcgatcccggtcactccctcgagcagggtccagccataattgagtgtattaatgtgcgggacccatattggaatgacacagaacccttgtgtcgagccatgtgtggtggagagttgtccgctgtggctggcgtggtcttgagcccgaattggccagagccgtatgtggagggcgaagactgtatctggaagatccacgtaggcgaagagaagagaatattcctggacatccagtttctaaatttaagcaattctgacattctcacaatctacgacggcgatgaggttatgcctcacattctcggacagtatctaggcaattccgggccccagaagttatacagcagcactccagaccttactattcagtttcacagcgaccctgctggtttgatcttcgggaagggacaaggttttataatgaattacatcgaggttagccggaatgattcatgtagcgacctgccagaaatccagaacggttggaagactacttcccacactgagctggttagaggggccaggattacttaccagtgcgatccaggctatgatattgtgggctccgataccctcacatgtcagtgggacttgagctggtcaagcgatccccctttctgcgagaaaatcatgtattgcaccgaccccggagaagtggaccatagtacgaggttgatctctgatccggtgcttttagtgggaaccaccattcagtacacctgtaacccgggtttcgtactcgaagggtccagcctacttacctgctactcacgcgagacggggacacctatttggaccagccggctgccccactgcgtatccgaggagtcactggcgtgtgataatcctggcctgccggagaacgggtaccagatcctttacaagagactttatttgcctggagagtcccttacattcatgtgttacgagggatttgagctcatgggcgaggttaccatacgctgcatactgggacaacccagccattggaatggtcctttacccgtgtgcaaagtcaaccaagactcatttgagcacgctttagaggccgaggccgcggccgagactagcctggagggaggcaatatggctctggcaatctttattcccgtcctaattataagcctcctcctgggcggcgcttatatatacatcacacggtgcaggtattatagcaaccttaggctcccgttgatgtacagccacccttacagccagattacagtcgagactgaatttgacaacccaatctatgaaacaggggaaacgcgcgagtacgaggtatccatctag

SEQ ID NO: 133647 - DNA, 258 bp, synthetic construct
  misc_feature 1..258: note = Description of Artificial Sequence: Synthetic coding sequence
  source 1..258: mol_type = other DNA
gggtttgggaccgatgtcgattatgagaccgccttcatccactacaggctcgcctccgagcagcaacattccgcccaagcaatgtttaatttgggatacatgcatgaaaaaggcctgggcatcaaacaggacattcatctggccaaaagattctacgatatggcggcctctcaacctcggtgcacttctagcagcctgccctcaccactgcagatcggccggcggctcttccttgctgttcacactggtaataaatag

SEQ ID NO: 133648 - DNA, 2385 bp, synthetic construct
  misc_feature 1..2385: note = Description of Artificial Sequence: Synthetic coding sequence
  source 1..2385: mol_type = other DNA
atgagggtgcgcatagggctcactctcttactgtgtgcagtactgctctctctggcatccgcctcctcagacgaggaaggttctcaggacgagagtctcgattcaaaaacaaccctgacctcggatgagagcgtcaaggaccacactacagcaggacgagtggtggctgggcagatcttcctcgacagcgaggagagcgaactcgaaagcagcattcaagaggaggaggacagcctcaaatcacaggagggcgaaagtgtgaccgaagacatcagtttcctagagtcccccaaccctgaaaataaagactatgaagagcccaagaaagtgcgtaagcccgctctgacagcgattgagggaacggcccatggtgagccttgccatttccctttcctgtttctagacaaggagtatgatgaatgtacttctgatggcagggaggacggcagactttggtgtgctactacttacgactataaggcggacgagaagtgggggttctgcgaaaccgaggaggaggccgcaaaaaggcgccaaatgcaagaagccgagatgatgtaccagacggggatgaagatactcaacggaagcaacaaaaaaagccaaaaaagggaagcatatcggtacctccagaaagccgcaagtatgaatcacactaaggccttggaacgggtaagttatgcattgctgttcggcgactatctacctcagaacatccaggcggctagggagatgttcgagaaactcacagaggagggcagtcccaagggtcagaccgccttgggttttttgtacgcctctggcttgggggtgaattctagccaggccaaagccctggtatattacacgtttggcgcacttggaggaaacctgattgcgcatatggtactgggataccggtactgggccggtattggcgttctgcagagttgtgagtctgcgctgactcattacagactggtcgccaaccatgttgcatcagacatctcactgacagggggctctgtggtgcaacggatccgcctgcccgacgaagtggagaaccccgggatgaactctggcatgctggaggaggatctgatacagtattatcaattcttagctgaaaaaggcgacgtgcaggcacaggtggggctggggcaactacatcttcacgggggtagaggcgtggaacagaatcaccaacgggctttcgactatttcaatctggccgcaaatgccggtaatagccatgccatggcctttctgggcaaaatgtacagcgagggatccgatattgtcccccagtccaatgagacagcactccactactttaaaaaggcagctgacatgggcaatccggtcggtcagagcggtctcggcatggcctatctgtatgggcgaggcgtacaggtgaattacgacctggccctgaagtacttccaaaaagccgccgaacaaggctgggtggatggtcaactgcagctgggtagcatgtattataacggaataggagtaaaacgcgattataagcaggccctgaagtatttcaaccttgccagccagggaggtcacattctagcattttacaacctggctcaaatgcacgctagtggcactggagtcatgcgctcttgccacaccgcagttgagttgttcaaaaatgtgtgtgagcgtggacgctggtcagagagactcatgaccgcctataattcctataaagatggcgattataacgccgccgttatccagtatctgctgctggctgagcagggatacgaagtagcccagtctaatgctgcctttattctcgaccagagggaggcgtctattgttggcgagaatgaaacttatcctagagcacttttgcattggaatagggcagcatcccaaggttacacagtggcacggattaaactcggggactaccatttctatggattcggcaccgatgttgattacgaaacagcttttattcattaccggctagcttctgaacagcagcacagtgcacaggctatgtttaatttaggttatatgcatgagaaaggcttgggcatcaaacaggatatacacctggcgaagcggttctacgatatggctgcagaggcttctcctgacgcccaggttcctgtcttcctggccctctgcaagttgggagtcgtatacttcctccagtatatcagggaaactaacattcgggacatgtttacccaattggatatggatcaactgcttggcccagaatgggatctttatctcatgacaataattgctctgctgctgggcacagtgatcgcctaccgccagcggcagcatcaagacatgccagcgccacgacccccagggccccgtccagccccacctcagcaagaaggcccgcccgagcagcagcccccccagtag

SEQ ID NO: 133649 - DNA, 906 bp, synthetic construct
  misc_feature 1..906: note = Description of Artificial Sequence: Synthetic coding sequence
  source 1..906: mol_type = other DNA
atgagagtccgaattggcctcacgttgttgctgtgtgctgtgttactgagcctggccagcgcctcttccgacgaggagggaagtcaggatgaatccttggattcgaagaccaccctgacttccgatgagagtgtgaaggaccacacaaccgcgggacgggtggtcgctggacagatatttttggacagtgaggaatccgagttggaatcaagcatccaggaagaggaagatagcctcaagagtcaggagggcgaaagcgtcaccgaggacatctcctttctggaatccccaaatcctgaaaacaaagactacgaagagccgaagaaagtaaggaagccagccttaactgcgattgagggaaccgcacatggggagccatgccacttccccttcctatttctggacaaggagtacgacgaatgcacttcagacggtcgggaagacggacgtctgtggtgtgccacgacctacgactacaaggcagatgagaagtggggattctgcgagacagaagaagaggccgctaagcgaagacagatgcaggaggccgaaatgatgtatcagacaggaatgaagatcctcaacggatcaaataaaaaatctcagaagcgcgaggcctatagatacctgcaaaaagcagctagcatgaaccatactaaagccttggagagagtctcctatgccctgttatttggtgactacctcccccagaacattcaagctgcccgtgaaatgttcgaaaagcttacagaggaaggtagtccaaaaggccaaacggcattaggtttcttatacgccagtggccttggagtaaactcctctcaggcgaaagccttggtctattacacattcggcgccctgggcgggaatttgatcgcacatatggtcctcgtgtcaagactttag

SEQ ID NO: 133650 - DNA, 2067 bp, synthetic construct
  misc_feature 1..2067: note = Description of Artificial Sequence: Synthetic coding sequence
  source 1..2067: mol_type = other DNA
atgaagcccttatcacttttaatagaaatcctcatcattttgggcgtgacgataaagaccatcaaggctgaagaacacaacaaaaggcagaaggaacgtaatgtgaccacccaggttagtgttaatgagattaaacaatacttgagccacatcctggagcaaagaaccagctcaaatgtcatcaataagagggaaaacctactggagaaaaagaagaaccagaggaaaatccggattaaagggattcagaataaggacatcctgaagagaaacaagaaccacttgcaaaaacaagccgagaaaaattttaccgacgagggagatcagctctttaaaatgggaataaaggtgcttcaacagagcaagagccagaaacagaaggaggaagcatacctcttgttcgctaaggctgccgacatgggcaacctcaaggctatggagaagatggctgatgctctcctgttcgggaacttcggagttcagaacatcacagcggcgattcagctgtacgaatccctggcgaaggaaggttcctgtaaggcgcagaatgcgctggggttcttaagcagttatggcatcggtatggagtacgaccaggcaaaggccttaatttactacacattcggctcggcaggtggtaatatgatgtcacagatgatcctgggctacagatacttatccggtatcaacgtgctgcagaattgtgaggtggcattgtcctactataagaaagtggccgactatatcgctgatacattcgagaaatccgaaggtgtgccagtggaaaaggtccgactgactgaacggccggagaatctctcgtctaactcagagatccttgattgggatatttaccaatattacaagtttctggcagaacggggtgacgtgcagatacaggtcagcctcggtcagctacacctgatcgggcgcaagggcctggaccaggactactataaggcccttcattactttttaaaagctgcaaaggcagggtctgcaaacgcaatggcatttattgggaaaatgtatctggagggcaatgcagcggtaccccagaataacgcaaccgccttcaagtattttagcatggcggcgtcaaaaggcaacgcaattggactccatgggctgggacttctgtacttccacggcaaaggggtccctctcaattatgctgaggccctgaagtatttccagaaggccgctgaaaaaggatggcctgacgcccagtttcagcttggctttatgtactactccgggtctggaatttggaaggactataaattggccttcaaatatttctatttggcctcccaaagtggtcagcctctggctatctattatctggcgaagatgtacgccacaggcactggagtcgtgcggtcgtgcagaactgcagttgagttatataagggggtgtgtgagctgggtcattgggccgagaagtttctaaccgcctatttcgcatacaaggacggcgatatcgatagctctctcgtacagtacgctctgctggctgagatgggctacgaagttgcacagtccaactcagctttcatcttggaatcaaagaaagcaaacatcttggagaaagagaagatgtacccgatggctctgttgctgtggaatcgcgctgcaatccagggaaatgcctttgccagggtgaagatcggagattatcattattacggctacggcacaaaaaaggattatcagactgctgccactcattattccattgctgctaacaagtaccacaatgctcaggcaatgttcaacctggcctacatgtacgagcatggacttggcatcacgaaggacatacacctagctcggcggctgtacgacatggccgcccagacatctcccgacgctcatatcccagtattattcgcagtgatgaaactggaaacaacacacttgctgagggacatcctgttctttaactttactacgaggtggaattggttgaagctcgacaatacaataggcccacactgggatttattcgtcattgggcttatcgtccccgggttgatcctgttgttgagaaaccaccacgggtag

SEQ ID NO: 133651 - DNA, 1728 bp, synthetic construct
  misc_feature 1..1728: note = Description of Artificial Sequence: Synthetic coding sequence
  source 1..1728: mol_type = other DNA
atgaagcccctgagcctgctgatcgaaattttgattattttaggagtcactatcaagactataaaagctgaggagcacaacaaaagacagaaagagcggaacgttaccactcaagtctctgtgaatgaaattaagcaatacctttcacatatacttgaacagaggaccagctccaatgttatcaacaaacgcgagaatctgcttgaaaagaagaagaaccagagaaaaatccggataaagggaatacagaacaaggatatattaaaaagaaataaaaatcaccttcagaaacaagctgaaaaaaactttacagacgagggcgaccagctgtttaagatgggcattaaagtgctgcagcaaagtaaatctcagaaacagaaggaggaggcatacctcctgtttgcaaaggcagcagatatgggaaacctgaaggccatggaaaagatggctgacgctctcctgtttgggaactttggggtgcagaatattacggcggccattcagctgtacgaaagcttggcaaaagagggatcgtgtaaagctcagaatgctctgggattcctcagtagctacggcataggaatggagtacgaccaggctaaggcgctgatctattacactttcggctcggcagggggcaatatgatgtcacagatgatccttggttaccgctacctcagtggaatcaatgtgctgcagaattgcgaagtggcccttagctattacaaaaaagtcgccgactacatcgctgacacattcgagaaatcagagggcgtgcccgtggaaaaggttagactgacggagcgccccgagaacctgtcaagcaacagtgagatactagattgggacatctaccaatactataagttcctagcggaacggggtgacgtccagatacaggtgagtttgggacagctgcatttaatcgggaggaaaggtctggatcaggactattacaaggccctgcactattttctgaaggccgctaaagctggcagcgccaatgccatggctttcatagggaagatgtacttagagggcaatgccgcagtcccccagaacaacgcaacggcctttaagtacttctctatggcggccagcaaaggaaacgccatagggctgcatggactgggcctgctgtatttccacggcaagggagtacctctgaattatgcggaagccctcaagtactttcagaaggcagccgagaaagggtggccagacgcccagttccaactcggttttatgtattactccggaagtggaatttggaaagactataaactagcctttaagtatttttatctggctagtcagtcggggcagcccctagccatctactacttggcgaaaatgtacgccaccggaactggggtggttcggtcctgtaggactgcagtggagaagaggctcacatttttaaaaaagcgtaggtgtattcagtggcggtttagctacggcatcgaactccccttcaaggacatccatctggctcggagactgtacgacatggcagctcagaccagccccgacgcccacattcctgtcctgttcgcagtgatgaagctggagacaacccatctgctgcgggacatcctttttttcaactttacaacacgatggaactggctaaaactggataatacaataggcccacactgggacctgttcgtgatcggattaatcgttccaggcttgattctgctgctacggaatcaccatggatag

SEQ ID NO: 133652 - DNA, 1833 bp, synthetic construct
  misc_feature 1..1833: note = Description of Artificial Sequence: Synthetic coding sequence
  source 1..1833: mol_type = other DNA
atgattgcaagccagttcctgtcagcgttgaccttagtgttgctgattaaagagtcaggcgcctggagctataatactagcacagaggcaatgacctacgatgaggcctccgcctattgccagcagcggtacacccatcttgtcgccatacagaataaggaagagattgagtacctgaactcaattttgtcatattctccctcatactactggatcggaatccggaaggtgaataacgtgtgggtgtgggtggggacacagaaacccctgacagaggaggccaaaaactgggctccgggggagccgaacaatagacagaaggacgaggattgcgtggaaatctacattaaaagagagaaagacgtcgggatgtggaatgatgaacgatgctctaaaaagaagttagcgctgtgctacaccgctgcatgtacaaacacaagctgctctggtcatggggagtgtgtcgagacaatcaacaattacacatgcaagtgcgatccaggtttttcaggtctgaagtgcgaacaaattgtgaattgtacagcgcttgaaagtcccgagcatggatccctggtctgcagtcaccccctgggcaatttctcgtataacagttcctgtagcatcagctgtgatcgaggctatctcccgagtagtatggagacaatgcagtgtatgtccagcggagagtggagcgcccccattcccgcttgcaatgtggtggagtgtgatgcagtgactaatcccgctaacggattcgtggagtgttttcagaatccaggcagcttcccctggaacacaacatgcacatttgactgtgaagaaggcttcgaactgatgggcgctcagtccctccagtgcacatctagcgggaactgggataatgagaagcccacctgcaaagccgtcacttgtcgcgcagtgagacagccccagaacggttctgttcgatgcagccattcaccagcaggagaatttacattcaaaagttcctgcaatttcacttgtgaagaggggtttatgcttcagggccccgcccaggtcgagtgcactacccaaggacaatggactcagcagatccctgtgtgcgaagcttttcagtgcacggccctgtctaacccagagagggggtacatgaactgcctgccttccgcaagcggtagttttcgatacggatcatcgtgtgaattctcttgcgaacagggtttcgtcctcaaaggttctaagcgcctgcagtgtgggccaaccggagagtgggacaatgagaaaccgacctgtgaggctgtccgatgtgatgcagtacatcagcctcctaaaggactggtgaggtgtgctcatagcccaataggcgagtttacatataagtcctcgtgcgccttctcatgcgaggagggtttcgagttacacggatccacacaacttgagtgtacgtcccaaggccaatggacagaagaagttccaagctgtcaggtggtaaagtgctctagtctggcagtgcctggaaagatcaacatgagctgcagcggggagccggtgtttgggacagtgtgtaagtttgcctgtcccgagggatggacattaaacggctccgccgctcggacctgcggggcaacgggccactggagtgggctcctgcccacctgcgaagcaccaacggagtccaatatcccgctggttgctggtctttcagcggctggactgtccctgctcaccttggcacctttcctgctgtggctgcggaaatgtctccgaaaagccaaaaagttcgtccccgcttccagttgtcagtccctggagagcgacggatcctaccaaaagccttcctatattctttag

SEQ ID NO: 133653 - DNA, 1455 bp, synthetic construct
  misc_feature 1..1455: note = Description of Artificial Sequence: Synthetic coding sequence
  source 1..1455: mol_type = other DNA
atgatagccagccaatttctgagtgccctgaccttggtacttctcatcaaggagtctggagcatggagttataacacttccaccgaggccatgacctatgacgaagctagtgcgtattgccaacagcgatacacgcacctcgtagccatacagaacaaggaggaaatagaatacctcaactcaatcctgtcttattcaccatcttattactggataggcatccggaaggtcaataatgtctgggtttgggtgggaacgcagaagccgctgaccgaggaggcaaagaattgggcccccggcgaacccaataacagacagaaagatgaggactgtgttgagatttatatcaagcgggagaaagacgttggaatgtggaatgacgagcgctgcagcaagaaaaagctggcgttatgttataccgctgcatgtactaacacctcctgctctggacacggggagtgcgtggaaaccatcaacaattacacatgcaagtgcgacccgggtttttccggtcttaagtgcgaacagatagtgaactgtactgcgctggaatcccccgagcatgggagcctggtgtgtagccaccctttaggcaacttctcttataactcatcctgttccatatcctgcgatcgcggttacttgccaagtagcatggaaaccatgcagtgcatgagtagcggagagtggtccgcccctattccggcctgtaatgtggtggagtgcgatgccgtgactaacccagctaacggctttgtggagtgtttccaaaatcctggttcctttccctggaacaccacatgcacgtttgattgcgaggaggggttcgagttgatgggcgctcaaagtctgcaatgtacatcatccggcaattgggataatgagaagcccacctgcaaagctgtaacatgtagggctgtgcgacagccacaaaatgggagcgtaaggtgttctcatagtccagctggagagtttactttcaaaagcagctgtaatttcacatgcgaagaaggattcatgctccagggtccagctcaggtggagtgcacgacccaggggcagtggacgcagcaaattcctgtctgcgaggtggtcaaatgttccagcttagcagtcccagggaaaataaatatgagttgttcaggagagccagtctttggcactgtctgcaagttcgcctgtccagagggatggaccctgaatggaagcgcagctcggacttgcggtgccacagggcactggagcgggctactccctacgtgtgaagcccctacagagagtaatatccccttggtcgcgggcctatccgccgccggcctatccctgcttactctggcacccttcctgctgtggctgcggaagtgtctgagaaaggctaagaagttcgttcctgcatctagttgtcagtcactggaatccgatggttcttaccagaagccgagttatatcctttag

SEQ ID NO: 133654 - DNA, 1458 bp, synthetic construct
  misc_feature 1..1458: note = Description of Artificial Sequence: Synthetic coding sequence
  source 1..1458: mol_type = other DNA
atgatagccagccaatttctgtctgcactgactttggtgctgcttataaaggagagtggggcgtggtcttacaacacaagcacagaggcaatgacctatgacgaggcctccgcctactgccaacagcgatacactcatcttgttgcaattcaaaataaggaagaaattgaatatcttaatagcattctctcttacagcccgtcttattattggatcggcatccgaaaagtgaataacgtgtgggtgtgggtcggcactcagaaacccctgacagaagaggcaaaaaattgggctcctggcgagccaaataatcggcagaaagatgaagactgcgtggagatatatatcaaaagagagaaagacgtcggcatgtggaacgatgagcgatgcagcaaaaagaaattggcgctatgctacaccgctgcctgtacgaatacgtcgtgctccggccacggcgagtgtgtcgaaaccattaataactacacctgcaaatgcgacccgggctttagcggcttgaaatgcgagcagatggtagaatgtgacgctgtcaccaacccggccaacggcttcgtagagtgttttcaaaatccgggatcatttccgtggaatacgacctgcacatttgattgtgaggaaggctttgagcttatgggcgctcaatcgctccagtgcacgagttccggtaactgggacaacgagaaacccacatgcaaagcagtcacatgccgtgctgtccggcaaccccagaacgggtcagtgcgttgtagtcactctcccgccggcgaatttactttcaaatcatcttgcaatttcacttgtgaggaaggctttatgcttcagggcccagcccaggtggaatgtacaacccaaggacaatggacccaacagattccagtctgcgaggccgtccggtgtgacgccgtgcatcagcccccaaagggtctcgtgaggtgcgcacacagcccaataggtgagttcacttataagtcatcctgcgctttcagttgcgaagaaggattcgaactacacggcagtacacagctggagtgcactagtcaggggcagtggacagaagaggtcccctcatgccaagtcgtgaaatgttcctcactcgccgtgccaggcaaaattaatatgtcatgctcaggcgaacccgtgttcggtaccgtgtgcaaatttgcttgtcctgaaggatggaccctgaatgggtccgccgcccgcacgtgtggcgccacaggacattggagcgggctgttgccaacctgcgaggccccaacagagagtaatatccccctggtagcaggcctgtcagccgccgggctgtccctgctcaccctagctccattcctcctctggttgaggaagtgtctcagaaaggctaagaagtttgtgccggcctcatcctgccagagtcttgagtcagacggctcttatcagaagccatcatacattctttag

SEQ ID NO: 133655 - DNA, 1644 bp, synthetic construct
  misc_feature 1..1644: note = Description of Artificial Sequence: Synthetic coding sequence
  source 1..1644: mol_type = other DNA
atgatcgcatctcagtttctgagcgcgctgactcttgtgctgctgataaaggagtccggggcgtggagctacaatacatcaacagaggccatgacttacgatgaggcgtctgcgtattgtcaacagagatatacacacctcgtcgctatccagaataaagaggagatcgagtatctgaattctattctgtcctatagtcctagctactattggattggaattcgaaaggtcaacaatgtgtgggtatgggttggaacacagaagccgctgactgaggaagctaaaaactgggcccctggcgagcccaataatcggcagaaagacgaggactgcgtggaaatctatatcaagcgcgagaaagatgtcggcatgtggaacgatgagagatgctctaagaagaagctcgccctgtgctacacagctgcctgcaccaatacctcctgtagtggccacggagagtgcgttgaaaccattaacaactatacttgcaaatgcgatcctggcttcagtgggctgaaatgtgaacagatagtgaattgtacagctctagagtccccggagcacggaagtctggtgtgctcccaccctctcggcaacttttcttataattcttcttgcagcatcagctgtgaccgtgggtatcttccctcaagtatggaaacaatgcagtgcatgtccagtggggaatggagcgcacctatccctgcctgcaatgtggtggagtgtgacgccgtgacaaaccccgctaatggattcgtggagtgtttccaaaatccagggagcttcccctggaacactacctgtacgttcgactgcgaggaaggtttcgagcttatgggcgcccagtcacttcaatgcacttcctctggcaactgggacaacgagaagcctacatgtaaagccgtgacttgcagagccgtgcgccagccacaaaacggtagtgtgaggtgctctcacagccctgccggtgagtttacctttaagtcatcttgtaactttacatgcgaggagggtttcatgctgcaagggccagcacaggtagagtgcactacacagggccagtggacgcaacaaattcccgtgtgtgaggcagtgcggtgcgatgccgtccaccagccaccgaaaggattagtacggtgcgcgcactcacctatcggagagtttacgtacaagagttcatgtgccttttcctgtgaggaaggctttgagcttcatgggtcaacacagttggaatgcacctctcagggtcagtggaccgaagaagtgccctcctgccaggttgtcaagtgcagcagcctcgctgtgcccggaaagatcaatatgtcttgttcaggggaaccagtctttggcactgtttgcaagtttgcctgtccagagggatggacacttaacgggtcagctgcgcggacttgtggcgcaacgggtcattggtcgggacttcttccgacctgtgaggcccctacagagtccaacatcccactcgtggcgggacttagtgccgccggcctatcactgctcacccttgcccccttcctcttgtggttacgcaagtgcttgcgcaaagccaaaaaattcgtgcctgccagctcttgtcagtcactggagtcagatggtagttatcagaaaccaagctacatactgtag

SEQ ID NO: 133656 - DNA, 1644 bp, synthetic construct
  misc_feature 1..1644: note = Description of Artificial Sequence: Synthetic coding sequence
  source 1..1644: mol_type = other DNA
atgattgccagccagtttctgtctgcgttgaccctggttctgctcatcaaagagagcggagcctggtcctataatacctctacggaagcgatgacatatgacgaagcttccgcctattgtcagcaacgctacacacacctcgttgcgatccagaacaaagaggaaatcgagtatctgaactccatccttagttatagccccagttattattggattggtatacgaaaggtcaacaacgtgtgggtgtgggtagggacccagaaaccactaactgaggaggcaaaaaactgggcgcccggcgagcccaacaaccggcagaaagatgaggattgtgtcgaaatctatataaagcgtgaaaaggatgtcgggatgtggaatgatgagcgctgcagtaagaaaaagctcgctttatgctacaccgcagcttgcacaaatacgagttgcagcgggcacggtgaatgcgtagagaccatcaacaactacacatgtaagtgcgaccccgggttttctggccttaagtgcgaacaaatagtaaactgcactgcattagagtccccagagcatggaagtcttgtgtgttctcatccattaggtaattttagctataattcaagttgctccattagttgcgataggggctatctgcctagctctatggagaccatgcagtgtatgtctagcggcgagtggtcggcccccatcccggcgtgcaacgtggtggagtgtgacgccgtgactaaccccgctaatggatttgtggaatgcttccagaatcccgggagcttcccctggaataccacttgcaccttcgactgcgaggagggattcgagctgatgggcgcacagagcttacagtgtacatcaagcggcaactgggataacgagaagccaacatgtaaggcagtgacatgcagagctgtgaggcagccccagaatggctccgtgaggtgttcccatagcccagccggagagttcacctttaagtcatcgtgcaacttcacgtgtgaagaaggcttcatgctgcagggcccggctcaggtcgaatgcaccacacaagggcaatggacccaacagattcccgtgtgtgaggcattccagtgtacggcgctcagcaaccctgagagggggtacatgaattgtctgcctagtgcctccggatcctttcgatatgggtccagttgcgagttctcttgcgagcaggggttcgtgcttaagggctcaaagaggctgcagtgtggcccaacaggtgagtgggacaatgagaaaccgacttgcgaagtagtaaagtgcagctcattggccgtgcccggcaagataaatatgagctgctcaggggagccggtgtttggtactgtttgcaagtttgcatgtcctgaaggatggaccctgaacgggagcgctgctaggacctgcggcgccactggacattggtcagggctcctgccaacatgcgaagctcccaccgaaagcaacatcccactcgtggcaggcctctccgcagctggactgtccctgctaacactcgctcccttcctgttgtggctgagaaagtgcttgcgaaaagctaagaaattcgtgcctgcttcatcatgtcagtccctggagagcgatggaagctaccaaaagccatcttacattctctag

SEQ ID NO: 133657 - DNA, 1455 bp, synthetic construct
  misc_feature 1..1455: note = Description of Artificial Sequence: Synthetic coding sequence
  source 1..1455: mol_type = other DNA
atgatcgcatctcaattcctgtccgcattaacgctcgtcctcctgattaaagagagcggcgcctggtcttataacaccagcactgaagccatgacatacgacgaggccagcgcatactgtcagcaacggtacacccaccttgttgccatccagaacaaagaggaaattgaatatttgaattccattctgagctactctcctagctactactggattggcatcagaaaggtgaataatgtgtgggtatgggtgggtacacaaaaaccattaacggaggaagctaagaactgggcccccggagagccgaacaaccgccagaaagatgaggattgtgtcgagatatatattaagcgcgaaaaggatgtgggtatgtggaacgacgagcgatgttccaagaaaaaactggctctgtgttacactgcagcctgtacaaatactagctgctccggccatggcgagtgtgtagagactatcaataactacacctgtaaatgcgatcccggctttagtgggctcaaatgtgaacagatagtgaattgcaccgcactggaatcacctgaacacggaagcctggtgtgctcccatcctctcggcaatttctcttataactccagctgctcaattagttgtgaccgggggtatctcccctcatccatggaaacaatgcagtgtatgtcctcaggagaatggtccgcacccatacccgcgtgtaacgtggtggaatgcgacgcagtcaccaatcccgcgaatggcttcgtagagtgtttccaaaaccctggtagctttccatggaacacaacttgcacttttgattgtgaagaggggttcgaactcatgggcgctcagagcctgcaatgtacaagttctgggaattgggacaatgagaagccaacttgcaaagcagtaacttgtagagcagtgaggcaaccgcaaaacggcagcgtaagatgtagtcactcccccgcgggggagtttacatttaagtcatcttgtaactttacttgtgaggaaggtttcatgcttcaaggtccggctcaagttgaatgcaccactcagggccagtggactcaacagatcccggtgtgcgaagtggttaagtgcagctcattagccgttcccggtaaaatcaacatgtcttgctctggcgagcccgtttttggtacggtttgtaagtttgcctgccccgaaggttggaccctgaatgggtccgccgccaggacctgtggggcaactggccactggagcgggttgctccctacatgtgaggcacccactgagagtaatatacccctggtggccgggcttagcgctgccggcctgtcccttctaacactggcgccatttttgctctggttacggaaatgcctgcgtaaagcaaaaaaatttgtgccggcgtccagctgtcaaagcctggaaagtgacggttcttaccagaagccatcgtacattttgtag

SEQ ID NO: 133658 - DNA, 1458 bp, synthetic construct
  misc_feature 1..1458: note = Description of Artificial Sequence: Synthetic coding sequence
  source 1..1458: mol_type = other DNA
atgatcgcctctcagttcttatcagctctgacactggtgctgttgataaaagaatcaggagcctggtcctataatacttcgaccgaggcgatgacctacgacgaagccagtgcatattgccagcagcggtacacacacctcgtcgccatccagaataaagaagagattgagtacttgaattcaattctctcttatagcccaagctactactggattggaatccgcaaggtgaacaacgtttgggtctgggtcgggacacagaagcccctgacagaggaggcgaaaaattgggctcccggcgaacccaacaaccgccagaaagatgaggattgcgtggagatctatataaaacgcgaaaaggacgtaggtatgtggaacgacgagcggtgtagtaaaaaaaagctcgccctttgctacacggccgcgtgcacaaatacatcctgcagcggacacggagaatgtgtggaaacgataaataactacacttgcaagtgcgatcctggcttcagcggcttgaaatgcgaacagatggtggaatgtgatgcggtcacaaacccagccaacgggttcgtggagtgtttccagaaccccgggtccttcccatggaataccacttgcacatttgattgcgaagaggggttcgagctcatgggtgctcagtcactacaatgtacaagctctggcaactgggacaacgaaaagcctacctgtaaagctgtgacatgtcgggcagttcgacagccccagaacgggtccgtgcgatgcagtcactctccagctggggaatttacattcaagagctcttgcaactttacctgtgaggaggggtttatgttgcaagggccggcacaggtcgaatgtaccacgcagggccagtggacccagcagatacccgtgtgcgaggccgttcgctgcgatgccgtccatcagcctcctaagggtctcgtgagatgcgcccacagccctatcggtgaatttacatacaaaagctcgtgtgctttttcctgcgaggaaggtttcgagctgcacggcagcactcaattagagtgtacttctcaggggcagtggactgaagaggtgccaagctgccaggtcgtaaaatgtagttccctcgccgtgcccggaaaaatcaacatgtcttgtagcggcgagcccgtttttgggaccgtctgcaaatttgcctgcccagagggatggaccttaaatggaagtgccgcaaggacttgtggtgccacagggcattggagtggactacttccaacatgtgaggcccccacagaatccaacatacccctcgtggcgggcttgtcggcggcaggcttgtcgctgctaacattggcaccattcctgctgtggctgcggaagtgcctccgtaaggccaaaaaatttgttcctgcctcaagctgtcagtcactggaatctgacggcagctaccagaagccttcatatattctttag

SEQ ID NO: 133659 - DNA, 1644 bp, synthetic construct
  misc_feature 1..1644: note = Description of Artificial Sequence: Synthetic coding sequence
  source 1..1644: mol_type = other DNA
atgatagcctctcaatttctgagcgctctaacactcgtccttttaattaaggagtccggagcttggagttataataccagcactgaagccatgacctacgatgaggcttccgcctactgccagcagcgttatacccatcttgtggctatccagaacaaagaagaaatcgaatacctcaattccattctctcttatagccccagctactattggatcgggatcagaaaagtcaataatgtctgggtgtgggttggcacacagaaaccactgacagaggaggctaagaattgggcacctggcgaacctaacaacagacagaaggacgaggattgcgtcgagatctacataaaacgtgaaaaggacgttggcatgtggaatgatgagagatgtagcaaaaaaaagctggcactgtgttacactgctgcctgcactaacaccagttgttcgggacacggggagtgcgtcgagaccatcaacaactatacatgtaagtgcgatccggggttcagcggtctgaaatgtgaacagatcgtgaactgcacagcccttgagtcccctgagcacggaagtctagtgtgcagccacccactgggcaacttctcctataattccagttgttcaatctcttgcgatagggggtacctgccatcaagtatggagacgatgcaatgtatgagttcaggtgaatggtctgctcctatccctgcttgtaatgtggttgaatgcgatgctgtgactaatcctgcaaacgggttcgtggagtgcttccagaatcccggttccttcccatggaataccacttgtactttcgattgtgaagaaggattcgagctgatgggagctcaatccctgcaatgtacgtccagtgggaattgggataacgagaagccgacatgcaaggcagtgacatgccgcgctgtacgtcagcctcagaatggaagtgtaagatgctcccacagccctgctggagagttcacattcaagagcagttgcaacttcacttgtgaggagggtttcatgctgcagggacctgcccaagtcgagtgcacaacacaaggccaatggacccagcagattccagtatgtgaggccgttagatgcgacgccgtacatcagcctccgaaaggactggttcggtgcgcgcacagcccgatcggagaattcacatacaaatcttcatgtgccttttcttgtgaggaaggctttgaactgcatggcagtactcaactggaatgcaccagtcagggacagtggacggaggaagtgccatcatgtcaggtggtaaaatgcagctcattagcagtccctggtaagattaatatgtcttgttctggagagcctgtgttcggtactgtgtgcaagttcgcctgcccagaaggttggaccctgaatggcagcgcagccaggacgtgtggagccaccgggcactggtccggactgcttcccacttgcgaagcccctactgagtctaacattcccctggttgcaggtctttcagctgcaggtctctcactgctgacactagccccatttttactttggctccggaaatgcctaagaaaagccaagaagtttgtgcccgcctcttcatgccagtcacttgagtccgacggcagttaccagaagccaagttacattttgtag

SEQ ID NO: 133660 - DNA, 1644 bp, synthetic construct
  misc_feature 1..1644: note = Description of Artificial Sequence: Synthetic coding sequence
  source 1..1644: mol_type = other DNA
atgattgctagccagtttctatccgctctgaccttagtgctccttattaaagagtcgggagcctggtcatacaatacctctactgaggctatgacgtatgatgaggcctcggcctactgtcagcaacggtacactcatctggtcgccatccagaacaaagaagaaattgaatacttgaatagcatcctgtcatatagcccttcttactattggatagggatacgtaaggtgaacaatgtttgggtgtgggtggggacccaaaaaccactcactgaggaagccaagaactgggctccaggagaacccaacaatcgtcagaaagacgaggactgtgtggaaatttacatcaagagggagaaagatgtggggatgtggaacgatgagcggtgcagcaagaagaaactggctctctgttatactgctgcatgcactaacacgagctgcagcggtcatggcgaatgcgtggagaccataaataactatacctgcaaatgtgacccagggttttctgggctgaaatgcgagcagatcgtgaattgtacagctctcgagtcccccgagcacggttccttggtgtgtagccatccactggggaacttctcctacaacagctcttgcagtatcagttgcgaccggggctatctgccttcatcaatggagaccatgcaatgcatgtccagtggcgaatggtctgcaccgatacccgcctgtaatgttgtcgagtgtgacgccgtaactaaccccgcaaatggattcgtggagtgctttcagaacccggggagcttcccctggaacaccacgtgcactttcgactgcgaagaaggattcgagctcatgggcgcccagagcctgcagtgcaccagtagcggtaactgggataatgaaaaaccaacttgcaaggcagttacgtgccgcgcggttaggcagcctcagaatggctctgtgcgctgctctcatagcccagccggcgaattcactttcaagtcgtcttgcaactttacatgcgaggagggtttcatgctccaggggccggcccaggtggagtgcaccacgcagggtcaatggacccagcaaatccccgtatgcgaggccttccaatgcactgctctgagcaatccagagagaggctatatgaactgccttcccagcgcctcaggtagcttccggtacgggagctcctgtgagttcagctgtgagcagggattcgtgctgaagggtagcaagcggttacagtgtgggcctaccggagagtgggacaatgagaagccaacctgtgaggttgtgaagtgcagctccttggcagtccccggaaagattaacatgagttgcagcggcgagccagtgtttgggacggtctgcaagtttgcatgccccgagggctggaccctcaacggtagcgccgccaggacatgcggtgccaccggccactggtctgggttgcttcctacatgcgaagcacccacggaaagcaacattccattagttgccggtctttccgcggcagggttgtctctgcttaccctggccccgttccttctgtggctaagaaaatgcctgcggaaagctaaaaagtttgtgccagcctcttcttgccaaagcctggagagcgatgggtcctaccaaaagcctagttacattttgtag

SEQ ID NO: 133661 - DNA, 1158 bp, synthetic construct
  misc_feature 1..1158: note = Description of Artificial Sequence: Synthetic coding sequence
  source 1..1158: mol_type = other DNA
atgggttgtaggcgcacgcgggagggcccttcaaaggctatgatctttccatggaaatgtcagtcaacacagagagatctgtggaacatttttaagctatgggggtggacaatgctctgttgcgactttcttgctcaccacggcaccgactgctggacttatcattattccgagaagcccatgaactggcaacgggcgaggaggttctgccgtgataactacaccgacttggtagctatccaaaacaaggctgagattgaatatttggagaaaaccctcccattttccagatcttactactggattggcatcaggaaaatcggtggcatttggacttgggtcgggaccaataaatccctcaccgaagaagcagagaattggggtgatggcgagcctaacaacaaaaagaacaaggaggattgcgtcgagatctacattaaacgtaacaaggacgcaggcaagtggaatgacgacgcttgtcataagttaaaagcagctctgtgctacactgcaagttgccagccttggtcttgtagcggacacggcgagtgcgtggagataatcaacaactatacttgcaattgtgacgttggctattatggaccccaatgtcaattcgtcattcagtgtgaacctctggaggcccctgagctggggactatggactgtactcatcctctgggaaatttttctttcagctcacagtgtgcattctcatgctcggagggaaccaatctaacaggtatcgaggagaccacctgtggcccgttcggtaattggtcttccccagagcctacctgccaggtcatccagtgtgagcctctgtctgcaccagaccttggaataatgaactgcagccaccccttggcgtcattttcctttacttctgcatgtacattcatctgctctgagggcactgagctgattgggaaaaagaagacaatttgtgagtcaagcggtatctggagcaatccaagccctatatgtcagaagctggacaagagcttctctatgattaaggaaggagattacaaccctttgtttattcctgtggcagtgatggttactgctttctccggactggcgtttatcatctggctggccaggaggctcaagaaaggtaaaaagtctaaacggtccatgaatgatccttattag

SEQ ID NO: 133662 - DNA, 2493 bp, synthetic construct
  misc_feature 1..2493: note = Description of Artificial Sequence: Synthetic coding sequence
  source 1..2493: mol_type = other DNA
atggctaactgccagatcgctattctgtaccagcgcttccagcgggtcgtttttgggattagccagctcctatgttttagcgccctgatttcggagctgaccaatcagaaggaggtcgctgcatggacgtaccactacagcacaaaagcctactcctggaatattagccgcaagtactgccagaacagatacaccgacctcgttgctatccaaaacaaaaatgaaatcgactatcttaacaaagtgcttccctattattcatcttattactggatcgggattcgaaaaaacaacaagacatggacatgggtgggcacgaagaaagcactgacaaacgaggcggaaaattgggcagataacgagcctaataacaagagaaataatgaggattgcgttgagatctatattaaaagtccatcggcccctggcaaatggaatgacgagcactgtcttaagaaaaaacatgccctgtgctacaccgccagctgccaagacatgagctgcagcaaacagggtgagtgccttgaaaccattgggaactatacgtgctcatgttatcctggattttatggccctgaatgtgaatacgtccgggagtgtggggagcttgagctgcctcaacacgttttgatgaattgctcccaccccctcggcaacttctccttcaacagccagtgttctttccactgcacagacggttaccaggtgaatggtcccagtaaattagagtgtctggcttctggaatctggacaaacaagcctccccagtgcttggcagctcagtgtccacccctcaagattcccgaacggggcaatatgacctgcctgcacagcgccaaggcctttcagcatcagtctagctgtagcttttcctgcgaagaagggtttgcattggtcggcccagaggtagtgcagtgtaccgccagcggtgtttggacagctcctgcgccagtctgtaaggctgtgcagtgccagcatctcgaagcccccagtgaaggaaccatggattgcgtccaccctctgaccgcgttcgcctatggctcgagctgcaagttcgagtgccagccgggctacagagtgagagggcttgatatgctccgatgcatcgactcagggcactggagcgccccactacccacctgcgaggctattagctgcgagcctctggagagtccagtccacggctctatggactgtagccccagtctgcgggcattccagtacgatactaattgcagttttagatgtgccgaaggttttatgctgcgcggtgctgacattgtgcgatgtgataatctgggccagtggactgccccagccccagtgtgccaagcgctccagtgccaggatctgccagtgccaaacgaggcacgggttaactgttctcacccctttggggcattcagataccagtccgtttgttcctttacttgcaacgaggggctgctcctggttggtgccagcgtcctacaatgtctggcaactggaaactggaactccgttccccctgagtgccaggccatcccctgcaccccgctcctgagtccccagaacggaactatgacatgcgtgcaaccactcggcagctctagttacaagtccacgtgtcagtttatttgtgacgaaggctattctttgtctggcccggagagactagattgtacaaggtctgggcggtggacagattcacctcccatgtgcgaagctatcaagtgtcctgaactctttgctccagaacaggggtcactcgactgttccgacaccaggggagaattcaatgtgggctccacttgccactttagttgcgacaacgggttcaaattggagggcccaaacaatgtagagtgcaccacaagcggccgatggtctgccaccccgccgacctgtaagggaatagcaagtctccccacccctggtgtgcaatgccccgccctgactacacctggccaaggaacaatgtattgtcgtcaccacccaggtacattcggtttcaatacgacttgttactttggatgtaacgccggtttcacacttatcggcgacagcacactctcctgcagaccaagtggtcagtggacagcggtgactccagcctgtcgggcagtcaagtgttctgagctgcacgtcaataaaccaattgccatgaactgcagcaacttgtggggaaacttcagctacggctcaatctgtagtttccactgtctggaagggcaactcctgaacggctcagctcaaacagcatgccaggagaatgggcactggagtactaccgtgcctacttgccaggctgggcccctaaccatccaggaggccctgacgtacttcggcggtgccgtggcctccactatagggctcattatggggggcaccctgctggccctgctcagaaaacgttttcgacagaaggatgacggtaagtgtccactcaatccccactctcatctgggtacctacggagtgttcacaaacgccgcattcgatccctccccttag

SEQ ID NO: 133663 - DNA, 2307 bp, synthetic construct
  misc_feature 1..2307: note = Description of Artificial Sequence: Synthetic coding sequence
  source 1..2307: mol_type = other DNA
atggcgaactgccagattgccatcctgtatcaacgttttcaaagggtggttttcggaatcagccagctgctgtgtttctctgccctcatcagcgagctgacaaaccagaaagaagttgctgcttggacttaccactactctacgaaagcatactcttggaatatcagtagaaaatactgccaaaaccgttatacagacttggtagccatccagaataagaatgaaatcgattacctgaataaagttctaccatactacagttcatactattggatcgggattagaaagaacaacaaaacctggacttgggttggaaccaagaaggctttaacaaatgaagccgaaaactgggccgacaatgaacctaacaacaagagaaataacgaagactgcgtcgagatttacattaaatccccctccgcgccaggcaagtggaatgatgagcattgcctgaaaaaaaagcacgccctgtgctatacggccagttgccaagacatgtcttgtagcaagcagggagaatgtctggagacaataggaaattatacatgctcttgttacccaggtttctatggccccgagtgcgagtatgtccgcgaatgcggagagctagagctgccccagcacgtgctgatgaactgtagccacccccttggcaacttttcttttaacagccaatgctctttccactgcactgacggctaccaagttaacggtcctagcaagcttgaatgcctggcctccgggatttggactaacaaaccgcctcaatgcctggctgcccagtgtcctccactgaagatccccgagcggggcaatatgacatgcctgcacagcgcgaaggccttccagcaccagtccagttgctcattttcctgtgaggagggtttcgccctcgtcggtcccgaggtagtgcagtgtacagcgagcggagtgtggacagctcccgcaccggtatgcaaagcgatcagctgtgagcccctggagtctcccgtccacggaagcatggattgcagcccatccctccgggctttccaatacgacacaaattgttccttccgatgcgctgaagggttcatgctgagaggcgcagatattgtcagatgcgacaacctcggtcagtggacagcccccgctcctgtgtgccaggctctgcagtgtcaggacttacctgtccctaacgaggcccgcgtgaattgctcccaccctttcggcgccttccgctaccaatctgtgtgttccttcacctgtaacgagggacttctactcgtcggggcttcagtccttcagtgccttgcgaccggcaattggaacagcgtcccaccggaatgccaggcaattccctgcactccactcctaagtcctcagaatggcaccatgacatgcgtgcagcctctgggaagctcctcttacaaatcaacctgtcaattcatctgcgatgagggatatagtttgagcgggcccgagagattggattgtacacgctcaggaagatggacagacagtccccctatgtgcgaggcaatcaagtgtcccgagctcttcgccccagagcaaggatcgctggattgttcggatacaaggggtgaatttaatgtgggcagcacatgtcatttcagctgcgacaatgggtttaaacttgagggacccaacaatgtcgaatgtactacctcaggtaggtggtcggctaccccccctacctgcaagggaatcgcctctctgccaactccaggggtgcagtgtccagcactgaccacgccaggacaaggtacaatgtactgtaggcaccacccaggcacatttggctttaacactacttgttactttggctgcaatgccggcttcaccctcatcggagactcaacactgtcctgccgcccttccggacagtggaccgcggtcacccccgcttgccgagcagtcaagtgttccgaactgcacgtcaataaaccaattgcaatgaactgttcgaatctttgggggaacttcagctatggctccatctgctcgttccactgtctagagggtcagctgttgaacggaagtgcacaaaccgcctgccaggaaaacggccactggagtacaactgtgcctacatgtcaggcgggaccactaactattcaggaggcgttgacatattttggaggcgcagtagccagcaccatcgggctcattatgggcggcaccctactggctctcctgagaaaaaggttccgacagaaggatgacggcaaatgccctctcaacccacatagccatcttggtacctacggagtctttacaaacgctgcctttgatccgtccccttag

SEQ ID NO: 133664 - DNA, 2307 bp, synthetic construct
  misc_feature 1..2307: note = Description of Artificial Sequence: Synthetic coding sequence
  source 1..2307: mol_type = other DNA
atggcgaactgccaaattgccatactctaccagaggtttcagagggtcgtatttggaataagccagcttctttgcttctctgccttgattagcgagctcacaaatcagaaagaagtggctgcctggacataccattacagcacaaaagcctactcgtggaatataagcagaaagtactgccagaataggtatacagacctggttgcgattcaaaacaagaatgagattgattatttgaataaggtgttaccatactactccagctattactggatcggcatcaggaaaaataataaaacctggacatgggtggggaccaagaaggcactgaccaacgaggcagagaattgggccgataatgaacccaacaataaaaggaacaacgaggattgcgtagagatctatattaagagtcccagcgcaccagggaagtggaatgatgagcattgtttgaaaaaaaagcatgcactgtgctatactgcatcctgtcaggatatgagttgctcaaagcaaggtgagtgtttagaaactatcggcaactacacttgttcatgttacccaggcttctacggacccgagtgtgagtacgtccgagaatgcggtgagttagaacttcctcaacacgtgctcatgaactgttctcaccctctggggaattttagcttcaattctcagtgctcattccactgcactgacggctaccaggtgaatggcccgagcaagctcgaatgtctggccagtggaatatggactaataaaccccctcagtgtctggccgttcagtgccagcacctagaggctcccagcgaaggcacaatggattgcgtccacccactgaccgctttcgcttatggatcaagttgtaagttcgaatgccagccagggtaccgagttcgtggccttgacatgctgcggtgcattgatagcggacactggagcgctccactgccaacttgcgaggctatcagctgcgaaccacttgagagccctgtgcacgggtctatggattgtagcccttcgctccgtgcatttcaatacgataccaactgctcatttcggtgtgcagaaggttttatgttacgtggagccgatatcgtgagatgtgacaatctgggacagtggactgctccagcacccgtatgtcaggcgctccagtgccaggacctgcccgtccccaatgaagccagggtgaattgttcccatccgtttggagcgtttcgctaccaatcggtgtgctcattcacctgtaatgagggacttttactagtgggagcgtctgtattgcagtgtcttgcgactggcaactggaactccgtccctcccgaatgccaggcgatcccatgcactccattgctctcccctcagaacggtactatgacctgtgtccagcccctggggtcgagctcctacaagagcacatgccagttcatatgtgacgaagggtactctctttccggcccggagcggctcgactgtacaagatccgggcgctggaccgactctcctcccatgtgcgaagcaatcaagtgtcccgaactttttgcacccgaacaaggctctctcgattgctccgacacacgaggagaattcaacgttgggtctacctgccatttttcatgcgataacggctttaagcttgaggggccgaataacgtggagtgtacgacaagcggcaggtggtcagcaactccccctacctgcaaaggcatcgcaagcctccctacccccggagtgcagtgccccgccttaacaacccctgggcaggggacaatgtactgccggcaccaccctggaactttcgggttcaacactacatgctacttcggatgcaacgccggctttacactcataggcgactccacactgtcatgccgtcctagtggtcagtggactgcagtcactcccgcttgcagagcagtaaagtgctcggagctgcacgtgaataagcccatcgcgatgaattgttctaatctgtgggggaatttctcgtacggtagcatatgctctttccactgtctcgaggggcagctgttgaacggctctgcccaaaccgcctgccaggagaatgggcattggtcaacaactgtgcctacctgccaagccggccctctgacaattcaggaagccttaacgtacttcggcggcgcggtagctagtacaattggcctaattatgggaggtacccttctggctctcctgcggaaacgcttcaggcagaaggacgacgggaaatgtcccctgaatcctcactcgcatctgggaacttacggcgtgttcaccaacgcggccttcgacccatctccatag

SEQ ID NO: 133665 - DNA, 1941 bp, synthetic construct
  misc_feature 1..1941: note = Description of Artificial Sequence: Synthetic coding sequence
  source 1..1941: mol_type = other DNA
atggccaactgtcagattgcgattttgtatcagagattccaacgggtggtgttcggcatctcccagttactgtgtttctctgctctcatatccgaactgaccaaccagaaggaagtagccgcttggacttaccattatagcaccaaggcgtacagctggaacataagccgcaaatactgtcaaaatcggtacaccgatctggtggcgattcagaacaagaacgaaatcgattatttaaacaaagtgctgccatactactccagctactattggatcgggatcaggaagaataataaaacttggacgtgggtgggaaccaagaaggcgcttaccaatgaggccgaaaactgggccgacaatgaaccaaacaacaaacgaaataatgaagattgcgtggagatctatattaaatcgccttcagcccctgggaaatggaacgatgaacactgcctgaagaaaaagcatgccctctgctatacagccagttgccaagacatgtcgtgttcaaagcagggagaatgtctcgagaccatcggaaactacacatgtagctgttacccggggttttacggaccagagtgtgaatatgtgcgggagtgcggagaacttgaattgccacagcacgtgctcatgaattgcagccaccccctcgggaattttagtttcaactctcagtgctccttccactgcaccgacggttaccaggtgaatggcccttccaaattagaatgtttggcatcaggcatatggacaaataagccacctcagtgcttggcggctcagtgtccgccgcttaaaattcctgagaggggaaacatgacgtgcctgcatagtgctaaagctttccagcaccagtcatcctgtagtttctcctgcgaagagggcttcgctctcgtagggcccgaagtggtgcagtgcaccgcgagcggggtttggacagctcccgccccagtctgtaaggccatatcatgcgagcccctggagtccccagtgcatggcagcatggattgctctcctagccttcgcgcatttcagtacgacacaaactgttccttcagatgcgccgagggatttatgttgaggggcgccgatattgtgcggtgtgacaacttgggccagtggaccgctccggcccccgtctgtcaggcactgcaatgtcaggatctgcctgtgcccaatgaagcaagagtcaactgctctcaccctttcggtgccttccggtaccagagtgtctgcagcttcacctgcaatgaaggcttactcttggtgggtgcatccgtcctgcaatgtttagcaaccggaaattggaacagtgtcccaccggagtgtcagggcaagtctatagcctcactgcccacaccaggggtgcagtgccccgccctgacaactccagggcagggtaccatgtattgcaggcaccaccccggaacctttggatttaatactacatgctactttggatgcaatgccggctttaccctgattggcgactctaccttatcttgtcggccctcaggtcagtggaccgcagtgacacctgcttgcagggccgtgaaatgctcagagctgcacgtcaacaaacccattgccatgaattgctcaaacctgtgggggaactttagttatggttcgatctgctcatttcactgcctcgagggacagctgcttaatggcagtgcccagacagcttgccaggagaacggtcactggtctactaccgtccctacttgtcaagcaggtccactgaccattcaggaggccctaacatacttcgggggagcagtggcctccaccattggcctcatcatgggcggtacactgcttgcacttcttagaaagcggtttcggcagaaggatgatggcaaatgtccactaaatccccacagccaccttggcacctacggcgtgtttactaacgccgctttcgatcctagcccatag

SEQ ID NO: 133666 - DNA, 2493 bp, synthetic construct
  misc_feature 1..2493: note = Description of Artificial Sequence: Synthetic coding sequence
  source 1..2493: mol_type = other DNA
atggccaactgtcagatcgcaatcctgtatcagcgtttccagagggttgtgtttgggatatctcagctgctctgcttcagcgctctcatctccgaactgactaaccagaaagaagtggctgcatggacctatcattactctactaaggcgtacagttggaatatcagtcgcaaatattgccagaatcgttatactgacttagtagcaatacagaacaagaacgaaattgattatctgaataaggtgcttccatattatagctcctattactggatcggcattagaaagaataacaagacgtggacatgggtgggtactaaaaaggcattaaccaatgaggccgagaattgggcggacaacgagcccaacaataaacgtaataacgaggactgcgtggagatctacattaaatcgccctctgctcccggaaaatggaatgacgagcattgtcttaagaagaaacacgccttgtgctacaccgcaagctgtcaagacatgtcctgcagtaaacagggtgagtgcctcgagacaataggaaactacacctgtagctgttatccaggcttttatggccccgagtgtgagtacgtgcgcgagtgtggcgagctagagctgccgcagcacgtgctaatgaactgcagccatccactcggtaacttctcttttaacagtcaatgctcgttccactgcacggacgggtatcaagttaatggtcctagtaaactcgagtgccttgcatctggaatttggacaaataaacctcctcaatgtttagctgcccagtgccctcccctcaagattccagaaagggggaatatgacttgtcttcatagtgccaaggcattccaacaccaatcgagctgttcctttagctgcgaggagggatttgccctagtgggcccagaggttgttcagtgcaccgcatcaggtgtatggaccgccccagctcccgtgtgcaaagccgtccagtgtcagcacctagaggcacccagcgaaggtacgatggactgtgtgcacccactgactgccttcgcctatggttcctcctgcaaattcgaatgccaacctggttacagagttcgcggcctcgacatgctgcgctgcatcgattccggacactggtctgcaccattgccaacatgtgaggccatttcctgcgaacccctggagagccctgtgcacggatcgatggactgctctccttctctacgtgcctttcagtatgatacaaactgtagctttcgttgtgctgagggctttatgctgagaggagcagacattgtacgttgcgacaatctgggccagtggactgccccggcacccgtgtgccaagcgctgcagtgtcaggatctaccagtgccgaacgaagctcgggttaactgctctcacccctttggcgcttttcgttaccagtcagtttgtagtttcacttgtaatgaagggttgctgcttgtgggggcttccgtcttacagtgcctggccaccggcaactggaactctgtaccccccgagtgccaggctattccttgcacaccactattgtctccccagaatggtaccatgacgtgcgtgcagccactaggctcatcttcgtataagagcacttgccagtttatctgcgatgagggatactcccttagtggacccgaacgactggattgcacacgttcagggcggtggacagattctccaccgatgtgcgaagccattaaatgtcccgagctgttcgctcccgagcaaggaagcctcgactgcagtgatacaagaggagaatttaacgtgggctcaacatgtcatttcagttgtgacaatggttttaagctcgaagggcctaacaacgtggaatgtaccacaagcggcagatggtcagccacgcctcctacctgcaaaggcatcgccagtctacccactccgggtgtacagtgcccagctctgactacaccaggccagggaacaatgtactgcaggcaccaccctggaacattcgggttcaatacaacctgttatttcggctgtaatgccggttttactttaataggcgattccaccctctcatgccgcccatctggccagtggactgccgtgactccagcttgcagggcagttaagtgctccgaactccatgtcaataaaccaattgctatgaattgttccaatctgtggggaaattttagctatggaagtatttgttctttccactgccttgagggacagctgcttaatgggagcgctcagaccgcctgtcaggagaacggtcactggtcaaccactgttcccacatgtcaggctggaccactcacaatacaggaggctctgacgtacttcggaggagcagtggcctccacaatcgggctgatcatgggcgggacgctcttggcgctactgcgaaaaaggtttcggcagaaggacgatggcaagtgcccgctcaacccacattctcacctaggcacttatggagtgtttaccaacgccgccttcgatccctccccgtag

SEQ ID NO: 133667 - DNA, 1935 bp, synthetic construct
  misc_feature 1..1935: note = Description of Artificial Sequence: Synthetic coding sequence
  source 1..1935: mol_type = other DNA
atggcaaactgtcagatcgccattctgtaccagaggtttcaacgcgttgtatttggaatatcccagctcctatgcttctctgctttaatctccgagctcaccaaccaaaaagaagtcgccgcctggacataccactattcgactaaagcgtactcttggaacatcagtcgcaagtactgccaaaaccgctacaccgatctagtcgcgattcagaataagaatgagatcgattatctcaacaaagttctgccatactactccagttactattggattgggataagaaaaaacaataagacttggacctgggtagggaccaagaaagccctgactaatgaggccgaaaattgggccgataacgagcctaacaataaacgcaataatgaggactgtgtggaaatatacatcaagtctccaagtgcacccggcaagtggaacgacgaacactgcctgaaaaagaaacacgctctttgctataccgccagttgccaggatatgtcctgtagcaagcagggagaatgcttggagacaatcggcaattacacctgcagctgttaccccgggttttacggtcctgagtgcgagtacgtgagagaatgtggagagctcgaactaccacaacatgtcctaatgaattgtagccaccccttaggcaacttttccttcaattcgcaatgttcctttcactgtactgacgggtaccaagttaacgggccaagcaaactggagtgtctcgcatccggcatatggaccaacaagcctcctcaatgtcttgcggcccagtgcccaccgcttaagatcccagaacgcggtaacatgacctgcctccactcggccaaggctttccagcatcagtcctcttgttcattctcctgtgaggagggcttcgctctggtggggcctgaggtggtccagtgtaccgccagtggggtgtggaccgctccagcacccgtgtgtaaggcactgcagtgtcaggaccttcctgtcccaaacgaggcccgtgtgaattgcagccatccttttggagctttccgataccagtcagtgtgcagctttacgtgtaatgaggggctcctgctggtgggggcctcagtccttcagtgcctggcaaccggaaattggaactctgtgccgcccgagtgtcaggccatcccatgtacacccctgctcagcccacaaaacgggactatgacttgtgtgcagccacttgggagttcttcatacaaaagcacctgccaattcatttgcgacgagggctatagcctcagcggcccagagcggctggattgtactcggtccggccggtggacagacagcccacctatgtgtgaaggcattgccagcctccccacccctggagtgcagtgtccagccttaacaaccccaggccagggtaccatgtattgtagacaccaccccggcacgtttggcttcaataccacatgctatttcgggtgtaacgccggctttaccctcatcggcgattccacccttagctgcagaccttctgggcaatggaccgccgtcacacccgcttgcagggcagtcaagtgcagcgaactgcacgtgaacaagccaatcgctatgaattgtagtaatctgtgggggaacttctcctacggatcaatttgcagtttccactgtcttgaaggacagctgctcaatggatctgcccagaccgcttgtcaggagaacgggcattggtctacaacagtgcccacctgtcaggcgggaccactaaccatccaggaagccctgacttatttcggcggagcagtcgcctctactataggcctcataatgggggggacactcctcgcactcctcagaaaacgatttaggcaaaaggatgatgggaaatgccctctgaacccacactcacacctggggacgtacggcgtgttcaccaacgctgcgtttgaccccagtccatag

SEQ ID NO: 133668 - DNA, 1941 bp, synthetic construct
  misc_feature 1..1941: note = Description of Artificial Sequence: Synthetic coding sequence
  source 1..1941: mol_type = other DNA
atggccaattgtcaaatcgccatactttaccagcggtttcaacgcgtagtgtttgggatttcccaactgttgtgtttcagcgccctgatctctgagctcaccaaccagaaggaagtggccgcttggacctatcattactccacaaaggcatatagttggaacatctccaggaaatactgccagaaccgatacactgacctggtggccatccagaacaaaaacgagatagactatcttaacaaggtgctcccttattatagctcctactactggatcggcattcgcaagaacaataagacatggacttgggtcgggacaaagaaggcccttactaacgaagccgaaaactgggccgataatgagccgaacaataagcgaaataatgaggattgcgtcgaaatctacatcaagagcccttccgcacctggtaaatggaacgacgaacattgtctgaagaaaaagcacgctctatgttatacagctagctgtcaagacatgtcctgcagcaaacagggagagtgcctggaaaccatcggcaattacacatgctcttgctatcctgggttctatggccccgagtgtgagtatgttcgggagtgcggggagttggaactgccacagcatgtactcatgaattgctcacaccccctgggaaacttcagctttaattcacagtgtagtttccattgtaccgacggctaccaagtaaacggccccagcaagcttgagtgtctggcaagtggcatttggacaaataaacctccccagtgcttagctgcccagtgccctccattgaagatacccgagcgggggaacatgacctgtctgcactccgcaaaggcatttcagcaccagtctagctgcagcttttcttgcgaagaaggatttgccctggtggggccggaagtggtccagtgcaccgccagcggcgtgtggacagcgcctgcacccgtgtgtaaggctatcagctgtgagccccttgaaagccccgttcatggtagcatggattgttctccttccctccgagccttccagtatgacaccaactgctccttccgctgcgctgaggggtttatgctgcggggagcagatattgtaagatgcgataacctgggccagtggacagcccctgctcctgtgtgccaggccttgcagtgccaggacctgcctgtgccaaatgaggccagggtcaattgcagccatccctttggggctttccgttatcagtcagtctgtagcttcacctgcaatgaggggctgcttctggtcggcgcctccgttcttcagtgcctagctacgggaaactggaactccgtaccgccagagtgccagggaaaatcgattgcttcgctgcctacaccaggtgtgcagtgtcccgccctgacaacacccgggcagggcacgatgtactgccgtcatcacccaggcacgttcggattcaatactacttgttatttcggatgtaacgcaggtttcacactgatcggcgattcaaccctttcctgccgacccagcggccagtggactgccgtgacaccagcttgcagagctgtaaaatgcagcgagctgcatgtgaataaacccattgccatgaactgcagtaacttatggggcaacttcagttacggctccatttgtagtttccattgtctcgaaggccagctcctgaatggctccgcccagactgcatgccaggagaatggccattggagtacaacagttcctacatgtcaggccggacctctgacgattcaggaggcacttacctactttggaggcgctgtcgcgagtacgataggcttgatcatgggcggcaccctactagccctgctcaggaagaggtttcgccaaaaagacgacggaaaatgcccattgaacccgcattctcacctgggaacctatggagttttcaccaatgccgctttcgatccttctccttag

SEQ ID NO: 133669 - DNA, 2307 bp, synthetic construct
  misc_feature 1..2307: note = Description of Artificial Sequence: Synthetic coding sequence
  source 1..2307: mol_type = other DNA
atggccaactgtcagatcgcaatactctaccagaggtttcagcgggtggtatttggcatttcccaactcctatgcttttccgcactaattagcgaattgactaatcaaaaggaagttgctgcctggacttatcattactctacgaaagcctatagttggaatatcagcagaaagtactgtcaaaacaggtacacagatttggtggccatccagaacaagaatgagatcgattacctcaataaagtcctgccttactattcttcatattattggatcggcattcgtaagaacaataagacgtggacctgggtggggaccaagaaggcattgactaatgaggctgagaattgggccgacaacgagcccaacaataagagaaacaatgaagattgcgtggaaatctacatcaagtcgccaagcgctcctggcaagtggaacgacgaacattgtctcaaaaagaagcacgccctctgctacacagccagttgtcaagacatgagttgttccaaacaaggtgaatgccttgagacaatcgggaattacacatgtagctgttaccctggcttctatggccctgaatgtgaatatgtgagagagtgcggcgaactggagctgcctcagcacgtgttgatgaactgttcccacccacttggcaacttctcttttaattcccagtgttcgtttcactgcactgatggctatcaagttaatggaccctcaaagctggagtgtctcgcatccgggatttggactaacaagccaccgcagtgtttggccgtccagtgccagcatttggaggccccatccgagggcacaatggactgtgtacaccccctgactgctttcgcatacgggtctagttgcaaatttgagtgtcaacccgggtaccgtgttcggggtcttgatatgcttaggtgtatcgacagcggacactggtccgcaccactacctacgtgtgaggcaataagctgcgaaccacttgagtctccagtacacgggtccatggactgttctccgtcgcttagagcattccagtatgataccaactgcagcttcagatgtgcagaaggcttcatgctgaggggcgcggatatagtcagatgtgataacctcggccagtggactgcccccgcccccgtgtgtcaggccctgcaatgccaggatctgcccgtccccaacgaggctcgcgtgaattgctcccacccattcggagcttttcgctatcagtctgtctgctcattcacctgtaatgaggggcttttgctagtaggggcctccgtgttgcagtgtctggcaaccggaaactggaacagtgtccctccagaatgtcaggccataccctgcaccccactcctctcacctcagaatggtactatgacctgtgtgcaacctctgggttcaagttcttacaaatctacgtgccagttcatctgcgatgagggatactcgttgagtggtcccgagagattagactgcactaggagcgggcgctggacggacagtccacccatgtgcgaggcaatcaaatgccccgagctgttcgcaccagagcaaggaagcctcgattgttccgacacaaggggcgaatttaacgtaggcagcacctgtcacttttcttgtgataatggttttaaattagaagggcccaataacgttgaatgtacgacgtcgggaagatggtcggctacacccccaacctgtaagggaatagcatctctgccaacccccggagtacagtgtcccgccttgaccacaccaggtcaaggaactatgtattgtaggcaccacccaggtaccttcgggttcaatacaacttgttacttcgggtgcaacgctgggtttaccctgataggggattcaacactctcctgcaggccatcagggcaatggacagcagtcactccagcatgcagagctgtgaagtgctccgagctacatgtgaacaagcccatagcgatgaattgctccaatctttggggcaactttagttacggcagtatctgtagcttccattgcctagagggccagctacttaatggtagcgctcaaaccgcttgccaggagaatggccattggtccactaccgtccctacctgtcaagccgggcctctgaccatacaggaggccctcacctattttggcggtgccgttgcgtcaaccattgggttaattatgggcggcactctcctggcgctcctaaggaagaggttccgccagaaagatgacggcaagtgccccttaaatcctcactctcaccttggcacctacggagtgtttacaaatgctgctttcgacccctcaccctag

SEQ ID NO: 133670 - DNA, 2307 bp, synthetic construct
  misc_feature 1..2307: note = Description of Artificial Sequence: Synthetic coding sequence
  source 1..2307: mol_type = other DNA
atggcgaactgccagatagccatcctataccagagatttcagagggtcgtctttggaatctctcagttgctgtgcttttcggctttgatttccgaactgaccaatcagaaggaggtggctgcttggacataccattactcaactaaagcatactcatggaacattagtcgcaagtattgccaaaatagatataccgacctggttgctatacagaacaaaaatgaaatcgactatttgaataaagtgcttccttactactctagttattactggataggtattcgcaagaacaataaaacttggacatgggtagggactaagaaggcattaaccaacgaggcggagaactgggctgataatgagccgaataacaaacgtaacaatgaggattgtgtggaaatctatatcaaaagcccaagtgcccctggcaagtggaacgatgagcattgcttaaaaaagaagcacgctctttgttacactgctagttgtcaagacatgagctgttccaagcaaggagagtgcttagagacgatcgggaattatacttgcagctgttaccccgggttttatgggcccgagtgcgaatacgtgcgagagtgcggggagttggaactcccccagcacgttctgatgaattgttcccacccactgggcaattttagctttaacagccagtgtagtttccactgcaccgatggttatcaggtgaacggaccatcaaagctggaatgccttgcttcgggaatctggactaataaaccacctcaatgccttgctgctcagtgcccgcctctgaagatccctgagcggggaaacatgacctgccttcattccgctaaggcctttcagcaccagtctagttgtagcttttcgtgtgaggagggcttcgccctggtcggccccgaggtggtgcaatgcacagcttccggagtgtggacagcgccggccccagtgtgcaaggctatatcttgtgagccactcgaatctccagttcacgggtcaatggactgttctccttcactccgcgccttccagtacgataccaactgctcttttagatgcgctgagggtttcatgttgcgcggggctgatatcgttaggtgcgacaatctgggccagtggaccgcccctgcccctgtctgtcaagcgctgcaatgtcaggatctgcccgtgccgaatgaggcaagagtgaattgttctcatcctttcggtgcatttagataccagtcagtctgctctttcacatgcaatgaggggctcctgcttgtgggggctagcgtcttgcagtgcttagccacggggaattggaacagtgtgccgccagaatgccaagctataccgtgtacaccactcttgtctccacagaatggtaccatgacatgtgttcagcccttagggagttcaagttacaagagcacctgccagtttatatgcgatgaaggctacagtttaagcggcccagagaggctggactgtactcggtctggccgatggactgatagcccccccatgtgtgaggcgattaagtgcccagaactgttcgctcctgaacagggctccctagactgtagcgacactaggggagagttcaatgtgggctcaacctgtcacttctcctgcgacaacgggtttaagttggaggggcctaacaatgttgagtgcactacctccggtagatggtccgccaccccccccacttgcaaaggcattgcttctcttccgacccccggagtccagtgtccggcactcaccaccccaggccaaggcaccatgtactgccggcatcatcctggcaccttcggttttaacactacttgttatttcgggtgcaatgctggatttacactaattggagattcaaccctgtcctgcaggccttcgggtcagtggacggctgtgacaccggcttgccgagcagttaagtgctctgagctacacgtgaacaagccaatcgctatgaattgttccaatctctggggcaacttctcttacgggagtatctgcagctttcattgtttggagggccagctgttgaacggatctgcacagacagcctgccaagaaaacggccattggtccaccacggtgcccacatgtcaggccggacctcttactatccaggaggcattgacctactttggaggtgccgttgcctctaccattggcttgataatgggaggtaccctgctcgccctgctccgaaagagatttaggcagaaggacgatggtaagtgccccctcaatccccactcacaccttggcacctacggagttttcactaatgcagcctttgaccccagcccctag

SEQ ID NO: 133671 - DNA, 1935 bp, synthetic construct
  misc_feature 1..1935: note = Description of Artificial Sequence: Synthetic coding sequence
  source 1..1935: mol_type = other DNA
atggcgaattgtcagatcgccatcctttatcagcggttccaacgcgtggtgtttggtatctcacagctgctctgcttctctgcactgatttcagaactgacaaaccagaaggaagtcgctgcatggacatatcattattctacaaaggcctattcctggaacatctccaggaagtattgtcagaatcggtatacagacctcgttgcaattcagaacaagaacgaaatcgactacttaaacaaagtcctgccttattactccagctattactggatcgggattcgcaaaaataacaagacctggacatgggttggcaccaagaaggccctgacgaatgaggcggaaaactgggccgataatgagcccaataataaacgcaataacgaagactgtgttgagatctacatcaaatccccgtcggccccaggtaaatggaatgatgagcactgtttgaaaaagaagcacgccttatgttatacggcctcttgtcaggacatgtcgtgctccaagcaaggagaatgcctggaaaccattgggaattacacctgttcttgttaccctggtttttatgggcctgagtgcgagtatgtacgggagtgtggggagttggagctgcctcaacacgtcctgatgaactgctctcacccactcggaaactttagcttcaacagccaatgcagctttcattgcacagacgggtaccaggtcaatggcccatcaaagctagagtgcctggcctcaggaatttggaccaacaagcctcctcagtgccttgcagcccagtgccccccgttgaagatccccgaaagggggaacatgacctgtttgcacagcgccaaagccttccaacaccaaagctcctgttccttttcatgtgaagaaggatttgctttagtcgggccagaggtggtgcaatgcacggccagtggagtgtggaccgctcccgctccggtatgcaaggccctgcagtgccaagacttgccagtacctaatgaggcgagagttaattgtagccacccgttcggtgcattcagataccagtctgtctgctcattcacctgcaatgaaggccttttactggttggcgcatccgtgctccagtgtttggcaacagggaattggaacagtgtgccgccagaatgccaggctattccctgcacccctctcttgtctcctcaaaacggcacgatgacctgcgtgcagcctctgggatctagcagttataagtccacttgtcagttcatttgcgatgaaggatattctctctctggccccgagcggctggattgtacaaggagcggacggtggaccgacagtcccccaatgtgcgaagggatagccagcctgcccacacctggagtgcaatgcccagctctgaccactccaggccagggcaccatgtactgcagacaccatcccggcactttcggcttcaacactacgtgttactttgggtgtaatgctgggtttaccctgatcggggatagcacattgtcttgccgcccgagcggacagtggactgctgtaacacctgcctgccgagccgttaagtgctccgaactgcacgtaaataaaccgattgcgatgaattgcagcaacttgtggggcaatttttcttatggcagtatctgttcctttcactgcttggaaggccagctgctcaatggaagtgctcaaaccgcctgtcaagagaacggccattggagcaccaccgttccaacttgccaggcaggtccactgacgatccaggaagcactcacctatttcgggggcgccgtggcatcaacaatcgggctcatcatgggcgggactctcctcgctttgctccgtaaacgattcagacagaaggacgacggcaagtgtcctctgaatccccacagtcatctggggacctatggagtgtttaccaacgccgcctttgatccctcaccatag

SEQ ID NO: 133672 - DNA, 2490 bp, synthetic construct
  misc_feature 1..2490: note = Description of Artificial Sequence: Synthetic coding sequence
  source 1..2490: mol_type = other DNA
gcgaactgccaaatcgctatcctataccagcggttccagcgtgtggttttcggcatctcccagctgctgtgctttagcgccctgatcagtgaacttacaaaccagaaggaagtggcggcctggacctatcattattccacgaaagcatactcatggaacattagccgcaaatactgtcagaatagatataccgatctggttgctatccagaataagaacgagatcgactacctgaataaggtgcttccatattattcctcatattattggatcggcataaggaaaaataataaaacatggacctgggtcggaacaaaaaaggcgctgaccaacgaggccgagaactgggctgataacgagcctaacaacaagcgtaacaacgaagattgcgtggaaatctatataaaatccccctcagcgcccggcaaatggaatgatgagcattgcttaaagaagaaacatgctctatgttacacagcctcctgccaggacatgagctgctcgaaacagggtgaatgcctggaaaccataggcaattatacttgctcatgctatccagggttttacggccccgagtgcgagtatgtgcgagaatgcggggagttggagctgccccagcacgtgctaatgaattgctcccaccccctggggaacttttccttcaactcccagtgtagcttccactgcaccgacggataccaggtcaatggtccctctaagcttgaatgtctcgcctctggcatctggaccaataagcctcctcagtgtctggccgcgcaatgccctccactcaagattccagaacgtggcaacatgacgtgtcttcactccgctaaagcttttcagcaccagtccagttgcagtttttcatgcgaggaggggttcgcacttgtaggaccagaggtggttcagtgcactgcctccggcgtctggacagcccccgccccagtctgtaaggccgtacagtgtcagcacctggaagccccgtctgaggggactatggactgtgtgcacccactcaccgctttcgcatatggcagcagctgcaagttcgagtgccagcccgggtacagagttaggggcctggatatgttaaggtgcattgacagcggacactggagtgcccccctccccacttgtgaagctatcagctgcgagccccttgagtctcctgtgcacggctccatggattgtagcccctccctcagagccttccagtatgacaccaattgttcctttcggtgtgcggaggggttcatgttgagaggagcagacattgtgaggtgcgacaatctgggccagtggaccgcccctgctcccgtttgccaggctctgcaatgccaggacttgcccgttcctaacgaggctagggtcaactgtagccatccctttggagcgttccgctaccagtccgtatgttccttcacatgtaacgaaggccttcttctcgttggcgcttctgtcctgcaatgcctggccactgggaactggaactccgtccctcccgaatgtcaagccattccatgcacacctcttttgtcgccacaaaacggtacgatgacatgtgtccagccactcggcagctcttcctataagtccacttgccagtttatttgcgacgaggggtactccttgtctggccctgagcggttagattgtacacgaagtgggcgctggacagattcgccacccatgtgcgaggccatcaagtgccctgagttattcgcacctgagcaggggtctctcgactgttctgacaccaggggcgagtttaacgtgggctctacttgccacttttcgtgcgataatggattcaaactcgagggcccaaacaatgtagagtgtaccacgtccggcagatggtcagctactcctcctacttgcaaaggtattgcgtcccttcctacgcccggagtccagtgtcccgctttaacaacgcccgggcagggcaccatgtattgccgtcaccaccctggtaccttcggattcaacaccacctgctatttcggatgcaatgcagggtttaccctgattggagacagtaccctgtcttgcagaccttcaggccaatggacagccgtgactcccgcctgccgcgctgtgaagtgctctgagttgcacgtgaacaagcctatcgctatgaattgctcgaatctctggggaaacttctcctatggaagtatttgttccttccactgcctggagggccagcttctgaacggctctgctcaaacagcctgtcaggaaaacgggcactggagtactactgtccctacatgtcaggctggacctcttacaattcaggaggccctgacctacttcggtggcgccgtggccagtaccattgggctgattatggggggcacactactcgccctgctccggaagcggtttagacagaaggacgacggtaagtgcccgctgaaccctcattctcatctcgggacgtatggcgtattcacaaacgccgccttcgacccatctccctag

SEQ ID NO: 133673 - DNA, 1941 bp, synthetic construct
  misc_feature 1..1941: note = Description of Artificial Sequence: Synthetic coding sequence
  source 1..1941: mol_type = other DNA
taagcaaactgtcagatcgccatcctgtatcagcggtttcagagggtcgttttcggcatttctcagttactatgtttctcagcactcatcagtgaactgacgaatcaaaaagaggttgccgcatggacctatcactattctaccaaggcatactcatggaatataagtcgaaaatactgtcaaaacagatatacagacttggtcgcaattcagaacaaaaacgagatcgattatcttaacaaagttttgccatactactcctcctactactggatagggattcgtaagaacaataagacttggacctgggtgggcaccaaaaaggcgctgaccaacgaggctgagaattgggctgataatgaaccaaataacaaacgcaataatgaggattgcgtggaaatttatatcaaatccccgtccgctcccggcaagtggaatgatgagcactgcctgaagaaaaagcacgcgctgtgctacaccgcttcttgccaggacatgagttgtagcaaacagggtgaatgccttgaaaccataggaaattatacttgctcgtgttatccaggtttttacggcccggagtgtgagtacgtccgagagtgtggggagctggagttgcctcagcatgtgctgatgaattgttcccaccccctgggaaacttctcttttaactctcagtgtagctttcactgtaccgacggataccaggtgaatggtccctccaagcttgaatgtcttgcctctgggatctggactaataagcctcctcagtgtttggctgcgcagtgcccccccctgaaaattcctgaacgaggcaacatgacatgcctgcattctgctaaggctttccaacaccaatcatcgtgctccttcagctgcgaggaaggcttcgccctggttggaccggaagtggtccagtgtaccgcaagcggtgtctggaccgccccagcgcctgtgtgtaaggccattagctgcgaaccgctggaatctcccgtgcacgggagcatggattgttcaccttctctccgagcattccaatatgatactaattgtagcttcaggtgcgccgaaggctttatgctgcgcggcgcagacatcgtcaggtgcgacaacctgggacaatggacggctcctgctcccgtgtgccaagctctgcagtgtcaagacctgccggtgccgaacgaggcacgggtgaactgttctcacccttttggagcttttcggtaccagtctgtttgttcatttacatgcaacgaaggcttactactggttggggccagtgtcttacaatgcctggccaccggaaattggaacagcgtgccccccgaatgccagggcaagagtatagcctcgttgcccactcctggcgtacagtgtccggctctgactaccccaggtcagggtactatgtattgccgacaccatcctggtacgttcggtttcaatacaacctgctatttcgggtgtaatgcgggctttaccctcattggggattctaccctctcttgccgcccttccgggcagtggaccgctgtgacacccgcctgtcgagcagtgaaatgtagtgaactgcatgtcaacaagcctatcgcgatgaactgctccaacctgtgggggaatttctcctacgggtcgatttgttctttccactgcctcgagggccaactgttgaatgggagtgctcagactgcttgtcaggagaatgggcactggtctactacagtgccaacttgtcaggccggacctctaaccatccaggaggcactgacgtatttcggcggagctgtggcatctaccatcgggctaataatgggcggtaccctcctggcgctgctccggaaacgcttcagacagaaggacgacggcaaatgccccctaaacccacactcccatcttggcacatacggcgtattcactaacgctgcctttgatccatccccttag

SEQ ID NO: 133674 - DNA, 2262 bp, synthetic construct
  misc_feature 1..2262: note = Description of Artificial Sequence: Synthetic coding sequence
  source 1..2262: mol_type = other DNA
gttgttttcggaatcagccaattactttgtttcagtgccctgattagcgaattaacaaaccagaaggaggttgccgcatggacctaccactactccaccaaagcctactcttggaacatttctcggaaatactgccaaaatcggtacaccgatctggtagcgatccagaataagaatgagatcgattatctcaacaaggtgctaccttactattccagctattattggatcgggatccgaaagaataacaaaacatggacctgggttggaacgaaaaaagccctaacaaatgaggcggagaactgggctgacaatgagcctaataataaacggaataatgaggattgcgtggaaatatacatcaagtctccgtctgcacccggaaagtggaacgacgaacattgtcttaagaagaagcatgcactctgctacactgcttcatgtcaggatatgtcatgtagcaagcagggagagtgtctcgagaccatcgggaattacacttgtagttgctatccgggcttttacggccctgagtgcgagtatgtccgcgaatgcggggagctggagctcccccagcatgttttgatgaactgctctcaccctctgggcaacttcagtttcaatagccagtgctcttttcactgcaccgacgggtaccaagtcaatggaccctccaaactggaatgcttagcgagcggaatttggaccaataagcccccccaatgtctcgccgctcagtgtccacccctgaagattcccgagcggggcaatatgacctgcctgcactctgccaaggcttttcagcatcagtcctcttgtagttttagctgtgaggaaggatttgccctcgtcggccctgaagtcgttcagtgcaccgcatccggagtctggaccgcaccagctcccgtatgtaaggccatctcctgtgaacccttagaatctcccgtccatggaagcatggattgctctccttctcttcgcgcctttcagtacgacactaactgttcttttcgctgtgccgagggctttatgcttcggggagcagacattgtcagatgtgacaatcttggacagtggaccgccccagctccagtgtgccaggccctgcagtgtcaagacctgcctgtccccaacgaagctcgcgtgaactgcagccacccttttggagcctttcggtatcagtccgtctgctcttttacctgcaacgagggactgctgctcgttggcgcatcggtactacaatgcctggccacagggaactggaacagcgtgccgcctgaatgccaggctattccgtgtacacctctgctttcaccacagaacgggacaatgacatgcgtgcagccgcttggctcgagtagctacaagagcacttgtcaattcatttgtgacgaaggatattcattatctgggcccgagcgcctggactgcacccggtctggaagatggactgatagccctccaatgtgcgaggcaattaagtgtccagagctgttcgcccccgagcaggggtccctggattgctccgacaccaggggcgagtttaacgtcggaagcacatgtcacttctcttgtgataatggcttcaagctggagggccctaacaacgtggaatgcaccacttccggtagatggagcgctacccctcctacttgcaaaggcatcgcctcgcttcctacacctggcgtccagtgtccagctctgactacaccaggacaggggactatgtattgtcggcaccatccaggcacatttgggtttaatacaacgtgctattttggatgtaatgccgggttcaccctgatcggagattcaactctcagctgtaggccctccggccagtggaccgctgttacccctgcatgcagggccgtgaagtgctctgagcttcatgttaataaaccgattgctatgaattgtagcaatctgtggggaaatttcagctatggatctatttgtagcttccattgtctggagggccagctgcttaatggctcggcgcagacagcatgtcaggaaaacggacattggtcgactactgttcctacttgtcaagctggtcctctcacaattcaggaggccctcacatactttggtggagccgtggctagcactattgggctcataatgggagggaccctacttgcgctcttgcgcaagagatttagacagaaggacgacggaaaatgccccctgaacccccattcacatctgggaacctatggggttttcacaaatgctgcattcgatccttctccgtag

SEQ ID NO: 133675 - DNA, 2373 bp, synthetic construct
  misc_feature 1..2373: note = Description of Artificial Sequence: Synthetic coding sequence
  source 1..2373: mol_type = other DNA
atggctaactgtcaaatagctattctgtaccagaggttccaaagagttgtctttggcatctctcagctactgtgttttagcgccctgataagtgagttgactaaccagaaagaggtcgcagcatggacctaccattacagcaccaaggcctacagttggaacatcagtcgaaagtattgtcagaataggtatacggatcttgttgctattcagaacaaaaacgagatcgactatttaaacaaggtgctcccctattactctagttattactggatcgggatcaggaagaataataaaacctggacctgggtgggtaccaagaaagcattaacaaacgaggcggagaattgggccgataacgagcctaataacaaaaggaacaatgaggattgtgtagagatctacatcaagtcaccctcggccccagggaagtggaacgacgagcattgcttgaaaaagaaacacgctctttgctacaccgcatcgtgccaggatatgtcttgttctaaacagggagaatgtctcgaaaccatcgggaattacacttgctcttgttatcctggcttctatgggcctgagtgcgagtacgtcagggaatgtggcgagctcgaattgcctcagcacgttctgatgaattgtagccatcccctcggaaacttttcctttaacagtcagtgctcattccactgtactgatgggtatcaggtaaatggacctagcaagttggagtgcctggccagcggtatttggacgaacaagccacctcagtgcctagcagcacaatgtccacctctgaaaatccccgagcgcggtaatatgacctgtcttcacagtgccaaagcctttcaacaccaatcatcatgcagtttttcctgcgaggagggttttgctttggtggggcctgaagtggtccagtgtacagcttccggagtgtggacggcgcccgcaccagtttgtaaggcagtgcaatgccaacacttggaggcgccttccgaaggaaccatggattgtgtccatccactaacagctttcgcttacggaagcagctgtaaatttgaatgccaaccaggctatcgggtccgaggcttagacatgctccgctgcatagatagcggacactggtctgccccgctgcccacgtgcgaggccatatcctgtgaaccccttgagtctccagtacacgggtctatggactgtagcccttcactccgagctttccagtacgatacaaattgtagcttccggtgcgcagagggcttcatgctgaggggcgcggacattgtaagatgtgacaatctgggacaatggacggccccggctcccgtgtgccaagcattgcaatgccaggatttgcccgtgcccaacgaggctcgggtgaactgcagccacccatttggtgcttttcgatatcagtcggtctgcagcttcacatgtaacgagggactcctacttgtcggcgcatcagtgcttcagtgtctagctaccggtaattggaacagtgtgcccccggagtgtcaggcaatcccatgcaccccattgctgtcccctcagaatggcacaatgacatgtgtgcagcctcttggtagttcctcctacaagtccacctgtcagttcatttgtgacgagggctattctctgagtgggcctgagcgcctcgattgcacacggagtggccgctggactgattccccgcccatgtgcgaggccatcaagtgcccagagcttttcgccccagagcagggctcactggattgttccgacacccggggagagttcaatgttggttctacttgccatttcagctgcgataacgggttcaaacttgaaggtcccaacaacgtagaatgtactacatccggccgctggtcggccaccccgcccacttgtaagggaatagccagcttacctacccccggagtacaatgcccagctctaacgacccccggtcaagggaccatgtattgccggcaccatcccggcacattcgggttcaacacgacttgctattttgggtgcaatgccggctttaccttaataggagactcaactctgtcttgtcggccttctggccagtggactgctgtgacaccagcatgcagggcagtaaaatgttccgaattacacgtgaataaaccaattgctatgaattgttccaacctgtgggggaacttctcctacggctctatttgtagcttccattgcctggaaggacagctgctgaatggatcagcacagactgcttgccaggagaacggccattggagcactaccgtcccgacttgtcaggacgatggcaagtgtcccctgaatccacactcacatctggggacatatggagtcttcacaaatgcggcgttcgatcccagcccatag

SEQ ID NO: 133676 - DNA, 450 bp, synthetic construct
  misc_feature 1..450: note = Description of Artificial Sequence: Synthetic coding sequence
  source 1..450: mol_type = other DNA
atgatgactaagcataaaaagtgctttattattgtcggggtactgattaccacaaacatcatcaccttgattgtgaaactgacccgtgattcacaatcactatgtccttacgattggatcggctttcagaataaatgttattacttttccaaagaagaaggagattggaattcatccaaatataactgttccactcaacacgccgatctgacaataatcgataatatcgaagagatgaatttcctcagacggtacaagtgctcaagcgaccattggatcggtctcaagatggcaaagaatcgaaccggacagtgggttgacggggccacttttacaaagagtttcgggatgcgcggatccgaaggctgcgcttacctgtccgatgacggcgctgctacagcgcgctgctatacagaaaggaaatggatctgccggaagcgcatacattag

SEQ ID NO: 133677 - DNA, 1209 bp, synthetic construct
  misc_feature 1..1209: note = Description of Artificial Sequence: Synthetic coding sequence
  source 1..1209: mol_type = other DNA
atgcccctgcaactcttgcttctgctcatactcttgggaccaggcaactcgttacagctgtgggacacctgggccgatgaggcggaaaaagctctaggccccctcctggcccgcgatcggaggcaggccactgagtacgaatacttagactacgacttcttgccagagaccgaacctcctgagatgttgagaaatagcactgatacaacaccgctcacgggaccagggacccctgagagcacaaccgtagaaccagctgcccggaggtccaccgggctggacgctggaggcgctgtcacggaactgactacagaacttgcgaacatggggaatctgagcactgatagcgctgcaatggagatccagaccacccagcccgctgcaacagaggctcaaaccacacccttggccgctactgaggctcagaccacgcgtctgaccgcaacagaggctcagacgacccccctcgctgccaccgaagcacaaaccacaccccccgccgccaccgaggcacagaccacccagcctacaggccttgaggcacagaccaccgctcccgctgcgatggaggcgcagaccacagccccagcggccatggaggcccagactacacctcctgccgccatggaggcccagacaactcaaaccaccgcgatggaagcgcagactacagccccagaggctacagaggctcagactacccagcctaccgccaccgaagcccagactactccgctcgccgccatggaagcgctttcaaccgaacccagcgctacagaagcacttagtatggagcccactacaaagaggggcctgttcataccttttagtgtctccagtgtgacccataaagggatccccatggcagcttcaaacctctcagtcaattatccagtcggcgccccagaccacatctctgtcaagcagtgcttactagccatcctgatcctggctcttgtagcaacaatcttctttgtctgcaccgtggtgttggctgtgcggctgagcagaaaaggccacatgtatccggtgaggaactattcaccaacagaaatggtttgcatcagcagcctgctgcctgatgggggagagggaccgtccgcaacggccaacggaggtctcagtaaagcgaaatcccctgggcttacacccgagcccagggaagatcgagagggggatgacctcacccttcattcatttctcccgtag

SEQ ID NO: 133678 - DNA, 1239 bp, synthetic construct
  misc_feature 1..1239: note = Description of Artificial Sequence: Synthetic coding sequence
  source 1..1239: mol_type = other DNA
atgccactgcagttattgctattactgatcctccttggccctggaaacagcctgcagttgtgggatacatgggcggacgaggcggagaaggcacttggacctctgctggccagagaccgacgtcaggctacagaatatgagtacctggactatgattttctcccagagaccgagccacctgagatgctgagaaatagtactgatactacccctctgaccggccccgggaccccagagagcaccacagtcgagcccgcagccagacgcagcaccggcctagacgccggcggagcggtgaccgagttgactaccgaactggccaatatgggcaatctatcaaccgacagcgctgccatggaaatccagacgacacagccggctgcaactgaagcccagaccactcagcccgtaccaactgaggcccagacgacacccctggccgcaactgaggcacagactaccaggctgactgctacggaggctcagactacccccctggccgctacggaggcgcagacaaccccccccgctgccacagaggctcaaactacacagcccacagggctggaggcacagactaccgcccctgcagctatggaagcccaaacaaccgcccctgcagccatggaggcccagaccacccccccagcagctatggaggctcaaaccactcagaccactgcgatggaggcccagaccaccgcgccagaagcaaccgaggcacagacgactcagccaaccgccactgaggctcagaccactcccctggcggccatggaagctctatccacagagccgtccgcaactgaagcacttagcatggagccaactacgaagaggggcttgttcatccctttctccgtgagcagtgtgacccacaaaggtatccctatggcagccagcaacctgtccgttaattatcccgttggggcaccagaccacattagcgtaaagcagtgcctgttagcgatacttatactggctctggttgcaaccatcttctttgtgtgtacagtcgtgctggccgtgcgactcagcaggaaaggccacatgtacccagttcggaattatagccccacggaaatggtgtgcatctcttccttgcttcccgatggaggagaaggaccatccgccacagccaatggggggctttcaaaggctaagagcccaggacttactccagagccaagggaagatcgagaaggggacgacttgaccctacacagcttcctcccttag

SEQ ID NO: 133679 - DNA, 1419 bp, synthetic construct
  misc_feature 1..1419: note = Description of Artificial Sequence: Synthetic coding sequence
  source 1..1419: mol_type = other DNA
atggctaccaaatgcgggaattgtgggcccgggtactcaacccccctcgaagcgatgaaaggccccagagaggagatcgtttacctcccatgcatttatagaaacactgggaccgaagccccagactaccttgccactgtcgacgtagacccaaagtccccccagtactgccaagtgatccacagattacctatgccgaacttgaaggacgagttgcatcatagtggatggaatacatgctctagctgctttggggactcgaccaagtcacgcaccaagctggtcctgccatccctgatcagtagccgcatttacgtcgtcgatgtgggatctgagccgcgggcccccaagctgcacaaggtgatcgagccgaaggatatccatgctaaatgtgaactagcttttctgcacacgtcccactgtctggcgtctggggaggtgatgataagctctcttggagacgtcaaggggaacggcaagggcggctttgtcctgttagatggagagacatttgaagtgaaaggcacttgggaaagaccagggggcgctgcccctctcggctatgacttttggtatcagccccgtcataatgtgatgattagcaccgaatgggcagcccctaacgtgttaagagatgggttcaaccccgccgacgttgaggctggcctatacggctctcacttatacgtgtgggactggcagagacacgagatcgttcagacactgtcccttaaagacgggttgatacccctcgagatccgcttcctgcacaacccggacgctgcccagggatttgtaggctgcgctctgagctccacaattcaacgcttctataagaacgagggcggcacttggtcagttgaaaaggttattcaggtcccaccaaagaaggtgaaggggtggctcctgcccgaaatgcccggtctgattaccgacattctactgtcactggatgatcgcttcctttacttctccaactggctgcatggagacttgaggcagtacgacatctccgaccctcagagaccaagactgacagggcagcttttccttgggggctcgatagtgaaaggcggacccgtacaggttctcgaagatgaggaattaaagtcacagccggagcctcttgtggtgaagggaaagagggtggcaggagggcctcaaatgatccagctgagcctggacggaaagcgcttatacatcacgacctctctttatagtgcttgggataagcagttctatcctgacctgatccgtgaggggagtgttatgttgcaggtcgatgtagataccgtcaaagggggcctcaagctgaaccccaattttttggttgacttcggcaaggaacctctcggaccggccctggcccacgaattgaggtacccgggcggggactgctcaagcgacatttggatttag

SEQ ID NO: 133680 - DNA, 1227 bp, synthetic construct
  misc_feature 1..1227: note = Description of Artificial Sequence: Synthetic coding sequence
  source 1..1227: mol_type = other DNA
atgcccaatctcaaggacgagttacaccattccggctggaatacttgctcctcctgctttggtgattcaactaaaagccggaccaagctcgtgctcccgtcacttatctcctctaggatatacgtggtggacgtaggctcagaaccaagggcgccgaaattgcataaagtgatagaaccgaaagatattcatgccaaatgtgagctcgcttttctccatacaagtcactgccttgcttcaggcgaagtgatgatcagcagcctgggcgatgtgaaaggcaacggcaagggcggttttgttctgctggatggcgagacatttgaagtcaagggtacgtgggaacgaccaggtggcgccgcccctctggggtatgatttttggtatcagccccgccacaacgtaatgattagcaccgaatgggcagcacctaacgtcctgagagacggttttaaccctgcggatgtggaagcaggattatatggctcacacttgtacgtgtgggattggcagcgacacgagatcgtgcagaccctatcacttaaagatggtctgatcccactggaaatacgctttttgcataatccggacgctgcgcaaggtttcgtgggctgcgctcttagctcgactattcagcgtttctataaaaacgagggcggcacgtggagcgtagaaaaggtgatccaggtgccccctaaaaaagtcaaaggatggctcctccccgaaatgcccgggcttataactgatatcctactgtcccttgatgatcgtttcctgtactttagcaactggctgcatggcgatctgcggcagtacgacatttctgatccccaaagaccgaggctcactggccaactgtttctggggggctcaatagtgaaagggggtcctgtacaggttcttgaagatgaggagttaaagagtcagcccgaacctcttgtggtgaaaggcaagcgagtcgccggcggacctcagatgatccaattgtctttagatgggaaaagattgtacatcaccacaagtctgtattctgcttgggacaagcagttctatccagacctgattagagaggggtccgtgatgttacaagtggacgttgacacggtcaaaggcggattaaagctgaacccaaattttctggttgactttgggaaagagcctttagggcccgccttagcacatgagttaaggtacccgggtggggactgttcgagtgatatttggatctag

SEQ ID NO: 133681 - DNA, 1233 bp, synthetic construct
  misc_feature 1..1233: note = Description of Artificial Sequence: Synthetic coding sequence
  source 1..1233: mol_type = other DNA
atggcgactaagtgcgggaattgtggccccgggtactccacaccattggaggccatgaagggcccaagagaagagatcgtctaccttccctgcatttatcggaacacgggtaccgaagcacccgattatctggcgacagttgacgtggaccctaagagccctcagtactgtcaagtcatcgaacctaaggatattcacgctaaatgcgagctagcctttctgcacacatcgcattgcctggcgtcgggtgaggtcatgatctcttccctgggcgatgtgaaggggaacggcaaggggggtttcgtccttctcgacggagaaaccttcgaagttaaaggcacatgggaacgacccggcggggctgcgccactgggctatgatttttggtaccagcccaggcataacgtcatgatatctactgagtgggctgcacccaatgtgctacgggatggctttaaccccgctgatgtggaggccggtttatatggatcccacttatacgtctgggactggcagcgacatgagattgtgcagaccctatccttaaaagatggtctgatcccacttgagattcggtttttgcacaatccggatgccgcacaaggcttcgtcggctgcgccctgtcctccaccatccagagattctataagaacgagggtgggacttggagcgtggagaaagttatccaagtgccgcctaaaaaggtcaaagggtggctcctgcccgagatgcccggcctgattaccgatatcttgcttagtctggatgaccgctttctgtatttctcaaactggctccacggagatctcaggcagtatgatatcagtgaccctcagaggcctcgactgaccgggcaactgtttctggggggaagcattgtcaaggggggtcccgtgcaggtactagaggacgaagaactgaagtcccaacctgaacccttggtggttaaaggcaaacgcgtcgctggcggtccacagatgatacagcttagtctggatggcaagagactttacattactaccagcttatatagtgcctgggacaaacagttctatccagacctcatccgagagggtagcgtaatgctgcaggtggacgtcgacactgtgaagggcggcttgaaattgaacccaaactttctggtagactttggtaaggaaccactgggacccgccttagcccacgagctgaggtatccggggggagactgctcctccgacatttggatatag

SEQ ID NO: 133682 - DNA, 1362 bp, synthetic construct
  misc_feature 1..1362: note = Description of Artificial Sequence: Synthetic coding sequence
  source 1..1362: mol_type = other DNA
atgcccggctccagtggcgccggcatggaagctgccgtggctccaggccgtgatgcgccagctccagccgcctcacagcccagtggttgcgggaagcataattcccctgagcgcaaggtgtacatggactacaatgccacaacgccactggaacccgaggttattcaggcgatgaccaaggctatgtgggaggcatggggaaacccaagcagcccctattccgcgggccgaaaggcaaaagacatcatcaatgcagcaagggagtctctcgccaaaatgatcggaggcaagccccaagatatcatttttacttctgggggcactgagtctaacaatctcgtgatccattctgtggttaagcattttcatgccaaccagacctctaagggacacaccggaggacatcatagtcctgtaaaaggagccaaaccgcacttcatcaccagcagcgtggaacacgactctatcagactcccattggaacaccttgtcgaggagcaggtggccgccgtcaccttcgtccctgtgagcaaggtctccgggcaggcggaagtcgatgacattctggcggccgtcagacctaccactaggttggtgactataatgttggcaaacaatgagaccggaatcgtgatgcccgtgcccgaaatttctcagcggatcaaagccctcaatcaggaacgggtggccgccggactgccaccgattttagtccacaccgacgcagcacaggcgctgggtaaacaacgggtggacgtcgaggatctgggcgtggacttcctcacgattgtgggacacaaattctatgggcccaggattggagcactgtacataagaggtctaggcgagtttactcccctctatccaatgctcttcggcggaggccaggagaggaattttcgacccggcaccgaaaatactcctatgatcgcggggcttggcaaagcggctgagcttgttacccagaactgcgaggcttacgaggcccatatgagagacgtgagagactatctagaagagaggctggaagcagaattcgggcagaagcgtatacacttaaattctcagttccccggtacccaaagactgcctaacacctgtaacttttccattcggggcccccgcctgcagggccacgtggttctcgcacaatgtcgggtgctgatggccagcgtcggcgcagcatgccactccgaccacggtgaccagcctagccctgtgctactgagctatggggttccttttgatgtcgctcgaaacgccctacgtcttagcgtgggtcgcagtacaacccgagctgaggtcgatctcgtggtacaggacctaaaacaagccgttgcccaattggaggaccaggcatag

SEQ ID NO: 133683 - DNA, 708 bp, synthetic construct
  misc_feature 1..708: note = Description of Artificial Sequence: Synthetic coding sequence
  source 1..708: mol_type = other DNA
ttcagtaatcctttctgtggagagacttttccccgtaaacccgacttaaaggggactcatcgctgggccccccagccatcagaagggggacaggccccgttccactacttcctgggcgggacccgactgcaccctgccgccccaggcgctcccgggggacgcacatctggttcactgctaaacgtcaaaatgatgaaaatgaagactttcatgatgatttgcttccatttaattaacaccgtcacatttgtccccgtatctaaagtgtctggccaggccgaggtcgacgatatcctggctgccgtgagaccaaccactagactggtaactattatgttggcaaataatgagaccgggatcgtgatgccagtcccagagatatcccagcgcattaaggcactgaatcaggagcgggtggccgccgggttgcccccaattcttgtgcacactgacgccgcacaggccttggggaaacagcgcgtagatgttgaagacctcggcgtagacttcctgactatagtagggcacaaattttatggccctcggatcggcgctctgtacataagaggtctcggtgaattcactcccctctacccaatgctattcggaggaggccaggagcggaattttcgcccgggcacagagaatacgcctatgattgcagggctcgggaaagtctctccaggagagctggaggaaatgagttag

SEQ ID NO: 133684 - DNA, 954 bp, synthetic construct
  misc_feature 1..954: note = Description of Artificial Sequence: Synthetic coding sequence
  source 1..954: mol_type = other DNA
atggaggccgctgtggcccctggccgtgatgcaccagcacctgcagcctctcagccctctggatgtggtaaacacaattcccctgagcggaaggtctacatggattacaacgctaccaccccactcgaacccgaggtcatccaggctatgaccaaagccatgtgggaggcgtgggggaatccctcatccccgtactctgcaggtcgcaaggccaaggacattattaacgctgcaagggaatcacttgcaaagatgattggtggcaagccacaggacatcatctttaccagcggagggaccgagagcaacaatctagtgatccacagcgtagtcaaacatttccacgcaaatcagacctctaaaggtcacacagggggtcaccattctcccgttaagggagccaaaccccactttatcactagctcagtggagcacgatagtatcaggctccccctggaacatcttgtggaggagcaagtggcggccgtgacttttgtccccgtatccaaggtttctggccaagcagaagtggatgacatcctggctgctgttcgtccgacgacacgcttggttactatcatgttagccaacaatgagactggtattgtgatgccggtgcctgagatatcacaacgaataaaagctctcaaccaggaaagagttgcggccggccttcccccaatactggtgcacactgacgctgcccaggctctgggaaaacagcgggttgatgtggaggatctcggtgtggatttcctcaccatagtgggccacaagttttacggcccccgtattggcgctttgtacattcggggcctgggcgaattcacgcccctgtatcccatgcttttcgggggcggccaggaaagaaactttaggcctggcacagaaaatacacccatgattgccggactcggcaaagtcagtccaggcgagctggaggagatgagctag

SEQ ID NO: 133685 - DNA, 1056 bp, synthetic construct
  misc_feature 1..1056: note = Description of Artificial Sequence: Synthetic coding sequence
  source 1..1056: mol_type = other DNA
atggaagccgctgtggcgccaggtcgcgacgctccggctcctgctgcatctcaaccttccggatgtggaaaacacaattctccagaacgcaaagtttacatggattataacgcgactaccccactagagcctgaggtcatccaggcaatgacaaaggctatgtgggaagcgtggggcaacccaagtagtccatactcagctgcagtgacctttgtccctgtgagtaaggtgagcggccaggctgaagtcgacgatattctggcggcagtgcgccctaccacgcgtttggtcaccatcatgctggccaataatgagacgggcatcgtcatgccagtcccggagataagccagaggatcaaggctctgaaccaggagagggtggctgcaggcctgccacccatcttagtccataccgatgcggcacaagcgcttgggaaacagcgggtcgacgtagaagaccttggcgttgactttttgacaatcgtcggtcataaattttatggcccacgtattggcgcactttacattcgggggctcggagaattcacccccctttatcctatgctgttcggtggaggccaagaaaggaacttccggccaggtactgagaataccccaatgatagcagggttgggaaaagctgctgagcttgtcacgcagaattgtgaggcctatgaagcccatatgcgcgacgtaagagactatctggaagagcggcttgaagccgaattcggccaaaagcgcatccacctcaactctcagtttcctggaacccagagactccccaacacatgtaatttctccattcggggaccaagattacaaggccatgtcgtattagcacagtgccgcgtgctgatggccagtgtcggcgccgcgtgccattctgaccatggcgatcagcctagcccagtgctactgagctatggggttccatttgatgttgcacggaacgcactgagattgtccgtaggacgctccaccacccgcgccgaagtggaccttgtcgtccaggacctgaagcaggcagttgctcagctggaagaccaggcatag

SEQ ID NO: 133686 - DNA, 720 bp, synthetic construct
  misc_feature 1..720: note = Description of Artificial Sequence: Synthetic coding sequence
  source 1..720: mol_type = other DNA
atggaggcagccgtggctcctggacgcgatgccccagcccccgccgctagccagccttccggatgtgggaaacataatagtccggagaggaaagtttacatggactacaatgccaccactcctctcgaacctgaagtcattcaggccatgactaaagcaatgtgggaagcatggggaaatccatcaagtccatattccgcgggcaggaaggccaaagacattatcaatgctgcgagagagtccctcgctaagatgatcggcggtaaaccccaggacattatctttacctctggaggaacagaggccgcagagctggtgacacaaaactgtgaggcttatgaggcgcacatgagagacgttcgcgattatctggaagagaggcttgaggccgaatttggccagaaacggatccatcttaactcccagttcccagggacacagaggctccccaatacttgcaacttttctattcgcgggcctcggttacagggacatgtggtgctcgcacagtgccgtgtgcttatggcgtctgttggcgctgcatgccacagcgaccatggagatcagcctagcccagtcctcctttcatatggagtgccgttcgatgtagccagaaatgctctgagactgagcgtcgggagaagcaccactcgggcagaagttgacctcgttgttcaagacttgaaacaagctgtggcacagctggaggaccaagcatag

SEQ ID NO: 133687 - DNA, 1338 bp, synthetic construct
  misc_feature 1..1338: note = Description of Artificial Sequence: Synthetic coding sequence
  source 1..1338: mol_type = other DNA
atggaggctgcagtggcgcctggacgggatgcacccgcaccagctgctagccagccaagcggctgtgggaaacacaattctccggagcgcaaagtctacatggactataatgccacaacaccactggagcctgaagtgatccaggccatgaccaaagctatgtgggaggcttggggaaacccaagtagtccctattctgcaggccggaaagccaaagatatcataaacgccgctagggagagtctggctaaaatgatagggggaaagcctcaggacatcatcttcacgtcaggagggaccgaatcgaacaacctcgtgatacacagcgtggtgaagcattttcacgccaatcagacctcgaaaggacacactggtgggcaccattcaccagtcaagggcgcaaagccccatttcatcacgtcatccgtcgaacacgattccattcggttgccgctggagcatctggtggaggagcaggttgccgcagtcacgtttgtgcccgtgtctaaagtgtctggacaggctgaagtcgatgatattcttgcagcagtccgacctacaaccagattggtcaccatcatgctcgctaataatgaaactggcatagtcatgcccgttccagagatcagccagagaatcaaggctttaaaccaggagcgagtggccgctgggctgcccccaatcctggttcatactgatgccgcccaggcgcttggcaagcaaagggtagatgtggaggatttgggcgtggactttctgactattgtcggtcataagttttacgggccacggatcggggccctttatatccggggtctcggcgagttcacaccgctctacccaatgttgttcggcggagggcaagagcgtaatttcaggcctggaaccgagaacactccaatgattgcaggccttggaaaagccgcagagctggtgacccagaattgtgaggcttatgaagcccacatgagagacgttcgcgactatttggaggagagattggaagcagagttcggacagaaacggatacaccttaactctcaattcccaggcacccagcgcttacccaatacatgtaatttctccattcgcgggcctcgtctccagggacacgttgtgttggcccagtgccgggttctcatggcttccgtcggggcggcgtgccacagcgaccacggcgatcagccctcaccagtgctgctgtcttatggggtgccatttgatgttgccaggaacgccctcagactctctgtcggccgctcgactacaagggccgaggttgacctcgtcgtccaagacctcaagcaggcggtcgcacagttagaggaccaggcctag

SEQ ID NO: 133688 - DNA, 966 bp, synthetic construct
  misc_feature 1..966: note = Description of Artificial Sequence: Synthetic coding sequence
  source 1..966: mol_type = other DNA
atgtctaccagggagtctttcaatcctgagtcctatgagttggacaaaagttttaggcttacccggttcacagagcttaaaggtaccgggtgcaaagttccacaagatgtcctgcaaaagctgcttgagagcctgcaagagaatcatttccaggaagacgaacagtttctaggcgccgtgatgcctagactaggcataggcatggatacttgcgtcataccgctcagacacgggggtctgagtctggtgcagaccaccgattacatctaccccattgtggacgacccctacatgatggggagaatagcctgcgcgaatgtgttaagcgatctgtatgcaatgggcgtgacggagtgcgataatatgttaatgctcctgggcgtgtctaataaaatgacggatcgtgagagggataaagtgatgcctctgatcatccagggcttcaaggatgctgctgaagaagccggtacctctgtaacagggggccagaccgtcctcaatccttggattgtgctcggcggcgtggcaacaactgtctgccagcccaatgagttcatcatgcccgacaatgctgttcctggggacgtgctcgtgctcacaaagccactgggaacacaggtggccgtggccgttcatcagtggctggacatccctgagaagtggaataagataaaactcgttgtcacccaggaggacgtcgaactggcttaccaggaggctatgatgaacatggctcggctcaaccggaccggtggtctgctcatctgcctcccccgggaacaggccgcgaggttttgtgccgagatcaagtcccctaaatacggagaagggcatcaagcctggattatcggtatcgtggagaagggcaaccggacagctcggataattgataaaccccggatcatcgaggttgctccccaagtggccacccagaatgttaaccccacacctggcgccacaagctag

SEQ ID NO: 133689 - DNA, 1179 bp, synthetic construct
  misc_feature 1..1179: note = Description of Artificial Sequence: Synthetic coding sequence
  source 1..1179: mol_type = other DNA
atgtccacccgagagagctttaatcctgagagctacgaactcgacaaatcatttcggctgaccaggtttacggaactgaagggcaccggctgcaaagtcccccaggatgtgttgcagaagcttttggagtctttgcaggagaatcactttcaggaggatgagcaatttctgggagcagtgatgccacggctcggtatcggtatggatacatgtgtgattccactccggcatgggggactctcgctggtgcaaaccacagactacatatacccgatcgtggatgacccttatatgatgggtaggattgcttgcgccaatgtcttatccgacctttatgctatgggagtcacggagtgtgataatatgcttatgttactcggagtgagcaacaagatgactgaccgtgaaagagacaaagtgatgccactcatcatccagggcttcaaggacgccgcagaagaggccggaacgtcagtgactggaggacaaaccgtgctgaatccttggatcgtactgggaggagttgcgacaacggtctgtcagcccaatgaattcatcatgccagataacgcagttcctggcgatgtcctggtcctgaccaagcctctgggcactcaggtggcggtggctgtccaccagtggttggacataccagagaagtggaacaaaataaagttggttgtgactcaagaagacgtggaactggcttatcaggaggctatgatgaacatggctcgcctgaatagaacagccgctggcctcatgcacacctttaacgcgcatgcagccacagacatcaccgggttcggaatcctcggccacgctcaaaatcttgcgaaacagcagcgcaacgaggtctctttcgtaattcacaacctgcctgtacttgccaaaatggccgcagtaagcaaggcttgcggcaatatgtttggccttatgcatggaacatgtccagaaacatccggaggattactcatttgccttcccagagagcaggccgcccggttctgtgccgagattaagtcccccaaatatggagagggccatcaggcttggatcattgggattgtagagaagggcaataggacagcgcggattatcgataagcctaggattatagaggtagccccccaggttgcaacacaaaatgttaatccaacacctggagccactagctag

SEQ ID NO: 133690 - DNA, 966 bp, synthetic construct
  misc_feature 1..966: note = Description of Artificial Sequence: Synthetic coding sequence
  source 1..966: mol_type = other DNA
atgtccacccgggagtcttttaaccctgagtcctacgaactcgacaaatccttccgcctcacgcgtttcaccgagctgaaaggcactggctgcaaagtcccacaagacgttctgcagaaactcctggagagcctgcaggagaatcacttccaggaggacgagcaattcctaggggctgtgatgcctcgtttgggcataggtatggatacctgtgtgatcccactaagacacgggggcctctcattagtgcagaccactgactacatctaccccatagtggacgacccatatatgatgggcagaatcgcctgtgcaaatgtcctttctgacctatatgcaatgggtgtcactgagtgcgacaacatgctcatgctgctgggagtctccaacaaaatgaccgaccgagagagagacaaggtcatgcctttaataattcagggatttaaggatgccgctgaggaggccggcacttccgtaactggtggacaaacggtcctcaacccttggattgtgctgggtggcgtcgctacaaccgtgtgtcaaccaaatgagtttatcatgccagacaatgctgtccctggggacgtgctcgtgctgactaagcctctgggtacccaagtcgcagtggccgttcaccagtggcttgatatcccagagaaatggaacaagatcaagctcgtggtgacgcaggaggatgtagaactggcatatcaagaggctatgatgaatatggcgcggctaaatcgcacaggtgggttgctgatttgtttgcccagggagcaggcagctcggttttgtgccgagattaaatcacctaagtatggagagggacaccaggcatggattattggcattgtggagaagggcaaccggaccgcccggataatcgacaaacccagaattattgaagtcgcccctcaagttgcaacccagaatgttaatccaacaccaggggcaacctcctag

SEQ ID NO: 133691 - DNA, 501 bp, synthetic construct
  misc_feature 1..501: note = Description of Artificial Sequence: Synthetic coding sequence
  source 1..501: mol_type = other DNA
atgagcacacgggaatcatttaatcccgagtcttacgaacttgacaagtcttttcgcctaacgcgcttcactgagctgaaagggactggttgtaaggttccacaggacgtactgcaaaagctgctggagagtctccaggagaaccacttccaggaggacgagcaattcctgggggcagtaatgccacgcctaggcatcgggatggatacgtgcgtcatccccctccggcacggaggcttgtctctggtacaaacaacagattatatctatcctatcgttgatgacccttacatgatgggacgcatcgcctgcgcaaacgtgctgtctgacctctacgccatgggagtcactgaatgcgataacatgttgatgctgctcggggtgtccaacaagatgacagatagggagagagataaggtgatgcccctaattattcagggtttcaaagatgccgccgaagaggcgggtacatcggttaccgggggccaaacggtgctgtag

SEQ ID NO: 133692 - DNA, 279 bp, synthetic construct
  misc_feature 1..279: note = Description of Artificial Sequence: Synthetic coding sequence
  source 1..279: mol_type = other DNA
atggacacttgcgtgatccctctgagacacggaggattgtccttagtccaaaccactgactacatctatcctatagtggacgatccctacatgatgggaaggattgcctgtgccaatgtgctgagtgacttatacgctatgggggtgaccgaatgcgataacatgctcatgctgcttggggtgtctaataagatgaccgacagggagcgagataaggtcatgcctctcatcattcaaggattcaaagatgccgctgaagaggccggcaccagcgtttag

SEQ ID NO: 133693 - DNA, 978 bp, synthetic construct
  misc_feature 1..978: note = Description of Artificial Sequence: Synthetic coding sequence
  source 1..978: mol_type = other DNA
atggatacttgcgtgatccccctgcgccatggcggcctgtcactcgttcaaaccacagactatatctatccaatcgtcgacgatccctacatgatggggcggattgcatgcgctaacgtgctcagcgatttgtacgctatgggagtgacagaatgtgataacatgctcatgttgctcggtgtgtctaacaagatgacagaccgcgaacgcgacaaagtgatgcccttaattattcagggatttaaagatgctgccgaggaggcaggtacctcagttaccggagggcagaccgtcttgaatccatggatcgtgctggggggagtggccaccactgtgtgtcaacctaatgagttcatcatgccagataacgctgtgccaggagatgtcctcgtactgaccaaaccattaggaacccaagtcgcggttgctgtgcaccaatggctagacattcctgagaagtggaataagatcaagctagtcgtgacacaggaggatgttgagctggcctatcaggaagcaatgatgaacatggccaggctgaataggacagcggcaggcctgatgcataccttcaacgcccatgccgctaccgacatcactggctttggtattctgggacacgctcagaacctcgctaagcagcaacgcaacgaggttagcttcgtgatacacaacctcccagttctggctaaaatggccgccgtgagtaaggcatgtggcaatatgttcggactgatgcacgggacttgtccagaaactagcggaggcctgctgatctgcctgccccgcgagcaggccgcccgtttctgtgctgaaataaaaagtcccaagtacggagaaggacaccaggcatggattattgggattgttgagaaaggaaatcggactgcacgcattattgacaagccaaggatcatagaagtggctccacaggttgctacccaaaatgtaaacccaactcctggagccacttcctag

SEQ ID NO: 133694 - DNA, 975 bp, synthetic construct
  misc_feature 1..975: note = Description of Artificial Sequence: Synthetic coding sequence
  source 1..975: mol_type = other DNA
atgagcacccgtgagtcgttcaatcccgaaagttatgagcttgataaatctttcaggctgacacgtttcaccgagctcaagggaaccggctgcaaggttcctcaggacgtgttgcaaaagttgttagaatctttgcaagagaatcactttcaagaggacgaacaatttctgggggcagtaatgccacgacttggcattggtatggacacttgtgtgatccccctccggcacgggggccttagcctagtgcagacaacggattacatctaccctattgtggacgatccttatatgatggggcgaattgcctgtgcaaatgtgctgagcgatctctatgccatgggggtcactgagtgcgacaacatgctcatgctgctgggcgtgtccaacaaaatgacggacagagagagggacaaagtgatgcctttgatcatccagggctttaaggacgctgcagaggaggcgggaacctccgttaccggcgggcagacagttctgaacccttggatcgtgctgggcggcgttgccaccactgtctgtcagccgaacgaatttatcatgccggataatgccgtaccgggcgacgtgcttgttctgacaaagcccctcggtacgcaggtggccgtggctgtccaccagtggctcgacatcccagagaaatggaacaagattaaactggtggtcacccaggaggatgttgaactcgcctaccaggaggcgatgatgaacatggcgaggcttaaccgaacggcagccggcctgatgcatacttttaatgcccatgcagctacagatatcaccgggttcggcatactcgggcatgcccaaaacctcgccaagcaacagcgcaatgaggtctctttcgtcattcataaccttcctgtcctggctaagatggccgccgtaagcaaggcctgtggcaatatgttcgggcttatgcacggcacttgccccgaaaccagtgatgtgcagtag

SEQ ID NO: 133695 - DNA, 1200 bp, synthetic construct
  misc_feature 1..1200: note = Description of Artificial Sequence: Synthetic coding sequence
  source 1..1200: mol_type = other DNA
atggccgaagcttctgcaaccggcgcctgcggagaggccatggctgccgcagagggaagctcaggtccagcagggctaactctgggcagattaacgggcttctccggaatgaaggggttagtcgggggtcaggaggaggcctctcaggaggccggtctaccagctggggcaggtccgagcccaaccttccctgctctcggtattgggatggattcctgcgtcatccccctgaggcacggaggccttagcctggtgcagactacagactttttctacccactcgtggaggacccatatatgatgggccgtatcgcctgtgccaacgtcctttcagacttgtacgcaatggggatcacggaatgtgataatatgctcatgctgctgagtgtctctcaatccatgagcgaagaggaaagggagaaagtcactcctctcatggtgaaaggttttagggatgccgcagaggagggagggactgctgttactggaggacagaccgtggtaaacccctggatcataataggaggtgttgccacggttgtgtgtcagcctaatgaattcatcatgcccgatagcgcagtagtcggggatgtgctggtgctaaccaaaccgctgggcactcaggtcgcagtcaacgcccaccagtggctggacaatccggaaagatggaataaagtcaagatggtggtgtccagagaggaggtggaactcgcctatcaggaagctatgttcaatatggccacgcttaatagaacggcggccggactgatgcacacgtttaacgcacacgcggccacagatatcactgggtttggtatactcgggcatagtcagaacctggctaaacagcagcgaaatgaggtttcttttgtaatccacaacttgccaatcatcgccaaaatggcagctgtgtcaaaggcttctggccggtttggtttactccagggtacctcagctgaaacctcgggcggcttactaatctgcctacctcgcgagcaggcagcaaggttttgctcagaaatcaaatcctccaagtatggcgaaggccaccaggcttggatcgtcggaattgttgagaaaggtaacagaactgcaaggatcattgataagcctagggtgatagaagtgctgccccgtggcgcgaccgcagcagtgttggctccagacagctcaaacgcctccagcgaaccttcatcatag

SEQ ID NO: 133696 - DNA, 1452 bp, synthetic construct
  misc_feature 1..1452: note = Description of Artificial Sequence: Synthetic coding sequence
  source 1..1452: mol_type = other DNA
  misc_feature 1..177: note = DNA
  misc_feature 178: note = RNA
  misc_feature 179..1344: note = DNA
  misc_feature 1345: note = RNA
  misc_feature 1346..1452: note = DNA
atggcggaagcgagcgccactggagcttgcggggaagcaatggccgcggcagaaggaagttctggaccagctggtctcaccctgggacggtcattctcaaattaccgccctttcgagccccaggctctgggccttagcccatcatggcgcctcacgggctttagtggcatgaagggatgaggctgcaaggttccccaggaggccctgttgaagctgcttgccggcctgacacgccccgacgtgaggcctccccttgggcgggggctggtcggaggtcaggaggaagccagtcaggaggccggactacccgccggtgcaggtccatcacccaccttccccgccctggggattgggatggactcgtgcgttatacctctacgccatggtggcctctccctggtacagacgactgacttcttctaccctctggtcgaagatccttacatgatgggccgcattgcttgcgcaaatgtgctctccgacttgtacgctatggggataacagagtgtgataatatgcttatgcttctgtctgtgtctcagagcatgtctgaggaggagagagagaaagttacccctctgatggtgaaagggtttcgggatgctgccgaggaggggggcaccgcggtgaccgggggtcagacagtagttaacccctggatcatcatcgggggcgtggctaccgttgtttgtcaaccaaacgaatttattatgcctgacagcgccgttgtcggggatgtgctggtgttgacaaaacctctgggcacccaggtcgccgttaacgctcatcagtggctggataacccggaaagatggaataaagttaagatggtcgtcagcagggaagaggtggagctcgcgtaccaggaagccatgttcaatatggcaacattaaataggactgccgcaggacttatgcacaccttcaacgcccacgcagccacagacatcaccggattcggcatattgggacattcgcagaacctcgctaaacaacagcgaaatgaagtgtccttcgtcattcacaaccttccaatcattgctaagatggccgccgtgtcgaaggctagtgggcggttcggcctgctgcaggggacctccgctgaaacatcaggaggcctgctgatctgtctcccacgagagcaggctgcacgcttctgtagcgagataaaatcctctaagtacggggagggccatcaggcatggattgtaggtattgtggaaaaaggaaacaggacagccagaataattgacaaacccagagtcattgaggtcttacctcgtggcgctacagcagccgtgctggccccagactcttccaacgccagttccgaaccatcctcttgagatgaacggactgaggttgtatggaccttagagcccctatctaccataacagatggctctcaagagctgatcgtacgcaattttcagcgacgacttccagcctag

SEQ ID NO: 133697 - DNA, 1347 bp, synthetic construct
  misc_feature 1..1347: note = Description of Artificial Sequence: Synthetic coding sequence
  source 1..1347: mol_type = other DNA
  misc_feature 1..177: note = DNA
  misc_feature 178: note = RNA
  misc_feature 179..1347: note = DNA
atggccgaggctagtgcgaccggcgcttgtggggaagcaatggccgcagccgaaggctctagtggacccgccggcctcactctgggccgatctttctcaaactataggcccttcgagccccaggccctgggactgtccccttcatggcggttaacgggctttagcggaatgaaaggatgagggtgcaaggtacctcaggaggccctgctgaagctgctggcagggctcacgaggcccgacgttcgcccgccattagggaggggccttgttggtggacaagaagaagcatcccaagaagcaggactgcctgccggcgctggaccttcccctacattccccgccctaggcatcggcatggattcctgtgtaatccccctcaggcacgggggattgagcctcgtgcagacaacggactttttttatcccctggtcgaggacccgtatatgatgggccgaattgcatgtgccaatgtcctgtccgacttgtacgcaatgggaatcaccgagtgcgacaacatgctcatgctgctgagtgtgtcccagtccatgtcagaggaagagagggagaaggtgaccccattgatggtgaaaggctttcgagacgctgcggaagagggtggtaccgctgtgacaggcgggcaaaccgtcgtcaacccttggattatcatcggcggagtcgcaacagtggtctgtcagccaaacgaatttattatgccagactcggccgtggtaggagacgtattagtcctcaccaaacctctggggacgcaagtggccgtgaatgctcaccaatggcttgataaccccgaacggtggaataaggtaaaaatggtggtgtcaagggaagaagtggagctggcttaccaggaggctatgttcaatatggcgaccctgaataggacggctgccggcctaatgcacacctttaatgctcacgctgctaccgacatcaccggattcggcattttgggccattctcaaaacctggcgaagcagcaacgcaatgaagtttcctttgtgattcacaacctgccaatcatcgccaaaatggccgcagtgtctaaggcaagcggtcggttcggcctcctccaagggacttccgccgagacttcagggggcctcctcatctgtctgcccagagaacaagcagcccggttctgctcagagattaagtcatccaagtacggtgagggtcatcaggcttggatcgtgggaatcgtggaaaaggggaatagaactgcaagaatcatcgataaacctcgggtgatcgaggtattgccccgaggcgccaccgctgcagtgcttgcgccggacagtagcaatgcgagttctgagccaagtagttag

SEQ ID NO: 133698 - DNA, 1176 bp, synthetic construct
  misc_feature 1..1176: note = Description of Artificial Sequence: Synthetic coding sequence
  source 1..1176: mol_type = other DNA
atggccgaggcatccgccacaggagcttgcggagaagctatggcagccgccgagggctcctcaggcccggccggactcaccctagggcggtcttttagcaactataggccttttgaacctcaggaagcgggtctgcctgctggagcaggaccttcaccaactttccctgcgttaggcattgggatggactcttgtgtcatcccattgcgacatggcggcttatcactggtgcaaaccacagattttttctatccactcgtcgaggacccatatatgatggggcgcatcgcctgtgctaacgttctcagcgatctttatgcaatgggcataacggagtgcgacaacatgctgatgctgctgtcagtttcacagagcatgtctgaggaggagagagaaaaggtgactcctctgatggtgaaggggtttcgagatgccgctgaggagggaggaaccgccgtgactggcggccagacggtcgtcaatccctggatcatcattggcggagttgccaccgtggtctgtcagcctaacgagtttataatgcctgattcagcggtggtcggggacgtccttgtgctgaccaagccactcggtacccaggtggcagtgaatgcccaccagtggctggacaaccctgaacgctggaacaaagtgaagatggtggttagccgggaagaagtagagctggcataccaggaggccatgttcaatatggctaccctcaaccgtaccgctgccgggttgatgcatacctttaacgctcacgccgctacagatattacaggcttcggtatcctgggccactcacaaaacttggccaagcaacagcgcaatgaggtgtcattcgtaatccataacctgcccattattgccaaaatggccgctgtatccaaagccagtggccgctttgggttactgcagggcactagtgccgagacgagcggcggactgttgatatgtcttccacgcgagcaggccgcacggttttgtagtgaaatcaagtcatccaagtatggtgaagggcaccaggcctggatcgtgggtatagttgaaaaagggaataggactgcccgaatcatcgataagccgagagtcatagaggtgttgccacggggtgccaccgcagctgtgctcgcacccgattcctctaatgcatcttctgaaccaagtagttag

SEQ ID NO: 133699 - DNA, 1671 bp, synthetic construct
  misc_feature 1..1671: note = Description of Artificial Sequence: Synthetic coding sequence
  source 1..1671: mol_type = other DNA
atgggaagggcaagaccaggacagcgcggtcccccatctcccgggccagccgctcagccacctgcacccccccgcagacgtgcaaggtccttggcactgctgggggctcttctcgcagctgccgccgctgcagcagtacgggtgtgcgcccgccacgccgaagcccaagccgcagcccgacaggaattagccctgaagacactgggtaccgacggtttgtttctattctcctctttggatacagacggcgacatgtacatttcgcccgaggaattcaagcctattgccgagaaactcacaggcagcactcctgctgcaagttgtgaggaggaggagctgccccctgatccaagtgaggaaacattaacaatcgaagctcgattccaaccgctgctccctgaaactatgaccaagagtaaagatggatttctgggcgtttcaaggctggcactcagcgggttaaggaattggacagcagctgcttccccaagcgcagttttcgcaacacgccattttcagccgttcctcccaccacccggtcaggagctcggcgagccttggtggatcatacctagcgaattaagtatgttcacaggctacctcagtaataatcgtttctaccctcccccaccaaaagggaaggaagtgattatccatcggttgctgtccatgttccacccaagacccttcgtcaaaacacggtttgctcctcaaggggccgttgcctgtcttaccgccatttctgatttttactatactgtaatgttccgcatccacgccgagtttcagctgagcgaaccgccggactttccattctggttttctccggcccagttcactggacatataattctgtcaaaggacgctacccatgtccgtgatttccgacttttcgtgcccaaccataggagtctgaacgtggatatggagtggctgtatggggccagtgagagttcaaatatggaggtggatattgggtatatcccccagatggagctcgaggccacaggcccgtctgtaccttctgtcatactcgatgaagacggcagtatgatcgactcccacctgccttccggcgagccattacagtttgtgtttgaagagatcaaatggcagcaagaactcagctgggaggaagctgctagacggctggaggtcgctatgtacccttttaaaaaagtgtcgtatctccctttcacagaggcttttgatagagcgaaagctgagaacaaattagttcactccatccttttgtggggggctctggatgatcaatcgtgccactgcagcggccgcaccctgcgcgaaaccgtgctggaatcctctcctattctgacgttgctgaacgaatctttcatttcaacttggtcactggtgaaagaattggaagagttgcagaacaatcaggaaaactcttctcaccaaaaactggccggtctccatctcgagaagtatagttttcctgtggagatgatgatctgtctgcctaatgggaccgtggtgcaccacataaacgcaaattactttctggatatcacttctgtcaaacctgaggagatagagagcaatctgttttccttttcatcgacgtttgaagacccaagcaccgccacttacatgcagtttttgaaggaaggcctgaggcgcggactccccctcctccagccttag

SEQ ID NO: 133700 - DNA, 1773 bp, synthetic construct
  misc_feature 1..1773: note = Description of Artificial Sequence: Synthetic coding sequence
  source 1..1773: mol_type = other DNA
  misc_feature 1..378: note = DNA
  misc_feature 379: note = RNA
  misc_feature 380..1383: note = DNA
  misc_feature 1384: note = RNA
  misc_feature 1385..1773: note = DNA
atgggaagggcccgaccaggtcaaagaggaccccccagtccgggcccagccgcacagcctcccgcgcccccgcggcgccgggctcgctcactggcactgctgggtgccttactggccgctgccgcagcagccgcagtgcgggtatgcgcacgacacgcagaagcgcaggccgccgccagacaggagctggcactgaagactttgggtactgacggattgttcttattcagcagccttgacactgacggggatatgtatatctcaccagaggaattcaaaccaatcgctgaaaagctcaccggttcatgcagcgtcacgcagacaggggtgcagtggtgctcccactccagccttcagcctcaactgccctggcttaactgatcgagttgcctgagtttactaagaagcactcctgcggcctcatgtgaagaggaggaattgccccctgaccccagcgaggaaactctgactatcgaagctagatttcagcctctattacctgaaactatgaccaaatccaaagatggatttctcggcgtctccaggctggctctatcgggtctcaggaactggaccgcggctgcgtcaccctccgctgtcttcgcaacccgacacttccaaccctttctcccaccacctggacaggaactgggggaaccctggtggatcattccttcagaactgagcatgtttaccggctacctctccaacaacagattctatccaccaccccctaagggcaaggaagttattatacatcgccttttatcaatgtttcatccaaggcctttcgtgaagacccgcttcgcccctcagggcgctgtggcctgtctgaccgctatatctgacttctattacactgtgatgttcaggatccacgcggagttccagctctctgagccccctgatttcccattttggttttctcccgcccaattcaccggccacatcatcctgtccaaagatgcgacgcatgtcagagatttccgcctcttcgttcctaaccatcgttccctgaacgtcgacatggagtggctatacggcgcctctgagagctccaacatggaagtagacatcggatacatcccacagatggaactagaagcgaccggcccctccgtgccctctgtaattcttgatgaagatgggtctatgattgactctcacctcccttctggggaaccacttcagttcgtctttgaggagattaaatggcagcaggagctctcctgggaggaagcagctcggcgcctcgaggtggccatgtaccccttcaaaaaggtgtcatacctaccctttacagaggccttcgacagggctaaggctgagaacaagctagtgcatagcatcctactttggggggcgttggacgatcagtcctgctgaggttccgggagaacacttcgagagacggtgctggagtcctcacccatcctaactctcctgaatgaatcttttataagcacatggtccttggtcaaggagctggaggagctgcagaataaccaggaaaattcgtcacatcagaagctcgccggcttgcacctggagaaatactccttccccgtagagatgatgatctgtctgcctaatggaacagtcgtgcaccatattaacgccaattacttccttgatattaccagtgtgaagcccgaggaaatagagtcgaaccttttttccttctctagcactttcgaagaccctagcactgccacatatatgcagttcctcaaggagggactgaggcggggcctgcctctgctgcaaccttag

SEQ ID NO: 133701 - DNA, 1671 bp, synthetic construct
  misc_feature 1..1671: note = Description of Artificial Sequence: Synthetic coding sequence
  source 1..1671: mol_type = other DNA
  misc_feature 1..1281: note = DNA
  misc_feature 1282: note = RNA
  misc_feature 1283..1671: note = DNA
atgggacgagcccgacccggacagaggggaccaccctcaccaggccctgccgcccaaccaccagctcccccccgtagaagggctcgttcacttgccctcttaggagcactgttggctgcagccgcggctgcagcggtgagggtttgtgcgagacacgccgaagcacaggccgccgctcgtcaagagctggctctgaaaaccctgggaacagatggactgtttttattctcgtccctggacacagacggagacatgtacatcagtcccgaagaattcaaacccattgccgagaagttgacaggaagtaccccagcagccagctgcgaggaggaagagctgccacccgaccctagtgaagaaacgttgaccatcgaggctcgctttcagccactgctccccgagactatgaccaagagtaaagatggctttttaggggtttcccgactggccctctcaggccttagaaattggactgcggcagccagcccctccgccgtattcgctacgaggcacttccagccatttctgccccctcccgggcaagagctgggcgagccttggtggatcatcccttcagagctttcgatgttcaccgggtacctgtccaataatcgtttctacccgcccccacccaaaggcaaagaggtcattatccatagattgctgtccatgttccatcctagaccattcgtgaaaacacggtttgccccgcagggcgcagtggcctgcttaaccgccatctcagacttctactacacagtgatgttccggatacatgctgagttccagctcagcgagcccccagatttccctttctggttctctcctgcccagttcaccggacatatcatactgagtaaggatgcaacccatgtgcgggattttcggttgttcgtgccgaaccatagaagtcttaatgtcgatatggaatggctttatggtgcttctgagtcctcaaacatggaggttgatatagggtacatcccacagatggagctggaagcaactggacctagcgtgccttccgttatcctggacgaggatggttctatgatcgacagccacctgccatcaggtgagcccctgcagtttgtctttgaagaaataaaatggcaacaagagctgtcctgggaggaggcagcccgacgccttgaagtggcgatgtatccctttaaaaaggtgtcttatttgccttttacagaggcctttgacagagccaaagcggaaaacaagctagtacatagcattctgctttggggcgccctcgacgaccagagctgctgaggaagtggccgaactcttagagaaacagtgctggaaagcagtcccattctcaccctgttgaatgaatcattcatcagtacttggagcctcgtaaaagaactggaggagctccagaacaaccaagagaattcaagtcaccagaagcttgctgggctgcatttagagaagtattctttccctgtagagatgatgatctgccttcctaatggtacggtcgtgcatcacatcaacgctaattattttctcgacatcacatcagttaaacccgaagaaatcgaatccaacctcttctccttctcttccacttttgaggatccatccaccgccacttacatgcaattcctcaaggaagggctgcggagaggcctgccgctactacagccctag

SEQ ID NO: 133702 - DNA, 1146 bp, synthetic construct
  misc_feature 1..1146: note = Description of Artificial Sequence: Synthetic coding sequence
  source 1..1146: mol_type = other DNA
  misc_feature 1..174: note = DNA
  misc_feature 175: note = RNA
  misc_feature 176..897: note = DNA
  misc_feature 898: note = RNA
  misc_feature 899..951: note = DNA
  misc_feature 952: note = RNA
  misc_feature 953..987: note = DNA
  misc_feature 988: note = RNA
  misc_feature 989..1032: note = DNA
  misc_feature 1033: note = RNA
  misc_feature 1034..1053: note = DNA
  misc_feature 1054: note = RNA
  misc_feature 1055..1098: note = DNA
  misc_feature 1099: note = RNA
  misc_feature 1100..1104: note = DNA
  misc_feature 1105: note = RNA
  misc_feature 1106..1125: note = DNA
  misc_feature 1126: note = RNA
  misc_feature 1127..1131: note = DNA
  misc_feature 1132: note = RNA
  misc_feature 1133..1146: note = DNA
atgtggaggagcctcggccttgcgctggctctatgcttgttgccgtcaggcggcaccgagagccaggaccagagtagtctgtgcaaacagcccccagcatggtccattcgcgaccaagatcccatgctgaatagtaatggttctgtgacagtggtggcccttctgcaggcaagttgatacctatgcatattgcaagcatccaagctggaggatcttcgcgttaaactcaagaaggaaggttacagtaacatatcttacattgttgtgaatcaccaaggaatcagcagcaggctgaagtatacccacctaaagaacaaggtctctgagcacatccctgtgtaccagcaggaggagaatcaaaccgacgtgtggacactgctcaatggctcaaaagatgacttcctgatctacgacagatgcggacgacttgtctatcatctgggcctccccttcagcttcctaacattcccttacgtggaggaggccataaaaatcgcttactgtgagaaaaaatgcgggaattgctcactcacaactttaaaagacgaggatttttgcaaacgcgtctcacttgctactgtagataagacggtggaaaccccctctccacactaccaccatgaacatcaccacaatcacggccaccaacatctggggagtagcgagctctcagagaaccagcagcccggcgctccgaacgcccctacacaccccgcgcctcccggtctgcaccaccatcacaagcataaaggacagcaccgtcaaggacaccccgagaaccgcgacatgccggctagtgaggacctgcaggatctccagaaaaagctctgccgcaaacggtgtatcaatcaacttctctgtaaactcccgaccgattcagagctggcccctcgctcttgatgttgtcattgcagacacctcatctttgaaaagaccggttccgccatcacttgacagtgcaaagagaacctgcctagcctctgtagctgacaaggacttagggctgaagagaacattactgagagctgccagtgacgcctccctccggctgcatgacagatctcccagcagctcataccaactgaggcatccgcatcctgaagatgaaagaatcaggccaagaaatgagagtgaccctccaattag

SEQ ID NO: 133703 - DNA, 630 bp, synthetic construct
  misc_feature 1..630: note = Description of Artificial Sequence: Synthetic coding sequence
  source 1..630: mol_type = other DNA
  misc_feature 1..174: note = DNA
  misc_feature 175: note = RNA
  misc_feature 176..630: note = DNA
atgtggagaagcttgggtctggctctagcgctgtgcctgctcccatcaggaggcacagagtctcaagaccaatcaagcctttgcaaacaaccccccgcgtggtcaatcagggaccaggacccaatgctaaatagtaatgggtcagttacagtggtggcacttctgcaggcctcgtgatacctgtgcattctgcaagccagtaagcttgaggatctccgtgtcaagcttaagaaggaaggctactccaacatatcttacatagtggtcaatcaccagggcatctccagtcgcctgaagtacacgcacttgaagaacaaggtgagcgaacacattcctgtctatcagcaggaggagaatcaaactgatgtctggacactgctgaatggctctaaggatgacttcctgatctatgacaggtgcggccgtctcgtgtaccatttgggtctcccattctctttcctcacatttccctacgtggaagaagccatcaaaatcgcctattgcgaaaagaaatgtggcaactgctcattgactacactaaaggatgaagatttttgcaagcgcgtgagcctcgcgacggtggataagactgtggagacccccagccctcactaccaccatgagcactag

SEQ ID NO: 133704 - DNA, 1146 bp, synthetic construct
  misc_feature 1..1146: note = Description of Artificial Sequence: Synthetic coding sequence
  source 1..1146: mol_type = other DNA
  misc_feature 1..174: note = DNA
  misc_feature 175: note = RNA
  misc_feature 176..897: note = DNA
  misc_feature 898: note = RNA
  misc_feature 899..951: note = DNA
  misc_feature 952: note = RNA
  misc_feature 953..987: note = DNA
  misc_feature 988: note = RNA
  misc_feature 989..1032: note = DNA
  misc_feature 1033: note = RNA
  misc_feature 1034..1053: note = DNA
  misc_feature 1054: note = RNA
  misc_feature 1055..1098: note = DNA
  misc_feature 1099: note = RNA
  misc_feature 1100..1104: note = DNA
  misc_feature 1105: note = RNA
  misc_feature 1106..1125: note = DNA
  misc_feature 1126: note = RNA
  misc_feature 1127..1131: note = DNA
  misc_feature 1132: note = RNA
  misc_feature 1133..1146: note = DNA
atgtggaggagcttgggtctggcactggctctctgcctgttaccctccggcggaactgagagccaggatcaatcaagcctgtgcaaacagcccccagcatggtccatcagggaccaggatcctatgctgaatagcaatgggagcgtaaccgttgttgcccttttgcaggccagctgatacctttgtattttgcaagcctccaaactggaagatctgagagtgaagctgaagaaggagggatacagcaacatttcttacatcgtcgtaaatcaccaaggtatctcgagccgcctgaagtatacccatcttaaaaataaggtgtccgaacacattccagtgtatcagcaggaggagaaccagactgatgtgtggactttgctcaacgggtctaaggacgatttcctcatctacgaccgttgtgggaggctggtgtaccacttaggcctacccttttccttcttaactttcccatacgtggaagaggctatcaaaatcgcctattgtgaaaaaaaatgtggcaactgctctcttaccacattaaaagacgaggatttttgcaaacgggtctcccttgcaacggtcgataaaactgtcgaaactcccagcccacattaccatcacgaacaccaccacaaccatggccatcagcacctgggatcttcagaactgagcgaaaaccagcaaccaggggctcccaatgcacccacccaccccgcacccccgggcctgcatcatcaccacaagcataagggtcagcacagacagggtcatcctgaaaatagagatatgcctgccagcgaggacctacaagacctgcagaagaaactctgccggaaacgctgtattaaccagcttctatgcaaattacccaccgactccgagttagccccccgcagttgatgctgtcattgtcgccatcttatattcgagaagacaggaagcgccattacctgacagtgcaaagagaatctgccttctctctgttcttgacaggggttgagggctgaggagaatattactgagagctgccagtgacggcttcctccagccgcctgacaaatctcacaacagctgataccaaccgaagcttccgccagttgaaggtgaaagaaccaagctaaaaagtgagagtgaccctctaattag

SEQ ID NO: 133705 - DNA, 933 bp, synthetic construct
  misc_feature 1..933: note = Description of Artificial Sequence: Synthetic coding sequence
  source 1..933: mol_type = other DNA
  misc_feature 1..174: note = DNA
  misc_feature 175: note = RNA
  misc_feature 176..897: note = DNA
  misc_feature 898: note = RNA
  misc_feature 899..933: note = DNA
atgtggagatccctagggctcgcccttgccctatgtctgttgcctagcggcggcacagaatctcaggaccaaagttccctgtgcaagcaacctccagcttggtcgattcgtgatcaggaccccatgttgaacagcaatggaagtgtgactgtggtggccttgttgcaggcctcatgatacctctgcatactccaggccagcaagctagaagacctacgagtcaaactgaagaaggaaggctacagcaacatatcctacatcgtggtgaaccaccaaggaatatcatctcggctgaaatacacccacctgaagaataaggtcagcgaacacattcctgtgtaccagcaggaagaaaatcagactgatgtgtggaccctgttgaatggcagtaaggacgatttcctcatttacgatcggtgtgggcgactagtttaccacctgggcctaccattttcattcctgaccttcccatatgtcgaagaggccattaagattgcctattgtgagaagaaatgcggtaactgctccttgactactttgaaggacgaggacttctgtaagcgggtcagcctcgcaaccgtcgacaagacagtagaaacaccatccccccactatcaccacgaacaccatcacaatcatggccatcagcacctgggttcctctgagttatccgagaatcagcagcctggtgcccctaatgccccaacacacccagctcctccaggattgcatcatcatcataagcataaagggcagcataggcagggacatccagagaatagagacatgcctgcgagcgaagaccttcaggacctccagaagaagttgtgtaggaaaagatgcattaatcaactactgtgtaagctgccaaccgattcagagctggctccaagatcttgatgctgtcactgtcgccatctcattttcgaatag

SEQ ID NO: 133706 - DNA, 1146 bp, synthetic construct
  misc_feature 1..1146: note = Description of Artificial Sequence: Synthetic coding sequence
  source 1..1146: mol_type = other DNA
  misc_feature 1..174: note = DNA
  misc_feature 175: note = RNA
  misc_feature 176..897: note = DNA
  misc_feature 898: note = RNA
  misc_feature 899..951: note = DNA
  misc_feature 952: note = RNA
  misc_feature 953..987: note = DNA
  misc_feature 988: note = RNA
  misc_feature 989..1032: note = DNA
  misc_feature 1033: note = RNA
  misc_feature 1034..1053: note = DNA
  misc_feature 1054: note = RNA
  misc_feature 1055..1098: note = DNA
  misc_feature 1099: note = RNA
  misc_feature 1100..1104: note = DNA
  misc_feature 1105: note = RNA
  misc_feature 1106..1125: note = DNA
  misc_feature 1126: note = RNA
  misc_feature 1127..1131: note = DNA
  misc_feature 1132: note = RNA
  misc_feature 1133..1146: note = DNA
atgtggagatcactaggcctggctctggcgctttgcctgttaccatctggtggcaccgagtcccaggaccagagtagcctgtgcaaacagcccccggcatggagcattagagaccaggaccccatgttgaacagcaatggaagcgtgactgtcgttgcccttctgcaagcctcttgatacctgtgtatcttacaggccagtaagttggaagacttaagagtgaagctgaagaaggagggatattcaaacataagttacatcgtcgtaaatcaccagggaattagctctaggcttaagtatacccacctcaaaaataaagtgtccgagcacattcctgtctaccaacaggaagagaatcagactgatgtttggaccctgctgaacgggtccaaggacgattttctgatctacgaccgctgcgggcggctcgtctatcacctcggactgcccttttctttcttgacattcccctacgtggaggaggccattaaaattgcttactgtgagaaaaagtgcggaaactgcagtttgactacccttaaggatgaggatttttgtaagagagtaagcctcgctacggtggacaagacggtggagacaccttccccccactaccaccacgaacaccatcataatcacgggcaccagcacctcggttctagcgaactgtcagaaaaccagcagccgggagcaccaaatgcgcctacacatcctgccccacctggacttcaccatcatcataaacacaagggccagcaccggcaggggcaccccgagaaccgagatatgccagcttctgaagatctacaggatctgcagaaaaagctttgtaggaaaagatgcatcaatcagctgctgtgtaaactgccaacggacagcgaactggcgcctcggtcatgatgttgccactgcaggcacctcattttcgagaagacaggctctgccataacctgacagtgtaaggaaaacctccccagcctgtgcagttgacaggggttgcgggcagaggagaatataaccgagtcctgtcagtgacgtctgccccccgctgcctgacaaatcagccaacagctcattcctactgaggcgagcgccagttgacgttgaaagaaccaagctaaaaaatgagaatgacccagcaattag

SEQ ID NO: 133707 - DNA, 264 bp, synthetic construct
  misc_feature 1..264: note = Description of Artificial Sequence: Synthetic coding sequence
  source 1..264: mol_type = other DNA
  misc_feature 1..36: note = DNA
  misc_feature 37: note = RNA
  misc_feature 38..264: note = DNA
atggccctggccgtgagggttgtttactgtggcgcctgagggtataagtctaagtacctccaactcaaaaagaaactcgaggatgaatttccagggagactggatatatgcggggagggcaccccacaggctaccggtttcttcgaagtaatggtggccggaaaactgattcactctaagaaaaaaggagatggttacgttgacacagagtctaagttcctgaaacttgtcgccgcaatcaaggctgcgcttgcccaggggtag

SEQ ID NO: 133708 - DNA, 267 bp, synthetic construct
  misc_feature 1..267: note = Description of Artificial Sequence: Synthetic coding sequence
  source 1..267: mol_type = other DNA
atggccttggctgtcagggttgtttactgctgcggcgctggcggctacaaatccaagtatttacaactgaagaaaaagctcgaggacgaatttcccggccggttggatatctgcggggaaggtaccccgcaagccacaggctttttcgaagtgatggtcgccggtaaactgatccactccaagaaaaagggagatgggtatgttgatactgaatcaaagtttcttaaactagtggctgctattaaggccgctctggcccagggttag

SEQ ID NO: 133709 - DNA, 351 bp, synthetic construct
  misc_feature 1..351: note = Description of Artificial Sequence: Synthetic coding sequence
  source 1..351: mol_type = other DNA
  misc_feature 1..282: note = DNA
  misc_feature 283: note = RNA
  misc_feature 284..351: note = DNA
atgtcgttctgtagcttctttgggggtgaggtgttccagaaccatttcgaacccggggtgtacgtctgcgctaagtgtgggtacgagctttttagttctcgttctaagtacgcacacagttctccatggcctgctttcacggaaacaatccatgcagattctgttgctaaaagaccggagcataaccgctccgaagctctgaaagtgagctgtggtaagtgcggcaacggtctcggtcacgagttcctgaatgatgggcccaaaccgggccaatctaggttttgaatcttcagtagctcattaaaatttgtgcctaaaggcaaagagacatcagccagtcagggtcactag

SEQ ID NO: 133710 - DNA, 681 bp, synthetic construct
  misc_feature 1..681: note = Description of Artificial Sequence: Synthetic coding sequence
  source 1..681: mol_type = other DNA
atgtctttctgctctttcttcgggggcgaagtctttcagaaccactttgagcctggtgtctatgtgtgtgcaaaatgtgggtatgaactgttcagttccaggtccaagtacgcacatagcagcccttggccagccttcacagagaccatacacgccgattccgtcgcaaaacggcccgagcataatagatcggaagcactgaaggtaagggggcaccggggcggcggagggacgggcgccgcacgcgaaagcagggaaccagtgcccccctctagtctgtgtctcccacactccagccggggattagaggcttccattcccgggctgctaccactgcccgggtcatgccacccccgactgtctggtgagccggggctgctcgtgcaaatgtgggagactggtcaggtgagctgtactggatccaggactaaagttaatttactgtgcagaaggtctgcgtgggagattggagtgtgggaagagaccccttcggcgtcccctagcaaagggctgcactgtggctgcattatggcccgatccagcccatcatgtctggttatttttccgggggtgttatggcaagtctggcagtgggtaggccctcgggttccagagcgcagaccccaggcaggagcagtgcctatcctcaatatacagcaactggccgaagtttgcccatag

SEQ ID NO: 133711 - DNA, 2328 bp, synthetic construct
  misc_feature 1..2328: note = Description of Artificial Sequence: Synthetic coding sequence
  source 1..2328: mol_type = other DNA
atggccagtgccggacacatcattacattgttgttatggggatatctgctggagctctggacaggaggacacaccgcggacacgacacatcccaggctgaggctgtcccacaaggagttgctcaacctgaacaggacatcaatcttccactccccatttgggttcctggatttacatacaatgttgctggacgagtatcaggagcggcttttcgtaggaggtcgcgacctggtttacagtctgtcgcttgagagaatcagcgacggatacaaagagatacactggcccagtacggctctgaaaatggaagagtgcattatgaagggcaaagacgccggagagtgcgcgaactacgtgcgagtcctgcaccattataaccgaacccatcttctgacctgtggcaccggtgcatttgacccagtttgtgcattcattcgcgtcggttatcacctcgaggatcctctgttccatctggaatcaccccgctctgaacggggcaggggccgctgtccattcgacccctcatccagcttcatcagcaccctcatcggcagcgagctgttcgccgggctgtactccgactattggtccagagatgccgccatttttcgcagtatgggaagactggctcacatacgtaccgaacatgatgatgaacggctcctcaaagagcccaaatttgttggatcttacatgatacctgacaacgaagatagggacgacaataaagtgtatttcttcttcactgagaaagctttggaagccgaaaataatgcccatgccatttacactagagtgggccggctttgcgtcaatgacgtgggcggtcagaggatcctcgtgaacaaatggagcacattcctcaaggcacgattggtatgctctgtcccgggaatgaacggaatcgatacatactttgatgagctggaggatgtgtttctcctgcccacgcgggaccacaagaaccccgtcatttttggattgtttaatacgaccagcaacatctttaggggacacgctatctgtgtataccacatgtcgagcattagggcggcctttaacgggccctacgcacataaggagggaccggaatatcactggtccgtttacgaggggaaagtgccgtacccgcggccaggatcatgtgcctcaaaagttaatggtggacggtatgggacgaccaaggactacccagacgatgcaatcaggttcgctcggagtcaccccctgatgtaccaggctattaagcctgcacacaagaaacccatcctcgtcaaaacagatggtaagtataacctcaagcagatcgccgttgaccgggtcgaggcagaggatggccaatatgacgtcctctttattggcacagacaacggcatagttctgaaagtgatcactatttataaccaagaaatggaaagtatggaggaggtgatcttagaggagttgcagatattcaaggaccccgtaccaatcatctccatggagattagctctaagaggcaacagctgtacataggaagtgctagcgctgtcgctcaggtgaggttccaccattgcgacatgtatggaagtgcttgcgccgattgttgcttggcacgggatccctattgcgcttgggatggaatctcctgttcacgctattaccccacaggtacccatgcaaaacggaggttcagacgccaggatgtaaggcatgggaacgcggctcagcagtgctttggacaacaatttgtgggcgatgcccttgacaagaccgaggaacatttggcctacgggattgagaataactctacactgctggaatgcacgccacgttcactgcaggccaaagtgatatggttcgtccaaaaaggtagagaaacaagaaaggaagaggtcaagacggatgatagggtggtgaaaatggatcttgggctcctcttcctcaggctgcacaaatctgatgctggtacttatttttgtcagactgtggaacactccttcgtccatactgttagaaagatcacactggaggttgttgaagaggagaaggtcgaggacatgtttaataaggatgatgaggaagataggcaccatcgtatgccatgcccagcccaaagctcgatatcgcagggagctaaaccttggtacaaggagtttctgcaactgataggctactctaacttccagcgggttgaagaatactgcgagaaagtgtggtgcacggataggaagcggaagaaattgaaaatgtcgccctcaaagtggaaatacgctaatccccaggagaagaagctgcgttctaagccggagcactatagacttcctcgccatacactcgactcatag

SEQ ID NO: 133712 - DNA, 2148 bp, synthetic construct
  misc_feature 1..2148: note = Description of Artificial Sequence: Synthetic coding sequence
  source 1..2148: mol_type = other DNA
atgcttttggacgaatatcaagaaagattgttcgtaggcgggcgcgacttagtgtatagtctgtccctcgaacgcataagcgatgggtacaaggagattcattggccttccacggccctgaaaatggaggagtgtatcatgaaaggcaaagatgcaggcgagtgtgcaaactatgtgagagttctgcaccattataaccggactcacttactcacctgcggcaccggcgcttttgacccagtgtgcgcttttattagagtcgggtaccacctcgaagatcccttgttccaccttgagtcccctcggtccgagcgtgggcggggaaggtgcccttttgaccccagttccagcttcatcagcacccttatcgggtcagagctgttcgcaggcctgtactcagactactggtcgcgagatgctgctatttttagaagcatgggaagactcgcccacataagaaccgaacacgatgatgaacggttgctgaaagaacctaagtttgtggggtcttacatgatcccagacaacgaagaccgcgatgacaataaggtgtattttttctttacggaaaaggctctggaggcagaaaataacgcacatgccatttatacgcgggtgggccggctctgcgtcaacgatgtcgggggtcagaggatactggtcaataagtggtctacatttctcaaggccaggctcgtctgctcagtgcccggaatgaacgggatagacacttatttcgatgaactcgaggacgtgtttttactgccaaccagagaccacaaaaaccctgtaattttcgggctttttaatactaccagcaatatcttccggggccatgcaatctgcgtgtatcatatgtcttcgatccgcgctgctttcaatggcccatatgcacataaagaaggtcccgaataccattggagcgtctatgaagggaaggtcccctatccacgaccggggtcatgcgcctctaaagtcaacggcggccgctatggcacaactaaagactacccagatgatgccatccgattcgcgaggtcccatcccttaatgtaccaagctatcaagccagctcacaaaaaaccaattctggtaaagactgacgggaagtacaatctaaaacagattgccgtcgatcgcgtagaagctgaggacgggcaatacgacgttttgtttatcgggactgacaacggaatcgttttaaaagtcataactatctataaccaggaaatggaatccatggaggaggtaatcctcgaggagctgcagattttcaaggaccccgtgccgataatatctatggaaatttcaagcaagaggcaacaactctatatcggttctgcctcggccgtcgcccaggtcaggtttcatcactgcgatatgtacggatccgcatgcgccgactgttgcctggcacgagacccgtactgcgcctgggacggcatttcctgcagtcgttactaccctaccgggacccatgcaaagagacgcttccgacgacaggacgtccgccacggcaacgcggcccagcagtgcttcggtcagcagtttgtcggagatgccctggacaaaacagaggaacaccttgcttatgggatcgagaacaattccactcttctggaatgcacaccccgttccctgcaggctaaagtgatctggtttgtgcagaaagggcgggagactcgtaaggaagaggtaaagacagatgaccgcgtcgtcaaaatggacctgggtcttctcttcttgcggctgcataaatcagatgctggtacctatttctgccagactgtggaacatagctttgtccacacagtgagaaagatcacccttgaggtggtggaagaagagaaggtggaagatatgttcaacaaggatgatgaggaggatcgtcaccatcgtatgccatgtcctgcacaaagtagcatttctcagggcgccaaaccctggtacaaagagttcctgcagctcatcgggtactctaactttcagcgcgtggaagaatattgtgagaaagtctggtgcaccgaccgcaaacgcaagaagctcaaaatgagtccttctaagtggaagtatgcaaacccgcaagaaaaaaagctgagatctaaacctgagcattatcgactgcccaggcacacactcgactcctag

SEQ ID NO: 133713 - DNA, 2301 bp, synthetic construct
  misc_feature 1..2301: note = Description of Artificial Sequence: Synthetic coding sequence
  source 1..2301: mol_type = other DNA
atggcctctgcaggacatataatcactctgctcctgtgggggtatctcttggaactgtggaccggcgggcatactgcggacacaacccacccaagactgagactctctcataaagaactgctgaatcttaatagaacaagcattttccactcaccgtttggtttcctcgacctgcatacgatgctgttggatgaatatcaggagcggctctttgtaggcggacgtgatctcgtctactccctgtctcttgagaggatttctgacgggtacaaggagatacattggccatctactgccctaaaaatggaggaatgcatcatgaaaggtaaagacgccggcgagtgtgcaaactatgtccgcgtgcttcaccactacaatcgaacccacctgctgacatgcgggacaggggcatttgaccccgtttgcgcattcatcagggtcggataccatcttgaagacccactttttcacctggaaagccccagatcagagagggggcgggggcgctgtccattcgatccttcatcctccttcatttccaccctgattggaagcgagctcttcgctgggctgtattcagactattggtcccgtgacgctgccatatttcggtcaatgggcagactggcccatataaggacagagcacgacgatgagcgcctgctcaaagaacctaaattcgtcggtagttacatgattccagacaacgaagacagagacgacaacaaagtgtatttttttttcaccgaaaaggccctcgaagccgaaaacaacgctcatgccatttacacacgggtcggcagactgtgcgtgaacgatgtggggggccagcgtattctggtgaataaatggtccaccttcctgaaggcgagactggtttgttcagtgcctgggatgaacggaatcgatacctatttcgatgagcttgaggacgtatttctcctgccaactagggaccacaaaaacccagtaatcttcggactgttcaacaccacctccaatatatttaggggtcacgctatttgcgtctatcatatgagttccatacgagcagcatttaatggaccttacgcccacaaggaaggcccggaatatcactggagcgtgtacgaaggaaaagttccctaccccagacctggatcttgcgcaagtaaagtgaatggagggagatacggcaccacaaaggactatcccgatgacgccattcgctttgcacggtcacaccctctcatgtatcaggccataaaacccgctcataagaagccaatcctggtgaaaactgacggaaaatacaatttgaagcagattgccgtggacagagttgaggcagaggatgggcagtatgacgtcttgttcatcgggaccgacaatggcatcgtattaaaggtcatcacaatctataaccaagagatggagtccatggaagaagttatactcgaagagttgcagatttttaaagatcccgttcctattatctccatggagatctcatctaagcgacaacaactttatattgggtctgcttctgccgtggcccaggttaggttccatcactgcgatatgtatggtagcgcctgcgcagactgctgtctagcaagagacccttattgcgcatgggatggtatctcctgcagccgatactatcctacagggacacatgctaaacggaggtttcgcaggcaagacgtgcgccacggcaacgctgcccagcaatgctttggacagcagtttgtgggcgacgccctggacaagactgaagaacatctagcctatgggatcgagaataactcaacgttgttagagtgcacgccgagatcgttacaggctaaggtcatttggtttgtgcagaaggggcgcgaaacaaggaaagaggaagttaagacagacgatcgcgtggtgaaaatggacctcggacttttatttctaagactacacaagagcgatgctgggacctacttttgtcagaccgtggagcattcatttgtacacaccgtacggaagatcaccttggaggtggtggaggaggagaaagtggaagatatgtttaacaaggacgatgaagaagatagacatcacagaatgccatgcccagcacagtccagcatatctcaaggggctaagccatggtataaggaatttctccagttgatcgggtacagcaatttccaaagggtagaagaatactgtgaaaaggtctggtgtaccgatcgaaaacgtaagaaactgaagatgtccccgagtaaatggaagtacgccaatcctcagcattatcggctccctcggcacaccctcgattcctag

SEQ ID NO: 133714 - DNA, 2286 bp, synthetic construct
  misc_feature 1..2286: note = Description of Artificial Sequence: Synthetic coding sequence
  source 1..2286: mol_type = other DNA
atggccttacctgcactggggttggacccatggtcactcctgggactgttcctgtttcaactgctccagctgttgttacctaccacaaccgctggaggtgggggccagggaccaatgccaagagtgcgctactatgcaggcgacgagagaagggccctttcattcttccatcaaaagggactgcaggacttcgacactttactgctgtccggagacggaaacactttgtacgtgggcgcacgggaggccatcctggctctggatattcaggatcccggtgtgcctcggctgaagaatatgatcccttggcccgccagtgatcggaagaaaagtgagtgtgcttttaaaaagaagtcaaatgagactcagtgtttcaattttataagggtgctggtgtcctacaacgtgacgcacctgtatacatgtggcacattcgctttctcacccgcatgcacatttatcgaactgcaggactcctacttactacccatcagtgaagacaaggtgatggagggaaaggggcagtccccattcgaccccgcacacaagcatacagcggtgctggttgacgggatgctctactcaggcacaatgaataacttcctcgggagtgagccaatattgatgagaacactgggcagtcagcccgtgctaaagacagacaatttcctgaggtggctccaccatgatgcaagctttgtcgccgctataccgtcaactcaagtggtgtattttttctttgaggaaactgcttccgagtttgatttttttgagcgacttcacacaagtagagtcgcccgcgtgtgcaagaatgatgtggggggagagaagttgctgcagaagaaatggacgacttttctgaaagctcaattgctgtgtacacagccaggccagctgcccttcaatgtaattcgtcacgcggtcctgctaccagctgattcaccaaccgccccacatatatacgcagtgttcacttcacagtggcaagttggtggcaccagatctagcgcggtgtgtgccttttctctcttggacattgaaagagtctttaaggggaagtataaggagctgaacaaggagaccagccgctggaccacctataggggccctgaaaccaatcctcgaccaggtagttgctccgtaggccctagcagtgacaaagcactgactttcatgaaggatcatttccttatggatgaacaggtcgtcggcacaccactcttggtcaagtctggggtggagtatacaaggctggctgtggaaacagctcagggtctggatggtcattcgcatttggtaatgtacctggggactaccaccggctctttgcataaggccgttgtcagcggagattcttctgcacatctggtggaggaaatccaacttttccccgaccccgaaccagttaggaacctacaactggcgccaacccagggcgccgtgtttgtggggttctccggaggagtctggagggtcccacgggccaattgtagcgtctacgaatcctgcgtcgattgcgtactggccagggatcctcactgtgcctgggacccagagtctcgtacttgttgcctgctgtctgcacccaaccttaacagctggaagcaggatatggaaagaggaaatccagagtgggcctgcgcttcaggtccaatgagtcgcagtctgagacctcagagcaggcctcagataattaaagaggtgctcgccgtgcctaactctatcttagaattgccatgcccccacctatctgccctggcgagctactactggtcccacggacccgctgcagtgccagaagcctctagcacagtgtataacgggtcacttctcctcatcgtgcaggacggggtggggggcctttatcaatgctgggcgaccgaaaacgggttcagctaccccgtgatcagctactgggtggattcccaggatcagactctggcgctggatccagagctggcaggaattcctcgcgaacacgtcaaggtgccactgacaagagtgtccgggggggcagccctggctgcgcaacagtcctactggcctcacttcgtgaccgtcactgtgctgtttgccctggtgctgtcaggcgccctcattatcctggtggcgtcccccctgcgcgctctccgagctcgtggaaaagtgcagggttgcgagaccctgcggcctggcgagaaagcccctctgtcccgagagcagcacctgcagtctccaaaggagtgtcgcacttccgcttccgacgtggatgcagataacaattgtcttggtaccgaggtggcatag

SEQ ID NO: 133715 - DNA, 2286 bp, synthetic construct
  misc_feature 1..2286: note = Description of Artificial Sequence: Synthetic coding sequence
  source 1..2286: mol_type = other DNA
atggctcttccagccctcggattggacccatggagtttgctgggtctttttctctttcagctgctgcagttacttctcccaaccaccacagcaggagggggcgggcagggccctatgcctagagtgagatattacgccggggacgaacgccgcgcattgagtttttttcatcaaaaggggctgcaagactttgataccctactgctcagcggcgacgggaacactctatatgtgggggcccgtgaagcaatcctagcacttgatatccaggaccccggtgttcctaggctgaaaaacatgattccctggcctgcatcagaccgcaaaaagagtgaatgtgcctttaaaaagaagtctaatgaaacccagtgtttcaactttattagggttctggtttcctataacgtgacacatctgtacacttgcggtacatttgcattcagcccagcctgcacgttcatcgagctgcaggattcctatctgctgcccatttccgaggacaaagtgatggagggcaagggccagagcccgtttgatcctgctcacaagcacaccgcagttctcgttgacggcatgctttattctgggaccatgaacaattttctaggaagcgaacctatactcatgagaacgctgggctcccaacctgttcttaaaaccgacaacttcctacggtggctgcaccacgacgcctctttcgtggccgcaatccctagtacacaggtggtttattttttttttgaagaaactgccagtgaattcgactttttcgaacgtctgcacacgtcgagggttgccagagtgtgtaagaacgatgtggggggcgaaaagttacttcagaagaaatggaccaccttccttaaagcccaactgctatgcacgcaaccgggacagcttccctttaatgttattcgtcacgccgtgcttctgcccgcggacagtcctacagcgcctcatatatacgccgtcttcactagccaatggcaggtgggtggtacccgaagttccgcggtttgcgccttttcactgctcgacatcgaaagagtgtttaaagggaagtacaaagaacttaacaaggaaaccagccgttggacaacctacagggggcctgaaaccaatccccgtcccggctcatgttctgtgggaccgtcctcagataaagccttaacattcatgaaggaccactttctgatggatgagcaagtggtcggcaccccgctgctggtgaagagcggtgtggagtacaccaggcttgctgtggaaacggctcagggcctagatgggcattcgcacctggtgatgtacctgggtacaacgactgggtccctgcacaaggcggtggtaagcggagactccagtgcacacctagtagaggaaattcaactgttccccgatccagagccagtgcgtaacctgcaactggcccctacccagggagccgtgttcgtggggtttagtggcggtgtgtggcgcgttccgcgcgcaaactgcagtgtctacgagtcgtgtgtcgactgcgtgttggcgcgggacccccactgcgcatgggaccctgaaagtcgcacctgttgtttgcttagtgcccctaatctgaattcttggaagcaggacatggagcggggaaaccccgaatgggcatgcgcaagcgggccgatgagcaggagcttgcgcccacagagtcgtccccagatcatcaaggaggtactcgccgttcccaattctatcctcgagctcccctgcccccatctgtccgccctcgcctcctactactggagtcacggaccagctgccgtgccagaggccagcagcactgtatacaacgggagccttctcctgattgtgcaggacggggtcggcgggctatatcagtgctgggccaccgagaacggattcagctatccagtgatcagttactgggttgactctcaggaccaaactctagcgcttgaccccgaactggccggtatccccagagaacatgttaaggtgcccctcactcgtgtgagcggaggcgccgccttggcagcccaacagagctactggcctcatttcgttactgtgacagtcctgttcgccttggttcttagtggggctctcatcatactggtagcctcgcccctcagagcccttagagcacgcggaaaagtccagggctgcgagacactcagacctggcgagaaggctcccttaagcagagaacagcatctgcagtctccgaaggagtgtagaacctcagcttctgacgttgatgcggacaataactgtctcggcaccgaagtcgcatag

SEQ ID NO: 133716 - DNA, 2172 bp, synthetic construct
  misc_feature 1..2172: note = Description of Artificial Sequence: Synthetic coding sequence
  source 1..2172: mol_type = other DNA
atgcccagggttcggtactatgccggagatgaacgtagagccctgtctttcttccaccagaaaggccttcaggacttcgataccctgcttctgtccggggatggaaacaccttgtatgtgggagcccgggaggctattcttgccctcgacatccaggaccctggtgtgccgcggctgaagaacatgatcccttggcctgccagtgatagaaaaaaaagcgaatgtgcgttcaagaagaaaagcaacgagactcagtgcttcaacttcatccgggtactggtgtcctacaatgtgacccacctgtatacttgcggcacattcgcattttctcccgcttgtacattcatagaactccaggactcctatctactgcctatctcagaagacaaagtcatggagggtaagggccagtctccattcgaccctgcccataagcacaccgctgtgctcgtggacggaatgctttatagtggtacaatgaataatttcctgggctccgaaccaatcctgatgcgcactctggggtctcagccagtcctgaaaacagataattttcttagatggttgcatcacgacgcttcgttcgtggctgccatcccgtctactcaggtggtttacttcttttttgaagaaacggcatcggagttcgatttttttgaaagactccacacgagcagggtggcacgcgtctgtaaaaatgatgtcggaggggagaagctgctccaaaaaaaatggacaaccttcctgaaggcccagctgctctgtacccagcctggccagctgccctttaacgttatacggcatgccgtcctccttccggctgactcaccaaccgcacctcacatctacgctgtgttcacatcgcagtggcaagtcggggggacaaggtcgagtgccgtctgtgccttttctcttttggatatcgaacgggtcttcaagggcaagtataaagagttgaataaggagaccagtaggtggaccacctaccgtggccccgagaccaaccctcggcctggatcatgctctgtggggcccagcagtgacaaagcgttaacttttatgaaagatcacttcctgatggatgaacaggtcgttggaacccctctcctggtgaagagcggagtcgagtatactcggctggcagtggaaaccgctcagggacttgatggccacagccacctcgtgatgtacctgggcacgacaactggatctctgcacaaggccgtagtaagtggcgacagttcagcccacctcgtcgaagagatacaactctttccagatccggagcctgtgagaaatctacaactggctcccactcagggcgccgttttcgtcggattttctggaggggtttggcgggtcccaagagcaaactgtagcgtgtacgaaagttgcgtggattgtgtgctggcgcgggacccacattgtgcatgggacccagagtcacgcacctgctgtcttttgagtgctcccaaccttaacagttggaagcaagacatggaaagaggcaaccccgagtgggcttgcgcctctggaccaatgtcacggtctctaagaccccagtcccgccctcaaatcatcaaagaagtgttggcagtaccgaactctattctggagctgccatgtcctcatctctccgccttggcgtcctattactggagtcacggcccagcagccgtacccgaagcctctagcaccgtgtacaacgggtcccttttgttaattgtccaggacggcgtgggcggactgtatcaatgttgggctaccgagaacggcttttcctatccagttatttcttactgggtggatagccaggatcagactctggcactggatccagagctcgccggaattccgagagaacacgttaaggtccccttaactcgggtttctggcggggccgccctggcagcccagcagagctactggccacactttgtgacagtcacagtcttatttgccctggtactctccggggccctcatcatcttggtggcatctcctctacgagctctgcgggcccggggaaaggtgcaggggtgcgagaccctgcggcctggcgaaaaggcaccactgagccgtgagcagcacctgcagtcacctaaggaatgcaggaccagcgctagtgatgtggatgcagataacaattgtctcgggactgaggtagcctag

SEQ ID NO: 133717 - DNA, 1890 bp, synthetic construct
  misc_feature 1..1890: note = Description of Artificial Sequence: Synthetic coding sequence
  source 1..1890: mol_type = other DNA
atgataccatggcctgcttctgatcgaaagaagtcagaatgtgccttcaaaaaaaagtcgaacgaggagcttcaggacagctatcttcttccaatcagtgaggacaaagtgatggaaggtaaggggcaatctccgtttgaccccgcccataagcacaccgcagtactcgttgacggaatgctgtattccgggacaatgaacaatttcttgggatctgagcctatactgatgcgaacgctgggcagccagcccgttctcaagaccgacaacttccttaggtggctgcatcacgatgcaagcttcgtggccgcgattccttccacgcaggtggtatattttttcttcgaggaaacagcttccgagtttgactttttcgaacgcttgcatacctcaagagtggcccgggtatgcaagaacgacgtgggaggtgagaagctgctccagaagaaatggacaacatttctcaaggcccaactgctgtgcacacagcctggccagctgcctttcaatgtgatccgccacgcagtgctgttgccagctgattctccgactgccccccatatctatgcggtttttacctcacagtggcaggtgggaggcacccgttcttccgctgtgtgcgcgttctctctcctcgacatcgaaagagtttttaaggggaagtacaaggaattgaacaaagaaacatctcggtggacgacctaccgtggacctgagacgaacccccggcctggatcctgcagtgtggggccttcctcagacaaggccctgacatttatgaaagaccactttctgatggatgagcaggttgtggggacccccctgcttgtgaagtcgggggtcgagtacacaaggctcgctgtagagacggcacagggtctcgacggccacagtcatctggtgatgtacttgggaacaaccactggttcactgcataaggccgtggtgtctggagattctagcgctcatctggtcgaggagatccagttgtttccagatccagaaccagtacgcaatctgcagctcgccccgactcagggcgccgtgtttgtgggattttcgggcggcgtctggagagtgcccagagccaactgttccgtctacgaaagttgtgtggactgtgtgctggcacgcgatccccactgcgcctgggatcctgagagtcggacttgctgtctgctaagtgcacctaaccttaactcctggaagcaggacatggaacgtggcaaccccgaatgggcctgcgccagcgggcccatgtcccggagcctacgcccccagagccgtccacagataatcaaggaagtcctcgccgtgcccaactctatcctggagctgccctgccctcacttaagtgctcttgcaagctactactggtctcacggccctgcagcagtgcctgaagccagttcgacagtgtacaacggaagtttgttactgatcgtccaggatggcgtcggaggattataccagtgttgggccacagaaaatgggttctcttaccctgtaatcagctattgggtcgactcacaggatcagacactagcccttgatcccgagctggcaggcatcccccgggagcacgtgaaagttccactcacacgagtctccggtggggctgccttggccgcgcagcaatcgtattggcctcatttcgtcactgttaccgtcctgtttgctcttgtgctgagtggcgcactaataatccttgtcgctagtcctttgcgtgctcttagagctaggggaaaggtgcaggggtgtgaaaccctgcgtcccggcgagaaagcccccctgagtagagagcagcacttacagtctcccaaagaatgtaggacaagtgcatcagacgtggacgcagataacaattgtttgggcactgaagttgcttag

SEQ ID NO: 133718 - DNA, 2286 bp, synthetic construct
  misc_feature 1..2286: note = Description of Artificial Sequence: Synthetic coding sequence
  source 1..2286: mol_type = other DNA
atggcgctgccagcattgggcctagacccatggagcctgttaggcctcttcctgtttcaactcctgcagttgcttttacccacgaccacagccggggggggcgggcaaggccctatgccccgggtgagatattatgccggggatgaacgacgggccttgtcattcttccatcaaaaggggctacaggatttcgatacgttgctgcttagcggggacggcaacactctttatgtcggcgcccgggaagccatcctggccctcgacatacaggatcccggggtgcctaggctgaagaatatgattccctggcctgcctctgataggaaaaagtccgaatgcgcattcaaaaagaagtccaatgagacacagtgttttaatttcattcgggtgctcgtatcctataacgtgacacacctgtacacttgcggaacatttgcattttctcccgcctgcacctttatagaattgcaggatagctacctattgccaattagcgaggataaagttatggaggggaaagggcagagtccattcgaccccgcccacaagcatacagcggtgttagtcgacggcatgttgtactccggtaccatgaataactttcttggctccgaacctatcctcatgcggacactcggatctcagccagttctgaagaccgacaacttcctccggtggcttcaccatgatgcatcattcgtggctgccatacccagcacccaggtcgtttacttcttctttgaagagaccgctagtgaatttgacttctttgaaagactccacacaagccgcgtcgcacgggtttgtaaaaatgacgtgggaggagagaagttgctgcagaaaaaatggactacttttctgaaagctcagctgctgtgcactcagcccggccagctcccattcaacgtgataaggcatgcggtgctcttaccagctgattccccaacagcccctcacatatacgctgtgttcacctcccagtggcaggtcggcggcaccaggagtagcgccgtttgcgcctttagtttgcttgacattgagcgagttttcaaggggaaatataaggagctaaataaggagactagtagatggacaacataccggggcccagaaaccaatccaaggcccgggtcctgcagcgtgggtccatcttccgacaaggcccttacatttatgaaggaccacttcctgatggacgagcaggtggtcggaactcctcttttagtgaagtctggggtggaatatacccgactcgccgtagagaccgcccaaggtttggatggccactcacacctagtgatgtaccttggcacaacgactggaagcctccacaaagcagtggtctctggtgactcttctgcccacctggttgaagagatccaactttttccagaccctgagccagtacgcaacctccaactagctcccactcaaggcgccgtcttcgtcggcttcagcggaggggtctggcgcgtgccccgggcaaattgttccgtgtacgagtcttgcgtcgattgcgttctggcccgggatccacactgcgcctgggatcctgaatcacgcacttgctgtctgctatcggcgccaaatctgaactcttggaaacaggatatggaacgaggtaatcctgagtgggcctgtgccagcggacccatgtctcgctccctacgcccccaatcgagacctcagataattaaggaagtgttggccgtgcctaacagtattctcgagctgccttgcccacacttgagtgcgctggctagttattactggtctcacgggccagcggctgtcccggaggcatctagtacagtgtataacggaagcctgctccttattgtgcaggacggcgtgggagggctttatcagtgctgggcgaccgagaatggattcagctacccagtcatttcctattgggtcgatagtcaggatcaaacgctcgctctggaccctgagctagctggaattcccagggagcatgtaaaggtccccttaacaagggtatccggcggtgctgcgctggcagctcaacaatcatattggccacactttgtgacagttactgtcctattcgcgctcgtactgtccggcgcactcataatcttagttgcctcgccactacgggccctacgcgcccgcggcaaggtgcaaggatgtgaaaccttaaggcctggggaaaaagcaccactaagccgggaacagcacctacagagcccgaaggaatgccgcacaagtgccagcgacgtggatgcagataacaactgtctggggaccgaagtggcttag

SEQ ID NO: 133719 - DNA, 1890 bp, synthetic construct
  misc_feature 1..1890: note = Description of Artificial Sequence: Synthetic coding sequence
  source 1..1890: mol_type = other DNA
atgataccttggcccgccagtgatcgcaagaaatccgaatgcgcttttaaaaaaaagagcaacgaggaacttcaggacagttatctcctgccaatcagcgaggacaaagttatggaggggaagggacaatctcctttcgaccccgcccacaagcacacagccgttctcgttgatggaatgctgtacagcgggaccatgaacaattttcttggcagcgagccaatcctgatgaggacgctgggaagtcagcccgtgcttaaaactgacaacttcctgcgctggctccaccacgatgccagttttgtggccgcaatccccagcacacaggtcgtttatttcttttttgaggaaacggcaagtgagttcgacttttttgagcggctgcacactagccgcgtggccagggtctgcaagaacgacgttgggggtgagaaattactgcagaaaaagtggacaactttccttaaggcacagctcctgtgcacacagcccggtcagttgccctttaatgtgattagacacgccgtactcctaccggcagactcccccaccgctcctcacatttacgctgtgtttacaagtcagtggcaagtcgggggaactagaagttccgccgtgtgtgctttttcactcttggatatcgaaagagttttcaaaggtaagtataaggaactgaacaaagaaacatcaagatggactacttaccgaggtccagagacaaaccctagacctgggtcctgctctgtaggcccttcgtcagacaaggcactgactttcatgaaggatcacttcttaatggatgaacaagtcgtagggacccctctgctcgtgaagtctggggtggagtacaccaggctggcagtggaaaccgctcagggactggatggccattcccacttggtgatgtacttgggcaccaccactggcagcctacataaggctgtagtttccggcgattcaagtgcgcatttagtggaggagatacagttgttccccgatcctgagcctgtgaggaacttacagttagctcctacccaaggagcagtcttcgttggatttagcgggggtgtgtggcgagtgcccagggcgaactgcagtgtctatgagtcatgtgtggactgtgtgctggcacgtgacccccattgcgcttgggatccggagagcagaacttgttgcctcctctccgctcccaatctaaattcctggaaacaagatatggagcgtgggaatccagaatgggcttgcgccagtggtcccatgtcccgcagcttgcggcctcagagtcggccacaaataattaaggaagttctagccgtcccaaactccatacttgagttaccctgtccccatctcagtgcactggcctcttattattggtcccatggcccagcagcagtacctgaggcgtccagcaccgtgtacaacggaagtctccttctgatcgtgcaggacggggttggagggctctaccagtgctgggcaacggagaatgggttttcctaccccgtcatcagttactgggtggatagtcaggatcagaccctcgcactggatcctgagctggccgggatcccccgggagcacgtgaaggtgccattgacacgcgttagcggaggcgccgcactggccgcccagcagtcttattggccgcatttcgtgacagtcaccgtgctgttcgcgctagtcctcagcggcgccctcattatcctagttgcttctccactcagggcattgcgggctaggggcaaggtgcagggttgtgagaccctgagacctggggaaaaggcaccactttcccgcgagcagcacctgcagtctcctaaagagtgtcgaaccagcgcttcagatgtggacgccgataacaattgtctgggcactgaagtggcgtag

SEQ ID NO: 133720 - DNA, 663 bp, synthetic construct
  misc_feature 1..663: note = Description of Artificial Sequence: Synthetic coding sequence
  source 1..663: mol_type = other DNA
atgataccgtggcccgccagcgatcggaaaaagagcgaatgtgcatttaagaagaaaagcaacgaaacccaatgtttcaatttcataagggtcctggtgtcatacaacgttacacacctgtacacatgcgggacttttgcctttagccccgcatgtacatttatcgaattgcaggatagctatcttctgccgatttcagaagacaaagtaatggagggaaaggggcagtcccccttcgatccagcccacaagcacactgcagtccttgtagacgggatgttgtactcaggtacgatgaataattttctgggttcagagcctattctcatgcgaactcttggcagccagccggtcctcaagactgacaatttcttgagatggctgcaccatgacgcaagctttgtcgccgctattcccagcacgcaggtcgtctattttttcttcgaagagacggccagtgagttcgacttctttgaacggttacatacatccagggttgcgcgggtctgcaaaaatgacgtggggggcgaaaaactactgcagaaaaaatggactacattcctcaaggctcagctgctgtgcacacagcccggccagctcccttttaatgtgatccgacacgccgtcttattgcccgccgactcacctacggctcctcattag

SEQ ID NO: 133721 - DNA, 966 bp, synthetic construct
  misc_feature 1..966: note = Description of Artificial Sequence: Synthetic coding sequence
  source 1..966: mol_type = other DNA
atggcactgccggccctagggttggatccgtggtcactcctgggactctttttgtttcagctgctccagttgttattgccgacgacaacggcgggggggggaggtcaagggccaatgccgagagtacgatactatgccggcgatgagagaagggccctgtctttttttcaccagaaaggcctacaagactttgacactttgctcctctccggagatggcaacactctctacgtcggcgccagggaagccatactggccctagacattcaggatccaggtgttcccaggctcaagaatatgatcccttggccagcaagtgatcgcaaaaagagcgagtgtgcgttcaagaaaaagtccaatgaaacacaatgcttcaacttcatccgggtgttagtgtcatacaatgtcactcacttgtacacatgtggaacatttgccttcagtccagcctgcacttttattgaactgcaggacagctaccttctgcctatttccgaggataaagttatggagggaaaaggccagtcccccttcgacccggcacataagcacaccgctgtgctcgtggacgggatgctctattctggcactatgaataactttctgggcagcgagcccatcctgatgagaaccctcggctcccaaccggtcctaaagaccgacaactttttacggtggttgcaccatgatgccagcttcgtcgctgccatcccctcaacacaggtggtgtacttcttctttgaggagacggctagtgagtttgatttttttgaacggctccacacgagccgggtagcaagagtctgcaaaaacgatgtaggaggagagaagttgctacaaaaaaagtggaccacctttctgaaagctcagctgttatgcacacagccgggtcagctgcctttcaacgtcattcgccacgctgttctcctccccgcagatagccctaccgctccccacatttactag

SEQ ID NO: 133722 - DNA, 711 bp, synthetic construct
  misc_feature 1..711: note = Description of Artificial Sequence: Synthetic coding sequence
  source 1..711: mol_type = other DNA
atggcgctgccagctttaggtctcgacccttggagtctgctggggctgttcctgtttcagttgcttcaattgctgctgccgaccactacggctggtgggggcggccaaggacccatgccccgggttcgctactatgcaggagacgagaggcgagccctgagcttcttccaccagaaggggctccaggacttcgatacactgctcctgtccggcgacggaaacaccctgtacgtcggcgctagagaggcaattctggccctggacatccaggatcccggtgtgcctagactaaagaatatgatcccctggccagcctcagatagaaaaaaatcggaatgtgcttttaaaaaaaagtcaaatgaggagcttcaggactcttacttgctgcctatctcggaggacaaagtaatggagggtaagggacaatcacctttcgaccctgcgcacaagcacaccgcggtgcttgtggatggcatgctctattcaggtaccatgaacaacttccttggtagtgaacctatcctaatgaggaccttgggctcccagccagttctgaagaccgataatttcttgcggtggctccatcatgacgctagttttgtggccgctatccccagcactcaggttgtttatttcttcttcgaggagaccgcctccgagtttgatttttttgagcggttgcacacaagtagagtggctcgagtatgttag

SEQ ID NO: 133723 - DNA, 2172 bp, synthetic construct
  misc_feature 1..2172: note = Description of Artificial Sequence: Synthetic coding sequence
  source 1..2172: mol_type = other DNA
atgccaagagtgcggtattacgccggcgatgagcgaagagccctgtccttcttccaccagaagggacttcaggatttcgataccctcctgcttagtggagatgggaacaccctctatgtcggggcccgagaggccattcttgcattggatatccaggatccaggcgttcctagacttaagaacatgatcccatggccagcttcagacaggaaaaaaagcgagtgcgcctttaagaagaagagcaatgaaactcagtgtttcaatttcatacgggtattagtgtcctataacgtaactcacctttatacatgtggaacttttgccttttctccagcgtgcaccttcatcgagcttcaagattcctatctgctgccgatcagcgaggataaagtgatggaagggaaaggacagtctcccttcgaccccgcccacaagcatacggccgtgttggtggacggcatgctatattctggaaccatgaataacttccttggctccgaaccgatccttatgcgtactcttggctcacagcccgtcctcaagacagacaactttttgcgctggctgcaccatgatgccagttttgttgcagctataccctcaacacaagttgtgtactttttcttcgaagaaaccgcaagtgagttcgacttttttgaacggcttcatacctcacgcgtcgcacgagtgtgcaagaacgatgttggcggtgaaaagctcctgcagaaaaaatggaccactttcctcaaagcccaactcctgtgcacacaacccggccagttgccgtttaacgtgatcagacacgccgtgttgctacctgccgattctccgactgccccccatatctacgcggtattcaccagccaatggcaggtcggaggcacccgttcttcagcagtgtgtgctttcagtttgcttgacattgagagagtctttaaggggaagtacaaggagctgaataaggagacgagccgttggacgacatacagagggcctgagactaatcctcgcccgggctcctgctcggtaggcccatcctccgacaaggccctgacgtttatgaaagatcacttcctgatggatgagcaggtagtgggcacccctctccttgtgaaatcaggggtcgagtatacacggctagctgtcgaaaccgctcaggggctcgatggccatagccacctggtgatgtacctgggcacgacgactggcagcttacataaggctgtcgtgagtggggactccagcgcacacctcgttgaggagatccagcttttccctgaccctgagcccgttcggaatctgcagctagccccaacacaaggggccgtgttcgtgggattcagcgggggcgtctggagggtgcctcgagcaaactgcagcgtgtatgagtcgtgcgttgactgtgtcctggctagggatcctcactgtgcttgggaccctgaaagcagaacttgttgtttactgtccgcaccaaacttgaactcatggaaacaagatatggagcgagggaaccccgagtgggcctgcgccagcggccccatgtcccgcagcctacgcccccagtcgcgacctcagattattaaagaggtgcttgctgtccctaattccatcctggagcttccctgcccccaccttagtgcactggcaagttactattggtctcatggtccagccgctgtcccagaagcctcttccacggtctataatgggtccctactgctgatcgtgcaagatggagtcggggggctgtatcagtgctgggcaacagagaacgggttcagctatcccgtgatttcttattgggtggattctcaggatcagacactggcgctggaccctgaactggctggaattccaagggagcatgtgaaagtgccgctgacccgtgtaagcggcggagccgcccttgctgcacagcagtcatactggcctcacttcgtcacggttacggtcctgttcgcattggtattgtctggcgcgttaattatattggtggcatcccctctccgggcccttagggcacgcggaaaggttcaaggttgcgaaaccctgcggcccggtgagaaagcgcctctatcccgggagcagcacctgcagtcacctaaggagtgcagaacttccgcaagtgacgttgatgccgataacaattgcctggggactgaggtggcatag

SEQ ID NO: 133724 - DNA, 3225 bp, synthetic construct
  misc_feature 1..3225: note = Description of Artificial Sequence: Synthetic coding sequence
  source 1..3225: mol_type = other DNA
atgaagggcacctgcgttattgcgtggctatttagttccttgggcctttggcgcctggcgcatccagaggctcagggcaccactcaatgtcagcgcactgagcacccagtcatatcgtacaaggagataggcccttggctcagggagtttcgggctaaaaacgccgtagatttttctcaactaacctttgatcccggtcagaaggagttggttgtgggcgcgagaaattaccttttcagactgcaacttgaagacctgagcctcattcaggccgtggagtgggaatgcgacgaggctaccaagaaggcctgttactcaaaaggaaagtccaaggaggagtgccagaactatattagggtgttacttgtgggaggagacaggctgttcacttgtggtaccaacgcatttacgcccgtatgcactaaccgcagtctgtcaaacctcaccgagattcatgatcagatctccggcatggcccgatgtccatactcaccacaacacaacagcaccgctcttttgacagctggcggcgaattgtacgctgccaccgcaatggattttcccggacgagaccctgccatctatcggagccttggaatccttccacctcttcgaactgcccagtacaacagcaagtggctcaacgagcccaattttgtgtccagttatgacattggaaattttacctatttttttttccgggaaaatgccgtcgaacacgactgcggaaaaacagtgttcagccgtgcggcgcgcgtgtgcaagaatgacatcggaggacgttttctgctcgaagatacctggacaacatttatgaaggctagactgaactgttctcggccaggggaggtaccattctattataacgaattacagagcaccttttttctgcctgagctggacctcatctatgggatctttaccacaaatgtgaattctattgcagcctccgctgtctgcgtgtttaatcttagcgctattgcacaggcattcagtgggccttttaaatatcaggagaatagtagaagcgcgtggctaccttacccaaaccccaacccacacttccagtgtggtacggtggatcaggggctgtacgtgaacttaacagaacggaatcttcaggacgcacagaaatttatccttatgcacgaagtggtccagcccgtcactaccgttccgagctttatggaggacaattcgaggttcagccacgtagcagtggatgtggtgcagggacgggaggcactggtacatatcatctacctggcaaccgattatggaaccataaagaaagtgcgtgtccccctgaaccaaaccagtagctcctgcctgctggaggagattgagctgtttccagagcgtaggcgggaaccaattaggagcctgcagatactccattcccaatcagtcctctttgtgggtctgagagaacatgtagtgaagatccccctcaagcgttgccagttctaccgtacaaggtcaacatgcatcggagcccaggatccttactgcgggtgggatgttgtcatgaaaaagtgtacttcactggaagagagtctgtcgatgacgcagtgggagcagtctatatccgcatgccctacccgaaacctgacggtagatggccactttggcgtgtggagcccgtggacaccttgtacacatacagatggttcagccgtaggttcttgcctgtgtagaaccaggagctgtgattcgccagcccctcagtgcggaggctggcagtgcgaaggcccaggcatggaaattgccaactgttctcgcaacggaggatggaccccttggacctcctggtccccatgctctaccacttgtggcatcggctttcaggttcgccagcggagctgtagcaacccaactcccaggcacggcgggagggtatgcgtcggacagaacagagaagagcggtactgcaacgagcacctgctgtgcccgccccacatgttctggacaggctggggtccctgggagaggtgtacagctcagtgcgggggcggcatacaagctaggcgcaggatttgtgaaaatgggcctgactgcgctggttgcaacgttgaataccagtcctgcaacacgaacccctgtccagagctgaaaaaaactactccctggaccccttggacccctgtcaatatctccgataacgggggccactatgaacagcgtttccggtacacttgcaaagctcggttagctgatccaaacttactggaagtcggccggcaacgaatcgaaatgcggtattgtagctccgatggaacaagcgggtgtagtaccgacggcctgtcaggggattttctgcgtgctgggaggtactccgcccacactgttaatggtgcatggagcgcgtggacatcttggagccagtgcagccgcgactgctcgcgcggcattcggaataggaagcgcgtctgtaataaccccgagcctaagtatggcggaatgccctgcctcggaccaagccttgagtaccaagaatgtaacattcttccttgtccagtggatggggtatggtcatgctggtctccctggaccaagtgctctgccacttgtggaggggggcactatatgcgcacaaggagctgctctaatcctgccccggcttacggcggggacatctgtctgggtttacatactgaagaggctctttgtaacacccaaccctgccctgagtcctggtccgagtggtcagattggtcagaatgtgaggcctctggggtgcaggtccgcgccaggcaatgcatcctcctgttccccatgggatctcaatgttccggtaatacaacagagtctagaccatgcgtgttcgatagtaatttcatccctgaggtgtcagtagctaggagctctagcgttgaagagaagcgctgtggcgaattcaacatgttccacatgattgcagtcggcctgtcatccagcatcctcggctgtctcctgaccctgctcgtctacacctattgtcagcgataccagcaacagtcacatgacgccaccgttatacatccagtgtcccccgccccactcaacacctcaatcaccaaccatatcaacaagctggacaaatacgatagcgtggaggccatcaaagccttcaacaagaacaatctgatactcgaagaacgcaataaatattttaacccccatctgacgggaaagacttactcaaatgcatactttaccgatctgaataattacgacgaatattag

SEQ ID NO: 133725 - DNA, 765 bp, synthetic construct
  misc_feature 1..765: note = Description of Artificial Sequence: Synthetic coding sequence
  source 1..765: mol_type = other DNA
atgaagggcacttgcgtgatcgcctggttgttcagctctcttggactttggaggctcgcccatcctgaggcccagggaacgacacagtgccaacgaactgagcatccagtaatttcctacaaggaaatcgggccatggctgagagagtttagagcaaaaaacgcagtagactttagtcagttaacgtttgaccccgggcagaaggaactggtggttggtgcacggaattatttattccggcttcagctcgaggacctctccctcattcaggccgtggagtgggaatgcgacgaggcaaccaaaaaagcttgctacagcaaagggaagtctaaggaggaatgccagaattacatcagggtgcttctggtcgggggcgatagactcttcacgtgcggtacaaacgccttcacacctgtgtgcactaataggtctctgtccaatctgacagaaattcacgatcaaatttctgggatggctcgatgcccctacagtcctcagcacaacagcaccgcactcctcacggcaggcggagagttgtacgccgcaactgcaatggatttccctggccgtgatcccgccatctatcggagcctcggaatcctgccccccctgcggaccgcacagtataatagcaaatggttgaacgagcctaatttcgtctcatcttacgacatcggaaatttcacatactttttcttccgagaaaatgccgtggagcatgattgcggcaagaccgtgttctcccgggctgcgagggtttgctag

SEQ ID NO: 133726 - DNA, 2001 bp, synthetic construct
  misc_feature 1..2001: note = Description of Artificial Sequence: Synthetic coding sequence
  source 1..2001: mol_type = other DNA
atgactccccctccacctgggagggccgctccaagtgcgccaagagctagagtgcctggtcctcctgcacgcctgggactgccacttcgactgaggctcctgctgcttctctgggcagccgcggcttctgcccagggccacttgcgctccggtccccgtatttttgcagtctggaagggtcatgttgggcaggaccgcgtggacttcgggcaaaccgagccacacactgtgctgttccacgaaccgggaagcagctcggtttgggtgggtggacgcggcaaggtttatctcttcgatttccctgaaggaaaaaacgcctctgttagaacagttaatataggaagcactaaaggttcttgcttggacaagagggattgtgagaactacataaccttgctggagagacgaagcgagggcctgttggcttgcggaaccaatgcgaggcacccaagctgttggaacctggttaacggaactgtggttcccctgggggaaatgagggggtacgcaccatttagccccgacgagaacagtttagtcttattcgaaggagatgaggtgtacagcacaattcgtaaacaggaatacaacggtaagatccctagatttcgcagaattcggggggaaagcgaactgtacacaagcgataccgtaatgcaaaatccacagtttattaaggccaccattgttcatcaggatcaggcttacgatgacaaaatttactacttttttcgtgaagacaacccggacaagaaccccgaagccccgctcaacgtgagtagggtcgcgcaattgtgccgtggcgatcagggtggggaatcctcactctcggtgtcaaagtggaacacctttctcaaagctatgctggtgtgttccgacgcggctacaaacaaaaatttcaacagactccaagacgtcttcctattacccgatccatccggccagtggagggacacaagagtgtatggagtgtttagcaatccttggaactatagtgctgtttgtgtatattctcttggggatatcgacaaggtgtttcgaaccagcagcctgaaggggtatcactcctccctgccaaaccctcgccctgggaagtgcctacctgaccagcagccaatccccacggagaccttccaggtggctgaccggcatcccgaagtggcacagcgcgttgaacctatgggccctctgaagactccgctgttccactcaaaatatcattatcagaaggtggccgtacaccgtatgcaggcaagccacggtgagaccttccatgttctgtacttgacgacagaccgcgggacaatacacaaagtcgtcgaacccggcgaacaggagcattcgttcgctttcaacattatggagattcagccgttccgccgcgcagcagcaattcagaccatgagcctggatgcagagcgccggaagctgtacgtgagtagtcagtgggaagtgagccaggtacctctggacctctgtgaggtgtacggaggcgggtgtcacggttgcctcatgtctagagatccgtactgcggctgggatcagggccgatgtattagcatttatagctccgaaagaagtgtgttgcaatcgattaatccagctgagcctcacaaggagtgtcctaatcccaagccagacaaggcccccctacagaaggttagcctggctcctaattccaggtactatctttcctgtccgatggaaagcaggcatgccacttactcctggcgacataaggagaatgtggagcagagttgcgagcctgggcaccaatctcctaattgtattctgtttatcgagaatctaacagcccagcagtatggccattatttctgtgaagcccaggaagggtcatactttcgtgaggcacaacactggcaactgctgccagaagacggcataatggcagagcaccttctggggcacgcttgcgcactcgcagcgtcactgtggctaggagtgctgcctaccctcaccctggggttattagtccactag

SEQ ID NO: 133727 - DNA, 1506 bp, synthetic construct
  misc_feature 1..1506: note = Description of Artificial Sequence: Synthetic coding sequence
  source 1..1506: mol_type = other DNA
atgcgtggctacgcgccgttcagcccggacgagaactcattggtgttgtttgagggcgacgaggtttacagtaccatcaggaagcaggaatacaatggcaagatcccaaggtttaggcgtattcggggagagtccgaactgtacactagcgacacagtcatgcaaaatccccagttcattaaggctaccatcgtccatcaggatcaggcttacgacgacaagatctattatttcttccgagaggataaccctgacaagaaccccgaagctccactgaatgtctccagggtggcacagctgtgcaggggtgatcagggaggcgagagtagtttaagcgtgtccaagtggaacacttttctcaaggcaatgctcgtttgctccgatgctgcaactaataaaaactttaacaggctccaagacgtctttctcctgccagatccttccggacagtggcgtgacacgcgtgtatacggtgtattctctaacccctggaattacagcgcagtgtgcgtgtactccttgggagatatagacaaggtcttcaggacgtctagcctgaaaggctaccactccagcctccccaatccccgacccgggaaatgcctcccagaccaacagcctatccccacggagacattccaggtggctgatcggcacccagaagtggcacagcgggtggagcccatgggtccactgaaaacgccattatttcactcgaaataccactaccagaaggtggctgtgcaccggatgcaggcatctcacggagaaacctttcatgttctttacctgacaaccgatcgaggcaccatccacaaagtggtggaacccggtgaacaggaacactcttttgcgttcaatatcatggagatccagcccttcagaagggccgcggccatccagacaatgtcattggatgccgagagacggaagctgtacgtgagttcacaatgggaagtctcacaggtccccctcgacctgtgtgaagtgtacggtggcggatgtcacggctgcctcatgagtcgcgacccctattgcggctgggaccagggcaggtgtatctcaatctactctagtgagaggagcgtcctgcaaagcattaaccccgccgagccccataaagagtgcccaaaccctaagcctgataaagccccgctgcaaaaagtcagcctcgcccccaattcacggtactacctatcttgtcctatggagtcaagacacgctacatattcgtggagacacaaagagaacgttgagcagtcttgcgaacccggccaccaaagccccaactgtattctgttcatcgaaaacctgacggcacaacagtacggccactacttctgcgaggcccaggagggatcctattttagggaggcccagcattggcagttgctgccagaagatggtattatggctgaacatctattaggacatgcttgcgctctggctgccagcctgtggctgggcgtgttgcctaccctgactcttggccttctcgtgcattag

SEQ ID NO: 133728 - DNA, 1959 bp, synthetic construct
  misc_feature 1..1959: note = Description of Artificial Sequence: Synthetic coding sequence
  source 1..1959: mol_type = other DNA
atgactccaccccctccagggagagccgcgcccagcgccccaagagccagggttccgggacctccagctcgtctgggcctcccacttagactgcggctactcctcctgctgtgggctgccgccgcatcggcccaggggcatcttcggtctgggcctcggattttcgcagtctggaagggacacgtgggccaggaccgagttgattttgggcagactgaacctcacaccgtgttattccacgagcctggttcctcctccgtctgggtggggggacgcggcaaggtgtacctattcgatttcccagaagggaaaaacgccagcgtccgcacggactgcgagaattatattactctcctggaaaggagatcggaaggattactggcttgcggtaccaacgctcgccacccctcctgctggaacttggtcaatggtactgtggtgcctctgggcgaaatgcgggggtacgctccattttcccctgatgaaaatagcctggtgctcttcgaaggagacgaggtgtattccacaattcgcaagcaggagtacaatggtaagattcccagattccggcggatacgcggggagagtgagctttacactagtgataccgtgatgcagaacccgcagttcatcaaggccacaatagtccaccaagatcaggcatatgacgacaagatatactatttctttagagaagacaaccctgataaaaatccagaggcccctctgaatgtgtctcgtgttgcccagctttgcaggggtgaccagggaggtgagtcctccctgtccgttagcaagtggaacacatttctgaaggcgatgcttgtgtgcagtgatgcagctactaataaaaactttaacagactccaagacgtatttcttctaccagatccttctggacaatggagagacactcgggtgtacggggtcttttccaatccatggaattacagcgctgtgtgcgtctattccctcggggatattgataaagtgttcagaacctcttccctaaaggggtaccacagctctctaccgaatccgagacctggcaagtgcttacccgatcagcagcccatcccaaccgagacctttcaggttgcagacaggcacccggaggtggcgcagagagtcgagcccatgggccctttgaagacacctctgtttcacagcaaataccattaccagaaggtagcagtgcatcggatgcaggcctcacatggcgagacgtttcacgttctgtaccttaccaccgaccggggcacaattcacaaagtagtcgaacccggagagcaggaacatagctttgcattcaatatcatggaaatccagcctttcaggcgagctgccgctatacagacgatgtccctggacgctgaacgcagaaagctgtatgtgtcaagccaatgggaggtgagccaggtgccgctcgatctatgcgaagtatatggtggagggtgccacggatgccttatgtcgcgtgacccgtattgcggatgggatcagggaagatgtatatctatttattcttcagagcggtctgtgcttcagtcaatcaaccctgccgagccacacaaagaatgccccaatccaaagcctgataaagctcccttgcagaaggtttctttggcccccaactctcgctactacctcagttgccccatggagtctcgccacgcgacctacagctggcgccacaaagaaaatgtggaacagagttgcgagcccggccaccagtccccaaactgcatcctgtttatcgaaaacctgacagcacagcagtacggccactacttctgtgaggcgcaggaagggtcctattttcgagaagctcagcattggcagttactcccagaggatggcatcatggcagagcatctgctgggtcatgcgtgcgccctggctgcatctctgtggctgggggtcctaccaacactgactttgggcctgttagtgcattag

SEQ ID NO: 133729 - DNA, 1209 bp, synthetic construct
  misc_feature 1..1209: note = Description of Artificial Sequence: Synthetic coding sequence
  source 1..1209: mol_type = other DNA
atgaaaccaaacataatctttgtcctctctctactgctgattcttgagaaacaggccgcagtcatggggcagaaaggaggctctaaaggaaggttacccagcgaattttctcaatttccccatggacagaagggccagcactacagtggccagaaaggaaaacagcagacagaaagtaagggaagcttctcaattcagtacacttaccacgtggatgcgaatgatcacgatcagtctcgcaaaagtcagcaatatgacttgaatgctctgcacaaaactaccaaaagccagcgacatctcgggggttctcagcagctgttgcacaacaaacaagagggcagggaccacgataagtcgaaaggccactttcacagggtagttatacatcacaagggagggaaagctcaccgaggaacacagaacccatcgcaagatcaaggcaacagtcccagcggaaaggggatctcttcacagtattccaataccgaggagcggctctgggtgcatggtctttccaaggaacaaactagcgtttccggcgcccagaaaggcagaaagcagggaggctctcagagctcttacgtcctgcagaccgaggagttggttgccaataagcagcagagggagacaaagaacagccaccaaaataagggtcactaccagaatgtcgtcgaggttagagaggagcactccagcaaagtgcagacgtctttgtgtccagcccaccaggacaaactgcagcacggtagtaaagatatcttctcaacccaggacgagctgcttgtgtacaataagaaccagcatcaaactaaaaacttgaaccaagatcaacagcatggtaggaaagccaacaaaataagttaccaaagctctagtaccgaagaacggcgactgcactatggagagaacggcgtgcaaaaagatgtctctcaaaggagtatctatagccaaacagaaaagctggtggcgggcaaatcccagattcaggcacctaaccctaagcaagagccgtggcatggcgagaacgctaagggcgagagtggccagtcaacaaatagggagcaggaccttctcagtcatgagcagaagggtcgccatcaacatgggtcacatggcggcctggacatcgtgatcattgagcaggaagacgacagcgataggcacctcgctcaacatctaaacaacgaccggaacccccttttcacctag

SEQ ID NO: 133730 - DNA, 1389 bp, synthetic construct
  misc_feature 1..1389: note = Description of Artificial Sequence: Synthetic coding sequence
  source 1..1389: mol_type = other DNA
atgaagccaaacatcattttcgtcctgtccctcctgttgatcctcgaaaaacaggccgctgttatgggacagaagggaggatccaagggaaggcttcccagtgaattttcgcagtttcctcacggtcagaagggccaacactacagcgggcaaaagggaaagcaacagaccgaatctaaaggatcattcagtattcagtatacctatcatgtggatgcaaatgatcatgaccaatccagaaaatcacagcaatacgacctgaacgcactgcataagacaaccaagtcccagcgccatctgggcgggtcacagcagctcctccataataaacaggagggccgagatcatgataagtctaagggccattttcatcgggttgtgattcatcataagggagggaaagctcataggggcactcaaaacccttctcaggaccagggaaatagtccctcaggtaaagggattagtagtcagtattcaaacaccgaggaacgcctatgggtgcatgggttgagcaaggagcagacatctgttagcggcgcacagaaaggacgaaaacaggggggcagtcaaagttcttatgtgctgcaaactgaggagctggtcgctaacaaacagcagcgtgagactaagaacagccatcaaaacaagggacactaccagaacgtagtggaagtgcgggaggagcactcctccaaagtgcagacgtccctgtgtcctgctcaccaggataagctgcagcacggaagtaaggatattttctctactcaggacgaactgctcgtgtataataaaaaccagcaccagactaaaaacctgaatcaggaccagcagcatggcaggaaagccaataagatctcatatcagtcctcttcaacggaagagagacgtctccattatggagaaaacggggttcagaaagacgtcagtcagagtagcatctattcacaaaccgaggaaaaggcccaaggcaagagtcagaagcagattaccattccctcacaggagcaggagcactctcagaaggccaataaaatatcctatcagtcgagtagtacggaggagcgcagattacactacggcgaaaatggcgtgcagaaggatgtcagtcagcgatcgatctattctcagaccgaaaagctggtggcaggcaagtcacagatccaggctcccaaccccaagcaagaaccatggcacggtgagaacgcaaagggagagtcagggcaatctaccaacagagagcaggatcttctgtcgcatgagcagaagggtcggcatcaacacgggagtcatggcgggctcgacatcgtcatcatagaacaggaggatgacagtgatcgccaccttgcccagcacctaaataatgataggaatccgctgttcacctag

SEQ ID NO: 133731 - DNA, 1749 bp, synthetic construct
  misc_feature 1..1749: note = Description of Artificial Sequence: Synthetic coding sequence
  source 1..1749: mol_type = other DNA
atgaaatccattattctctttgttttatctctattgctaattctcgagaaacaggcagccgtcatgggacagaagggcggaagcaaaggccagctcccttccgggtcttcccagttcccccacggccaaaagggccagcattatttcggacagaaagaccagcaacatactaaatccaaaggttcctttagcatacagcacacgtaccatgtggacattaatgatcacgactggacccgcaagagtcaacaatatgacctgaacgcactccacaaggccaccaagtcaaaacagcacctaggtggctcacagcagctgctaaattacaaacaggaaggtcgtgatcacgacaaatcgaaaggacattttcatatgattgtgatacaccataagggcgggcaggcgcaccacggtactcaaaacccctcccaggatcagggaaactccccgtcaggcaaagggttatcgtctcagtgtagcaataccgaaaagcgcctgtgggttcatggtttgtccaaagaacaggctagcgcgagtggcgcccagaagggacggacacaggggggatctcagtctagttacgtcctccagactgaggaactcgtcgtgaataaacagcagcgggaaacaaaaaatagtcatcagaacaagggccactatcaaaacgtcgtagacgtgcgggaggaacactcgagtaagttacaaacatcactacaccctgcccaccaggaccggttgcagcatggtccaaaggacatttttactacgcaagacgagctgcttgtctataataagaaccaacatcagacgaaaaatttgagccaagaccaggaacacggtcggaaggcccataaaatctcatacccctcttcaaggaccgaggaaagacaactgcatcacggtgagaaatccgttcaaaaggacgtgtccaagggatctatcagcatccagacagaagaaaagattcacggcaaaagccagaatcaggtcactatacatagtcaagaccaggaacatgggcacaaggaaaacaaaatcagctatcaaagctccagtactgaagagagacatctcaattgtggcgagaaaggtatccaaaagggtgtgtcaaaagggtcaatttcaattcagaccgaggaacagatccacggtaagtcccagaaccaggtgcgcataccttcgcaagcacaagagtatggtcacaaagaaaacaagatatcttaccaatcctcctcaaccgaagaacggaggcttaattctggcgaaaaggatgtgcaaaagggcgtgtcgaaaggttcgatttccattcagacagaggagaagattcacggcaagtcccaaaaccaggttacaatcccatctcaggaccaagaacacgggcataaggagaacaagatgtcctaccagagctctagcactgaagagcgacgtctgaattacggcggcaagagtacccaaaaggacgtctctcagagctcaatttctttccagatcgaaaaactggtcgagggcaagagccaaattcaaaccccaaatcccaaccaggaccaatggtcaggccaaaacgcaaaagggaagagcggccagtctgcagacagcaagcaagatttgttgtctcacgaacagaagggtcgctacaagcaggagtcatccgaaagccataacattgtgattactgagcatgaggtggcacaagacgaccacttaactcagcagtacaatgaagatcgtaatccgatttcaacatag

SEQ ID NO: 133732 - DNA, 447 bp, synthetic construct
  misc_feature 1..447: note = Description of Artificial Sequence: Synthetic coding sequence
  source 1..447: mol_type = other DNA
atggcagagagcgactgggacacagtgacagttctgcgtaaaaagggccccaccgcggctcaggcgaaatccaagcaggctatccttgccgcccagcgccgcggggaagatgtagaaaccagcaaaaagtgggctgccggacaaaacaagcagcactccatcacaaaaaacactgctaaactcgacagagagacagaagagcttcatcatgacagggtaaccttggaagtgggcaaggtgatccagcagggtcgtcaaagcaagggacttacgcaaaaggacctagctacaaagatcaatgagaaaccccaagtaattgccgattacgagagtggacgcgccataccgaacaatcaagttcttggcaagattgaacgcgccataggcctgaaactgaggggtaaggacattggcaagccgatagaaaaaggtccaagggcaaagtag

SEQ ID NO: 133733 - DNA, 8121 bp, synthetic construct
  misc_feature 1..8121: note = Description of Artificial Sequence: Synthetic coding sequence
  source 1..8121: mol_type = other DNA
atgagtacatgttgctggtgtacgccagggggtgcatctaccattgattttctgaaaagatacgcgagtaacacccccagtggtgagtttcagacagccgatgaggacctctgctattgcctggagtgtgtggctgagtatcataaggcccgtgacgagctgccctttctccacgaggtactgtgggagctcgaaactctacgcctaatcaatcacttcgagaaatccatgaaagcggagattggcgatgacgatgagctgtacatcgtagacaataatggcgagatgcctctgtttgacatcactggccaggatttcgagaataagctacgcgtcccattgcttgagattctgaagtatccatatcttctgctacatgaacgcgtaaatgagctatgcgttgaggctctctgccggatggaacaagccaactgtagctttcaagttttcgacaagcaccccgggatttacctgtttttggtgcacccaaacgagatggtccgacgctgggcaattctcactgcgcgcaacctagggaaggtggatcgcgacgactactatgacctacaagaagttctgctgtgcttattcaaggtcattgaactgggccttctggagagtcctgacatttacacctctagtgtgctcgagaagggcaagcttatcttgctgccttcccatatgtacgacactacaaactacaagtcctattggctaggaatctgtatgttgctcaccatcctggaggagcaagctatggactccctcctgctaggcagtgataagcagaacgacttcatgcaatctatcctccatactatggaacgtgaagcggatgatgactcagttgaccccttctggcccgcgctgcattgttttatggtgattctcgatcggttgggctcaaaagtgtgggggcaactcatggaccccatagtcgctttccagaccatcatcaataatgcttcttacaatagagagattcggcacatcagaaatagcagtgttcggacgaaactagagccggagtcttatttggatgacatggtgacatgtagtcagatagtctacaattataaccctgaaaagaccaaaaaggatagcgggtggcggaccgcaatttgtcccgactactgtcccaatatgtatgaagagatggagaccctggctagtgtcctccagtcagatattggccaggacatgagagtccataattctacatttctgtggttcattcccttcgtgcagagcttgatggacctcaaagatctgggtgttgcgtacatcgcccaggtcgttaaccacttgtatagtgaggtcaaggaggttctgaaccaaacagacgcagtgtgtgacaaagttacggagttcttcctacttattcttgtctccgtgattgaacttcacagaaataagaaatgcctccacctgctgtgggtctctagtcagcagtgggtcgaagcagttgtgaaatgtgctaaactcccaacgaccgcgttcaccaggtcaagtgaaaagtcttctggaaattgtagcaaggggacagccatgatatcaagtctgtcgcttcacagtatgccaagtaactccgtgcaactcgcttacgtccagctgattcgtagcctgcttaaagagggctaccagctggggcaacagagtttgtgcaaaaggttttgggacaaactgaacctcttcctgagaggaaacctgtccctcgggtggcagcttacaagccaggagactcacgaactgcagagctgcttgaagcagatcattcggaatatcaagtttaaggcaccgccatgtaacacattcgtcgacctcacctcggcatgcaaaatatctcctgcctcttacaacaaagaggagtccgagcagatggggaaaaccagccggaaagacatgcattgtctggaagcgtccagtcccactttctcaaaagagcctatgaaagtgcaggactcagtgttaattaaggccgacaatactatagagggggacaacaacgagcagaattatatcaaggatgtcaaattagaggatcatctgctggctggaagttgtctcaagcaatcctcgaagaatatttttactgaaagagccgaggaccaaattaagatcagcacaagaaaacagaaatctgtcaaggagatttcgtcgtacacgccgaaagactgcaccagtcgaaatggcccagagcggggatgtgaccgcggtatcatcgtctcaacgcgtctgctaactgactcttctaccgacgccttggagaaagtctctacgtccaacgaggacttttccctgaaggacgacgccttggccaaaacgtccaaaagaaagactaaagttcaaaaagacgaaatctgcgcaaaactcagccacgtaatcaagaaacagcatcgaaagagcacgctcgtggataacacgatcaacctggatgaaaacctgacggtgagtaatatcgagagcttttactctcgaaaggacaccggggtgcagaagggggatgggtttatccacaacttgagccttgaccccagtggggtcttggatgataaaaacggcgaacaaaagagtcagaataatgtgcttcctaaagagaaacagctcaaaaacgaagagctggtgattttttcattccatgaaaacaactgcaagatccaagaatttcacgtggacgggaaagagctgataccatttacagaaatgaccaatgcttctgaaaagaaaagctctccttttaaagacctgatgactgttcctgaatcccgcgatgaggaaatgtccaacagtacttctgtgatctattccaatcttacccgggaacaggctcctgatatcagtcctaagtccgataccctgaccgacagtcagatcgacagggacctgcacaaactgtccctgttagcacaggccagtgtgattacatttcctagcgactctccccagaactccagccagctgcagcggaaagtgaaagaggacaagcgctgttttaccgccaaccaaaacaatgtaggggacacttctaggggccaggtcattatcatatccgattccgacgacgacgacgatgaacgcatactctctctggaaaagttgactaagcaagataaaatttgcttggaacgggagcacccagaacagcacgtctctacagtaaattctaaggaagaaaaaaacccagttaaagaggagaagacggaaactctctttcaatttgaggaatcagatagtcaatgtttcgagttcgagagctctagtgaggttttttctgtgtggcaagatcaccctgatgataataactccgttcaagacggggagaagaagtgtctcgcgccaatagctaataccacgaatggccaggggtgcactgattacgtgtcagaggtggttaaaaagggagccgaaggcattgaggaacacactagaccacggtccatttccgtggaagagttctgcgaaatcgaagtcaagaagccaaagaggaagcggtcagaaaagccgatggccgaagacccagttcggccgagctcttcagtgcgtaacgaagggcagagcgataccaacaagagagatcttgtcgggaatgatttcaaatctattgatagaagaacctctacacccaattctcgaatccagagagcaactactgtgagtcagaaaaagagcagcaaactttgcacttgtacagaaccaattcgcaaagtccccgtgtccaagacacccaagaagacacacagcgacgccaaaaaggggcagaataggtcgagcaactacctgtcatgtcgaaccactccagctattgtccctcctaagaagtttcgccagtgtccggagccaacctctaccgccgaaaagctgggtctgaagaagggtcctcgaaaggcctatgagctttcccaacgctcactggattatgtggcacaattacgggatcacggtaaaacagtgggggtagttgatacgagaaaaaaaacaaagctgatctccccacagaatctgtcagttcgaaacaacaaaaagctgcttacatcccaggagctgcagatgcagagacagatccgacctaaaagccaaaaaaacaggcggagactgtctgactgcgagtccactgacgttaagcgggcaggtagtcacaccgcccagaactcagacatttttgtccctgagagtgacaggtctgactacaactgtactggcggcactgaggtgctggccaacagcaaccgcaagcagctgatcaagtgtatgcccagtgagccagagacgatcaaggcaaaacacggctctcctgctacagatgacgcatgtccactaaaccaatgcgattcagtggttcttaatgggactgtcccgactaatgaggtgattgtatccacgagcgaagaccccctggggggaggagatcccacagcacgacacatcgagatggcagcacttaaagaaggcgagcccgactcctcctccgatgccgaggaagacaatctgttcttgacacagaatgacccagaggacatggatctgtgtagtcagatggaaaacgataattataagttgattgaactaatacatggcaaagacacagttgaagtggaggaggattccgtctccagaccccagttggagtccttgagcggcaccaagtgtaagtacaaagactgcctggaaactacaaaaaatcagggcgagtactgtccaaaacatagcgaggtgaaggccgcagacgaggatgtgttccgcaaaccgggcctcccacctcccgcaagcaagccgctgcgtcctacgacgaagatattctcctcaaagagtacatctcgaattgccggattgagcaaatcacttgaaacttctagtgccctgagtccatctctgaaaaacaagagtaagggcatacagtccatcctaaaagtcccgcagcctgtgcccctgatcgcccaaaaaccagttggagagatgaagaactcttgcaatgtgcttcaccctcaaagccctaacaactctaacagacagggctgtaaggtaccatttggtgagtctaagtactttccatcctcaagtcccgtgaatatcctgttgagttctcaaagcgtctctgacacattcgtaaaagaggtcctgaagtggaaatatgagatgttcttaaacttcggccagtgcggccctcccgcctctctctgtcagagcattagccggccagttccggtacgatttcataactacggggactactttaacgtgttttttcctctaatggtcctgaatacgttcgagacggttgcccaggaatggctgaatagccctaaccgagaaaacttctaccagctgcaggttagaaagttcccggctgattacattaaatattgggagttcgctgtctacctcgaagagtgtgagctggccaagcagctgtatcctaaggagaatgatcttgtgtttttagcaccagagagaatcaatgaggagaaaaaggatacagagcgaaacgacattcaagacctccatgaatatcattccgggtacgtacataagttcaggcggacaagtgtgatgcggaatggaaaaaccgagtgttatctgtctattcagactcaagagaatttccccgccaatctcaacgaactggtgaactgtatagtcatctcaagtctcgtaactacccaaaggaaattaaaagcaatgtctttgttgggatccagaaatcagttggcaagagccgtactgaatcctaacccgatggacttctgcacaaaagatctgctcactacaacgtccgagagaatcatagcttacctgcgagatttcaatgaggatcaaaaaaaggcgattgaaactgcttacgctatggtcaagcatagccccagtgtggccaaaatttgccttatccatggcccaccgggcacagggaagtcaaaaactatcgtgggcttgctgtacagactgcttaccgagaaccagaggaaaggccactccgatgagaattccaacgcaaagatcaagcagaatagggtactcgtttgtgcaccttccaacgccgcagtagacgaactgatgaagaaaattattcttgaattcaaggaaaagtgcaaggataagaagaaccctctcgggaattgcggcgacattaacctcgtgaggttaggacccgaaaaaagcataaactccgaggttttgaaattttctctggattctcaggtaaatcacaggatgaagaaagaactgcccagccatgtccaggcaatgcacaagaggaaagaatttctggattatcagctggacgaattgtcacgacaacgcgcactgtgcaggggtggccgagagatacaaagacaggaactcgatgagaatatctctaaggtctccaaggagaggcaggagctcgcttctaaaatcaaagaggttcaaggaaggcctcagaagacccagagcataatcatcctggagtcacatataatctgttgcacattaagcacgagtggaggcctgctactcgagagcgcctttcgtggacaggggggcgtaccattttcctgtgtcatcgtcgatgaagcagggcagagctgtgaaattgaaaccctcacccccttgattcataggtgcaataagctaattctcgtcggcgatccaaagcagctgccccccacagtgatctccatgaaagcccaggagtacggctatgatcagtctatgatggctcgcttttgccgcctgttagaagaaaatgtcgagcataacatgatctcaaggctgccaattctgcagcttaccgtccaataccggatgcaccctgatatatgtctgtttccatcaaactatgtgtataaccgaaacctgaaaacgaatagacagactgaagcgattaggtgttcctctgactggccatttcaaccatacctggtgtttgacgtgggcgatggtagtgaaaggagagataatgactcatacataaatgtccaggaaattaaattagtgatggagatcattaaacttatcaaggataagaggaaggatgtctccttccggaatattgggatcattacacattataaggcacagaaaactatgattcaaaaggatctcgacaaggaattcgaccgcaagggcccggctgaagtggacacagtggatgcatttcaggggagacagaaagattgcgtgatcgtgacttgtgtcagagctaactcaattcagggctccatcggatttctagcctccctgcagagattgaacgttacaattactcgcgctaagtattcactcttcatacttgggcatcttcggacattaatgcagctgctcccaaggtccttttgcgttcacgttaaccattcaccattttttagtcctgagcccaagtaccttcattgggccctaaaagagaaccagcattggaatcagctgattcaagatgcccagaagcgcggtgcaattataaaaacctgtgataaaaactacaggcatgacgcagtgaaaatcctcaagttgaagccggttcttcaaagatctctcactcatccaccgaccatcgcaccagagggctcgagaccccagggcggcctgccttccagcaagctcgactccggattcgccaagaccagcgttgcggcttctttgtaccatacaccgagcgacagcaaagaaattacgctgactgtcacaagcaaggacccagaaaggccgcctgtccatgaccagctgcaagaccctaggttgctcaaaagaatggggatcgaagtgaaaggaggcatatttctctgggatcctcaacccagctcgccacagcatccaggggctacgcccccgacaggcgaaccaggcttcccagtggtgcatcaggacctgagccacattcagcaacccgctgctgtggtggcggctctgtcctctcacaagcctccggtgaggggtgagccacctgccgcatcaccagaggcatcaacatgccaaagcaagtgcgacgatcccgaagaggagctgtgccatcggcgggaggcacgcgccttctctgaaggggagcaggaaaagtgcggatctgagacccatcataccaggagaaatagtaggtgggacaaacgtactctggaacaggaggacagctcctccaaaaagaggaagctcctctag

SEQ ID NO: 133734 - DNA, 7935 bp, synthetic construct
  misc_feature 1..7935: note = Description of Artificial Sequence: Synthetic coding sequence
  source 1..7935: mol_type = other DNA
atgtcaacctgttgctggtgcacacctggcggtgcctcaaccatcgattttctgaaacgctatgctagcaatactccctctggagaatttcaaacagcagacgaggacctgtgttactgtttggagtgtgtggctgagtatcataaggctcgagatgagctgccctttttacacgaggtgctctgggagcttgaaaccttacggcttattaaccatttcgagaagtctatgaaggctgaaataggcgatgatgacgaactgtatatcgtggataacaatggggaaatgcctcttttcgatattaccgggcaggattttgagaataaacttcgcgtaccactgcttgaaatcttaaagtacccctacttgctgttgcacgagcgggtcaacgagctctgtgtcgaagccctgtgtcgcatggagcaggcaaactgctcattccaggtgttcgataagcatccaggcatctatttgttcttagtgcaccccaacgaaatggtgaggcgttgggcgattctgacagcaaggaatttaggaaaggtggacagagacgattattacgaccttcaggaggtcctactgtgcctcttcaaggtaattgagctgggactcttagaatctccagatatctacacaagttcagtactggagaaagggaaattgatccttcttccttctcacatgtatgatacaacaaactataagtcatactggttggggatctgcatgctgctgacgatcctagaagagcaagcgatggattccctgctgttgggctccgacaaacagaacgatttcatgcaatctatactccatactatggagagggaggccgacgacgatagtgtcgaccccttttggccagctttacattgcttcatggtgatcctcgataggctgggcagcaaagtctggggccagctgatggaccccatcgtggcatttcagaccatcatcaacaacgccagctataaccgggagatccgacatattcgaaacagcagtgtcaggaccaaactagagcccgagagctacctggacgatatggttacctgtagccagatagtgtataactataatcctgagaagactaagaaggactcaggctggaggactgccatctgccccgactactgccctaacatgtacgaggagatggagacgctggcgagcgtcctgcaaagcgatattggccaggacatgcgtgtgcataacagcactttcctgtggttcatcccttttgtgcagtcactaatggatctgaaggacttgggagtcgcctatattgctcaggtggtgaatcacttgtactccgaagtaaaggaagtgttgaatcagactgatgcagtctgcgacaaggttactgagtttttcctgctgatcctggtgagcgtcattgaactgcaccgcaacaagaaatgcttgcacctactatgggtgagcagccagcagtgggtggaggcagtggtaaaatgcgccaaattacctacaacggctttcacaagaagctccgaaaaatcaagtgggaactgcagtaaaggcactgccatgattagtagtctctctctgcacagtatgcctagcaattctgtccaactcgcatacgtgcagctgattcgcagcctactgaaagagggatatcagctgggacagcagtctttgtgcaagcggttctgggataaactgaaccttttcctccggggtaacttgtcacttggttggcagctgacctctcaagagacccatgaactgcagtcctgtctgaagcagattattcgaaacatcaagtttaaggcgcccccctgcaatacgtttgtggacttaacatctgcctgtaaaattagtcccgcatcttataataaagaagaaagtgaacagatggggaagacctctcggaaggatatgcactgtttagaagcgagcagccctacattttccaaggagcccatgaaagtgcaggatagtgtcctgatcaaagctgacaatactattgaaggtgacaacaatgagcaaaattacatcaaggatgtgaagctcgaggatcacctgctggctggctcgtgcctcaagcaaagtagtaagaatatttttaccgagcgcgccgaagaccagatcaagatttccacgcgtaagcaaaaatctgtgaaagaaatcagttcttatacccccaaagactgcacctcccgtaacgggcccgagcgcggatgcgaccgaggaatcatcgtgtcaaccagactgctgaccgactcctccaccgatgctctggaaaaggtgagtacctcaaatgaggacttcagtttaaaagatgacgcactcgctaagacatccaagcgtaagacaaaggtgcagaaagacgagatttgtgccaaactgtcccacgtgattaagaagcagcatcgaaaatctaccctagtggataatacaatcaatctggacgagaacctgactgtttccaatattgagagcttctacagcaggaaggacacaggggttcaaaaaggggacggtttcatacataacctatccttggacccatcgggggttttagatgataagaacggggaacagaaaagccagaacaatgtgctgcccaaagagaagcaactgaaaaacgaagagctcgtcatattcagctttcatgaaaacaactgtaagatccaggagtttcatgttgacggcaaagagctcattccatttactgagatgacaaatgcaagcgaaaagaagagctcccccttcaaggacctgatgaccgtgcccgagtcgcgtgacgaggagatgtccaatagcacatccgtcatatacagtaatctgacacgagaacaggcccctgacatctcccctaaatcagataccttaacagactcacaaattgacagagacctccataaactgtccctcttagctcaggccagcgttatcactttcccctctgattccccacaaaactccagccagctgcaacgcaaagtgaaagaagacaagaggtgttttacagctaatcaaaacaacgtcggtgacacctcccgcgggcaggtgatcatcataagcgactccgacgacgacgatgatgaacgcatcctgtcactcgaaaagcttaccaaacaggacaaaatctgtttagagcgggagcatccggagcagcacgtctccacggtcaattcaaaggaagagaaaaatcccgtaaaggaggagaaaaccgaaactctgttccagtttgaagaaagcgattcccagtgttttgagtttgaaagcagcagcgaggtgttctccgtgtggcaggaccatcctgatgacaataacagcgtgcaggatggcgagaaaaaatgtctggctcccatcgccaatacaaccaatggccagggatgcactgactatgtgtctgaggtggtgaaaaagggcgccgagggtatcgaagaacatacaaggccccgatccatctcagtcgaggaattttgcgaaatcgaggtcaagaagccaaagagaaaacggtcagagaagccaatggctgaggaccccgtacggccttcgtcctcggtgaggaatgaaggacaatcagatactaacaaacgagatctcgtggggaatgatttcaaatctattgacaggagaaccagtacccccaacagccggattcagcgcgcgacaactgtgtcccagaaaaaatcatccaaactttgcacctgtactgagccgattagaaaggtacctgtgagcaagactcccaaaaagacccatagcgatgccaagaaaggacagaaccggtctagcaactacctgtcatgcaggacaacaccggctatcgttccaccgaaaaaatttcgccaatgtcctgagcccacttccacagctgaaaaactgggacttaaaaaggggcctagaaaagcctatgaactgtctcaacgatctctcgactacgtggctcagctgagggaccatggcaaaaccgttggggtggtcgacaccagaaagaaaacgaagctgatttccccgcagaatttgagtgtgagaaacaacaagaaactgctcaccagtcaggagttacagatgcagagacagatcagaccaaaatcccagaagaatcggcggaggctgtctgactgtgagtctacggatgtaaaaagagccggatcccacactgcccagaactcagacatcttcgtgcctgaaagcgaccggagcgactacaactgcaccgggggtaccgaggtgctggcgaattcaaatcgcaaacagctcattaagtgtatgccaagcgaacctgagaccataaaggccaagcatgggtcacccgcaactgacgatgcgtgcccccttaaccaatgtgacagtgtggtgttgaatggcactgtacctactaacgaagtgattgtctctactagcgaggaccccctgggagggggcgaccccacagcacggcacatcgagatggccgccctgaaagaaggggaaccggactcctcctctgatgccgaggaggataacctcttcctaacacagaacgatcccgaggacatggatctgtgctctcaaatggagaatgacaactataaattgatcgagctaatacacgggaaggataccgttgaagttgaggaggactcagtgtctcgcccccagctcgaatccctttccgggaccaaatgcaaatacaaggactgtttggagacgaccaaaaatcaaggggagtattgcccgaaacactccgaagtaaaggccgccgatgaggacgtgttccggaaaccaggcctcccaccacctgcctcaaaacccctgcgaccaaccaccaagatttttagcagtaagtcaacgagcagaattgcaggactgtccaagtccctggagactagtagcgctctctcccccagcttgaagaataaaagcaagggcatacagtctatcttgaaggtgccccagcctgtgcctctcatagcccagaaacctgtgggagagatgaagaattcctgcaacgtattgcacccacaaagtccaaataattccaaccgccaaggatgtaaggtgccttttggtgagtcaaaatatttcccatcgagcagtccggtgaacatcctgctgagcagccaatccgtcagtgacacctttgtcaaggaggtactgaagtggaaatacgaaatgtttttaaactttggccagtgcggccctcccgcctccctctgtcaatctatcagtcgacctgtgcccgtgcggtttcataattacggggactacttcaacgtctttttccctctaatggtcctaaacaccttcgaaacagtagcacaggaatggcttaattcacccaaccgagagaatttttaccagctccaggtacggaagttccctgctgattatattaagtactgggagtttgccgtatacctcgaggagtgtgaacttgctaaacagttgtacccaaaagaaaacgatttagtctttctggctcccgagaggataaacgaagagaagaaggacactgagcgcaatgatattcaggacttgcacgaataccacagtggttatgttcacaagtttcgccggacctcagttatgaggaatggcaagaccgaatgctacttgagcatccagacccaggagaacttcccagccaatctaaacgagctggttaactgtatagttatcagtagcctggttaccacccagcgaaagcttaaggccatgagtctgcttggcagtagaaaccagttagctagggcggtgcttaaccccaatcctatggatttctgtaccaaagatctcctgacgaccacatccgagaggattatcgcttatctcagggacttcaacgaggaccaaaaaaaagcaattgagacggcctacgccatggtaaagcattctcccagcgtggccaagatatgcttgatccacggtcccccagggaccggcaaatcaaagacgattgtagggctgttatatcggttgctgacggagaaccagcgaaaagggcactcggacgaaaatagtaacgccaagattaagcagaatagggtcttagtttgcgcaccgtccaacgccgcagtggacgaactgatgaagaagataatcttagaattcaaagaaaaatgtaaggataaaaagaatcctctaggcaactgcggggatataaacttagtgaggctgggaccggagaagtccatcaacagtgaggtcttgaaatttagcctggactctcaggtgaaccacagaatgaaaaaggaattaccttcgcacgtgcaggctatgcacaagcgaaaggagtttctggattatcagcttgatgagctctcccgccagagagccctgtgccgtggtggccgtgaaatccagcgccaggaattggacgagaatatcagcaaagtctcaaaggaacgtcaggagctggcttctaaaattaaagaggtccagggcagacctcaaaaaactcagagcattataatcctagagtcccatatcatatgttgtacactgtctacgtccggcggcctgctgctcgagtccgcattcaggggtcaaggcggggtgccctttagctgtgtgattgtggacgaggccggccagagctgcgagatagagacactgaccccacttatccatcgatgtaacaagttgattctggttggtgatccaaaacagttgccacccacagtcatttcaatgaaagcgcaggagtatgggtatgatcagtctatgatggctcgtttttgtcgtctacttgaggagaacgtggaacataatatgattagtagactgccgattctgcagttaactgtgcagtacaggatgcatcctgatatttgcctcttcccttcaaattacgtgtacaaccgcaatctgaaaacaaatcgacagacggaagccattcgctgtagtagcgattggccatttcagccctatctcgtgtttgatgtgggggatgggtccgagaggcgggacaacgacagctacatcaacgtccaagaaatcaaacttgttatggaaataatcaagctcatcaaggacaagcgaaaggacgtatccttccggaacatcggcattatcacccactacaaagcccagaaaaccatgatccagaaagatttagataaggagttcgacaggaagggattcctggcatccttacagaggctgaacgtgaccatcacacgcgccaaatactcactctttatactcggccatctcagaactcttatggagaatcagcattggaaccagcttatccaggatgcccaaaagcgcggtgccatcattaagacatgtgataagaactatagacatgacgctgtcaagatcctgaagctgaaaccagtcctccagaggtctctgacacatccccctaccatcgctcctgaaggatccagacctcagggtggcttgccctcaagcaagctggactctggattcgctaagaccagtgtggccgcctccctgtaccatactccctcagatagcaaagagatcacattgacagtcacttctaaggacccggaaagacccccagtgcatgaccagcttcaagaccctagactcctgaagcgtatggggatcgaagttaagggaggcatcttcctttgggatccacagccgtcttccccccaacaccccggggccaccccccccacgggggagccgggcttcccagtcgttcatcaggacttgtcccatattcaacaaccagcagccgtggtggcagccctctcaagccataagccacctgtgcgcggcgaaccccccgcagccagccccgaggcatcgacctgccaatctaagtgcgacgacccagaagaggagctctgtcatagacgggaggccagagcctttagcgaaggtgaacaggagaaatgtggaagtgagacacaccacacgaggcggaactcacgttgggacaagcggacgctggaacaagaagattcctcctcaaaaaaaaggaaattgctgtag

SEQ ID NO: 133735 - DNA, 2847 bp, synthetic construct
  misc_feature 1..2847: note = Description of Artificial Sequence: Synthetic coding sequence
  source 1..2847: mol_type = other DNA
gtcgcacaggaatggctgaactcccccaacagggaaaacttctatcaactgcaggtgagaaagtttccggcggattatataaagtattgggagttcgccgtctacctggaggagtgtgaattggccaagcagctataccctaaggaaaacgacctcgtgttcctggcccctgaacggatcaatgaagagaaaaaggatactgaaaggaacgacatccaggatcttcatgagtaccactctgggtatgttcataaattcaggaggaccagcgtcatgcgcaacggaaagaccgagtgctatttatctatccaaacacaggaaaacttccccgcaaacctgaacgaactagtaaactgtatcgtgatcagctctctggtgactacacagcgcaagctgaaagccatgagtctcctgggcagccgcaaccagctcgcccgggccgttctgaatccaaatccaatggacttttgtactaaggacctcctaaccaccacctcggagcgaatcatcgcatacctaagggattttaatgaggatcagaagaaggcgattgaaacggcttatgctatggttaagcactctccctctgtcgctaagatctgcctcatccacgggccaccaggcactggcaaaagtaagaccatcgttggactcctgtacaggctcttaacggagaaccagcgtaaaggccacagcgacgagaatagtaatgccaagatcaaacagaatcgtgtgctagtctgtgctcctagtaacgccgccgtcgacgaactcatgaaaaagatcatactcgaattcaaagagaagtgcaaggataagaagaacccactgggtaattgcggcgatatcaacctcgtgcgtttaggcccagaaaagtccattaacagcgaggtcctcaaattctcattagacagtcaggttaatcatcggatgaagaaggagctgccttcgcacgtacaagccatgcataaacgcaaggagtttctcgactatcagttggatgagctcagtaggcagcgagctctgtgccgtggcgggagagaaattcagaggcaggaattggacgagaacatttctaaggtgtccaaagaacggcaggagctcgcatcaaaaattaaggaagtgcagggtcggcctcagaaaacgcagagtattattatcctagaatcacatatcatttgttgcacactttctacatcgggtggtcttctgcttgagtccgcctttaggggacagggaggcgtcccgttctcttgtgtgatcgtggacgaggccgggcagagttgtgaaatagaaacactaacccccctgatccaccgatgtaataagcttatccttgtcggcgatcctaaacagctgcctccaaccgtcatttctatgaaggcacaggaatacggatatgatcaaagcatgatggctcgattctgccgcctgttggaggaaaacgtcgagcataacatgattagtaggttaccgattctgcagctgacggtgcaataccggatgcatcccgacatatgcttatttccgagtaactacgtgtacaaccgaaatctcaaaactaatcgacaaacagaggcaatacgatgcagcagcgattggccgttccagccatatttagtgttcgacgtgggggatggctccgaacgcagggataatgattcttatatcaatgtgcaggagattaagctggtcatggagatcattaaattgatcaaagataagcgcaaggacgtgagcttcaggaatattgggataataacccactataaggcccagaagacgatgatccagaaagaccttgataaggaatttgaccgcaaggggccagccgaggttgatactgtagacgcctttcaaggtcggcagaaggactgcgttatcgttacatgcgtcagagccaactctatacagggcagcattgggtttctggcctctcttcagagactaaatgtgaccattacaagggccaaatattccttattcattctgggacatcttcgcactttgatgcagttactccccagaagtttctgtgtgcatgtgaatcattctccatttttctcgcccgagccaaaatacctccactgggctctaaaggaaaaccagcactggaatcagctcatccaggacgctcagaaacgaggcgccatcattaagacatgtgataaaaactaccgtcatgacgccgtcaaaatactgaaactgaaacctgtacttcaacgcagtcttacacatccgcccacaattgcaccagaaggcagtaggccccaggggggacttccatcctctaagctggatagcgggttcgctaagacctccgtggcggcttccctatatcacactccatccgattcaaaggaaataactcttacagtgaccagcaaagatcccgaacgaccccctgtccacgaccaactgcaagaccctcggctgctcaagcggatgggcatcgaggtcaaaggaggcatattcctttgggatccgcaacctagttcccctcagcaccccggcgctacaccaccaactggggagcccggatttcctgtcgtgcatcaggatctctctcatattcagcagcccgcagccgtggttgctgcgctgtctagccacaagcctccggtcaggggcgagcctcctgctgctagccccgaagcgagcacttgccagtccaaatgtgacgatcctgaagaggagttgtgtcacaggcgcgaagctcgcgccttctcagagggagaacaagaaaagtgcgggtctgaaacacaccacactcgccgcaactctcgatgggacaagaggactctggagcaggaagacagcagcagcaaaaagcggaagctcctatag

SEQ ID NO: 133736 - DNA, 1269 bp, synthetic construct
  misc_feature 1..1269: note = Description of Artificial Sequence: Synthetic coding sequence
  source 1..1269: mol_type = other DNA
atgtccacaagctacggatgtttttggcgcagattcattcacgggattggccgctccggagatataagtgccgtgcaacccaaggctgccggatcttctttgctaaataagatcaccaacagtctagttttggacataataaagttagcgggagttcatacggtggctaattgttttgtggtgccaatggctactggaatgtcccttacactttgtttcttgaccctccggcataaaagacccaaagctaagtacataatctggcctcgtatcgaccagaagagttgttttaagtcaatgatcaccgccggattcgaacctgtggttattgaaaatgtacttgagggggacgaactgagaacagatctgaaggctgttgaagccaaggtgcaggagctgggacctgactgcattctatgcattcattccaccacaagctgttttgcacctcgggtgcctgatagactcgaagagctggcggtcatttgtgcaaactacgacatcccgcacatagtgaacaacgcatacggagtgcagtcaagcaaatgcatgcacttaatacagcaaggcgctcgggtcggacgcatcgacgcttttgttcagtctttagacaaaaattttatggttccggtgggcggtgcgatcatcgcggggtttaatgactcattcatccaggagatctcaaagatgtatcctggcagggcttctgcatccccctcccttgatgtcctgatcaccctattaagtctgggaagcaacgggtacaagaaactactcaaggagcgcaaagagatgttttcttatctgagcaaccagataaagaaactgtccgaagcctataatgagagattactgcatacaccgcacaatcctatcagcctagccatgacacttaaaaccttggatgaacaccgcgataaggctgtgacccaactgggatcaatgctgttcaccagacaggtctctggggctagagttgttcctttgggctccatgcagaccgtgagcgggtacaccttcagaggattcatgtctcacacaaacaactacccctgcgcatatctaaatgccgcatctgcaattggcatgaaaatgcaggacgttgacctttttattaagcggttggatcggtgcctgaaagccgtgagaaaggagcgtagcaaggaatccgacgacaactatgacaaaactgaggatgtggatatcgaggagatggcgctcaaactggacaatgtccttctcgacacttatcaggatgcaagtagctag

SEQ ID NO: 133737 - DNA, 1506 bp, synthetic construct
  misc_feature 1..1506: note = Description of Artificial Sequence: Synthetic coding sequence
  source 1..1506: mol_type = other DNA
atgaacagggagtcgtttgccgctggtgagagactggtgtcccccgcttacgttcggcaagggtgcgaagcccgcagatcccacgagcacttgattcggctgttgctggagaaaggcaagtgcccagagaatggctgggacgaaagcactttggagctgtttctccacgagcttgccattatggattctaacaattttttaggaaactgcggcgtgggcgagcgagaagggagggttgcgtccgctttggtggcgcgtcgacattaccgatttatccacggcattggtcggagcggggacattagcgccgttcagcccaaagcggctggcagtagtctgctgaataaaataacaaacagcctggtgctggatatcatcaaattagctggagtccatacagtagctaactgcttcgtggttcccatggccaccgggatgtcactcaccttatgtttcctgaccctgagacacaagcgacccaaggctaagtacatcatttggccaagaatcgaccagaagagttgctttaagtcaatgatcacggcgggcttcgagcccgtagtgattgagaatgtcctcgagggcgatgagctccggaccgatttgaaggctgtggaggccaaagtccaggaactcggccctgactgcatcctctgtattcacagcacaacttcttgttttgcaccccgagtgcctgatcggctcgaggagctggctgtgatatgcgcaaattacgatatcccccatatcgtcaataatgcatacggagtccaatctagtaaatgcatgcaccttatccagcagggcgcccgagtgggaaggatagacgcctttgtacagtcattagacaagaatttcatggtgcccgttgggggagcaatcatcgccggctttaacgactcctttatccaggagatcagtaagatgtatcccgggcgggcttctgcttcaccttccctagatgtgcttatcactttactgagcctgggctccaacggatataagaaactcctaaaagaaaggaaggaaatgttctcctacctgagcaatcagattaagaagctctctgaggcatacaacgaacgccttctgcacaccccacataaccctatttcacttgccatgactctgaagaccctggacgagcacagagataaagccgtgacgcagctgggctccatgctttttactcggcaggtttccggtgcccgggtggtgccactgggctcaatgcaaacggtaagtggctacacatttagggggtttatgagtcataccaacaactacccatgcgcatacctgaacgcagcttccgctatcggaatgaagatgcaggacgtggatctgttcataaagcgactggaccgttgtctcaaagctgtgagaaaggagcgatctaaagagagcgacgataattatgataagacagaagatgttgacatagaggaaatggccctcaagttggacaacgtcctgctcgacacatatcaagatgcgtcctcctag

SEQ ID NO: 133738 - DNA, 903 bp, synthetic construct
  misc_feature 1..903: note = Description of Artificial Sequence: Synthetic coding sequence
  source 1..903: mol_type = other DNA
atggaaggtgtgctttataaatggaccaactacctcaccggatggcaacctaggtggttcgtccttgataacggcatcctgtcatactatgattcccaggatgatgtttgtaagggcagcaaagggtccataaaaatggctgtttgtgagataaaggtgcatagtgcagataacaccaggatggagctgattattcctggcgaacaacatttctacatgaaggctgttaacgctgcagagagacagaggtggcttgtggccttgggaagttctaaagcttgccttacagatacccgaacaaagaaagagaaggaaatttccgagactagtgagagcctgaagactaaaatgtccgaactgaggctgtattgcgatctcctcatgcaacaagtgcacacgattcaggagttcgtgcatcatgacgagaatcattcttctcccagtgcagagaacatgaacgaagccagttccttactctccgctacatgcaatacttttattacaaccctcgaagagtgcgtgaaaatcgcaaacgcaaaattcaagcccgagatgttccagctgcaccatccggatccgttggtgtcccccgtgtccccatcgcccgtccagatgatgaaacggagcgtctcgcacccaggttcatgttcaagcgagaggtcaagccacagcattaaagagcctgttagcactcttcacaggttgagccaaaggaggcgcaggacatattccgataccgactcctgctctgatatccctctggaggaccccgaccgtcccgttcattgcagtaagaataccctgaatggagacttggctagcgcaaccattcccgaagaatcccgcctgatggccaaaaagcagtctgaatcagaggacacactgccgtctttcagtagttag

SEQ ID NO: 133739 - DNA, 1104 bp, synthetic construct
  misc_feature 1..1104: note = Description of Artificial Sequence: Synthetic coding sequence
  source 1..1104: mol_type = other DNA
atggacaaagagtacgtggggttcgccgccttacctaaccagttacacagaaagtccgtcaagaaggggtttgatttcacgctcatggttgccggcgaatcagggctggggaaaagcacccttattaattcactgtttctgactaacctctatgaagaccgtcaggtgcctgaggcctctgctaggttgacgcagacactggcaatcgagcgccggggggttgagattgaggaaggcggcgttaaggtcaaacttacgttggtggacactcccgggttcggtgactccgtcgattgctcagactgctggctcccagttgtaaagtttatagaagaacaattcgaacagtacctgagggatgagagcggcctgaatcgcaagaacattcaggacagcagagttcactgctgcttgtacttcatatcgccattcggaaggggcctccgacccctggatgtggcctttcttcgcgcagtgcacgagaaagtcaatattattcctgtcatcgggaaagctgatgcattaatgccgcaggaaactcaggcactgaagcagaaaattcgggaccagttgaaggaggaagaaattcacatctatcagttccctgaatgcgactccgatgaggacgaagattttaagaggcaggatgcagaaatgaaggaaagcattccattcgccgtggttggaagctgcgaagtcgttagagacggtggcaacagacccgtccgtggccggcgttacagctggggaactgtggaggtggagaacccacaccactgtgacttccttaatctgcgcagaatgctcgtgcagacacatcttcaggacctcaaagaggtgacacatgacctgctatacgaagggtaccgagcaagatgcttgcagtctctggcaaggcctggtgcccgtgacagggccagcaggagtaagctttccagacagagcgctaccgaaattcccctacctatgctccccctggccgacactgagaagctgataagagagaaggatgaggaactacggaggatgcaagaaatgcttgagaagatgcaggcccagatgcagcagagccaggcccagggagagcagtccgatgccctctag

SEQ ID NO: 133740 - DNA, 1104 bp, synthetic construct
  misc_feature 1..1104: note = Description of Artificial Sequence: Synthetic coding sequence
  source 1..1104: mol_type = other DNA
atggataaagaatacgtgggctttgcagccctgcccaatcagctgcaccgtaagagtgttaaaaaaggctttgactttacccttatggtggccggcgagtccggattggggaaatctacactcatcaactctttgtttctgacaaacctctacgaagacagacaagtgcctgaggcatctgctagattgactcagaccctggcaatagaaaggagaggggtcgagatcgaagagggtggtgtcaaagtgaagctgaccttggtggacacccccggatttggagattccgttgactgttctgactgctggcttcctgttgtgaaatttattgaggagcagtttgagcagtacctgcgcgacgaatccggtctgaatcggaaaaatatccaagattcccgggtgcattgttgtctctatttcatttcaccttttggcagagggttacggcccctggacgtggccttcctcagggctgttcacgaaaaggtgaatataattcctgtcatcgggaaagcagacgccctgatgcctcaggagacccaggccctgaagcagaagatacgcgatcaactaaaggaagaggagattcacatctaccagtttcccgagtgcgattccgatgaggacgaggactttaagagacaagatgctgagatgaaggaatcaattccctttgccgtagtgggaagctgcgaggtcgtgcgcgatggaggaaatcgccctgtgcggggtaggcgctactcctggggtaccgtcgaggtggagaaccctcaccattgcgactttcttaacctgcggagaatgttagtccaaacccacctgcaagaccttaaggaggtgacacacgacctgctgtacgagggctaccgggctagatgcctccagtcacttgccagacccggcgcccgtgaccgtgccagcagatctaaactgtccagacagagtgctactgaaatccccctgccgatgctgcctctggctgacacagagaagctgatcagggagaaagacgaagagctccgcaggatgcaggaaatgctcgagaagatgcaagctcaaatgcaacagtcacaggcccagggcgaacagtccgatgcactgtag

SEQ ID NO: 133741 - DNA, 966 bp, synthetic construct
  misc_feature 1..966: note = Description of Artificial Sequence: Synthetic coding sequence
  source 1..966: mol_type = other DNA
atgatgaaccgatactaccaacccattgtggattatattgatgcacaattcgaggcatatctccaggaagagttgaagattaagcggtccctgttcacataccatgatagccgtatccacgtgtgcctctatttcattagccctacgggccacagccttaaaaccttggatctccttacaatgaagaacctggacagcaaagtcaatattattcccgtaatcgcgaaggccgatactgtgagtaagactgagcttcaaaagtttaaaattaagctaatgtccgaactggtgtctaacggtgtgcagatatatcagtttccaacagacgacgatacaatagctaaagttaacgcagccatgaatggtcaactgccctttgccgtcgtgggatccatggatgaggtcaaggtgggaaataaaatggtcaaggcccgccagtatccctggggcgttgtgcaggtggagaacgagaatcactgtgattttgtcaagctacgtgaaatgttgatttgtaccaacatggaggacctgagggaacagactcatacaagacactatgaactgtacagacgctgcaaacttgaagaaatgggttttaccgatgtgggacccgagaacaaacccgtttccgtgcaggagacttacgaggccaagcggcacgaatttcacggggaacggcaacgcaaggaggaggagatgaaacagatgtttgtccagagggtgaaggagaaggaagccatccttaaggaagcagagcgtgaattacaggcaaaatttgagcacctgaagagacttcatcaggaggagcgtatgaaactggaggagaagaggaggctcctcgaagaagagatcatcgccttttccaaaaaaaaagcaaccagcgagatttttcacagtcagtccttcttagcgacaggctccaacttacgaaaggacaaagatcgaaaaaattccaattttctgtag

SEQ ID NO: 133742 - DNA, 954 bp, synthetic construct
  misc_feature 1..954: note = Description of Artificial Sequence: Synthetic coding sequence
  source 1..954: mol_type = other DNA
atgagcggacacgtgggctttgagtcactgcctgaccagttggttaaccgctcgattcagcaggggttttgcttcaatatcctgtgcgtgggagagaccggaatcggcaaatctacgcttattgacaccttatttaacaccaatttcgaagactacgaaagcagccacttctgcccgaacgttaaactgaaggctcagacatatgagctgcaggagtccaatgtgcaattgaaactgacgatcgtgaacacggtgggttttggggatcaaattaataaagaggaaagttaccaacctatcgtcgattacatcgatgcacagtttgaagcctatctccaggaggagctgaaaatcaagagatccctctttacttatcacgactcgcgcatccacgtatgcttatactttattagccctacagggcattcgctgaaaacactggatcttctgaccatgaagaatctcgacagcaaggtgaacatcatccctgtgatagctaaagcggatacagtgtctaagaccgaacttcaaaagtttaaaattaagctcatgagcgagttagtgtccaacggcgtgcagatctaccagttccctacggatgacgacactattgctaaggtgaatgccgccatgaacggccagctaccgtttgctgttgtcgggtctatggacgaggtgaaagttgggaataaaatggtcaaggcccggcaatacccttggggggttgtgcaggtggagaacgaaaaccattgcgactttgtcaagctgcgcgagatgttaatttgtaccaacatggaggaccttcgagagcaaacacatacgcgacattatgaactgtacaggaggtgcaagctcgaggaaatgggatttaccgatgtgggtcccgagaacaagcctgtttcttataggcctaacctgtccacgctgagagactttacgaaaaagcgggagtag

SEQ ID NO: 133743 - DNA, 1635 bp, synthetic construct
  misc_feature 1..1635: note = Description of Artificial Sequence: Synthetic coding sequence
  source 1..1635: mol_type = other DNA
atggcctcttccgaggtggccaggcatctcctgttccagagtcacatggctaccaagacgacctgcatgtccagtcagggctctgatgacgaacaaattaaacgagagaacatccgctctcttacgatgtctggtcacgtaggatttgaaagtctgccggaccagttggtgaaccgatcaatccaacagggcttttgctttaacatcctgtgtgttggtgagacaggaattggcaagtctaccctcatcgacaccctttttaacaccaactttgaagattatgagtcttcgcacttctgcccgaacgtgaagttaaaagcccaaacgtatgaattgcaggagtccaacgtgcagctaaagttgaccattgtgaacaccgtgggcttcggggatcagattaataaggaggagagctaccaaccgattgtggattacatcgatgcacagtttgaggcctacctgcaagaagagctgaagataaagaggtccctcttcacgtatcacgactctcggatccatgtctgcctctacttcatctcaccgaccgggcattccctcaagaccctggatctgttgactatgaagaacctggactcaaaggtcaatatcattccagtgatagccaaggccgatactgtatccaaaacagaactccaaaagttcaagattaaactgatgagcgagctggtgtcaaacggggtgcagatataccagtttccaacagatgacgacaccatagccaaagtaaatgcagcgatgaacggccagttacccttcgccgtcgtcgggtcaatggacgaggtcaaagtaggcaacaagatggtaaaggcccgccagtacccctggggcgtcgtacaggttgaaaacgaaaatcattgcgattttgttaaattaagagagatgcttatatgtacaaacatggaggaccttcgcgagcagacacacaccagacactacgaactgtaccgcagatgcaaactggaggaaatgggattcacggacgtggggccagagaataagccggtgtctgttcaggagacatacgaagcaaagaggcacgagtttcatggtgagcgacagcgcaaggaggaggagatgaagcagatgttcgttcagagggtcaaggagaaggaggccatcttaaaggaagctgaacgggaattacaggctaagtttgaacaccttaagaggctccatcaggaggagagaatgaagcttgaggagaagcggaggttactcgaagaagagattatagccttcagcaaaaagaaggccacttcagagatattccacagccagtctttcctagctactgggagtaacctgcgaaaggataaggaccgcaagaaagaacctgggtgccggtttgagctgctttgcattgacgtgagagcctgtgagacaaatggaggaagaaaagatgccgagaaagctcccatcttctgcaaaacggaggtaccagagcacaggagatctagtagtcaagctaactttatcaaaaagaaactggaagtgtgtttcgatttcgcagtcatttgttttataacctccattttcggcgagcagccgcagttgcttatttttatggagaaatacttccaagtacagggtcagtacatctcacagagtgaatag

SEQ ID NO: 133744 - DNA, 1365 bp, synthetic construct
  misc_feature 1..1365: note = Description of Artificial Sequence: Synthetic coding sequence
  source 1..1365: mol_type = other DNA
atggcctcctcggaagtggcaagacatctgctattccagtcccacatggccaccaagaccacatgtatgagttctcaaggcagcgatgacgagcagatcaagagggaaaatataagaagcctgaccatgtctggacacgtcgggtttgaatccttgccagatcagctggtgaacagatccatccaacagggcttctgctttaatattttgtgcgtaggggagactggcattggcaaatcgaccctgatcgacacactgttcaataccaatttcgaagactatgagtctagccatttctgtcccaacgtgaaactgaaagcacagacttatgagctccaggaatctaacgtccagctgaagctcacaattgttaacactgtgggttttggcgatcaaatcaataaggaggagagttaccagccgattgtcgactacatcgacgcccaatttgaagcctacctccaggaagaactgaaaataaaaaggtccctcttcacataccatgactctcgtattcacgtttgcctctatttcatttctccgacaggccactctctgaagacccttgatctactcactatgaagaacttggattctaaagtcaacattatccccgttatcgccaaggccgacacagtgtctaagacagagctccagaagttcaagatcaagttgatgtctgagctagtgtccaacggcgtccagatatatcagtttccgacagatgacgatacaattgctaaagttaacgctgccatgaatggccagctaccattcgcagtagtggggtctatggacgaggtgaaggtgggcaataagatggtgaaggcccgccagtatccttggggtgtcgtccaggtcgagaatgaaaatcattgcgatttcgttaagcttagggaaatgctgatctgtaccaacatggaagaccttagagagcagacgcataccagacattacgaactttatagacgatgcaaactggaagaaatggggtttactgacgttggcccagagaataagccagtaagcgtgcaggaaacttatgaggccaagaggcacgagttccacggagagcggcaacgcaaggaggaagagatgaagcagatgttcgtccaacgggtaaaggagaaggaggccattctgaaggaagccgaaagagagctccaggctaagtttgagcacttaaagaggctgcatcaggaggagaggatgaaactggaggaaaagcggcgcctgctggaagaggaaattattgcattctcaaagaagaaggctacgagcgagatatttcacagtcagtctttccttgcaaccggttcaaacctgcggaaggataaggatcggaagaattccaactttctctag

SEQ ID NO: 133745 - DNA, 1296 bp, synthetic construct
  misc_feature 1..1296: note = Description of Artificial Sequence: Synthetic coding sequence
  source 1..1296: mol_type = other DNA
atggcgtctagcgaagtcgccagacacctcaaaagagagaacatccgctccctcacgatgtccggccacgtcggcttcgagagtctgcccgaccaactggttaaccgcagcattcaacaaggcttttgctttaacatcctttgtgtgggggagacaggcattggtaagtctaccctgattgacacactcttcaacaccaatttcgaagattatgagagctctcatttttgtcctaacgttaaactcaaggcccagacctatgagctccaggagagcaacgtacagctgaagcttactatcgtaaacaccgtaggttttggcgaccagatcaataaggaagaatcttatcagccaattgttgattatattgacgctcagtttgaggcctatctgcaagaggaattaaaaatcaagcggtccttatttacctatcatgactcaagaattcacgtgtgcctgtacttcattagtccaactggacactcattgaaaacgcttgacctgctcacaatgaagaacctagacagcaaagtcaacattatccccgttatcgctaaggctgatacggtttctaagacagagctgcaaaaatttaagattaagctaatgagtgaactggtctcaaacggagtgcagatctaccaattccctactgatgacgatactatagcgaaagttaatgcggcaatgaacgggcaattaccgttcgcggtagtcgggtccatggatgaggtgaaggtgggtaataagatggtgaaagccaggcagtacccttggggggtggtgcaggttgaaaacgaaaaccactgtgacttcgtgaagttacgagaaatgttaatttgcacaaatatggaagaccttagagagcagacccatactagacactacgagctttatcggagatgcaagctggaggagatgggattcacagacgtaggtcctgaaaacaaaccagttagtgtacaggaaacctacgaggcaaagcgccacgagttccatggtgagcgtcagaggaaagaagaagagatgaagcagatgttcgttcagagggtcaaagaaaaagaggctatcctaaaggaggcagaacgggagttgcaggccaaattcgaacatttgaaaagactgcaccaggaggagagaatgaagctcgaggagaaaaggaggctactcgaggaggagattattgccttcagcaaaaagaaggctacctccgagatttttcatagccagtcctttctggccactggcagcaatcttaggaaggacaaggatcgtaagaacagtaatttcctttag

SEQ ID NO: 133746 - DNA, 1353 bp, synthetic construct
  misc_feature 1..1353: note = Description of Artificial Sequence: Synthetic coding sequence
  source 1..1353: mol_type = other DNA
atggcttctagtgaggtcgctcggcatctgctgttccagtcgcacatggcaaccaagacaacttgcatgtccagccaggggtcagatgacgaacaaattaagagagagaatatacgctctctcactatgagcgggcatgtcgggttcgagtccctgccagatcagctggtgaatcgaagcatccagcaggggttctgtttcaacatcctgtgcgtgggcgagactggtatcggaaaaagtactctcatagacactcttttcaacacaaacttcgaggactatgagagctcccatttttgcccaaacgtcaagctgaaagcccagacctacgaactgcaggaaagcaatgtacagctgaagcttacaatcgtgaataccgtgggatttggcgatcagattaacaaggaagagagctatcagcccatcgtagactatatcgatgctcagtttgaagcctatttgcaagaagagctcaagattaagcggagccttttcacataccatgattcccgtatccacgtgtgcctctatttcataagccctactggccatagtctgaaaactctggatctcctgactatgaaaaacttggactcaaaagtgaatatcatccccgtaattgcaaaggcagacactgtttccaaaactgagctccagaaatttaagattaagctcatgagcgaactggtgtcaaacggcgtgcaaatttaccagttccctaccgatgatgatacgatcgccaaggtcaatgcagctatgaatggacagctacctttcgccgtggtaggttccatggacgaggttaaggtcggaaacaaaatggttaaagcccgacagtatccctggggcgtggtgcaggtcgagaacgagaaccattgcgatttcgtgaaattgagggagatgctcatttgtacgaacatggaggatctgcgggaacagacccacacgaggcattacgaactataccgaagatgcaaacttgaggagatgggattcacagacgtagggcctgagaacaagccggtttcggtgcaggaaacctatgaagctaaacgccacgaattccacggtgagaggcaaagaaaagaggaggagatgaagcagatgttcgtgcagagagtaaaagagaaagaggccatattgaaggaagccgaaagggaactccaggccaaattcgagcacttgaagcgtcttcatcaggaggaacgaatgaaattggaggagaaacgcagattactcgaggaagagataattgccttttctaagaagaaggccaccagcgagatcttccactcacaatcatttctcgccaccggcagtaacctgcgaaaggacaaggaccggaagaagtag

SEQ ID NO: 133747 - DNA, 1422 bp, synthetic construct
  misc_feature 1..1422: note = Description of Artificial Sequence: Synthetic coding sequence
  source 1..1422: mol_type = other DNA
atggcgactaagactacttgcatgtcttcacaaggatccgacgacgagcagattaagagggagaatattcgctccctcaccatgagtggacacgtcggatttgagagcctccccgatcaactagttaatcgttcaattcaacaggggttctgctttaacatattgtgcgtcggcgagaccggaatcggaaaatcaactttaatagatactctcttcaacacaaatttcgaggattacgaaagctctcacttttgccccaacgtgaaactgaaggctcagacatacgagcttcaggagtccaacgtgcagttaaaactgactatagtcaatacagttggtttcggagaccagatcaataaagaagagtcctatcagcccatcgtcgattacattgacgctcagttcgaggcctacttacaggaagagttgaaaatcaagcggtcactgtttacatatcacgattctaggatccacgtttgcctatattttatttctcccacgggacactccctcaaaactctggatctcttaaccatgaaaaatctggacagcaaagtgaatatcatcccggtgatcgctaaggctgacactgtttcaaagactgaactgcaaaaattcaagatcaagctgatgtccgaattggtgtccaacggggtgcagatttatcaatttcccaccgacgacgatacaattgccaaagtcaatgctgccatgaacggacagctgccattcgccgtagtcgggtcaatggatgaagtcaaagtaggtaataagatggttaaggctcgtcagtatccttggggcgtcgtgcaggtggagaacgagaaccattgtgatttcgtaaagcttagagagatgctgatttgtaccaacatggaggatttgcgcgagcagacacacactaggcactatgagctgtatcgccgctgcaaactcgaggagatgggtttcacagatgtggggccggaaaacaagcccgtttcagtacaggagacttatgaggctaaacgccatgagttccacggggaacgccagcggaaagaggaagagatgaagcagatgttcgtccagagagtgaaagagaaggaggcaatattaaaggaggccgagcgcgagttgcaagccaaatttgagcatcttaaacggctgcaccaggaggaaaggatgaaactagaggaaaagcgccgcctgttagaggaggaaattatagcatttagcaagaagaaggcaacatcagagatcttccactctcaaagtttccttgctaccgggagcaacttacgtaaagataaagacaggaagaaggaacctggctgccgattcgagctgctttgtatcgatgtgagggcctgtgagactaacgggggtaggaaggatgccgagaaaggaagggaaggccactctgcccgcggccagccgtag

SEQ ID NO: 133748 - DNA, 852 bp, synthetic construct
  misc_feature 1..852: note = Description of Artificial Sequence: Synthetic coding sequence
  source 1..852: mol_type = other DNA
atggccagcagcgaggttgcgaggcacttactctttcagagtcacatggctacaaagactacatgcatgagttcccagggctccgatgatgaacagatcgtcaatattatccccgttattgccaaagccgataccgtgtccaaaactgaactccagaaattcaaaatcaaactgatgtcagagctcgtctctaatggtgtgcaaatctatcagtttcccacagacgatgacaccattgcaaaggtgaatgcggctatgaatggacagctccctttcgccgtcgtggggagtatggacgaggtgaaggtcggaaataagatggtgaaagcaaggcagtatccttggggggtggtccaagtagagaatgagaatcattgtgacttcgtcaagctgagagagatgttgatatgtaccaatatggaagaccttcgcgaacagacccatacaagacattatgaactgtatagacgttgtaagctagaagaaatgggatttacagacgtcgggcccgagaacaaaccagttagcgtccaggaaacctatgaggccaaacgccacgaattccatggcgagagacagaggaaagaggaagagatgaagcagatgttcgtgcaacgggtgaaagaaaaagaagcaatcctgaaggaagctgagcgcgagttgcaggccaaatttgaacatttgaagaggctgcaccaggaggaaagaatgaagctcgaagaaaagcgccgcctcttagaagaagagataatcgctttcagcaagaaaaaggcaacgtctgaaatttttcactcccagtctttcctcgcaaccgggtctaatctgaggaaggacaaagatagaaaaaaatag

SEQ ID NO: 133749 - DNA, 1290 bp, synthetic construct
  misc_feature 1..1290: note = Description of Artificial Sequence: Synthetic coding sequence
  source 1..1290: mol_type = other DNA
atggcagtcgccgtcggaagaccctcgaacgaagagttgcggaatctctcactttctggccacgtaggctttgactccttacccgaccagttggtgaacaaatctacgtctcaaggtttctgtttcaatatcctctgcgtgggcgaaacaggcatcgggaagtctactctgatggacaccctgttcaacacaaaattcgagagcgacccggctacccataacgaacctggcgtcaggctaaaagcaagaagctacgagctgcaagagtctaatgtgagactgaagttgacaatagtcgataccgtaggttttggggatcagatcaataaagacgatagctataaacctatcgtcgagtatatcgacgcacagttcgaggcatacttgcaggaagaactgaagatcaaaaggtccttgtttaactatcatgataccagaatccacgcttgcttatacttcatagcccctactgggcattcattgaagtcactggatctagtcactatgaaaaagctcgacagtaaagtgaacatcatacctataatcgctaaggctgatactatcgcgaagaatgaattacacaagttcaagtccaaaattatgagtgaacttgtgtccaatggagtgcagatttatcaatttccaaccgacgaggaaacagtcgctgagattaacgcgacaatgtcggtacatttgccttttgcagtcgtaggatcaacggaagaagttaagatcgggaacaagatggcaaaggctaggcagtacccatggggggttgtgcaggttgagaacgaaaaccactgtgactttgtcaagttgagagagatgcttatccgagtcaacatggaagatctccgggaacaaactcacaccaggcattatgaactctatcgcaggtgcaagctggaggagatgggcttcaaggacactgatcccgacagtaaacctttttcgctgcaggagacttatgaggctaagagaaacgagtttctcggggagctgcagaaaaaggaagaggagatgagacaaatgtttgtcatgagagtgaaggaaaaagaggccgaactgaaagaggctgagaaggagttgcatgagaaattcgatctgctgaaaaggactcatcaagaggagaagaagaaagttgaagataaaaagaaggagcttgaagaggaagttaataactttcaaaaaaagaaagccgcagcgcagctgcttcagagccaggcacagcaatctggggcacagcagactaagaaagataaagacaagaagaacgccagcttcacttag

SEQ ID NO: 133750 - DNA, 1278 bp, synthetic construct
  misc_feature 1..1278: note = Description of Artificial Sequence: Synthetic coding sequence
  source 1..1278: mol_type = other DNA
atggcggtggcagtggggaggccctcaaatgaggagctgcgcaatttaagcctttccgggcacgtcggctttgattcactgcctgaccagctcgtaaacaagagtacttcccaagggttttgtttcaacattctgtgcgtaggagaaaccggaatagggaagtcaactctgatggataccttgttcaataccaagttcgaatccgatcctgccactcataatgaaccaggcgttcgactgaaagcaagatcctacgagcttcaggagagtaatgtgaggctgaagctcactattgtggataccgtaggattcggtgaccagattaacaaggatgacagctacaaaccaatcgtcgagtatattgacgcccagtttgaggcttatctgcaggaagagctcaagatcaagagaagcctttttaactatcacgatacacgtatacatgcctgtctgtactttattgcccccactgggcactctctgaaatctctggacctagtcactatgaagaagctggactccaaggttaatattatacccatcattgcgaaagcagacacaattgccaaaaatgagttgcataaattcaaatcaaaaatcatgtctgagctcgtttcaaacggtgtccagatctatcaattcccgaccgacgaggagacagtggcagagataaatgcgacgatgagcgtgcatctcccattcgctgtcgtggggtccaccgaagaagtgaagataggcaataagatggcgaaagcacgacagtacccttggggagtagtacaggtggagaacgaaaatcactgtgactttgtgaagctgcgggagatgttgattagggtgaatatggaagacctcagagagcagacacacaccagacattatgaactttaccggagatgtaagctggaggaaatgggttttaaggacacagacccagactctaaaccattttctcttcaagagacatatgaagcgaaacgcaacgagtttttgggagagctgcagaagaaagaggaggaaatgcgacagatgtttgtgatgcgagtcaaggaaaaagaggcagaacttaaggaggcggagaaagagctgcatgaaaagttcgacttgctaaagcgcactcaccaagaagagaaaaagaaggtagaggacaagaagaaggagctcgaagaagaagtcaacaatttccaaaaaaaaaaggctgcagcacagctgcttcagtcccaggcccagcagagcggagcccagcagacaaagaaagacaaagataagaagaaatag

SEQ ID NO: 133751 - DNA, 1320 bp, synthetic construct
  misc_feature 1..1320: note = Description of Artificial Sequence: Synthetic coding sequence
  source 1..1320: mol_type = other DNA
atggaagaaaggaaaccagcgcacgttctgagatcttttaaatacgctgctttcatgaatgaagagcttcggaatctgagcttgtccggccacgttgggtttgattccctgccggaccaactggtgaacaaatcaacttcccaaggcttttgtttcaatatcctatgtgtcggagagactgggatcggcaagtccacccttatggataccttatttaatacaaagttcgagtcagacccagcaactcataatgagcccggcgttcgcttgaaggctagaagttatgaactgcaggagtccaacgtcaggttgaagcttaccattgtggataccgtcggtttcggcgaccagatcaataaggacgattcatataagccaattgtggagtacattgatgcccaatttgaagcatacttgcaagaggaactgaaaattaagcgaagtctcttcaactaccacgataccagaatccatgcgtgtttatactttatagctccaactggtcatagcttaaagtccttggacctggttaccatgaaaaaactggacagtaaagtgaacatcattcccattatagctaaagccgacactatcgccaagaatgagctccacaaattcaaaagtaagatcatgtcagagcttgttagcaacggagtgcagatttatcagtttccaacagacgaggagaccgtcgccgagatcaacgctaccatgtcagtacacctgcccttcgcagtcgtcggttctaccgaagaagttaagataggcaacaagatggcaaaggcaagacagtacccatggggggttgtccaggttgagaacgagaaccactgtgacttcgtgaagcttagggaaatgctgatccgggtgaatatggaagacctgcgagaacagacacatacccgccactacgagctgtatcgtcgctgcaaattagaagagatgggatttaaagatactgatcctgacagcaagccattctcgttgcaagagacttacgaagcaaagcgtaacgagtttctgggcgaattacagaagaaagaagaagaaatgcgacagatgttcgtgatgagggtgaaggagaaagaagccgagcttaaggaagccgagaaggaattgcatgaaaagttcgacctgctcaagcgcactcaccaggaggagaagaaaaaggttgaggacaagaaaaaggaactggaggaagaagtgaataattttcagaagaagaaagcagccgcgcagctgctgcagtcccaggcacagcagagtggcgcacagcagactaagaaggacaaggataagaaaaatgcctccttcacatag

SEQ ID NO: 133752 - DNA, 1077 bp, synthetic construct
  misc_feature 1..1077: note = Description of Artificial Sequence: Synthetic coding sequence
  source 1..1077: mol_type = other DNA
atggaccctctacggcggagtccaagcccctgtctttccagccagcccagcagcccatccacacctccttgtgagatgctggggccagtgggtatcgaagcggtgttggatcaactgaagattaaggccatgaagatgggctttgaatttaatatcatggtcgtggggcaatcaggactgggaaaaagtacgatggtaaatacactttttaagagtaaggtgtggaagtcaaaccctccagggctgggcgtgccaacccctcagacactgcagctccactctctgactcatgtgattgaagaaaaaggagtgaagctgaaactaaccgtgacagacactccggggtttggcgatcagattaataatgataactgttgggatcctattttaggctacattaacgaacagtacgaacagtacctgcaggaggaaatacttatcacacggcagcggcatattcccgacactcgcgtacactgttgtgtttactttgtacctccgaccgggcattgtctccggcctcttgacatagagttcctacagcgactgtgccggaccgtgaatgtagtgcctgtcatagctcgagccgattctctaaccatggaagagagagaggctttccgtcgcaggattcagcagaacctgcggacgcactgcatcgacgtgtatcctcagatgtgcttcgacgaggatatcaatgacaagattctgaattctaagctccgagacaggatcccttttgcagtcgttggagccgatcaggagcacctcgttaatggtagatgcgtgctcgggcgaaagacgaaatggggcattatcgaggtggagaacatggcccactgtgagtttccacttctgcgggacttactgattcgttctcacttgcaggaccttaaggacatcacacataatattcactacgagaactaccgtgttatcagactgaacgagagccatctgttgcctcgggggccaggatgggtgaatctggcgcccgcaagtccagggcaattaacaacccccagaacttttaaagtctgccgcggagctcacgacgactctgatgacgagttttag

SEQ ID NO: 133753 - DNA, 939 bp, synthetic construct
  misc_feature 1..939: note = Description of Artificial Sequence: Synthetic coding sequence
  source 1..939: mol_type = other DNA
atggatccgcttcggcggtcaccaagtccctgcctgagctcacagcccagttcccctagtacacctccttgcgagatgctggggccggttggtatcgaggccgtgttggatcagctgaagattaaagctatgaagatgggttttgaatttaatattatggtggtggggcaatctggtttagggaagagtacaatggtaaacacactttttaaatcaaaagtctggaagtcgaacccccctggcctgggagtgcccactccccaaacgcttcagctccattccctaacccacgttatcgaggagaagggagttaaactgaaactgacagtcaccgatacaccagggtttggcgaccagattaacaacgataactgtctgaggccactggatattgaatttcttcagagactgtgtagaacagttaatgtggtgccggtaatcgctcgggctgatagcctcacaatggaagagcgggaggctttccgccgcagaatacaacagaacctcaggacacactgtattgacgtttatccccagatgtgtttcgacgaggacataaatgataaaattttgaactccaagctgcgagaccgaattcctttcgccgtggttggggcagaccaagaacacttggtcaatgggaggtgcgtactcggaaggaaaactaagtggggaattatcgaagtggagaatatggctcactgcgaatttcctctactccgggatcttcttatcagatcgcacttgcaggaccttaaagacatcacgcataatatacactacgaaaactacagggtaatcaggcttaacgaaagccacctgctgcctagggggccaggctgggtgaatctcgcccctgctagccccgggcagttgactaccccccggacttttaaggtatgtcgcggcgctcatgatgacagcgatgacgagttttag

SEQ ID NO: 133754 - DNA, 1299 bp, synthetic construct
  misc_feature 1..1299: note = Description of Artificial Sequence: Synthetic coding sequence
  source 1..1299: mol_type = other DNA
atggcagaaaggactatggcaatgcctacacagatcccggccgacggagacactcagaaagagaataatattagatgcctgaccaccatcggtcattttggtttcgagtgcttgccaaaccagctggtttctcgttcaatccggcaggggtttactttcaacattctgtgcgtgggagagacaggcatcggtaagtcaaccctgatcgacacactgttcaacaccaacttgaaggataataagtcgagtcacttctactctaacgtgggcctgcagatccaaacatacgaattgcaagaatctaatgtgcaactgaagctgacggtggtggagactgtcgggtatggagaccaaatcgataaagaggcctcgtaccagccaattgtggattacatcgatgctcagttcgaggcctacctgcaggaggagttgaaaattaagcgttctctgtttgagtaccacgattccagagtgcatgtctgcctgtatttcatttccccgactggacacagcttgaagtcattggatctcttaacaatgaaaaatctcgactctaaggtgaatataattcccctgattgcaaaggccgacactatatctaaaaacgacctgcagacttttaaaaacaaaatcatgtcagagcttatttcaaatgggattcagatctatcagctgcctacagatgaggaaacggccgcccaggctaactcatctgttagcggcctgcttccattcgccgtggtggggtcaaccgacgaagttaaggtgggtaaacgaatggttcggggaagacattatccttggggagtgttgcaggttgagaacgagaaccattgtgattttgtgaagttacgcgatatgctgctgtgtaccaacatggaaaatttgaaagaaaaaacccatacccagcactatgagtgctaccggtatcagaagctgcagaaaatgggttttactgacgtcggtccgaacaaccagccggttagtttccaggagatctttgaggccaaacgccaagaattctacgaccagtgtcagagagaagaagaagaattgaaacaaagatttatgcagagagtgaaagagaaggaggctaccttcaaggaggccgaaaaagagctgcaggataagtttgagcatctgaaaatgatacagcaggaggaaattcgtaagttggaggaggagaaaaagcagctcgaaggagaaataatcgacttctacaagatgaaggccgcctctgaggccctgcaaacacagctcagcaccgacactaagaaagacaaacacagaaagaagtag

SEQ ID NO: 133755 - DNA, 1086 bp, synthetic construct
  misc_feature 1..1086: note = Description of Artificial Sequence: Synthetic coding sequence
  source 1..1086: mol_type = other DNA
atgagtaagcaacagcccactcagtttatcaatcccgaaacacctggttacgttggcttcgccaacctgcctaaccaggtgcaccgaaaaagtgttaagaaagggttcgagttcacactcatggtcgttggtgaatcaggactgggcaagtccactctcattaatagtctattcctgaccgatctctatcccgaacgcgtaatacccggagccgctgaaaagatcgagaggacagtccagatagaagcatccaccgttgagattgaggaaagaggagtaaagcttagactgactgttgtggacacacccggctatggggacgccattaactgtcgagattgcttcaagaccatcatcagctacattgatgaacagttcgaacgatatctccatgacgagtcagggctgaataggcgacacattatcgataaccgagtgcactgttgcttttacttcataagcccatttggccacggcttaaagccgctggacgttgcttttatgaaggccatacacaataaggttaatatcgtacccgtgatcgcaaaggctgacaccctgacgttgaaagaacgcgaacggcttaaaaagaggatcctggacgaaatcgaagagcacaacatcaaaatctaccatctgcccgacgctgagtcagacgaggacgaggatttcaaggaacaaacgaggctgctcaaggcctccataccatttagcgtggtgggatcaaaccagctcatagaggccaaagggaaaaaagtgcgtggcaggctgtatccatggggtgtggtggaggtcgagaatccagagcataacgacttcttgaagctgagaaccatgctcatcacacatatgcaggatctgcaggaggtcacacaggatttgcactacgaaaactttcggtctgagaggctgaagagaggaggacgcaaggtagaaaacgaggacatgaacaaggatcagatcctgctggagaaggaggcagaactccggagaatgcaggagatgatcgcaaggatgcaggcacagatgcagatgcagatgcagggaggggacggagacgggggggcgctcggtcaccatgtctag

SEQ ID NO: 133756 - DNA, 1086 bp, synthetic construct
  misc_feature 1..1086: note = Description of Artificial Sequence: Synthetic coding sequence
  source 1..1086: mol_type = other DNA
atgtccaaacagcagcccacccagttcattaacccagagacccccggttacgtgggcttcgcaaacctccccaaccaggtgcacaggaaatccgtgaagaaaggatttgaatttaccctcatggtcgttggcgagtcagggcttggcaaaagcaccctgatcaactctctgttcttgacggacctgtacccagagcgtgtgatacctggtgcagcagaaaagatagaaagaaccgttcaaattgaagctagcactgtggaaattgaagaacgcggagtgaagctgaggcttaccgtggtggatacgcccggttatggcgacgccatcaattgccgggactgcttcaaaacaattatttcctatatagacgaacagtttgagaggtacttacacgatgagtcgggacttaataggagacacatcatcgacaatcgtgttcactgctgtttttactttatttctcccttcggccacgggcttaagcctctcgacgtggcctttatgaaagctatccataacaaagtcaacattgtgccggtgatcgccaaggctgacactctgactttgaaggagcgcgagaggctcaaaaagagaattttggatgagattgaagaacataatattaaaatttatcacctcccagacgctgaaagcgacgaagacgaggactttaaggagcagacccgtcttctgaaagcatccattccattctccgtggtaggatcaaaccagctgattgaggcaaagggcaagaaagtgagagggaggctttatccctggggtgtggtcgaggtggaaaaccccgagcataacgacttccttaaactaagaaccatgctgattacacacatgcaggatcttcaagaggttacgcaggatcttcattacgagaattttaggtcagagcgattgaagcgcgggggacggaaggttgaaaacgaggatatgaacaaggaccagatcctattggaaaaagaagcagaactgcgacgcatgcaggaaatgatagctagaatgcaggctcaaatgcagatgcagatgcagggcggcgatggagatggaggggcactgggacaccacgtatag

SEQ ID NO: 133757 - DNA, 1191 bp, synthetic construct
  misc_feature 1..1191: note = Description of Artificial Sequence: Synthetic coding sequence
  source 1..1191: mol_type = other DNA
atgccctggatctccgaggggagagcgacaaggccatgcttaagagtgccttctgcacgccgcggcgatgagggcctccaccaacgggatgaggccagccagaaaatgagtaagcagcagcccactcagttcatcaatcctgagacaccaggttatgtggggttcgctaatctgcccaaccaggtgcatagaaaaagcgtgaaaaaaggttttgaattcaccctcatggtggtaggtgagtcaggactcggtaagtctaccctgatcaacagtctgttccttactgatctttacccggagcgcgtcattcccggagcagccgagaagattgaaaggacggttcagatcgaggcctctaccgtggaaatcgaagagagaggggtcaagctgaggctgacagtagtcgataccccaggttatggcgacgctatcaattgtcgagattgcttcaaaaccatcataagttatatcgatgagcaattcgaaaggtaccttcacgacgagtccggattgaacaggcggcacatcatcgataatcgggtgcattgctgcttttacttcatatcccccttcggccacggtctcaagcccctggacgtcgcattcatgaaagcaatccacaacaaagtgaacattgttcctgtcatagccaaggccgacacgttgaccctgaaagagagggagcgtctcaagaagcgaatcttggacgagattgaggaacacaatattaaaatctatcacctgccagatgcggagtcagacgaagacgaggattttaaggagcagactaggttactgaaagccagcattccatttagtgtggtggggtctaaccagttgatcgaagcaaaagggaaaaaggtccgagggaggctgtacccatggggcgtcgttgaggtggaaaatcccgaacacaatgatttcctgaagctcagaactatgttgataacacacatgcaagacctgcaggaagtgactcaggatctccattatgaaaacttccgcagtgaaaggctcaaacggggtggccgaaaggtagagaacgaagatatgaacaaggaccagatacttctggagaaagaagccgagttgcgacgaatgcaggagatgattgctaggatgcaggcacagatgcagatgcaaatgcagggcggagatggagacgggggggccctgggccaccatgtctag

SEQ ID NO: 133758 - DNA, 1086 bp, synthetic construct
  misc_feature 1..1086: note = Description of Artificial Sequence: Synthetic coding sequence
  source 1..1086: mol_type = other DNA
atgagcaagcagcaacccactcagttcatcaaccccgaaactccgggctatgtggggttcgcaaacctgcccaatcaggtgcatcgaaagtccgttaaaaagggatttgaatttaccctcatggtagttggagaatccggccttggcaagtctactcttatcaactctcttttcctgactgatctataccccgagagggttatccctggcgctgcagagaaaattgaacggacggtgcagattgaagcttcgacggtggagatcgaggagcggggcgtgaagctccgtttgactgtcgttgacacccccgggtacggcgatgccattaactgccgtgactgtttcaagactatcatttcgtacattgatgaacagtttgagagatatctgcacgatgagtccgggctcaaccgaagacatattattgacaatagggtccattgctgtttctatttcatctctcctttcgggcacggtttgaaacccctcgacgttgctttcatgaaagctatccacaataaagtcaatattgtgccggtgatagcaaaggcagacaccctgaccctcaaagaaagggagagattgaagaagaggatcctcgatgagattgaggaacacaacataaagatctaccatctgccggacgcagagtcagatgaggatgaggacttcaaagaacagacccggctgctgaaggcctctattccattttcagtggtgggctcaaatcagctgatagaagcgaaggggaagaaggtgcggggcaggctttacccatggggggtagtcgaagtggaaaatcccgagcataatgattttttaaaactgaggacgatgcttataacacatatgcaggatctccaggaggtcacacaggatctgcattacgagaattttaggtcagagcgtcttaaaagaggaggaagaaaggtcgagaatgaggacatgaacaaagaccagatacttctggagaaggaggctgaattaagacgaatgcaggaaatgatcgcgcgcatgcaagcccaaatgcagatgcaaatgcagggaggagatggtgacggcggtgcactcggtcaccacgtctag

SEQ ID NO: 133759 - DNA, 1086 bp, synthetic construct
  misc_feature 1..1086: note = Description of Artificial Sequence: Synthetic coding sequence
  source 1..1086: mol_type = other DNA
atgagcaagcagcagcctacccagttcatcaaccctgaaaccccgggctacgtgggttttgcaaatctccccaatcaggtccaccgaaagtccgttaagaaaggcttcgagtttactctgatggttgttggagagtctggtttaggaaagtccaccttgatcaacagcttgttcttgacagacctgtatcccgagagagtgataccaggggccgctgagaagatagagcgtacagtacagatcgaagccagcactgtggagatcgaggagcgaggggtgaagctgaggcttaccgtggtggacacccctgggtacggcgacgcaattaattgtcgggattgcttcaaaacaatcatttcctacatcgacgagcagtttgaacgatacctgcacgacgagtccggactgaaccgcagacatatcatcgataatagagtccattgttgtttttacttcatcagtcccttcgggcatggccttaaaccccttgatgtagcctttatgaaggccatccataacaaagtgaacatagtgccagtgattgcgaaagctgacacccttaccctcaaggaacgagagaggctgaagaaaaggattctcgacgaaatcgaggagcataacattaagatttaccatttacccgacgccgagagcgacgaggacgaagactttaaggaacagactaggctgctgaaggcctctatccctttcagcgttgtaggtagtaatcaactaattgaagcgaagggcaagaaggtgaggggacggctctacccctggggcgtcgtagaagtggagaacccagagcataacgattttctcaaattaagaaccatgctgattacccatatgcaggatctccaagaggtgactcaagatttgcattacgagaactttaggtctgaacgcctgaagaggggcggccgtaaagttgagaatgaagacatgaacaaagaccaaattcttctggaaaaagaagccgaacttagacgcatgcaggagatgatcgccagaatgcaggctcagatgcaaatgcagatgcaagggggggacggtgacgggggagctctggggcatcacgtctag

SEQ ID NO: 133760 - DNA, 159 bp, synthetic construct
  misc_feature 1..159: note = Description of Artificial Sequence: Synthetic coding sequence
  source 1..159: mol_type = other DNA
atgagcaagcaacaaccgacacagttcatcaatccagagaccccaggctacgtgggctttgcaaatctgcccaaccaggtgcaccggaagtccgttaagaaggggttcgagtttaccttgatggtggtcggagaatctggcctgggcaaaagcacatag

SEQ ID NO: 133761 - DNA, 153 bp, synthetic construct
  misc_feature 1..153: note = Description of Artificial Sequence: Synthetic coding sequence
  source 1..153: mol_type = other DNA
atgtccaagcagcagcccacacagtttattaatcccgagacacctggctatgtcgggtttgctaatctgcctaaccaggttcaccgcaagtccgttaagaagggttttgagtttaccctgatggtcgttggagaatcaggtctgggcaaatag

SEQ ID NO: 133762 - DNA, 72 bp, synthetic construct
  misc_feature 1..72: note = Description of Artificial Sequence: Synthetic coding sequence
  source 1..72: mol_type = other DNA
atgtctaagcaacagccaacccagtttatcaatccagagacgcccgggtacgtgggcttcgccaatctgtag

SEQ ID NO: 133763 - DNA, 447 bp, synthetic construct
  misc_feature 1..447: note = Description of Artificial Sequence: Synthetic coding sequence
  source 1..447: mol_type = other DNA
atgagcaagcaacagcccactcagttcataaaccctgagacaccggggtacgtggggtttgcgaatctgcccaaccaggtccatcgtaaatcagtcaagaagggattcgaattcaccctgatggtggtgggggagagcggcctgggcaagtcaacccttatcaattcccttttcctgaccgacctgtacccggagcgggttatccctggcgctgctgaaaagatcgaaagaaccgttcagatagaagcgagtaccgtggaaatcgaggagagaggcgttaaattgcggttgactgtggtcgatacgcccggatatggcgacgccatcaactgtagggattgttttaaaactataatttcctatattgatgagcagtttgagaggtacttgcacgacgagtcgggcttaaatagacgacacatcatcgacaatagggttcactgttag

SEQ ID NO: 133764 - DNA, 396 bp, synthetic construct
  misc_feature 1..396: note = Description of Artificial Sequence: Synthetic coding sequence
  source 1..396: mol_type = other DNA
atgagcaaacaacagcccactcagttcattaacccagagactccaggctacgtggggtttgcaaacctgcccaaccaagtccaccggaaatctgtgaaaaagggcttcgagttcacactcatggtcgtgggcgaaagcggccttggtaagtccactctgataaattcgctcttcctcaccgacctctaccctgagagggtcatacctggggctgctgagaaaatcgagagaactgtgcagatcgaggcctcaacagtggagatcgaggagcgaggggtgaaactaaggttgacagtggtcgacacgcctgggtacggggatgccatcaactgcagagactgtttcaagaccattatctcttatatcgacgagcagtttgaacggtatctgcactag

SEQ ID NO: 133765 - DNA, 219 bp, synthetic construct
  misc_feature 1..219: note = Description of Artificial Sequence: Synthetic coding sequence
  source 1..219: mol_type = other DNA
atgtctaagcagcaaccaacccagttcattaatcctgagacccctggatatgtcggttttgccaacctgccaaatcaggtacaccggaagtcagtcaagaagggatttgaattcaccctgatggtcgtaggagaaagtgggctcgggaaatcaaccctaataaactctctcttcctcacggacctctatccggaaagggtgattccaggagctgcgtag

SEQ ID NO: 133766 - DNA, 219 bp, synthetic construct
  misc_feature 1..219: note = Description of Artificial Sequence: Synthetic coding sequence
  source 1..219: mol_type = other DNA
atgtctaagcagcagcccacacaattcatcaatcctgaaacccccggctacgtcggttttgctaacctacctaaccaagtgcaccgcaaaagcgtcaaaaagggctttgaattcaccctcatggtggtcggagagtcagggttagggaaaagcacgctaatcaactccctcttcctgaccgacctgtaccccgaaagggtgatcccaggagctgcgtag

SEQ ID NO: 133767 - DNA, 522 bp, synthetic construct
  misc_feature 1..522: note = Description of Artificial Sequence: Synthetic coding sequence
  source 1..522: mol_type = other DNA
atgagcaagcagcagcccactcagttcataaatcctgagactcctgggtatgtgggctttgccaatcttccgaatcaggtgcaccggaaatccgtcaagaaaggctttgagttcaccctgatggtagtgggcgagtctggcctcggcaaaagcacactcattaatagtctcttcttgacggacctgtatcccgaaagggtgattccaggtgccgctgaaaaaatcgagcggactgtccaaatagaagccagtaccgtagagattgaagaaaggggcgttaagctcaggctcacagtcgtcgacacaccaggctacggggacgcaattaactgccgcgactgttttaaaacaatcatttcttacatcgatgagcagttcgaaaggtacctgcacgacgaatccggtctgaaccgccgccacattatcgacaacagggtacattgctgtttttacttcattagcccctttggtcatgggctcaaaccccttgatgtggccttcatgaaagcaattcacaactag

SEQ ID NO: 133768 - DNA, 90 bp, synthetic construct
  misc_feature 1..90: note = Description of Artificial Sequence: Synthetic coding sequence
  source 1..90: mol_type = other DNA
tgagagatgattgctaggatgcaagctcagatgcagatgcaaatgcaggggggtgatggcgacgggggtgctcttggccaccacgtttag

SEQ ID NO: 133769 - DNA, 861 bp, synthetic construct
  misc_feature 1..861: note = Description of Artificial Sequence: Synthetic coding sequence
  source 1..861: mol_type = other DNA
atgagcaaaggtcaaagtggtctaggaaaatcgactctggtaaatacactgtttaagagccaagtgtcccggaaggcctcttcttggaatagggaagaaaaaatcccaaaaacggtggagattaaggcaatcggacacgttatcgaagagggtggagtgaagatgaagcttacagttatcgacacaccgggatttggcgatcagatcaacaacgagaattgctgggagcccattgaaaagtacatcaacgaacaatacgaaaagttcctgaaggaggaggtgaatatcgctagaaagaagagaattccagacactcgagtccattgctgcctgtatttcattagtcctacgggccacagcctacgccccttagacttggaatttatgaagcatctgtccaaggtggtgaatattattccggttattgcaaaggcagacactatgacgctggaagagaagtccgagttcaaacagagggttcggaaggaactcgaggtaaacggcattgagttctacccccagaaagagtttgatgaggacctcgaagacaagaccgagaatgacaagattagacaagaatctatgccttttgcagtcgttggctctgataaagagtatcaggtaaacgggaaaagggttttgggacggaaaactccatggggaataatagaagtggaaaacctgaaccactgtgagttcgcgcttctccgggactttgtgattcggacccacctacaagacctgaaggaagtgacccacaacatacattacgagacgtacagggccaagcgtctgaacgataatggaggtctgccccctgtgtcagttgataccgaagagagtcacgactcgaacccttag

SEQ ID NO: 133770 - DNA, 252 bp, synthetic construct
  misc_feature 1..252: note = Description of Artificial Sequence: Synthetic coding sequence
  source 1..252: mol_type = other DNA
atgagcaagggactgcctgaaacgagaacggacgcggcaatgtctgagctggttccggagccacggcctaagccggcagtccccatgaaacctatgtccatcaacagtaaccttcttgggtacataggcatagatacaattatcgaacaaatgcgcaagaaaacgatgaaaacagggttcgacttcaatataatggtggtagcgggaagtccactcagaagtacctccatgtcgtcaactagaagctcatag

SEQ ID NO: 133771 - DNA, 1053 bp, synthetic construct
  misc_feature 1..1053: note = Description of Artificial Sequence: Synthetic coding sequence
  source 1..1053: mol_type = other DNA
atgtcaaagggcctgcccgagaccaggactgatgctgccatgtcagagctggtcccagagccaaggccaaagcctgctgtgcccatgaagcctatgtctatcaacagtaatcttctgggctacatcggcattgacacaatcatcgaacagatgcgaaaaaaaacaatgaaaacgggttttgatttcaatattatggtggttggccagtccgggttgggtaagagcaccctcgtgaacaccctgttcaaatcgcaagtatcccggaaagcatcatcttggaaccgagaagaaaaaattcccaagactgtagagattaaggccatcgggcacgtgatagaggagggcggcgtgaagatgaagttgactgtcattgacacaccaggttttggcgaccagattaacaatgagaattgttgggagcccatagaaaagtacatcaatgaacagtacgaaaagttcttgaaagaagaagttaacatagcacgcaagaaacgcattcctgatactagggtccactgttgtctttactttataagcccgacagggcactcattgcggcctttggacctggaatttatgaagcacttatcaaaggtcgttaacatcattcctgtgattgctaaggccgataccatgaccctggaggaaaagtcagaatttaaacagagggtacgcaaggaactggaagtaaacggcatcgagttttaccctcagaaggagttcgatgaggatctagaggacaaaaccgagaacgataagatccggcaggaaagtatgcccttcgctgtggtgggaagtgacaaagagtaccaggtcaatggaaagcgcgtcttaggaaggaaaacaccctggggcataatcgaagtggagaatctcaaccattgtgagtttgccctgctgcgcgattttgtcatccgcacgcacctccaggacctgaaggaagtaactcataatatccattatgagacgtatcgagctaaaaggctgaatgataacggaggtctcccccccgtttctgttgatacagaagaatcgcacgacagcaatccatag

SEQ ID NO: 133772 - DNA, 1077 bp, synthetic construct
  misc_feature 1..1077: note = Description of Artificial Sequence: Synthetic coding sequence
  source 1..1077: mol_type = other DNA
atgtccaagggtctccctgagacccgcactgatgccgccatgtctgagctcgttccagagcctaggccaaagcctgccgttcccatgaagcctatgtctattaatagcaatcttctgggctacattggaatcgatactattattgagcaaatgcgcaagaaaactatgaaaaccggatttgacttcaacatcatggtggtcggtcagagcggcctgggcaaaagcacactggtaaacaccttgtttaagagtcaggttagtaggaaagcatcctcatggaatcgagaagagaagatccctaaaactgtcgaaattaaggcgatcggtcacgtcatcgaagaggggggggtgaaaatgaagctgacggttatcgacacccccgggttcggagatcagatcaataacgagaactgctgggaacccattgaaaagtacattaacgaacaatacgaaaaatttctgaaggaagaagttaatatcgctagaaagaagagaatccctgatactcgggtccattgttgcctgtatttcatttcccccacagggcactccctgcgaccactagacttggagttcatgaagcacctgagcaaagtagtcaacatcatcccagtgatagcgaaagctgacaccatgaccctggaggaaaaatcggaattcaagcagcgggtgagaaaggagcttgaagtcaacggtatcgaattttatcctcagaaggaattcgatgaagatctagaagacaaaaccgagaatgataaaatacggcaggaatcaatgccatttgccgtcgttgggtctgataaggagtaccaagttaacggtaagcgggtcctcggcagaaaaactccctggggcatcatcgaagtggaaaacctaaaccactgcgaattcgcgctgctgcgagatttcgtcatcaggactcacctccaagatttgaaggaggtcacacacaacatccattacgaaacctaccgcgcaaaaaggctgaatgataacggtggcctgcccccaggcgaaggattgcttggcaccgtgctcccacccgtgcctgccaccccttgtcctacagccgaatag

SEQ ID NO: 133773 - DNA, 885 bp, synthetic construct
  misc_feature 1..885: note = Description of Artificial Sequence: Synthetic coding sequence
  source 1..885: mol_type = other DNA
atgtcaaagggacagtcagggctcggtaaatcaactctcgtgaatactctgtttaagtcacaagtaagtagaaaagcgagtagttggaatcgcgaggaaaaaattccgaagactgtggagattaaggctatcgggcatgtcatagaggagggtggagtgaaaatgaagctgaccgttatcgatactcccgggtttggcgaccagattaacaatgagaactgttgggaacctatcgaaaaatacataaacgaacagtatgagaagtttcttaaggaggaggtgaacatcgccaggaagaagcggattccggacacaagagtgcactgttgcctgtactttatttctccaacaggccatagcctgaggccgctggatctggaatttatgaagcacttgagtaaggttgtgaatatcatcccagtaatcgccaaagccgacacaatgactttggaagaaaaatcagaattcaaacaacgcgtgaggaaggaactcgaggtgaacggaatcgaattttacccccagaaagagtttgatgaagatttggaagataagacagagaacgataagatccggcaagagagcatgcccttcgccgttgtggggtctgataaggagtaccaggtaaacggcaagcgcgttctggggaggaaaacgccctggggaatcattgaggtggaaaacctgaatcactgcgagttcgccctcttgcgcgattttgtgatccgaacccatctgcaggacttgaaagaggtcacccacaatatccactacgaaacatacagagccaagaggctgaatgacaacgggggcttgcctccaggggaggggctgttgggcaccgtgcttccaccagtcccggccaccccttgccctactgcagagtag

SEQ ID NO: 133774 - DNA, 537 bp, synthetic construct
  misc_feature 1..537: note = Description of Artificial Sequence: Synthetic coding sequence
  source 1..537: mol_type = other DNA
atgtccgaattggtgccagagcccaggcctaaacccgctgtccctatgaaacccatgtccatcaatagcaatcttctcgggtacatcggcatcgatactattattgaacagatgcggaagaaaaccatgaaaacaggcttcgattttaacatcatggtcgtggggcagtctggtctgggcaaatccacccttgttaacactctcttcaagagtcaggtgagtcgtaaggcgagcagctggaatcgagaggagaaaattcccaagaccgtcgagatcaaagctatcggacacgtgatcgaggaagggggggtgaaaatgaaactgaccgtgatcgacactccaggtttcggagatcaaatcaacaacgaaaattgctgggagccaatcgagaaatacataaacgaacagtatgagaaatttcttaaagaggaggtgaacattgctagaaagaagagaattcctgacacaagagtgcactgttgcctgtacttcatttcgccaaccggacacagcttgagaccactggacctcgaatag

SEQ ID NO: 133775 - DNA, 1137 bp, synthetic construct
  misc_feature 1..1137: note = Description of Artificial Sequence: Synthetic coding sequence
  source 1..1137: mol_type = other DNA
atggatagtttagccgcaccccaagaccgtcttgtggagcagctgcttagcccaaggacccaggcacagagacgcctgaaggacatcgataagcaatatgttggctttgcgaccctgcccaaccaggtgcatcggaagtctgtgaaaaagggcttcgactttacactcatggtggctggtgagtctggtttgggaaaatcaactctagtccactctctattcttaacagatctttacaaagacagaaagttgcttagtgccgaggaacgaatcagtcagacagtcgagattttgaaacacaccgtggatattgaggagaaaggagtgaaactgaaactcactatcgtggacacccccggttttggagacgccgttaataacaccgaatgttggaaaccaatcactgactacgtagaccaacaatttgaacagtactttcgcgacgagtctgggctaaatcgtaaaaacatccaagataaccgcgtacactgttgcttatactttatttcacccttcggccacggcctgagaccggtggatgtaggattcatgaaggccctccacgagaaggtcaacatcgtgccccttatcgccaaagccgactgtctggtcccgtcagaaattcgcaagctgaaagaaagaatccgtgaagagattgacaaattcgggattcacgtgtatcaatttccagagtgtgactcagacgaggacgaagacttcaaacagcaagaccgcgagctgaaagaaagtgcgcccttcgccgtcattgggagtaacaccgtggtagaggcaaaagggcagcgggtcaggggccgcctctatccatggggcatcgtcgaggtcgagaatcaggcgcattgcgatttcgtaaagctgcgcaacatgctcatccgcacacatatgcatgatctgaaagatgtgacttgcgatgtgcactacgagaactaccgggcccactgcattcaacagatgaccagcaaattgacgcaggactcccgaatggagtcacccataccaatcctgccactgcccacccctgacgcggagacagagaaactgattcggatgaaagacgaagaattacggcgcatgcaagagatgctgcagcgaatgaagcaacagatgcaggaccaatag

SEQ ID NO: 133776 - DNA, 969 bp, synthetic construct
  misc_feature 1..969: note = Description of Artificial Sequence: Synthetic coding sequence
  source 1..969: mol_type = other DNA
atggtagccggcgagtctggactagggaaatccacactcgtgcatagcctgttcttgacagatctgtacaaggaccgcaaattgctgtctgctgaagagcggatatcacaaaccgtggagatcctgaaacatacggttgacattgaagagaaaggggtgaaactgaaactaaccattgtggatacccccggctttggagacgccgtgaacaacaccgaatgttggaagccaattactgattacgtggaccagcagtttgagcagtactttagggatgagagcggtctgaatcgcaaaaacattcaggacaatagggtccactgctgcttgtactttatttcaccatttggtcacggcttgaggcccgtcgatgtcggattcatgaaggctctccacgagaaagtgaatattgtacctcttatcgccaaggccgactgcctagttcccagtgagattcgcaaactcaaagagcgaatccgggaagagattgataaatttggcatacatgtataccagtttcctgagtgtgattctgatgaggatgaggattttaaacagcaagaccgggagctcaaggagtcagctcccttcgcagttattggctccaatacagtcgtggaggctaagggccagagggttagagggagactttatccatggggaattgtggaggtggagaatcaggcacactgcgattttgtgaagctcagaaatatgctgattaggactcatatgcacgatctaaaggatgttacctgtgacgtgcactatgagaattatagagcacattgcatccagcagatgacttcaaagttgacgcaggactcgagaatggaaagtcccatcccaattctcccgttgcctacaccagacgccgagacagagaaattaattaggatgaaggatgaagagctccgtcgcatgcaggaaatgctgcagaggatgaagcagcagatgcaggaccagtag

SEQ ID NO: 133777 - DNA, 1041 bp, synthetic construct
  misc_feature 1..1041: note = Description of Artificial Sequence: Synthetic coding sequence
  source 1..1041: mol_type = other DNA
atggactctcttgccgctcctcaggataggctcgtggaacagttgttatcaccaagaacacaggcccagcggcggctgaaggatatcgacaagcaatacgtcggcttcgctacacttcccaaccaggtccatcggaagtccgttaaaaaaggatttgattttacacttatggtggctggcgaatctgggctgggcaagtcgaccctcgtgcatagcctgttcctgactgacctttataaggaccggaagctgctgtctgccgaagagaggatatctcagacagttgagatcctgaagcacactgtcgatattgaagaaaaaggggtcaagctgaaattaactattgtggatactccgggctttggcgatgcagtgaataacacagaatgttggaaaccaatcacagactacgtcgaccaacagttcgaacagtatttccgagacgaaagtgggctgaaccgcaagaatattcaggacaatcgggttcattgctgcctgtacttcatttccccttttggccacgggttgcggccagtggacgtggggttcatgaaagccctgcacgagaaagtgaacatcgtccccctcatcgcgaaggccgactgtttggtcccgagcgaaattaggaagctgaaggaaaggatacgggaagaaatagacaaatttggaatccacgtgtaccagttccccgaatgtgatagtgatgaagatgaagactttaaacagcaggatcgcgagctgaaggaatcagctcctttcgcagtcattgggagtaacactgtggtcgaggctaagggccagcgcgtgagaggcaggttatatccctgggggatcgtggaaggagctcttcggctgcgcgaggctgcccagcacgctcacccacacgcgtacgctcggccccagggtcgggacgtgaggagggctctgcgggaactcccccgcgcactacacccagccgatgatcagcagactgacccgggacagccccacggcgagccccaccctgaccctgccgctgcccaccctgggcggcgggactag

SEQ ID NO: 133778 - DNA, 450 bp, synthetic construct
  misc_feature 1..450: note = Description of Artificial Sequence: Synthetic coding sequence
  source 1..450: mol_type = other DNA
ctgcccaaccaggtacaccgcaagtcagtgaagaaaggttttgactttaccctcatggtcgctggcgaaagcggattgggaaaaagcacactcgtgcactctctgtttctgacagatctgtacaaggacaggaagcttttgagcgcggaagaaaggattagccaaactgttgaaatcttaaaacacactgtggacatcgaagagaagggcgtgaagctaaagctgactattgtggatacccctggcttcggggatgccgtaaacaacactgaatgttggaagcccatcacagactacgtggaccaacagttcgagcagtacttccgagatgagtcgggcctgaatagaaaaaatatacaagacaatcgcgtccattgctgcttatatttcatcagtccattcggccacggattgcggcctgtggacggattccacgagggaatagcgtag

SEQ ID NO: 133779 - DNA, 1110 bp, synthetic construct
  misc_feature 1..1110: note = Description of Artificial Sequence: Synthetic coding sequence
  source 1..1110: mol_type = other DNA
atgtcgactggcctacggtataagtccaaactcgccaccccggaagacaaacaagatatagataagcagtacgtggggtttgccacacttcctaatcaggttcaccgcaagagcgtaaagaaaggctttgactttaccctgatggtcgccggcgaatcaggtcttgggaaatctacattggtgcatagcctgtttctaactgacttgtataaggacagaaagttgctttccgctgaagaacgcataagccaaacagtggagatcttgaagcacacagtggacatcgaggaaaagggtgttaagctgaaactgacgatcgttgatactcccgggttcggcgacgccgttaataatacagagtgttggaagcccatcactgactacgtggaccagcaattcgagcagtacttccgggacgaaagtggtctgaatcggaagaacatccaggataaccgagtccactgctgcctctacttcatctctccattcgggcatggtcttaggcctgttgatgttggcttcatgaaagctcttcacgagaaagtcaacatagtccctctgattgccaaggccgattgtctcgtgcctagcgagattagaaaactcaaggagagaattagggaggaaatagataaatttgggattcatgtttaccagttccctgagtgtgattccgatgaggacgaggacttcaagcagcaggacagagaattgaaggagagcgcaccttttgctgttatcggatcaaataccgtggtggaggcgaaggggcagcgggtaaggggccgtctgtacccctggggcattgtggaagtcgagaaccaagcccactgcgactttgtgaagctcagaaatatgctgatcaggactcatatgcatgacctcaaggacgtcacttgtgacgttcattacgaaaactaccgggctcactgtattcagcagatgacctctaaacttacccaagactctaggatggaaagtcccatccctatactaccactgccaacgcctgatgccgagacagagaaacttattcgtatgaaagacgaagaattgcgacgcatgcaggaaatgctgcagcgcatgaagcagcagatgcaggaccaatag

SEQ ID NO: 133780 - DNA, 1137 bp, synthetic construct
  misc_feature 1..1137: note = Description of Artificial Sequence: Synthetic coding sequence
  source 1..1137: mol_type = other DNA
atggattccttggccgccccacaggatagactggtggaacaacttctgtctcctagaacccaagcccagcggcgcctcaaggatattgacaagcagtacgtgggatttgccaccctgcccaaccaggttcacaggaaaagtgtgaaaaaaggcttcgattttaccctgatggtcgctggggagagcggactcggtaaatctactctcgtgcactctttatttctaaccgacctgtacaaagaccgcaaactcctatctgcggaagagcggatttcccagactgtcgagatcctgaagcacaccgtggacattgaggagaagggagtgaagttaaagctgacaattgtggacacaccaggattcggtgacgccgtaaataataccgaatgctggaagcctattacagactacgttgaccaacagttcgaacagtacttcagggacgaaagcgggctgaataggaagaacatccaggacaaccgggttcattgttgcctctattttattagcccattcgggcacggcctccggcctgtagacgtcggttttatgaaagcgcttcacgagaaagtgaatatcgtgccgttaatcgccaaagccgactgccttgtccctagcgaaattcgcaagctgaaggagcggatacgagaggagatagacaaattcggtattcacgtgtatcagtttccagaatgtgacagtgatgaagatgaggactttaagcaacaagatcgtgaactaaaagaaagtgccccttttgctgtcatcggtagtaacaccgttgtggaggccaagggccagcgcgtgcggggacgtctgtacccttggggaatagtagaagtagaaaatcaagcccattgcgactttgtgaagctgcgcaacatgctcatccgaacccacatgcacgatctgaaagacgtcacctgcgatgtacactacgaaaactaccgagcccactgcattcagcagatgacttctaaactgacccaagactcccggatggaatcgccgattcccattttacccctacctactcccgatgctgaaaccgaaaagctcatccggatgaaggacgaggaactgcgccgaatgcaggagatgctgcagagaatgaagcagcaaatgcaagatcagtag

SEQ ID NO: 133781 - DNA, 1305 bp, synthetic construct
  misc_feature 1..1305: note = Description of Artificial Sequence: Synthetic coding sequence
  source 1..1305: mol_type = other DNA
atggccgccacggacatcgctcgccaggttggagaagggtgccgaactgtcccactggctggccacgtcggctttgattccctacctgaccagctagtgaataaaagcgtcagccagggcttttgcttcaatattctctgcgtgggggagaccggactgggaaagagcacactcatggacaccctgttcaacaccaaattcgaaggagagcccgcaacgcacacccagccaggcgtgcagttgcagagtaatacatacgaccttcaagagagcaacgttcgccttaaattgacgatagtgtctactgtcggcttcggtgatcagatcaataaagaggactcatataagccaattgtcgaatttatcgatgcgcagtttgaagcatatctccaggaggaattaaaaatccggcgggtcttgcatacttaccacgattcccgcatccatgtctgcctctattttatcgcccctacagggcatagccttaagagtctggatctggtcactatgaagaagctggattccaaagttaatattatcccaattatcgctaaggcagacgctatctccaagtcagagctcaccaagttcaagattaagattacttccgaattggttagcaatggggtacaaatttaccagttcccgacagatgatgagtctgtagcagagatcaacggaacaatgaatgcccaccttccattcgctgttatcggctctaccgaagagctgaaaattgggaataagatgatgagagcccgccaatatccttgggggaccgtgcaggtggagaacgaagctcattgcgatttcgtgaagttacgggaaatgctgattcgggtaaatatggaggacttgagggagcaaactcacacccgtcattacgagctgtaccggcgctgtaaattggaagagatgggctttaaggacacagacccggattctaagcctttcagccttcaggagacttacgaggccaagcgaaatgagtttttgggagaactgcagaaaaaggaggaggaaatgcgacaaatgtttgtccagagagtcaaggaaaaagaggccgagctgaaagaggcagaaaaggagcttcacgagaaattcgacaggctcaaaaagctgcatcaggacgagaagaagaagctcgaagacaagaaaaaatcgttagatgacgaggttaatgcgttcaagcaaagaaagactgcggctgagctcctccagtcacaaggtagccaggctggaggtagccagacactgaaacgcgacaaggaaaagaaaaataatccttggttgtgcaccgaatag

SEQ ID NO: 133782 - DNA, 1290 bp, synthetic construct
  misc_feature 1..1290: note = Description of Artificial Sequence: Synthetic coding sequence
  source 1..1290: mol_type = other DNA
atggctgccactgacatcgcccgccaagtcggagagggctgcagaaccgtcccactggccggacacgtgggcttcgactctttgccagaccagttagtgaacaagtccgtgtcacaaggtttctgctttaatattctgtgtgtgggggaaaccggtctcggcaaaagcactctgatggacacgttgttcaatacaaaattcgaaggagagcctgccactcacactcagcccggcgtgcagctgcagtctaacacttacgacctgcaggagtcaaacgtccgactgaaattgaccatagtttcgactgtcgggttcggggaccaaatcaataaagaggattcttataaacccattgtggaattcatcgatgcccagtttgaagcctacctgcaggaggagctaaaaatcaggcgcgtactccacacttatcacgacagcagaattcatgtgtgcctgtacttcatcgctccaactggtcatagcctcaagtcactggatctggtgacaatgaagaaactcgacagcaaggtcaatattattccaattatcgccaaagctgatgccatatcgaaatctgagcttacaaaatttaagattaaaattactagtgaactcgtctcaaacggcgtgcagatttatcaattccctaccgacgatgagagcgtcgctgaaatcaatggaaccatgaacgcgcacctaccgtttgcggttatcgggagtacggaagagctgaagattggaaataagatgatgagagccagacagtacccctggggtactgtccaggtggagaatgaggcacattgtgacttcgtgaaactgagggaaatgcttatccgggttaatatggaggacctcagagaacagacacacacgagacattacgaactataccggcggtgcaagctcgaggagatgggtttcaaagacactgatccggatagtaagcccttttctctacaggagacctacgaggctaagcgaaatgaatttctgggcgagcttcagaaaaaggaggaagaaatgagacagatgttcgtgcaacgcgtgaaggagaaagaagctgagctgaaagaggccgaaaaggaactccatgaaaaatttgaccgactgaaaaaactccaccaggacgagaaaaaaaaactggaagataagaaaaaatctttagatgatgaggttaacgcctttaagcagcgaaaaacggctgcggaacttctgcagagccaaggaagtcaggccggagggagccagaccctgaagagagacaaagaaaaaaaaaacttcttctag

SEQ ID NO: 133783 - DNA, 1296 bp, synthetic construct
  misc_feature 1..1296: note = Description of Artificial Sequence: Synthetic coding sequence
  source 1..1296: mol_type = other DNA
atggcagccaccgatatcgcacggcaggtgggggaaggatgtcgtaccgtgcccctggccggacatgtggggttcgatagcctacccgaccagttggtaaataaatcggtctcccagggcttctgcttcaacatcctgtgcgtgggcgagaccggtctcggcaagtcaactctgatggataccctgttcaacacaaagtttgaaggcgagcctgctacccacacacagccaggagtccagttgcagtcaaacacatacgatctacaggagtcaaacgtgaggttgaaactaacgatcgtgagcactgtcggctttggcgaccagatcaacaaagaagactcctataaaccaattgttgaatttatcgacgcccagtttgaggcctatctgcaagaggaactcaaaatccgaagagttctacatacttaccacgactcccgaatccacgtgtgtctgtacttcatcgcgcctacaggccattcactgaagagtctggatttggttaccatgaagaaactggactccaaagtgaacattattccgattatcgcaaaggcagacgctatctccaagagcgaattgacaaagttcaaaataaaaatcacttctgagctcgttagtaacggagtgcagatatatcagtttccaaccgacgatgaatcagtggccgagataaatggtacaatgaatgcacaccttccttttgctgttatcggctctaccgaggagcttaagattggcaataagatgatgagggcccggcagtacccttgggggaccgtacaggtggaaaacgaagctcactgtgactttgtgaaactgagggagatgctaatccgggtgaatatggaagatcttcgtgagcagacccacacacggcactatgagttgtaccgaaggtgtaagttagaggaaatggggttcaaggataccgaccccgactcgaagccattcagccttcaggagacatacgaagccaagaggaatgagttcctaggcgaactgcagaagaaggaggaagaaatgcggcagatgtttgtgcaaagggtgaaagagaaggaagctgagctgaaagaggccgagaaggaactccatgagaaatttgataggcttaagaagctgcaccaggatgagaagaagaagctggaagacaagaagaagtcactcgacgatgaagtgaacgcattcaagcagagaaagactgcggccgagctgctacaaagtcaggggtctcaggctggagggagccagacacttaagagggataaggaaaagaagaacctggggtttctctag

SEQ ID NO: 133784 - DNA, 1284 bp, synthetic construct
  misc_feature 1..1284: note = Description of Artificial Sequence: Synthetic coding sequence
  source 1..1284: mol_type = other DNA
atggccgccacagacattgcgcgccaggtcggcgaagggtgtaggacagtgcctctggcgggccatgtcggatttgactcattgccggatcaacttgtcaacaagtccgtgtcacagggattctgctttaatatcctttgcgtgggtgagacagggctgggaaagtcaactctgatggataccctattcaacacaaaatttgaaggggaacctgctacccatacccaacctggcgttcagctgcagtctaacacatacgatcttcaagagtctaacgtccggctgaaactgactattgtgagcaccgtcgggttcggtgaccagatcaataaggaggactcatacaaacctatcgtcgaatttatcgacgcccagtttgaagcatatttgcaggaagagttgaagatcagacgagtgctccatacataccatgacagtaggattcacgtgtgtctgtactttatcgccccaaccggccatagcctaaaatccctggacctcgtcaccatgaagaagttggacagcaaagttaacataatcccaattattgccaaagcagatgccataagcaaaagtgaactcacaaaatttaagattaaaatcacatcggagttggtaagcaacggcgtgcaaatctaccagttccccacagacgacgagagtgtcgccgagattaatgggacaatgaacgcccatctgcccttcgcagtgattggctccactgaagaattaaaaattgggaacaagatgatgcgagccaggcagtatccatggggtaccgttcaggtggagaacgaagcccattgcgacttcgtgaagctgcgggagatgctaattcgggtgaatatggaggacctgcgggaacagacgcacacgaggcactacgagctctacagacgatgcaagctcgaggagatgggcttcaaggacactgatcccgattcaaagccctttagtctccaggaaacatatgaagccaagagaaatgagttcctgggcgagctgcagaagaaagaggaggaaatgcggcaaatgttcgtccagagggtcaaggagaaggaggccgagctcaaagaagccgaaaaggaactgcatgaaaagttcgaccggcttaagaaactgcaccaggacgaaaagaagaagctggaggacaagaagaaaagtcttgatgacgaggtcaatgcctttaagcagcgtaaaactgccgcagaactgctgcaatcccagggttcccaggcaggaggcagccaaactctgaagcgggataaggagaagaagaactag

SEQ ID NO: 133785 - DNA, 1284 bp, synthetic construct
  misc_feature 1..1284: note = Description of Artificial Sequence: Synthetic coding sequence
  source 1..1284: mol_type = other DNA
atggccgccactgatatcgccagacaagttggcgagggctgcagaaccgtgcccctggcgggtcatgtagggtttgacagcttgcctgaccagcttgtcaacaagagcgttagccagggtttctgcttcaatattttatgcgttggggaaacgggcctgggcaagtctactctgatggatacattattcaacaccaagttcgaaggcgaacccgccacccacacccagccgggcgtacagctgcagtcaaacacatatgacctgcaggagtccaatgtgaggttgaaactgactattgtttctactgtcggcttcggtgaccagatcaataaagaggactcgtacaaacctattgtcgagtttatcgacgctcagttcgaggcatatctccaggaggagttgaaaatccggagagtgctgcatacatatcacgacagccggattcacgtatgcttgtattttatcgccccaactggccacagcttaaagtccctggacctagttaccatgaagaagcttgactcaaaggtgaatatcatccctatcattgcaaaggctgatgctatatcaaagtcagaattaaccaaattcaagattaagataacaagcgagctggttagcaacggtgtgcagatatatcaattcccaactgacgacgaaagcgtcgccgagataaatgggactatgaacgcccacctgcccttcgctgtcatcgggagtactgaggaactaaagatcggaaacaagatgatgcgagcacgtcaatatccgtggggtactgtgcaggttgagaacgaggctcattgcgacttcgtgaaactgagggaaatgctaataagagtgaacatggaagacttaagagaacagactcatacgagacactatgagttataccgccggtgcaaactggaagaaatggggttcaaggatacagaccctgatagcaagccatttagcctgcaggagacctatgaggcaaaaaggaacgagtttttaggagagctgcagaaaaaggaggaggagatgaggcagatgttcgtccagcgagtgaaagagaaagaggccgaactgaaagaagccgagaaagaactacacgaaaaattcgataggctgaagaagctccaccaggacgaaaagaaaaaactcgaagacaaaaaaaagtcacttgatgatgaggtaaacgcctttaagcaacggaagacggctgcagagctgctacagtcacaaggaagtcaggcgggaggctctcagactctgaagcgagataaggaaaaaaaaaactag

SEQ ID NO: 133786 - DNA, 1110 bp, synthetic construct
  misc_feature 1..1110: note = Description of Artificial Sequence: Synthetic coding sequence
  source 1..1110: mol_type = other DNA
atggatacactgttcaataccaaatttgaaggtgagcctgctacccacacacagcctggcgtgcagctccagagcaacacctacgatttgcaggagtctaacgtgaggcttaagttaaccatagtgagcactgtgggattcggcgatcagataaataaggaagactcttacaaaccaatagtggagttcatcgacgcgcaatttgaggcatacctgcaagaggaacttaagattcgccgggtcctgcacacttaccatgactcaaggatccatgtctgcctgtatttcatcgctcccaccggtcattcactgaagagcttagatctggtgaccatgaaaaaactggacagcaaagtaaacattattccgatcatcgccaaggctgacgccatatccaagtcagaattaaccaaattcaaaatcaaaattaccagtgaactagtgagcaacggcgtgcagatttaccagttcccaaccgatgatgaatcagtggccgagatcaatgggactatgaacgctcacctgccctttgcagttatcgggtctaccgaagaattaaaaatcggcaacaagatgatgagggctcgacagtatccctggggcaccgtccaagtcgaaaatgaagctcactgcgattttgttaaacttcgggagatgcttatccgggtgaatatggaggaccttagggagcagactcacacaagacattatgaattgtatcgacggtgtaagttggaggagatggggtttaaagacactgatcctgatagtaaaccattctcacttcaggagacatacgaagctaagaggaatgaattcctcggcgaactgcagaaaaaggaggaagaaatgcggcagatgttcgtgcagagagtcaaagagaaagaagccgagttgaaggaggccgagaaagaactccacgagaagttcgatcgactgaagaaacttcatcaggatgagaagaagaagctcgaagataagaagaaatccctggacgatgaagtcaatgctttcaagcaacggaaaacagccgcagaactcctgcagagtcagggtagccaagctggaggtagccagacgctgaagcgcgacaaagagaaaaagaagtag

SEQ ID NO: 133787 - DNA, 1374 bp, synthetic construct
  misc_feature 1..1374: note = Description of Artificial Sequence: Synthetic coding sequence
  source 1..1374: mol_type = other DNA
atggccgctactgatatcgctaggcaggtcttcggccgcagacgtcttctgcttctgggcttcgaaaccgtcgggttttccgctgcctgcactgaggagggcggccacatgcttagaagaggagaaggttgtcggaccgttcccctcgccggtcatgttggttttgatagtctgccagatcagctggtgaataagtcagtgtcacagggtttttgcttcaatattctgtgcgtcggtgagacagggctgggaaaaagcacacttatggatacattgtttaacacaaagtttgaaggcgaacccgctactcacacgcagcctggcgttcagttgcagtctaatacctacgatctccaggagtccaacgttcggctcaagctgaccatcgtgagtacggtgggctttggcgatcaaattaataaggaagatagctacaagcccatcgttgagtttatcgacgcccagttcgaggcctacctgcaggaggagcttaagattcgccgggtccttcacacgtaccacgattcaaggatccacgtgtgcctctatttcatagctcccaccggtcatagcctgaagtcgttggacctagtgacgatgaagaaactggacagcaaagttaatatcattcctataattgccaaagcagatgctatcagtaaatctgaattaactaaatttaagatcaagatcacttccgagctcgtctcgaatggagtccagatttatcagtttcccacagatgacgaatctgtggctgagatcaatgggacaatgaacgcccatctgccatttgccgtgatcggctctaccgaggaactgaagatcggcaacaaaatgatgagggcacggcaatacccctgggggaccgtacaagtcgaaaatgaagcccattgcgattttgtaaaactgcgggagatgttaatccgggtcaacatggaggatcttcgcgagcagacgcatacgcgacattacgagctctatagaagatgtaaattggaggagatgggtttcaaggataccgatcctgattctaagcccttctccctccaggaaacgtatgaggccaaaagaaacgaatttctgggtgagctccagaaaaaagaagaggagatgagacagatgtttgtgcagagagtgaaagagaaagaggccgagctgaaggaggcagaaaaggagcttcatgagaagttcgataggcttaaaaaactgcaccaggatgaaaagaagaagctggaggataaaaaaaaatccttagacgatgaggtaaacgcattcaagcaaaggaaaactgcggcggaactcctgcagtcacagggctctcaggcaggaggcagccagactctcaagcgcgacaaggagaaaaagaagtag

SEQ ID NO: 133788 - DNA, 1284 bp, synthetic construct
  misc_feature 1..1284: note = Description of Artificial Sequence: Synthetic coding sequence
  source 1..1284: mol_type = other DNA
atggctgcgactgatatcgctcggcaagtgggtgagggctgcagaacagtccccttagcaggccatgtgggcttcgacagcctccccgatcagctcgtgaacaagtcggttagccaaggcttttgcttcaacattttatgcgtgggagagacaggccttgggaaatcaactttgatggacacactcttcaatacgaagtttgagggcgaacccgccactcacacccagccaggcgtgcaactgcaatctaacacctacgatcttcaggaaagtaatgttcgcttgaaactgactatcgtgtccactgtgggctttggggatcaaataaacaaggaagatagttacaagccgatcgtagagttcatagacgctcagttcgaggcctacctccaggaggaacttaagatccgacgagttttacacacgtaccacgatagtcgcatccacgtgtgcttgtactttattgcgcctacagggcactcccttaagtctctcgacctagtcaccatgaagaagctcgacagtaaggtgaacattatcccaataatcgccaaagcggacgctattagtaaatctgaactgacaaagttcaaaatcaagataacttctgaacttgtaagcaatggcgtccagatttaccagttccctacggatgacgaatctgtggccgagatcaacggtaccatgaatgctcacctgcctttcgccgtgattggttctacagaggagctgaagattgggaataaaatgatgcgcgctaggcagtacccctgggggaccgtccaagtagaaaacgaggctcactgcgacttcgtgaaactgcgagagatgctcatccgggtcaacatggaagatctgcgggagcagacgcacacaagacactacgaactgtaccgccgatgcaagcttgaggagatgggctttaaggatacagatcccgattctaagcctttcagcctgcaggaaacatacgaagcaaagcggaatgaatttctgggtgagctccagaaaaaagaagaagagatgcgacagatgtttgtgcagcgggtcaaagagaaggaggcggagctgaaagaggcagagaaggagctgcatgaaaagttcgaccgcctaaagaaattgcaccaggatgaaaagaaaaagctggaggataaaaaaaagagcctcgacgacgaagtcaacgccttcaaacagcgtaagaccgcagcggagctgttgcagagtcaaggcagccaggctggtggcagtcaaacccttaagagagataaagaaaaaaagaactag

SEQ ID NO: 133789 - DNA, 804 bp, synthetic construct
  misc_feature 1..804: note = Description of Artificial Sequence: Synthetic coding sequence
  source 1..804: mol_type = other DNA
atggcagcgacagacatcgcccgtcaagtgggagagggatgtagaactgtgcctttggccggacacgtcggcttcgacagccttccggatcagttggtcaataaatcagtaagccaaggcttctgtttcaatatcctctgtgtgggagagaccggactggggaaatccaccctgatggataccctgtttaacactaaattcgaaggggagccagctacgcatacccagccgggagtccaactgcagagtaatacctacgatctgcaagagagcaacgtgcgccttaaacttaccatagttagtactgtcggcttcggggatcagatcaacaaggaggacagttataaaccaattgtcgaatttatcgacgcccagtttgaagcctatttacaggaggaactgaaaatccggagggtccttcacacataccacgattcgcggatccatgtttgcttgtactttattgctccaacagggcacagcctaaaaagcctcgatctggtgacgatgaagaagctggattcaaaggtgaatataatccctatcattgctaaagcagatgccataagtaagtctgagctgactaagtttaagattaagatcacctcagagctggtgtctaacggggtgcaaatctatcagttccctaccgacgacgaaagcgttgccgaaatcaatggtaccatgaacgcgcatctgccttttgccgttatcggctctacagaggaactaaaaattggaaacaaaatgatgagggcgagacagtacccctggggcactgtgcaggggtcaagccaagtttag

SEQ ID NO: 133790 - DNA, 1452 bp, synthetic construct
  misc_feature 1..1452: note = Description of Artificial Sequence: Synthetic coding sequence
  source 1..1452: mol_type = other DNA
atggctgcaacagacctggaaagattcagcaatgcggagccggaaccaaggagtcttagtcttggaggacacgttggatttgactctctcccagatcagctcgtatcaaagtccgtgacacagggcttttcttttaacattctttgcgtgggagaaacaggcattggcaagtccactcttatgaacacactgttcaacacgacattcgagactgaagaggcttcacaccatgaagcatgtgtgagattgcggcctcagacgtacgaccttcaggaatcgaacgtgcaattgaaattgacaatcgtcgacgctgtgggctttggcgaccagattaacaaggatgagtcctacaggccgattgttgactacattgacgcgcagtttgagaactatctccaggaggagctcaaaattcgaaggtctctgttcgactaccacgatacacggattcacgtctgcctttattttattactccaactggccatagtctaaagagtttggatctcgtaacgatgaaaaagcttgacagtaaggtcaacatcatcccaatcattgcgaaagccgacactattagcaagtcggaactgcacaagtttaaaatcaagattatgggggaattggtttctaacggggttcagatctaccaatttccaaccgacgatgaagcagttgcagaaatcaacgccgtgatgaatgctcatctgcctttcgcggttgtgggctcaaccgaggaagtcaaggtgggaaataagctggttcgcgcacggcaatatccatggggtgtagtccaggtagaaaacgagaaccactgtgacttcgtgaagctccgtgaaatgctcatccgagtgaatatggaagacctgcgagagcagacccattcccgacattatgagctctaccgccggtgcaagctggaggagatgggatttcaggattctgatggggacagtcagccttttagcctgcaggagacctacgaagcaaaaaggaaagagtttttgtccgaactacagaggaaggaggaggagatgcgacagatgtttgtaaacaaggtgaaagaaaccgagctcgaattgaaggagaaggagagagagctgcatgaaaagttcgaacatctgaagcgcgtccaccaagaggaaaagcgcaaagtggaagaaaaaaggcgggagctcgaggaagagaccaacgctttcaacagaagaaaagccgccgtggaagccctacagagtcaagcactgcatgccacttcccagcaaccactgcgtaaggataaggataaaaagaataggtcggacataggcgcacatcagcccggcatgtcactatctagttcgaaggtgatgatgaccaaggctagcgtcgaacccctgaattgtagctcatggtggccggcaatacagtgttgttcatgcctggtgcgcgacgcgacatggagagaggggttcctctag

SEQ ID NO: 133791 - DNA, 1110 bp, synthetic construct
  misc_feature 1..1110: note = Description of Artificial Sequence: Synthetic coding sequence
  source 1..1110: mol_type = other DNA
atgaataccttgttcaataccacatttgaaacggaagaagcaagccaccacgaagcctgcgtgcgtttgcgtcctcaaacttatgatttgcaggaatctaacgttcagttgaaactgacaatcgtggatgcggtcggcttcggggaccaaatcaacaaggacgaaagctacagacccattgtggattatatcgatgcccagtttgagaactacctacaagaggaactgaagattagaaggtcactcttcgactaccacgatacccggatccatgtctgcctgtactttataaccccgacgggacacagccttaaatcacttgacctggtgactatgaagaagctggattctaaggtgaacattatacccattattgccaaggccgataccatttccaagtctgagttacacaagttcaagatcaaaattatgggcgaactcgtttccaatggtgttcagatataccagttccctacagacgacgaggcagtggccgagatcaacgcagtgatgaacgcacatctgccttttgccgtcgttggatcaactgaggaggtgaaggttggcaataaactcgtgcgtgcccgacagtatccatggggagtcgtgcaggttgaaaatgagaaccattgcgacttcgtgaagctgagggagatgctcatcagagttaacatggaggatctgcgggagcagacccatagtaggcactacgagctctatcgccgatgtaagttggaggagatggggttccaggactctgacggtgactctcaacccttttcgttacaagaaacatatgaggcaaaaaggaaggagtttctctctgaactgcagcgcaaagaggaggagatgagacagatgtttgtcaataaggtgaaggaaactgaactagaactcaaggaaaaggaacgtgaactgcatgagaagttcgaacacttgaagcgagtgcaccaggaagagaagcgcaaggttgaggaaaagcgccgtgagctagaggaagagactaatgcgttcaatcggcgcaaagccgctgtggaggctctccaaagccaggccctccatgccaccagccaacaaccactacggaaagacaaggataagaagaactag

SEQ ID NO: 133792 - DNA, 1290 bp, synthetic construct
  misc_feature 1..1290: note = Description of Artificial Sequence: Synthetic coding sequence
  source 1..1290: mol_type = other DNA
atggctgccacagacctcgaaagattctctaacgccgaacctgagccccgttctctgagccttggtggtcacgttggttttgacagcttacctgatcagctggtaagcaagtccgtcactcagggtttctccttcaatatcctgtgtgtcggagagaccggcatcgggaaatcaacccttatgaatacactgttcaataccaccttcgaaacggaggaagcaagccaccatgaagcctgtgtcagactcaggccccagacctatgacctgcaggagtccaacgtccagcttaaactcacaatagttgacgcagtggggttcggcgaccagatcaacaaggacgagagctataggccaatcgtggactacattgacgctcagtttgagaactatcttcaggaggagcttaaaatcagacggtcgctcttcgactatcatgacacacgcatccacgtctgtttgtattttataacacccacagggcactccctgaaatccctcgaccttgtcacaatgaagaagctggatagcaaagtgaatatcatccctatcattgcgaaagcggatacaatttctaagtccgagctgcacaaattcaagatcaagattatgggcgaattggttagtaacggcgtgcaaatttaccaattccccaccgacgatgaagccgtggccgagataaacgccgtcatgaatgctcacctgcctttcgccgtcgtgggtagtaccgaggaggtcaaggtcggtaacaaactcgttcgtgcccgtcagtacccttggggggtggttcaggttgagaatgaaaaccattgcgattttgttaagctccgggaaatgctgatcagggtcaacatggaggatctccgggaacaaactcacagtaggcactacgaactgtatcggaggtgtaagttggaagaaatgggctttcaggattccgacggtgactcccaaccattctctctccaggaaacatacgaggctaagcggaaagaattcctttcagagctccagcgcaaggaggaggagatgcggcagatgttcgttaacaaggtgaaagaaactgaacttgagctgaaggagaaagagagggaactgcacgagaagtttgagcatctgaagagggtccatcaagaggagaaaagaaaagtggaagagaagcgtagggaattagaggaggagacgaacgctttcaatagacggaaagcggccgttgaggcactgcagtctcaggcccttcacgctacatctcagcagccactgcggaaggataaggacaagaaaaactag

SEQ ID NO: 133793 - DNA, 1329 bp, synthetic construct
  misc_feature 1..1329: note = Description of Artificial Sequence: Synthetic coding sequence
  source 1..1329: mol_type = other DNA
atggcagctacagacctggagagattttccaacgccgaacctgagcctaggtccctgtcattagggggccatgttggctttgactccttaccagaccaattggtcagtaagagtgtgactcagggcttcagctttaacattctttgcgtgggtgagactggcatcggtaagtccaccctgatgaatactctttttaatacaacctttgagactgaagaagcttcccaccacgaggcctgcgtccggcttcgaccacagacatatgacctgcaggaatctaacgttcagctgaaactaacgatagtggacgctgttggcttcggcgatcaaataaacaaagacgagtcttatcgccccattgtggactatatcgacgcgcagttcgagaattatctgcaggaagagttgaagatccggagaagcctgttcgactaccacgatacacgcattcatgtgtgtctttacttcataaccccaaccggtcatagtctgaagtcgctggatctcgttaccatgaaaaagctcgactcaaaagtcaacatcatcccaattatcgctaaggcggacaccatctcaaagtccgagctgcataaatttaaaattaaaattatgggcgaacttgtgtctaatggggtacagatctatcagtttccaactgacgatgaagctgtcgctgagataaatgccgtgatgaacgcccaccttcctttcgcagtcgtgggctctacagaggaggtgaaggtgggcaacaaactggttagggcacgccagtacccgtggggggtggtgcaggttgagaatgaaaaccactgtgatttcgttaagttgagggagatgctgatccgcgtgaacatggaggatctccgggagcagacacatagccgccactatgagttataccgacgctgcaagctggaggagatggggtttcaagattctgatggtgacagtcagcccttctctctgcaagagacatacgaagctaagcgcaaagagttcctgtcggagctgcagcgaaaggaggaagagatgcgccagatgtttgtcaataaagtcaaagaaactgagctggagctaaaagagaaagagcgcgaactgcacgaaaagtttgagcatctgaaacgcgtgcaccaggaagagaagcgcaaagtagaagaaaagagaagggagcttgaggaagagaccaacgcatttaatagacgcaaggccgcagtcgaagccttgcagtcacaagctttgcatgcaacatcgcagcagcctctgaggaaggacaaagacaaaaaaaaagcctctggctggagttctatctactccgtcacaattccttag

SEQ ID NO: 133794 - DNA, 1707 bp, synthetic construct
  misc_feature 1..1707: note = Description of Artificial Sequence: Synthetic coding sequence
  source 1..1707: mol_type = other DNA
atggaacgagatcggattagcgccctgaagcgaagtttcgaggtagaggaagtcgagacccctaactctaccccacctcggcgggtccaaacccccctgcttcgagcgacggtcgcctcaagcacccagaaattccaggatctcggggtcaaaaactcagaaccaagcgcgcgccatgtagactccctgtcccagcgaagtcctaaagccagtctcaggcgcgttgagctgtccgggccaaaagcagcagagcccgttagcagacggactgaattgagtatcgatatcagctctaaacaagtagagaatgccggcgctatcggaccatctagatttggactgaagagggcggaggtgctgggccacaaaactccagagcctgctccccggaggaccgagatcactatcgtcaagcctcaggagtccgcccatcgtagaatggaaccgcccgcctccaaggtcccagaagttccgaccgcccccgctaccgatgcagcacctaaacgcgtggagattcagatgccaaaacccgccgaggcccccactgcgcccagtcctgctcagaccttagaaaatagcgagcctgcacccgtgagccagctgcaaagcagacttgaacccaaaccccaaccacccgtggccgaggccacccctcgctcacaggaagcaacagaggccgctccatcctgcgttggcgatatggcagacactccgcgcgatgccgggctcaaacaggctcctgcttcccgaaatgagaaggcgcccgtcgactttggatacgttggaattgattccattctggagcagatgagaagaaaagccatgaagcaagggttcgagtttaatattatggtcgtcggccagtctggtctaggtaaatctactcttattaacactctgttcaagtccaagatctcacgaaagtccgtccaacctaccagcgaagaaagaattcctaaaacaattgagattaagtccatcactcacgacatcgaggagaagggcgtccgcatgaaactgactgtaatcgacacacctggcttcggcgaccacatcaataatgaaaattgctggcaacctatcatgaaattcataaatgatcagtacgagaagtacctgcaagaggaggtcaatattaaccgcaaaaaaaggattcctgacacgcgggtccactgctgtctctactttatcccagctacaggacatagtctgagaccactggacattgaatttatgaagagattgagcaaggtggtgaacatagtgcctgtcatcgccaaggcggatacgctaacacttgaggaacgcgtccactttaaacaaagaattaccgccgatctgttaagcaacggcatcgatgtctatcctcaaaaggagtttgatgaggatagcgaagatagactcgtgaatgaaaagtttagggaaatgattccatttgccgttgttggctctgaccacgaataccaagttaacggcaaaaggatactcgggcgtaaaactaaatggggcacaatcgaagtggagaacaccacacactgcgaattcgcttatctccgggatctactgatccgcacacacatgcagaacattaaggatataaccagctctattcacttcgaagcttaccgggtgaaacgacttaatgagggcagttccgccatggccaacggaatggaggagaaagagcctgaagccccagagatgtag

SEQ ID NO: 133795 - DNA, 591 bp, synthetic construct
  misc_feature 1..591: note = Description of Artificial Sequence: Synthetic coding sequence
  source 1..591: mol_type = other DNA
atggccgatactccgagggacgcaggtctgaagcaggcaccagccagtcgaaacgagaaggctcctgtggacttcggttatgttggcattgactccatactcgagcagatgcgaagaaaggccatgaaacagggatttgaattcaatataatggttgtgggccagtctggcctggggaaatcgaccctgatcaatacgctctttaaatcaaagataagtagaaagtccgtccagcctacctccgaagagagaatccccaaaactatcgaaatcaagagtatcacgcatgatattgaggaaaagggcgtccggatgaaactgactgtcatcgacactcccgggtttggagaccatatcaataatgaaaactgttggcagccaatcatgaagtttatcaatgaccagtacgaaaagtacctgcaggaggaagtcaacattaaccggaaaaaacgcatcccagacacacgcgtgcattgttgtctatacttcattccagccactggtcattctctaccacttctggaacaaaaggtacccctatcccaacctagtgccgactgtttggccagatgtggcgaccgcctcgagtag

SEQ ID NO: 133796 - DNA, 1740 bp, synthetic construct
  misc_feature 1..1740: note = Description of Artificial Sequence: Synthetic coding sequence
  source 1..1740: mol_type = other DNA
atgagtgatcccgctgttaatgctcaattggatggaattattagcgatttcgaggcattgaagagatcctttgaagtggaagaagtggaaacccctaacagcactccgcccagacgtgtgcaaaccccccttcttcgagccaccgtggcttcttctacccagaagttccaggacttaggcgtgaaaaattcagaaccatcagcacggcatgtggactcactgagccagcgatctccaaaagcctcactgagacgtgtcgaactctccggcccgaaagcagcagagcctgtttcgcggcgcacagaactgtccattgatataagctccaaacaagttgagaacgccggagctataggtccatctcgcttcggcctgaaacgagcggaagtgttgggtcacaaaactccagagcccgccccccgcaggacggaaatcaccatcgtgaaacctcaggagtccgctcaccggagaatggagccaccggccagcaaagtgcccgaagtgcccaccgcccctgccactgatgcagccccgaagcgggtagaaattcagatgcctaaacctgccgaggcaccaaccgctccctcaccagctcagaccctggagaattccgagccagcacctgtctcccagctacaatctcgcctggaaccaaaaccgcagccacctgttgctgaagccaccccccgttcccaggaagcaacagaggcggccccgtcttgtgtgggggacatggctgatactccaagagacgccggcctcaaacaagcccctgcgtcccgcaacgagaaggctcctgtggatttcgggtatgttggcattgattccattttagagcagatgagacgcaaggccatgaagcagggtttcgaattcaatatcatggttgtcggccagtctgggctgggcaagagcactcttatcaatacactttttaaatcaaaaatctcgcgcaagagtgtgcaaccgacttccgaggaacgaatcccaaagacaattgagattaagagtatcacacacgacatagaagagaaaggcgtgagaatgaaactgacagtgatcgacaccccggggttcggtgaccacatcaataatgaaaactgctggcagccaattatgaaatttatcaacgatcagtacgaaaaatacctgcaagaggaggtcaatatcaaccggaaaaagcggatccccgatacgagagtgcactgctgtctgtattttatccccgcaacaggccatagcctgcgacctctggacattgaatttatgaagaggctatcaaaggttgttaacattgtccccgtgatcgcaaaagccgacacccttactcttgaagaacgggtgcactttaaacagaggattaccgctgatctattaagtaacggtatcgatgtgtaccctcagaaagagtttgatgaagatagtgaagacagattagttaacgagaagttccgcgagatgattcccttcgcagtagtcggctcggaccatgaataccaggttaacggcaaacggattttgggacgcaaaactaagtgggggaccatcgaagtggagaacactactcattgcgagttcgcgtatttgcgagatttgctcatccgcactcatatgcagaatatcaaagatattacctcttcaattcatttcgaggcatatcgggtcaaacgcctgaacgagggtagtagcgcgatggccaacggtatggaagagaaagaaccggaggccccggagatgtag

SEQ ID NO: 133797 - DNA, 1761 bp, synthetic construct
  misc_feature 1..1761: note = Description of Artificial Sequence: Synthetic coding sequence
  source 1..1761: mol_type = other DNA
atgaagaagagttactcgggagggacccggaccagcagcggaagactccgcaggctcggagacagtagcggaccggcgttgaagagaagcttcgaggtggaggaggtggagacacccaatagcacacctcctagacgagtgcagacaccactcttacgtgctaccgtggcttcatccactcagaagtttcaggacttgggggttaaaaattccgagccttcagcccgtcacgtggactccctgtcccagcggagtcccaaggcgagcctgcgcagggtcgaactctctgggcctaaggctgcggagcccgtgtccagacgaacggagctgtccatcgatatttcatccaagcaagtggaaaacgccggcgcaataggtcccagccggttcggcctgaaacgggcagaggtgctcgggcacaagaccccagagcctgctccccggaggacagaaatcacaatcgttaaacctcaggagtctgcacatcgcaggatggaaccgcctgcttctaaggtccccgaagtcccaactgctccagccaccgacgcggcacctaagagagtggagatccagatgcctaagccagccgaagcacccacggcaccaagccctgcgcagaccctggagaactctgagccggcgccagtgagtcagcttcagagcaggcttgaacctaagcctcagccacctgtggctgaggctacccctagaagccaggaagccaccgaggctgctccaagttgcgttggcgatatggccgatactccaagagacgcagggctgaaacaggcccctgcctcacgcaatgagaaggcccccgtagacttcggatatgtgggaattgacagtatactcgaacaaatgcgcaggaaggccatgaagcagggctttgagttcaacattatggtcgtgggtcagagcggcttgggcaagtctaccttgatcaacactctattcaagtcgaaaatatcacgcaaatctgtgcaaccaacctcagaggagaggataccaaagaccatcgagatcaaaagcataactcacgatatcgaggaaaagggcgttagaatgaaactcaccgttatcgacacacccggcttcggtgaccatattaataacgaaaactgttggcagccaattatgaaattcataaatgatcagtacgagaagtacctacaggaagaggtaaatataaatcgcaagaagaggatacccgacacgagagtgcattgctgcctttatttcatacctgcgacgggccactccttaaggccacttgatattgagttcatgaagcgtttatcgaaggttgtaaatatcgtccccgttattgccaaggccgacaccctgaccttggaggagagagtccattttaagcaacggattactgctgatctgctgagcaacggcatagacgtgtacccacagaaggagtttgatgaggatagtgaggacaggctcgtgaatgagaagtttagagagatgattccgtttgcggttgtggggtccgaccatgaataccaggtaaacggcaagcgcatactgggaagaaagaccaaatgggggaccatcgaggtcgagaatactactcactgtgaattcgcctacctcagggatctgctcatccggacacatatgcaaaacatcaaagatattacctctagtatccactttgaagcttaccgcgtgaagagacttaacgaaggctcctctgccatggctaacgggatggaggagaaagaaccagaggctcctgagatgtag

SEQ ID NO: 133798 - DNA, 1425 bp, synthetic construct
  misc_feature 1..1425: note = Description of Artificial Sequence: Synthetic coding sequence
  source 1..1425: mol_type = other DNA
atgggcagttcattttgggaaggcctgcaagtggctgtgggcttgcctcaaggttgttggccccaggggttagacagcggcgaacctgccgagggtggacagctggaagctgcgccagtttgtatagtaacacggcagtctaaagagacagctgggccaactctcggacgcggcggatggagacaggggtctttgagacgaggcaaaggaacctcctgtcgctgccgccagctctcacctgggcatggtcccggcagactgaccgggtgcggcgaatgccaccggctgccatgccgtgggctggtgagcggtttcacaggcctccgcggccaggaagaagacgatctcgcgttctgcctggctacgataggatctgaccgtcaagctacggaggccgcgcctagctgtgtcggagacatggccgacactcctagagatgccggacttaagcaagcccctgcgtccaggaacgaaaaagctcccgtcgatttcgggtacgtggggatagactctatactggaacaaatgcgcagaaaggcaatgaagcaggggtttgaatttaatataatggttgtcggccagtccggacttggaaagagcacccttattaacacactctttaagtccaagatttctcgtaagagtgtccagccgacatccgaggagcggataccgaagaccattgagattaaatctattacacacgacatcgaagagaagggagtgcgaatgaaattgaccgtgatcgatactccaggattcggagaccacataaataacgaaaactgctggcagcccattatgaaattcattaatgaccaatatgagaaatacttgcaagaggaagtgaacattaatcggaagaagcgaattcctgacacacgcgttcactgctgtctatactttattcctgcgaccggacacagtctgcgtccattagacatcgagttcatgaaacggttatccaaagtggtcaacatcgtgcccgtgattgctaaagccgacactctgacgctggaggaaagagtccattttaaacaacggattactgccgatctcctgagcaatggaatcgacgtttatccccagaaggagttcgacgaagacagcgaagacagactcgtcaatgagaaatttcgggaaatgattcctttcgccgtagtcggatccgaccatgagtatcaggtgaacggaaagcgcatattaggccgcaagacaaagtggggcacaatcgaagtcgagaatacaactcactgcgagtttgcgtatctgcgcgatctgctgatcaggactcacatgcagaatatcaaggacatcacttccagcatccacttcgaggcatacagggtgaagaggttaaacgaaggcagtagcgccatggctaacggaatggaggaaaaagagcctgaggcaccggagatgtag

SEQ ID NO: 133799 - DNA, 1269 bp, synthetic construct
  misc_feature 1..1269: note = Description of Artificial Sequence: Synthetic coding sequence
  source 1..1269: mol_type = other DNA
atggagccccccgctagcaaggttcctgaggtgcctacggcgccagccacagatgctgcccctaagcgggtagaaatccagatgcccaaacccgctgaggctcctacggccccgagtcccgcccagaccctggagaactccgagccagctcctgtgtcacaacttcagtctcggctcgaaccaaaacctcagcctcctgtagccgaggcgacaccacgaagtcaagaagctactgaggccgccccctcctgtgtgggggacatggccgacacaccgagagatgccggcttgaaacaagctcccgcctcacgaaacgagaaggcccctgtggatttcggctatgtgggaatcgatagcatcttagaacagatgaggaggaaggctatgaaacaggggtttgaattcaatattatggtcgtgggacaatcaggtttaggcaagagcacactaatcaacacattgtttaaatccaaaatctcgcggaaaagcgttcagcctactagtgaggagaggattcccaaaaccattgagatcaagtctattacacacgacattgaggagaaaggggtaaggatgaagttgactgtaatcgacactcccggcttcggcgatcacataaacaatgagaactgttggcagccaatcatgaagttcatcaatgatcagtacgaaaaatatctgcaggaagaggtcaacattaaccgcaaaaagagaattccggatacccgagtacactgctgtctgtattttatcccggctactggccacagtctacggccactggatatcgagttcatgaagcggttatccaaggtggtgaacattgtcccagttattgcaaaggccgatactctgaccttagaagaacgggtgcattttaaacagaggattaccgccgacctgctttctaatgggattgatgtgtacccccagaaagaatttgatgaggactccgaagacagactggtaaacgagaagttccgtgaaatgatcccctttgcagtcgtaggctcagatcacgaatatcaggtgaatggaaagcgcatcctgggccgcaaaactaagtggggcacaatcgaagtggagaacactacacactgcgaatttgcttaccttcgtgacctgctgatacgtacccatatgcagaacatcaaggacatcacctcttccatccatttcgaggcatacagagtcaagcgacttaatgagggatcttcggccatggcaaatgggatggaggagaaagaacctgaggctccagagatgtag

SEQ ID NO: 133800 - DNA, 1008 bp, synthetic construct
  misc_feature 1..1008: note = Description of Artificial Sequence: Synthetic coding sequence
  source 1..1008: mol_type = other DNA
atggctgacactcctcgcgatgctggtttgaaacaggcacccgcttccagaaacgaaaaggcccccgtggatttcggctatgttggcattgactccatcctcgaacaaatgcgccgcaaagcgatgaaacagggttttgagttcaacataatggtggtgggacagagtggattgggcaagtccaccctgattaacacactgttcaagtctaagatcagccggaagtctgtgcaacctactagcgaagaacgcatacccaaaaccattgagattaagtcaattacacacgatattgaggagaagggagtgagaatgaaacttaccgtgattgatacaccaggtttcggagaccacattaacaacgagaactgctggcagcccatcatgaagttcatcaatgaccagtacgaaaaatatctgcaggaagaggtgaacatcaatcgaaagaagaggattccagacaccagagtccattgctgcttgtatttcatccctgcaacaggacactcactgagacccctggatattgaatttatgaaaaggctgtccaaggtcgtgaacatagttccagtgatcgcaaaagcagatactctcaccctggaggagagggtccactttaagcagagaatcacagcagacctgttgtccaacggaatcgacgtttatccacagaaggagttcgatgaggactcagaagataggctcgtgaacgaaaagttcagagaaatgattccatttgctgtggttggttccgaccatgaataccaggttaacggcaaaaggattctggggcggaaaaccaaatggggcacaatcgaggtggaaaatacgacacattgcgagttcgcttatttgcgagatcttttgatccgcacccacatgcagaacatcaaggacatcacctcgtctatccattttgaggcataccgggtgaagaggctgaatgaggggtcttccgccatggcgaacggaatggaggaaaaggagcccgaggccccggagatgtag

SEQ ID NO: 133801 - DNA, 1269 bp, synthetic construct
  misc_feature 1..1269: note = Description of Artificial Sequence: Synthetic coding sequence
  source 1..1269: mol_type = other DNA
atggagccacctgcctctaaagtgccagaagttcctaccgcaccagccaccgatgccgctcctaagcgcgtagagattcagatgcccaagccagccgaggcaccaactgccccttcacctgcacagacgctggaaaacagtgagcccgcaccagtaagtcaacttcagagcaggctggaacctaaacctcagccaccggttgctgaagccactccccggtcccaggaagcgaccgaagccgccccttcatgcgttggcgacatggccgacacgccccgcgatgcgggactcaaacaagcgcccgccagtcggaacgaaaaagctcctgtggacttcggctacgtaggtatcgacagcatcctggaacagatgcgcagaaaggcaatgaagcaggggttcgagtttaacattatggttgtcggacagtccggactcggaaaatctactcttatcaatacactattcaagagtaaaatctctcgtaaatccgtccagccaaccagtgaggagcggattcctaaaactatcgagatcaaatcaatcactcacgacatcgaggaaaagggcgtccgcatgaagctgaccgtgattgacactcccggtttcggagaccacattaacaacgagaactgttggcagcctatcatgaaatttataaacgatcagtacgagaagtacttgcaggaggaagttaatataaatcggaagaagcgcatccccgacacacgagtccattgttgcctgtatttcatccccgctacagggcacagtctaagacccttggatattgaattcatgaagcgcctcagtaaagtggtgaacatcgtcccagtaattgcaaaagcagacacactgaccctggaggagagagtgcacttcaagcagagaatcacagcagacctattgagcaatggcattgacgtgtaccctcagaaggagtttgatgaggattccgaggaccggctggtgaacgagaaattcagagaaatgatccccttcgccgtggtggggagcgaccatgaataccaggttaacggcaagaggatcctagggcgcaagactaagtggggcaccatcgaagtggaaaacactacacactgcgaatttgcctacctgcgcgacttgttgataagaacacacatgcagaacatcaaagatattacctcaagcatacacttcgaagcttatcgagttaagcgcctcaatgaaggatcttcggccatggccaatggcatggaggagaaggagcccgaagcacccgagatgtag

SEQ ID NO: 133802 - DNA, 1089 bp, synthetic construct
  misc_feature 1..1089: note = Description of Artificial Sequence: Synthetic coding sequence
  source 1..1089: mol_type = other DNA
atggcaggagccgggtgcaccggcacctggagctggctgtgggggactgcaaccgaagccgctcccagttgcgtcggtgatatggcggacaccccaagagatgcaggtcttaagcaggcccctgcttcccgcaacgagaaagcacccgttgacttcggctacgtggggattgattccatcttggagcagatgcgcaggaaggctatgaagcagggatttgaattcaatataatggtagtgggacagtcaggtctgggcaagagcaccctcattaatacacttttcaaatctaaaatttcaaggaaatctgtgcaaccgactagcgaggaaagaatccccaagacaatagaaattaagtctattacccatgacattgaagaaaagggcgtccgaatgaagctgaccgtgatcgatacacctggatttggcgatcacataaacaacgaaaactgttggcagcctatcatgaaattcatcaatgatcagtacgaaaaatacctgcaggaggaggtgaacatcaatagaaaaaaacggataccggatacgagggttcactgctgcctgtactttattcctgcgactgggcattcactgcgcccgcttgacatcgagttcatgaagcggttgtcaaaggttgttaacatagtgccagtgattgcaaaagccgatacccttacccttgaggaaagagtccacttcaaacagagaataactgccgatctcctgtcaaacggcatcgacgtataccctcagaaggagttcgacgaggacagcgaggatagattagtgaacgaaaaatttagagaaatgatcccctttgccgtggtgggatcggaccacgagtatcaggtgaacggcaagcgcattttgggtcggaagacaaagtggggaacaatagaagtcgaaaatactacccattgcgagtttgcatacctaagggatttgctcatccgcactcatatgcagaacatcaaggacataacaagtagtattcacttcgaggcttatagggtcaagcggcttaacgagggttctagcgctatggcgaatggtatggaagaaaaagagcccgaagctccggagatgtag

SEQ ID NO: 133803 - DNA, 582 bp, synthetic construct
  misc_feature 1..582: note = Description of Artificial Sequence: Synthetic coding sequence
  source 1..582: mol_type = other DNA
atgacattgtgtccccaggcttggctccctgaaggaagcgaagaacagctccgctgtgcagaccatccctcatgtggagttctgtcagccggcccatgggggggcggacaggcgtcacacctccagaggtctcccgtcggatgtaccctgccctctatcccgattggcccagtgccatggtcagtatctgagccacggggagagtgtagccctcccggcgctcccgggccacctgctcgacatatggtgtggcctagcctctccccttacccctgccctgcccctaagggtcgaaaactgcagggaccactgcctcccaccgcccaacccttacaggctccgtggcaactcccactcctcgagcaaaaagtccccctcagccagccaagcgctgactgctggccggacgcaggcactggatggaatgaaggtggtgtgttcatctcgctgccgtcccccagtcacgctaccccagctcccactggcctgcaggtgcttctgatgaggtgggacttgatcgaggataagaaggagggtgaaatgacaccaactccgagttctccgtccttcgaaaaggtgtag

SEQ ID NO: 133804 - DNA, 1071 bp, synthetic construct
  misc_feature 1..1071: note = Description of Artificial Sequence: Synthetic coding sequence
  source 1..1071: mol_type = other DNA
atggccatgtcctatgtgaaggatgacatcttcagaatatatattaaggaaaagaaagaatgcaggcgagaccacagaccgccttgcgcccaggaggcccctaggaatatggtccatcccaacgtgatttgcgatggatgtaatggccctgttgtggggacaaggtacaagtgctcggtttgccctgactatgacctgtgcagcgtgtgtgagggcaaaggactccataggggtcacacaaaactggcctttccctctccattcgggcatctaagcgagggttttagtcattctaggtggctccgcaaagtcaaacacgggcatttcggatggccggggtgggagatgggaccgcccgggaactggtcgccaagaccgccccgcgccggagaggccaggcctggccccactgcggagagcgcatctggtccttctgaagacccatcggtcaatttcttgaaaaatgttggtgaaagcgtggctgccgcactgtcgccactcggaatcgaggttgatatagacgtagagcacggcggaaaaaggtcgagattaactcccgtgtctccagagtcatcaagcacggaggagaaatctagctcccaaccgtctagctgctgctccgacccaagcaagcctggtgggaatgttgagggggccacacagtctctggcagaacagatgcggaagattgcgctggaatcagagggccggccagaggagcagatggagtccgataattgttccgggggcgacgacgactggacacatctgtcgagcaaggaagtggaccctagcactggtgaactccagagcctccaaatgccagaatccgaaggtccaagcagcctggacccctcccaggaggggcctactgggctcaaggaagccgcgctttatccgcatttaccgccagaagccgatcccagacttatcgaaagcctttctcaaatgctgtctatgggcttcagtgacgagggcgggtggcttacaaggctactccaaactaaaaattatgatattggcgcagccctcgatacaatccagtactccaagcaccccccacccctgtag

SEQ ID NO: 133805 - DNA, 1071 bp, synthetic construct
  misc_feature 1..1071: note = Description of Artificial Sequence: Synthetic coding sequence
  source 1..1071: mol_type = other DNA
atggccatgtcatacgtcaaagacgacatcttccgtatttacataaaggaaaagaaagaatgccgccgtgaccatcgccctccgtgcgcccaggaggcgcccagaaacatggtgcatcctaacgtaatctgcgatgggtgcaacggcccggtggtgggaacccgttataaatgttccgtgtgccccgactacgatctctgttctgtctgcgaggggaaaggactgcatcgcggacacactaagttggctttcccgagccctttcggtcatctgtctgaaggtttttcacatagccgctggcttagaaaggtaaagcacggccacttcggctggcccgggtgggaaatgggtccgcccggcaactggtcccctcgccccccacgggctggggaggcacggcccggacccaccgctgaaagcgcgtcagggcccagcgaagatccgagcgtgaactttttgaaaaatgtgggagagagcgtggcagccgccctcagtccgctcgggatcgaggtcgacatcgatgtcgagcacggcggaaagcgcagcagattgacccctgtctcacccgagtctagcagtactgaagagaagtcctcttcccagcccagctcttgctgctccgatccctctaaaccgggcgggaacgttgaaggtgcaactcagtcgctggccgaacagatgcggaaaatagctcttgaatcagaaggacgacccgaggagcagatggaatcggataattgcagcggaggagatgatgattggacgcacctgtccagcaaagaggtggatcctagtaccggcgaactccagtcactccagatgccagaatccgagggaccttcttcgttagaccccagtcaggagggccctacaggtctcaaggaagccgccctatacccccatctgcctcctgaagccgaccccaggttgatcgagagcttatcccagatgctaagcatgggtttctcagatgaggggggctggctcacgagattgctgcagacaaagaattatgacatcggcgccgccctcgatactatccaatacagtaaacacccccccccgttatag

SEQ ID NO: 133806 - DNA, 1323 bp, synthetic construct
  misc_feature 1..1323: note = Description of Artificial Sequence: Synthetic coding sequence
  source 1..1323: mol_type = other DNA
atggccagccttactgtaaaggcctatctgctggggaaggaagacgccgcccgcgagatccggcgtttcagcttctgctgttccccagagcctgaggccgaggctgaggctgctgccggtcctggcccttgtgaacgtctgctgagcagggtcgctgctctgtttccagcactgcgacctgggggtttccaggcacactatagggatgaggacggcgatctagtggccttcagtagcgatgaagaactgaccatggccatgtcatatgtcaaagacgatatctttcgaatttatattaaagaaaagaaggaatgtcggagggaccataggccgccatgtgcccaggaagcgccacggaatatggtccatccgaatgtaatctgcgacgggtgcaatggcccagtggtgggcacaagatacaagtgtagtgtctgccctgattatgacctctgttcagtctgcgaaggcaaagggcttcaccgaggacacaccaaactagcattcccatccccattcggacacctcagcgaaggcttcagccacagcagatggcttcggaaggtgaaacacgggcacttcggttggcctgggtgggaaatgggacctccgggcaattggagtcccagacctccccgtgccggagaagcgcggcccgggccaactgccgaaagtgcctctggcccatccgaagatccctccgtcaacttccttaagaatgtaggggaatccgttgcagccgccttgtccccgctcggcatcgaagttgatatagacgtcgaacatggcggtaagaggtccaggttgactcctgtctcaccagagagctcttccaccgaggaaaagagctccagccagccaagctcgtgttgttcagacccatcgaaacctggcgggaatgtggagggcgcgacccagagcctcgccgagcagatgcgcaaaatcgctctggagtctgaaggacgacctgaagaacagatggaaagtgacaactgctcaggcggtgacgatgattggacgcacctgtcctccaaagaagtggacccatccactggcgagctgcaatcactgcagatgcccgaatccgaagggccttcctctctcgatccctcccaagagggccccaccggcttgaaagaggctgcactctacccccacctgccccctgaagcggacccccgattgatagaatctctttcacagatgctttccatgggtttttctgatgaaggaggttggcttactcgcctcctccaaaccaaaaactatgacataggcgctgcccttgataccatccagtatagtaaacacccaccgccactgtag

SEQ ID NO: 133807 - DNA, 1071 bp, synthetic construct
  misc_feature 1..1071: note = Description of Artificial Sequence: Synthetic coding sequence
  source 1..1071: mol_type = other DNA
atggcaatgtcgtatgtcaaggacgacatcttcagaatatacattaaagagaaaaaagagtgcaggcgagatcaccgacccccttgcgctcaggaggcaccacggaatatggttcaccctaatgttatttgcgatgggtgtaacggacccgtggtcgggacacgatacaagtgttccgtctgccccgattatgatctgtgctctgtctgcgagggcaagggtctgcatagaggacacaccaagcttgcttttccaagcccattcggtcatctgtctgaaggattttctcatagtcgctggctgcggaaggtgaaacacggccacttcggctggccaggatgggaaatggggcccccaggtaactggtctcctcgtccacccagagccggggaagcccgccctggccccaccgccgagagcgcctctggtccctcggaggatccctccgttaattttctgaagaacgtgggagagagtgtcgccgctgctctctcgcctttgggcatcgaagtggatatcgacgtggagcacggagggaagaggtcccgcctcacccctgtgagccccgaatcctcatcaacagaggaaaaatctagtagccagccatcttcctgctgctctgatccttcaaagccgggcggcaatgtggaaggagctacacaaagtcttgctgagcaaatgcggaagattgctctagaatcagaaggccggcccgaggaacaaatggagtcagacaattgcagcggcggcgacgatgattggacccacctcagtagcaaggaggtggatccgagcacaggtgagctccaatcgctgcagatgcctgaatcagaggggccatcttctctggaccctagccaggaaggcccaacggggctcaaggaagcagcgctgtatccgcatttgccaccagaggcggacccccgtcttattgagtccttgagccaaatgctgagcatgggttttagcgacgagggaggctggctgactagactgcttcagactaagaattatgatattggggcggccctggacaccattcagtactccaaacacccgcctccactctag

SEQ ID NO: 133808 - DNA, 423 bp, synthetic construct
  misc_feature 1..423: note = Description of Artificial Sequence: Synthetic coding sequence
  source 1..423: mol_type = other DNA
atggcaatgagttacgtcaaagacgatatttttagaatttacattaaggagaagaaagagtgccggcgcgatcacaggccgccctgtgcgcaagaggctcccaggaatatggtccacccaaatgtaatatgcgatggttgtaatgggccagtagtcggtactaggtacaagtgctcagtctgccctgattatgacctgtgctccgtgtgcgagggcaagggtttacatagaggtcacactaagctcgctttcccaagtccattcgggcatctgtcagaagggttcagtcactcacggtggctgcgtaaggttaaacacggccatttcggatggcctgggtgggagatgggcccacctgggaattggagcccaaggccaccacgggcaggggaagctagaccaggtcccaccgctgaatcttag

SEQ ID NO: 133809 - DNA, 891 bp, synthetic construct
  misc_feature 1..891: note = Description of Artificial Sequence: Synthetic coding sequence
  source 1..891: mol_type = other DNA
atgactagctccgagagcaccttgaagaggaaaaagtctgccggtgggactactgcccaccgggtcctcagacgtcgtccatttggccatctgagtgagggattctctcatagccggtggcttcgaaaagtcaaacacggccattttggctggccgggttgggagatgggtcccccggggaattggagccctaggccaccacgtgctggggaggcacgacccgggccaacagccgaaagcgcttccggcccctccgaagatcctagcgtgaatttcctcaagaatgtgggggaaagcgtggccgcagccctatctccacttggcatagaggtcgatatagatgtagaacatggaggaaaaaggagccgtctcactccagtgtctccagaatcctcctccactgaagagaaaagctcctctcagcccagctcttgctgtagcgatccatctaaacccgggggaaatgtggaaggcgccacacaaagtttggctgaacagatgcgtaaaattgccctggaatcagagggccgcccagaggagcagatggaatccgacaactgtagcggcggcgacgacgactggactcatctgagttctaaggaagtagacccttcaaccggagaattgcagtcactgcagatgcctgaatcagaaggaccatcctctttggatccatcacaggagggtcctacaggacttaaggaggcagcactgtaccctcatttacctccggaggccgaccctcggttaatagaatccctgtctcaaatgctatccatgggctttagcgatgaagggggttggctcactcggctcctgcagaccaagaactatgacatcggagcggcgctagatactattcagtactctaagcacccacctcccctttag

SEQ ID NO: 133810 - DNA, 504 bp, synthetic construct
  misc_feature 1..504: note = Description of Artificial Sequence: Synthetic coding sequence
  source 1..504: mol_type = other DNA
atggcaatgtcctacgtcaaagacgatatcttccgcatatacattaaggaaaagaaagagtgtcggagggatcacagaccaccctgcgctcaggaagccccgcgtaatatggtgcaccctaatgtgatctgcgatgggtgcaacgggcctgttgtcggcaccagatacaagtgctccgtctgtccggactatgacttgtgctcagtgtgcgagggaaagggcttgcatagaggccatactaagctcgcctttcctagcccttttgggcacttgagcgagggcttttctcattctcgatggttgaggaaggtgaagcatgggcacttcgggtggcctggttgggagatgggccctcctgggaattggtcacctcggccaccgcgagcaggcgaagcccgtcctggccctacagcagagtcggcctctggcccatctgaagacccgtcagtgaactttctaaaaaacgtgggagaatcagtcgctgcagctcttagccccctttag

SEQ ID NO: 133811 - DNA, 477 bp, synthetic construct
  misc_feature 1..477: note = Description of Artificial Sequence: Synthetic coding sequence
  source 1..477: mol_type = other DNA
atgatgcaaaagttgctgaagtgcagccgattggtgctggctcttgcgctaattttagttctggagtccagcgttcagggttaccccacacggagagcacggtaccagtgggtaaggtgcaatcctgatagtaactctgctaactgcctggaagaaaaggggcccatgttcgagctactgcctggcgaaagcaacaagattcctaggctgcggacggatctttttcccaaaacacgaattcaggacctgaacaggattttcccattgtcagaggattacagtggctcgggctttggtagcgggtcaggttcagggagtggttccggcagcggcttcctgaccgagatggagcaggactaccagctcgtggacgagtccgacgctttccacgataatctgcgctcactggatagaaatctaccttctgatagccaagatctcgggcagcacggccttgaagaggattttatgttatag

SEQ ID NO: 133812 - DNA, 987 bp, synthetic construct
  misc_feature 1..987: note = Description of Artificial Sequence: Synthetic coding sequence
  source 1..987: mol_type = other DNA
atgatgtctggggaacccctgcacgttaagacacccattcgcgatagtatggctctatctaagatggctggtacatccgtatacctcaaaatggactcagcacagcccagtgggtcctttaagattagggggattggtcacttttgtaaaaggtgggcaaaacaaggctgtgcacacttcgtgtgttcaagcgccggaaacgccggtatggcggccgcttatgcagcgagacagctgggtgttccagcgacaatcgttgtcccaagcaccacaccagctctcacaatagagcgccttaagaacgaaggcgcaacggtgaaagtggtgggcgagttactggacgaagctttcgagctagccaaggccctggcaaagaacaaccctggatgggtttacatccccccattcgacgatccgttaatttgggaggggcacgctagcatcgttaaggaactgaaggaaactctctgggagaagcccggagcaatcgccctgagcgtgggaggcggaggcctgctgtgtggcgtggtgcagggtctccaggaggtcggatggggtgatgtcccagtgattgcaatggagactttcggggcccacagcttccatgctgctacgacagctggtaagcttgtttcattaccaaagattacgagtgtggccaaggctctcggggtaaaaacagttggggcccaggcgctcaaactttttcaggaacatcccattttctcagaggtgatttctgatcaggaggcggtagcagctattgagaaatttgtggacgatgaaaaaattctcgttgaacccgcctgtggagcagccctggccgctgtctattctcacgtgatccagaagctccagctcgaggggaatttacggacccctctgccctccctcgttgtgattgtatgtggaggatctaatattagccttgcccaactgagagctctgaaagaacagctcggaatgacaaaccggcttcccaaatag

SEQ ID NO: 133813 - DNA, 657 bp, synthetic construct
  misc_feature 1..657: note = Description of Artificial Sequence: Synthetic coding sequence
  source 1..657: mol_type = other DNA
atgatgagtggagagcccctgcacgtgaagacacccatccgagactcaatggctctgagtaaaatggccggcacatccgtgtacttgaagatggattctgcccaaccctcaggctcattcaagatcagggggatcgggcacttctgtaaacgatgggctaagcagggctgcgctcacttcgtgtgctcatcagctggaaatgccggaatggcagccgcatacgcagcccgccagttgggagtgcccgcaaccattgtagtcccaagcaccactcctgctctgaccattgagcggctgaagaacgagggtgccacagtcaaggtggttggggagctgctggatgaagcttttgagctcgccaaagctctggcaaagaataatcccggatgggtgtacataccgccatttgacgacccactcatttgggaagggcacgccagtatagtaaaggaactcaaggagaccttatgggaaaaaccgggcgcaatcgcgctgtctgtaggcgggggagggctattgtgtggagttgtacagggcttgcaagaagttggatggggtgatgtgccagtaatagcaatggagacttttggcgcacattcattccacgcagccacgacggcaggcaagctggtgtccttgcccaagataacgaggtag

SEQ ID NO: 133814 - DNA, 1452 bp, synthetic construct
  misc_feature 1..1452: note = Description of Artificial Sequence: Synthetic coding sequence
  source 1..1452: mol_type = other DNA
atgacgatgccagtcaacggcgcccataaggacgcagatctttggagcagccacgacaagatgcttgcccaaccactgaaagacagcgacgtggaggtttataacatcattaaaaaggagagcaacaggcaaagagttggtctggaattgatcgcttccgaaaatttcgctagccgcgcagtgctcgaggcactaggcagttgtctcaataataagtactctgaagggtatcccggtcagcgatactacggtggaaccgaattcattgacgaactagaaacgctgtgtcagaagcgcgctctgcaggcctataagctggaccctcagtgttggggcgtaaatgttcagccttatagtgggtcccccgcaaactttgcagtttacaccgccttggtcgaaccacacgggcgaataatgggtctggacctccctgacggtggacatttaacacacggcttcatgacggataaaaagaaaatctccgccacctcaatcttctttgaatctatgccgtataaggtgaaccccgacaccggctacattaattatgaccaactggaagaaaacgcaagactgttccacccaaagctgatcatcgctggcacctcgtgttactcccgaaatctggagtatgcccgcttgcggaaaattgctgatgaaaacggcgcctacctgatggcggacatggcccatatttcagggctcgttgcggcaggggtcgtcccatccccttttgaacactgccatgtggtgaccacaacaacacataagaccctgaggggatgcagggcaggaatgatcttttatagaaagggcgtaaagtctgttgaccccaaaacgggcaaggagattctgtataacttggagagtttaatcaacagcgccgtgtttcccggtctccaggggggaccccataatcatgctatagctggcgtggctgtagcactgaaacaggcaatgactctggagtttaaagtgtaccagcaccaggtggtggccaattgccgcgccttgtccgaagcactgactgaactggggtataagatagtgaccggtgggtcagacaatcatctgatcctggtggatctgcggtcaaagggcacagacggcggtcgggctgagaaagttcttgaagcttgttctatcgcctgcaataagaacacttgccccggcgataggtcagccctgcgcccttctggtctgcgcttgggcacccccgccctgacttcacgcgggctgctcgaaaaagattttcaaaaggtggcccactttatccatcggggtattgagctaactctgcagattcagtctgatactggcgtgcgcgctactctaaaggagttcaaggagcgtctggccggtgataagtatcaggccgcagtgcaggctcttagggaagaggtggaaagcttcgcctctctgttcccactgccaggcctgcccgacttttag

SEQ ID NO: 133815 - DNA, 378 bp, synthetic construct
  misc_feature 1..378: note = Description of Artificial Sequence: Synthetic coding sequence
  source 1..378: mol_type = other DNA
atgcggtacctgcttcaggtcgcccagctggtctggctgactgtggacagtcggggaatcggcggtacgcttgaccacgccggtttctctatttgcatcttcaccgtccccccccttagtttcttcggactgtgcgaggcgcaaaccttcggactcagcgggtccaagtccccggcattgcatcggtactacggaggaactgagttcatcgatgagctcgagaccctctgccagaaacgagctctgcaagcctacaaattggatccccagtgttggggagtgaatgttcccactcaggttctggtctccagcatatggccaggtgcagcaagcagttgtgcctcccccagagccgatatgcatcaggaagagtcttag

SEQ ID NO: 133816 - DNA, 1212 bp, synthetic construct
  misc_feature 1..1212: note = Description of Artificial Sequence: Synthetic coding sequence
  source 1..1212: mol_type = other DNA
atgacgatgcccgtgaatggggcacataaagacgccgatctctggtcctctcacgacaaaatgctcgctcagcccctgaaagattccgatgtggaggtgtacaacatcataaaaaaggaatcaaatagacaacgtgtaggattggaactgattgcttccgagaacttcgcaagtcgggctgttctggaggccctggggtcctgtttgaataataagtacagtgagggataccctggacaacgatattatggaggcactgaatttattgacgaattggagactctctgtcagaagagggccctccaggcgtacaaactggacccccagtgctggggcgtcaacgtgcagccttactccggaagccccgccaattttgctgtgtacacagcactcgtggagccccatggcaggatcatgggcctggacttaccagatgggggccatcttactcatggatttatgacggataagaagaagattagcgctacaagtattttcttcgagtccatgccctacaaagttaatccagacaccggatatattaattatgaccagctcgaggaaaatgctaggctgttccatcctaaattgatcatcgccggtacctcatgttactcccgcaatctggagtacgcccgccttaggaaaattgccgatgagaatggcgcgtacctgatggctgatatggctcacatttccgggctggtcgccgctggggtggttccaagtccattcgagcattgccacgtagttacaactaccacccacaagacactaagaggctgtcgtgccggcatgatcttttatcgaaagggcggctcagacaatcacctgatcctggtggatctgcgctccaaggggaccgatgggggcagagcggagaaagtgttggaagcctgttccattgcctgcaataaaaacacctgcccaggcgaccgatcagccctgagaccatccggccttaggctgggaaccccagccctcacgagccgcggccttctggaaaaagatttccagaaggtggctcattttattcacagaggcatcgagctcaccttgcagatacagtccgacactggcgtgcgagctaccctcaaggagttcaaagagcggctggctggggacaaataccaggcagccgtacaagcactccgtgaggaagtggagtctttcgccagtctgtttcccctccccggactgcccgatttttag

SEQ ID NO: 133817 - DNA, 1335 bp, synthetic construct
  misc_feature 1..1335: note = Description of Artificial Sequence: Synthetic coding sequence
  source 1..1335: mol_type = other DNA
atgactatgccggtaaacggagcacataaggatgccgacttatggtcctcccacgataagatgctggcccagcctctaaaggatagtgatgtggaggtgtacaacattattaagaaggaatccaacagacaaagagttggactggagctcatcgcaagtgagaattttgcctcacgcgcggtgctggaggctttggggtcatgtttgaataataaatatagcgagggctacccggggcagcggtactacggaggcaccgaattcattgatgagctggaaaccctctgtcagaaacgagcccttcaggcctataagctcgaccctcagtgttggggggtgaatgtgcagccttactccggatcacctgcaaactttgccgtgtatacagcgctggtagagccacatgggaggataatgggattggacttacctgacggaggacacttaacacacggcttcatgacagacaagaaaaaaatcagcgctactagtatattcttcgagtccatgccgtacaaggtaaaccccgataccgggtacataaactacgatcagctggaagagaatgctcgcctctttcatccgaaactcataattgctgggactagctgctattcgagaaacctggaatacgctcgtctgagaaaaatcgcagatgagaatggcgcctatctgatggccgacatggcccacatctccggactagtggccgctggcgttgtgccctccccattcgaacactgccacgtggtgaccacaaccacccacaaaacgctgagaggctgtagggcaggcatgatcttctatcgcaagggggtcgccgtggctctgaaacaggctatgaccctggagtttaaagtgtaccagcatcaggtcgtggctaactgtagagctttgtccgaagctctgactgagcttgggtacaagatcgttactggtgggagcgataatcatcttattctggtcgacctcagatcgaaagggactgatggaggcagggctgagaaggtcctggaagcatgttccatagcctgcaataaaaatacatgtcccggagaccgctccgctttaaggcccagcggcttacgtctgggtacccctgccctgaccagccgcgggcttctagaaaaagatttccagaaggtggcacacttcatccaccggggaatcgagcttactctacagatccagtccgatacgggcgtgagggcaactctgaaggagttcaaagagcgcttagctggcgacaagtaccaagctgctgtccaggccctcagggaggaggtggaaagctttgcatctctctttccgctgccaggactgcctgacttctag

SEQ ID NO: 133818 - DNA, 285 bp, synthetic construct
  misc_feature 1..285: note = Description of Artificial Sequence: Synthetic coding sequence
  source 1..285: mol_type = other DNA
atgactatgcctgtgaacggggcccataaagacgcagacctctggagtagccatgataagatgttggcccaaccactaaaagactcggatgttgaggtttacaacattataaaaaaggaatctaaccggcagagggtcggactggaattgatcgcctccgaaaactttgccagccgtgccgtcctggaggccctgggaagctgtctgaacaataaatatagcgaaggatatcctggtcagagatacgtcaacatcttcaaggggctggtcctgactcagtcttag

SEQ ID NO: 133819 - DNA, 777 bp, synthetic construct
  misc_feature 1..777: note = Description of Artificial Sequence: Synthetic coding sequence
  source 1..777: mol_type = other DNA
atggctgatatggcccatatcagcggtcttgtggctgcaggcgtggtgccgtcgccctttgaacactgccacgtagtcaccacaaccacacataaaactttaaggggatgtcgggctgggatgatattttaccgcaagggcgtcaaatctgtggacccaaagaccgggaaggagatcctgtataatctggaatcccttattaattccgccgttttccccggacttcaaggtgggcctcataatcatgccatcgccggcgtggccgtggccctgaaacaggccatgacactcgagtttaaggtttatcagcatcaggttgtagccaactgcagagcactgagcgaggctttgacagagctgggctataaaatcgtgacaggcggttctgataatcacttgatactggttgaccttcggagcaaaggaaccgacggagggagggctgaaaaagtgctggaagcctgctccatcgcttgcaataagaatacctgtccgggcgaccgctcggcgctccggccttcaggtctcagactcgggactccagccctgacaagtcgaggcctgctggagaaggactttcagaaagttgcccattttattcatagaggaattgagttaacacttcagattcaaagcgacaccggggtgcgcgctacactgaaggagtttaaagaaaggctggccggggataagtatcaggctgccgtgcaagctctgcgggaagaggtcgaatcattcgccagcctatttcctttgcccggcctgcccgatttctag

SEQ ID NO: 133820 - DNA, 1341 bp, synthetic construct
  misc_feature 1..1341: note = Description of Artificial Sequence: Synthetic coding sequence
  source 1..1341: mol_type = other DNA
atgacgatgcccgtgaacggggcccataaggatgcagacctctggagttcccatgacaagatgctggcacaaccactcaaggattcggacgttgaagtgtataatatcattaaaaaggaaagcaacaggcagagggtgggactggagctaatcgccagcgaaaacttcgcatcacgcgcagtgctagaagctcttggttcatgccttaataacaagtatagcgaaggatatcctgggcagcgatactatggtggcacggagtttatcgacgagctcgagaccttgtgtcaaaaacgcgccctacaggcttacaaactggacccacagtgttggggcgtgaatgtgcagccatattcgggaagcccggccaattttgccgtgtatacagccctggtggaaccacacggacgtattatgggactggacctccccgacgggggccatctaactcatggctttatgaccgataaaaaaaagattagcgccacctccatattcttcgagtcaatgccctacaaggtaaacccagacacaggctacattaactatgaccagcttgaggaaaacgctaggctcttccatccaaagctcattattgctggaactagctgctattcaaggaacctggagtacgcccgcctcaggaagatagcggatgaaaacggcgcctacctgatggctgacatggctcatatttctggcttggtggcagctggagtggtacccagccccttcgaacactgccacgtggtcactactaccacacataagacattacggggttgcagggcgggcatgattttctaccgtaaaggagtgaaaagcgtggacccaaaaactggtaaggagatcctttataatctggaatcactcattaactccgctgtgtttcccggtctgcagggcgggccccataatcacgcgatcgctggtgtcgcagtcgcgcttaagcaggctatgacactggaatttaaggtctaccagcaccaagtggtggccaactgcagagcactgtctgaggccctcaccgagctcgggtataagattgtaactggtggctccgacaatcacctcatccttgtggacttacgatccaagggaacagatggaggtcgggcggaaaaagtgcttgaggcctgtagtattgcatgcaataagaacacttgcccagggatagagctgacattgcagatacaatccgacacaggagtgcgggctaccttgaaggaatttaaggagcgcctggcaggagataaataccaagcagctgtgcaggcactgagggaggaggtggaaagttttgcgtccctcttccctctgcccggattgcccgatttctag

SEQ ID NO: 133821 - DNA, 1038 bp, synthetic construct
  misc_feature 1..1038: note = Description of Artificial Sequence: Synthetic coding sequence
  source 1..1038: mol_type = other DNA
atggggctggatctgcctgatgggggacacctaacccacggattcatgacagacaagaaaaagatttctgccacatctattttctttgagtccatgccatacaaagttaatccggatactggctacatcaattatgatcagctggaggagaatgcacgcctgttccaccccaagttgatcattgctgggaccagttgttatagtaggaatctggagtacgccagactgagaaaaatagctgacgagaacggtgcttacctcatggccgatatggctcacatttccgggcttgtggctgccggagttgtgccatcaccctttgaacactgccacgtcgtgaccacaacaactcacaagacgctgcgaggctgcagggcaggaatgattttctacagaaaaggcgttaaaagcgttgacccaaagacagggaaagaaattctctataatctggagagcctcatcaattcggcagtcttcccaggactgcaaggcggaccccacaaccacgccattgccggagtcgctgttgcactcaaacaggctatgacgctggagttcaaggtgtatcaacaccaggtggtcgcaaactgtcgagcccttagtgaagccctcaccgagctcggctataagattgtgacaggcggttcggataatcatttaattcttgtcgacctcagaagtaaaggcacggatggcggccgggccgagaaggttctggaagcatgctctattgcctgtaacaaaaacacctgccctggagatcggtccgccctgcggccatcaggcctgagactggggacgcccgcattgacttcgaggggacttctagaaaaggactttcaaaaggtggcccacttcatccacagaggaatagaactcaccctccaaattcagagcgacactggggtaagagccaccctgaaagaatttaaggaacggctggcgggcgataaataccaagccgcggtgcaggccctgcgagaggaggtggagtcttttgccagcctgttccccttgcccggattacctgacttctag

SEQ ID NO: 133822 - DNA, 1515 bp, synthetic construct
  misc_feature 1..1515: note = Description of Artificial Sequence: Synthetic coding sequence
  source 1..1515: mol_type = other DNA
atgctgtatttcagcctgttctgggctgctagacccttgcagagatgtgggcaactcgtgcgcatggcaattcgagcccagcattctaacgctgctcaaacccagacaggagaagcaaataggggctggacaggacaagagtccttgtccgattcagatcccgaaatgtgggagctgctgcaacgagaaaaagacaggcagtgtagaggattggagcttattgctagtgagaatttttgctcccgagcagccctcgaagctctgggctcttgccttaataacaaatattctgagggctaccccggtaagcggtattacggcggggcggaggttgttgacgaaattgagctgttatgtcagcgacgagccctcgaggctttcgatttggatcctgctcagtggggggtgaacgttcagccgtattccggatcccctgccaaccttgcagtatacaccgcgttattacaacctcatgacagaatcatggggttggacctacctgatggcggccatcttacgcacggatacatgtccgatgtgaagagaatttctgctaccagcattttcttcgagagcatgccctataaacttaacccaaaaacggggctgattgactacaaccaattagcgttgactgcacggttgttcaggccgaggctaatcattgctggtacctccgcatacgcacgccttatagattacgcaagaatgcgtgaggtttgtgatgaggtgaaagctcacttattagccgatatggcacatatctctggcttggtggccgccaaggtaatcccttccccttttaaacacgccgatatcgtgaccacaactacccacaagacacttcgcggggccagatcaggactgatcttttaccggaagggcgtgaaagcggtggaccccaaaactggccgcgagatcccctacacttttgaagaccgaattaatttcgctgtgttcccctccctccagggcgggccccacaatcatgccattgccgccgtcgccgtggcacttaagcaggcctgcacccccatgttccgggaatattcactgcaggtactcaagaatgcccgggccatggccgacgcccttctggaacgcggctactctctagtgagtggggggacagataaccacctggttctggtggacctgcgacctaaggggctcgacggcgccagggcagaaagagtcctggaattagtctctatcacagccaataaaaatacttgtcccggagaccgaagtgcaatcacaccaggcgggctgcgtctcggggcacctgccctcaccagtcgccaatttagggaggatgatttcaggcgagtggtggattttatagacgagggagttaacatcgggctggaggtcaagtctaaaaccgccaaactgcaggattttaagagtttcctactcaaagatagcgagactagccagagactggccaacctccggcaaagagttgagcaatttgcccgtgctttccccatgccaggctttgatgagcactag

SEQ ID NO: 133823 - DNA, 1227 bp, synthetic construct
  misc_feature 1..1227: note = Description of Artificial Sequence: Synthetic coding sequence
  source 1..1227: mol_type = other DNA
atgggagaacagaggtggtggatgaagctgtcctgctgcgcaagtgctggtccttggaaacctctcacctggattctgcactccggcgagagtatgtcttcacctacacctgggccacaacccacctggccatccactcagcctttttgtaatttgacaaccggtagctggggctggacgtgcccgatgggtgctatctcacccaccgccacatgcctgactagctcaggttaccagccgagaccttcatccagctccttgtgccccattagcagtaccgcactcgcggtgtgcgtgtcagtccagccaaagactggtttaatcgactataaccagttagctctaacagcccgtttgttcaggcccagactgattatcgcaggcactagtgcctacgcacgtctaatcgactatgctcggatgcgagaggtgtgcgacgaagtcaaggcacacttactggcggacatggcacacatcagtggcctcgtcgcggcaaaagttattccatcgccttttaagcatgccgatatagtgacgaccaccacacacaaaactctcaggggagctcggagcggattaatcttttaccgcaaaggcgtcaaagccgtagatccaaagaccgggagagaaattccttacacatttgaggacagaatcaatttcgctgtgttcccttctctccaaggaggcccccataaccatgccattgcggccgttgctgtggcgctgaaacaggcttgtactcctatgtttagggagtattcacttcaggtattgaaaaacgctagggccatggcagacgcactgctcgagcgcggatatagtctggtctcgggcgggactgataaccatcttgtactggtggatctccgccctaaggggttggacggggcccgagctgaaagagtgctcgaactggtgagcataacggcaaacaaaaatacttgtccaggcgaccgatccgcaataacgccaggtgggctgagactaggggcacccgcactgacatcacgccaattccgggaggacgatttccgacgggtggtggatttcatcgatgaaggagtgaatatcggcctagaggtgaagtcgaagactgcaaagctacaggactttaagagctttctgctgaaggactctgaaacatcacagcggctggccaacctccgccaaagagtggagcaatttgccagggcctttccaatgccagggtttgatgaacactag

SEQ ID NO: 133824 - DNA, 1452 bp, synthetic construct
  misc_feature 1..1452: note = Description of Artificial Sequence: Synthetic coding sequence
  source 1..1452: mol_type = other DNA
atggccatccgcgctcagcattccaacgccgcccagacacagaccggtgaggcaaatcgtggatggaccggccaggaaagcctctctgacagtgaccctgagatgtgggagttattgcagcgggagaaggacaggcagtgccgaggcctcgaattgattgcatctgagaatttctgcagcagagctgctctggaggccctcggctcttgcctcaacaacaaatatagcgagggctaccccggcaagcgatattatggcggggccgaggtcgtcgatgagatcgaactcctgtgtcagagaagagcgctggaagcattcgatctggacccagcgcaatggggcgtaaatgtgcagccttacagtggttccccagccaacttggccgtctacacagcattgcttcaacctcacgaccggatcatgggcttggatctgcccgatggcggacatctgacccatggctatatgagcgacgtaaagcgtatctccgcaacctctatattctttgagagtatgccctacaaacttaatcctaagactgggcttatagactataatcagctcgctctgacagccaggctgtttcgccctcgcctcattatcgcaggtacttcggcctacgccaggttgattgattacgcacggatgagagaggtgtgcgatgaggtgaaagcgcatctgctcgcagatatggcacatattagtggactggtggcagcaaaggtgattcctagccccttcaaacacgcagacatcgtcaccactacaacccataagactcttaggggggctcgctcgggactaatattttatcgcaagggcgtgaaagccgtcgatccgaaaacagggagagaaatcccatacacgtttgaggacagaattaattttgccgtatttccgtccctacaaggcggcccacacaaccacgctatcgcagccgtggcggtagccttaaagcaggcgtgtacgccaatgttccgagaatactctttgcaggtgctgaaaaacgctagagcgatggcagacgctttgttagagcgcggctactcccttgtcagtggggggacagataatcatcttgttctagttgatttacggccaaaggggctggacggtgccagagccgagcgcgtgctcgaacttgtgtccattaccgctaataaaaatacgtgcccaggtgacagatcagcaattacgcctgggggcttacgcctcggagcccctgcgctgaccagtagacagttcagggaagacgactttagacgagtggttgactttattgacgaaggggtgaatatcggactggaggtgaaatcaaaaacagctaaactgcaggactttaagtccttcctccttaaagatagcgagacatctcaacgcctggcaaacttgaggcagcgggtagagcaatttgcacgtgcgttccccatgccggggttcgacgagcactag

SEQ ID NO: 133825 - DNA, 1452 bp, synthetic construct
  misc_feature 1..1452: note = Description of Artificial Sequence: Synthetic coding sequence
  source 1..1452: mol_type = other DNA
atggcaattcgggcccagcattccaatgccgcccaaactcagacaggggaagcgaatcggggatggactggccaggagtctttaagtgattctgaccccgagatgtgggagctgctgcagagagagaaggacagacaatgcaggggcctcgaactgattgcctccgagaacttctgctctcgggctgctctggaagcgttgggttcttgtttaaataacaagtatagcgagggatacccaggcaagaggtattatggcggtgccgaagtggtcgatgaaatcgaacttttatgtcagcgcagagctttagaggccttcgatttggaccccgctcagtggggcgttaacgtccagccttactccggaagtcctgccaacctcgcggtttacaccgcgctactgcagccgcacgacagaatcatggggctagaccttccagacgggggacacctaacccacggttacatgtcagacgtaaaaaggatttcagcaacttccatcttctttgagagcatgccctacaaactcaacccaaagaccggacttatcgattacaaccagttagctctcaccgcacgactgtttcgcccacgcctcataatcgcgggcacttccgcttacgcaaggctgatcgattacgctagaatgcgtgaggtgtgtgatgaagttaaggcacaccttctggctgacatggcccacatttccgggcttgtggcagccaaggtcatcccatccccattcaagcatgcagatatagttacaaccaccacccataagaccctcaggggcgctcggagcggcctgattttttataggaagggcgtgaaagcggttgatcctaagactggcagggagattccatatacctttgaggatcggattaactttgcggtgtttccctccttacagggaggtccacataaccatgccatcgccgctgtcgcagtcgcacttaagcaagcctgtactcctatgtttagagagtactcgctgcaagtgctgaagaatgccagggctatggccgacgcactgcttgaaaggggatattctttggtctcaggcgggaccgataatcatctggtgttagtcgacctccggccaaagggattagatggcgcaagagcagagagggtgctagaactggtgtccatcaccgctaacaagaatacatgccctggggatcgctccgccataacaccagggggtctgcgtcttggcgcccctgcactgacatctcgacaatttcgggaagatgattttcgccgggtcgtggatttcatagatgagggcgtcaacatcggattggaggtgaagagtaaaacagctaagctgcaggattttaaatcatttcttttgaaggatagcgagacttctcagagactggccaacctgagacagagggtggagcagtttgcccgtgcctttccgatgcccggatttgacgagcactag

SEQ ID NO: 133826 - DNA, 1452 bp, synthetic construct
  misc_feature 1..1452: note = Description of Artificial Sequence: Synthetic coding sequence
  source 1..1452: mol_type = other DNA
atggctatcagagcccaacactccaacgcggcccagacacaaacaggggaagccaacagaggatggacagggcaggagtccctctccgatagcgacccagagatgtgggaactactgcaaagggagaaagaccgacagtgccgcgggctcgagttgattgcaagtgagaatttttgctctcgggccgctctagaggcactgggttcatgccttaacaataagtacagtgaaggctatcctggtaagcgatactatgggggtgctgaagtcgtggacgagatagagctgctttgtcaaaggagggctctcgaagccttcgacctcgaccccgcgcaatggggggtgaatgttcagccttactccggtagtcccgcgaaccttgcagtttataccgccctgcttcagcctcacgatcggatcatgggtttagacctgcccgacggaggacatttgacacatggatacatgtctgacgttaaacggatttcggccacgtctatattctttgaatcaatgccctataagctcaatcccaagaccggtctaatcgattacaaccagctggccctgaccgctcgactgtttaggcctcgtctcatcattgccggaactagcgcctacgcaaggctaatcgactatgctcggatgagggaagtgtgtgacgaggtaaaggctcatctgttggctgatatggcgcatatcagtggtttggtcgctgccaaggtcatcccctcccccttcaagcacgctgatatcgtgactaccacaactcacaaaactctcaggggtgcgcggtcgggcctgatattctaccggaagggcgtcaaggccgtagatcctaagaccggacgggagatcccgtacaccttcgaggacagaatcaacttcgccgtgtttccatctttgcaaggtgggccacacaaccacgcaatcgcagccgtggccgttgcacttaaacaggcctgcaccccgatgtttcgggaatattctttacaggtcctgaagaatgctagggctatggccgacgctctgctggagaggggatactccctggtgtccgggggaacagacaaccacctggtgctagtggatttaaggcccaaggggctggatggcgcccgggccgagcgtgtgctggaattagtgtctataacagccaataagaacacatgcccaggagacaggtccgccataactcccggtggtcttcgcctcggcgcgcctgccctgacaagtaggcagttccgagaagacgactttaggcgagtggttgattttatcgacgagggagtcaacattgggctggaggtgaaaagcaaaactgccaagctgcaagactttaagagcttcttactgaaagatagtgaaacttctcaacgactagccaatctgcggcagcgcgtcgaacagttcgcaagggctttccccatgcctggttttgatgaacactag

SEQ ID NO: 133827 - DNA, 1485 bp, synthetic construct
  misc_feature 1..1485: note = Description of Artificial Sequence: Synthetic coding sequence
  source 1..1485: mol_type = other DNA
atgctgtacttttccctgttttgggccgctcgaccgctccaacgctgcggtcagcttgtgcggatggcaatccgggcccaacattctaatgccgcacagacacagaccggagaagcaaatcgtgggtggaccggtcaggagtcactctcagacagtgaccccgaaatgtgggaattgcttcagagagagaaagaccgacagtgtagaggcctggagcttattgcttcggagaatttttgctcccgcgctgccctggaggctcttgggtcttgtcttaacaacaaatattcagaggggtacccaggtaagcggtactacggtggggctgaggtagtggacgagattgagctgctgtgtcagagacgagccctggaagcattcgacctggatccagcccaatggggagtgaacgtacagccttactctgggtcccccgccaacctggctgtgtatacagcccttctccaacctcatgaccggatcatgggattagacttgccagatggcggtcacctgacccatggttacatgtctgacgtcaaaagaatatctgcaacttccatcttcttcgaaagtatgccatacaaacttaacttagcactcactgcaagattgttccggccgagactcattatagcagggactagtgcatacgctcgactgatcgattacgcccgaatgagagaggtgtgcgatgaagttaaagcacatctactggccgacatggcacacatcagcggactggttgctgccaaagtgatacccagccccttcaaacacgcggacattgtgactactacaacacacaaaacgcttcggggggcgcgctctggacttattttctatcgaaagggagtgaaggctgtggacccaaaaacaggaagagagatcccgtacacatttgaagatcggatcaactttgcagtctttcccagcctccagggcggaccccacaaccacgctatcgcagctgttgcagtggccctgaagcaggcttgcacccccatgtttcgtgagtactctttacaggtgcttaagaacgcccgggcaatggccgatgcactacttgagagagggtactctctggtgtccgggggcacagataaccatctagtgctagtggatctccgcccaaaggggcttgatggtgcccgggccgaacgggtgttagagttagtgtcaatcacagcaaacaagaacacatgtccaggagaccggagcgctatcacaccaggcggattgcggctgggggcacccgccctgacatcgcggcagttcagggaggatgactttcggcgggtcgtcgatttcattgatgagggggtgaacattggcctggaggtcaagtccaagaccgcgaagctccaggatttcaaaagtttcctgctaaaggattccgagacctcccagagactggctaatctgagacagagagtggagcagtttgccagggccttccctatgcctggttttgacgagcattag

SEQ ID NO: 133828 - DNA, 1422 bp, synthetic construct
  misc_feature 1..1422: note = Description of Artificial Sequence: Synthetic coding sequence
  source 1..1422: mol_type = other DNA
atgggggcggttctcggtgtattttccctggcaagttgggtcccttgtttgtgctcgggggccagttgcctgctgtgcagctgctgccccaatagcaagaattccaccgtgacacgactcatctatgctttcattctgctccttagcacagtggttagctacatcatgcagcggaaggaaatggagacctacttaaagaaaatcccagggttctgcgagggcgggttcaaaatccacgaggctgatatcaatgcagacaaagactgcgacgtcttggtaggttacaaagcagtctataggatttcctttgccatggcaatattcttcttcgtgttctctctcctcatgttcaaggtaaagactagtaaagatctcagggcggcggtccacaatggcttttggttctttaaaatcgctgcactcatcgggatcatggtaggttccttttacatccctgggggttactttagcagcgtatggtttgtcgtgggtatgattggggctgccctattcatcctcatccagctcgtgctgctggttgattttgcacattcatggaatgaaagctgggttaaccgaatggaagaagggaacccccgtctatggtacgccgctcttttaagcttcacctcagctttctacattctgtctattatttgtgttggtcttctgtatacatactataccaagccggacgggtgcactgagaacaagttctttatcagtattaacttaatactgtgcgtggtcgcctcaattatcagcatccaccccaaaatccaggagcaccaacctcgctcaggtttgctccagagctctctaatcacactatacacaatgtatctaacatggagcgccatgtctaatgagccggaccgctcttgcaatcccaatttgatgtctttcatcaccaggatcaccgctccaacactggccccaggaaactccaccgctgtcgttcccacccccacaccacccagtaaaagcggtagcctgcttgactccgacaacttcattggactgttcgtgttcgtcctttgtctcttgtactcatcaattcgtacctccaccaacagccaagttgacaagcttactctcagtggctccgattccgtgatactcggcgatacaacaacctcaggggcctcagatgaagaagacggccagccccgcagggccgtggacaacgaaaaggagggcgtgcaatatagttacagtctattccatctaatgctttgcctggcctccttgtatataatgatgacattgacgtcctggtattcccccgacgctaagtttcaatccatgaccagtaaatggcccgctgtgtgggtcaaaatcagcagctcctgggtatgcttgcttctatacgtctggaccctggtggcaccattggtcctgacctctcgggactttagttag

SEQ ID NO: 133829 - DNA, 1422 bp, synthetic construct
  misc_feature 1..1422: note = Description of Artificial Sequence: Synthetic coding sequence
  source 1..1422: mol_type = other DNA
atgggggcagtcctgggggtgttttcgctcgcctcatgggtaccctgtctgtgttcaggggcaagctgtctgctatgcagctgctgtccaaactctaaaaattccacagttacaaggttaatctacgctttcattctcctcctgagtaccgtggtgtcctacataatgcagagaaaggagatggaaacctatctcaagaaaatccccggattttgcgagggcggattcaagatccacgaagcggacatcaatgctgataaagactgtgatgtgctagtgggttacaaggccgtctaccgcatctctttcgccatggccatcttcttctttgtctttagtctgttgatgttcaaggtcaagacttctaaggatctgagagctgccgtgcataatgggttttggttctttaagattgccgccttaataggaatcatggttggttccttttacataccaggaggctacttttcttctgtctggtttgtggttggcatgatcggggctgcgctttttatccttatacagctcgtcctgctcgtagattttgctcatagctggaacgaaagttgggtgaacagaatggaggagggtaatcccagactgtggtacgccgctctgctgtcatttacttccgctttttatatcctaagtataatctgtgtgggattactgtatacatattacaccaagcccgatgggtgcactgagaataagtttttcattagcattaacctaatcctgtgcgtggtcgcaagtatcatatcaatccaccctaagatccaggaacaccaacccaggtcaggcctgttgcaatcaagcttgatcactctttacacaatgtatctcacatggtccgcgatgagtaatgagccagacaggtcctgcaaccccaatctgatgtccttcatcacacggatcacagccccgaccctggctcctgggaactctaccgcagtcgtgccaacgcccacgccaccatccaagagcggatctctgctcgactccgataactttatcggcctgtttgtgttcgtgctttgccttctgtacagtagtatcaggacttctactaacagccaagttgataaactgactcttagcgggtctgattccgtgatactgggcgacacaacaacaagcggagccagcgacgaagaggacggtcagcctagaagggccgttgacaacgaaaaggagggggtccagtactcttatagcttgtttcacctcatgctctgcctggcaagtttgtatatcatgatgactcttacttcatggtattcccctgacgctaaatttcagagcatgacttcaaagtggcccgccgtctgggtaaaaatctcttcttcctgggtgtgcctactgttgtatgtgtggactcttgtcgctccactggtcctgactagtcgagacttcagctag

SEQ ID NO: 133830 - DNA, 639 bp, synthetic construct
  misc_feature 1..639: note = Description of Artificial Sequence: Synthetic coding sequence
  source 1..639: mol_type = other DNA
gagcaccagccccgatctgggctgcttcaatcttctctcataacgctctatacaatgtatttgacgtggtccgccatgtccaacgaacccgatcgctcctgtaaccccaacctgatgagttttattaccagaataaccgcccctactctggcccctggtaattctacagccgtggtgcctacccctactcctccctccaagagtgggtctctgctggacagcgacaattttatcggtctttttgtattcgtgctttgtcttctttactcatccatacgtacatccaccaactcccaggtagacaagttgaccctgagtgggtcagatagcgttattctgggcgatacaacaacctctggagccagcgacgaagaggatggacagccaaggcgggctgtagataatgagaaggagggggttcagtattcttactcacttttccacctgatgctctgtttggcatctctgtacatcatgatgactttaacctcatggtacagtccagatgccaagtttcagtcgatgactagtaaatggcccgcggtatgggtcaaaatctcatcaagctgggtgtgtctcctgctatatgtgtggacactcgtcgcaccactagtgctgacatctagggactttagctag

SEQ ID NO: 133831 - DNA, 1323 bp, synthetic construct
  misc_feature 1..1323: note = Description of Artificial Sequence: Synthetic coding sequence
  source 1..1323: mol_type = other DNA
atgccccttcaacgctgtctcatttacgcctttattctgctcctatcaacagtagtcagttacataatgcagcgcaaggagatggaaacctacctgaaaaaaataccgggattctgtgagggaggatttaagattcacgaggcggatattaatgccgataaggattgtgacgtgttagtaggctataaggctgtgtatcggatttcattcgcaatggccatcttcttttttgtattcagccttctcatgttcaaggtgaagacctccaaggatctgcgcgccgcagtgcacaatgggttctggtttttcaagatcgcggccctgatcgggatcatggtaggctcgttctacattccaggaggctatttttcttctgtctggtttgttgtcgggatgataggggccgcacttttcatcctcattcagctggtactgttagttgattttgcccattcttggaatgaaagttgggtcaataggatggaggaaggcaaccctaggctctggtatgccgccctcctgagttttacatctgccttctatatactgagcataatttgcgtggggctcctttatacctattacacgaagcccgacgggtgcaccgaaaataaattcttcatcagtatcaaccttatcctttgtgtcgtggcgtccatcatttctatacacccaaaaattcaggagcaccaaccccgctcaggactcctgcaatcgagcctgatcacgctgtacaccatgtaccttacgtggtccgcaatgtcgaacgagcccgatagaagctgcaaccccaatctgatgagtttcatcacaagaatcaccgcccctactttagctcccggcaatagtacagctgtggtgccaactcctacacccccaagcaagagcggctccctgcttgattccgataattttatagggctcttcgtctttgtgctgtgcctgttgtactcctcaatacggaccagtactaatagtcaagtagacaagttaaccctgtccggttccgattcggtcatcctgggagacaccaccacgagtggagcgagtgatgaggaagacggtcaaccacggcgggccgtggataacgaaaaggaaggcgtgcagtacagctatagtctgttccatctcatgttgtgcctggcctcgttgtatattatgatgacccttacttcctggtactcccccgacgccaagtttcagagcatgacctcaaagtggccagccgtatgggtcaaaattagctcctcctgggtttgtctgctgttatacgtatggactctagtagccccgttggtcctcacgtctcgagatttttcgtag

SEQ ID NO: 133832 - DNA, 1257 bp, synthetic construct
  misc_feature 1..1257: note = Description of Artificial Sequence: Synthetic coding sequence
  source 1..1257: mol_type = other DNA
atgcaaaggaaggagatggagacttacctcaaaaaaattcccggattctgcgaaggtggattcaagatacatgaagctgacataaacgcggataaagattgtgatgtcctggtaggctataaagctgtctataggatctcctttgccatggcgatcttctttttcgtcttctccctcctgatgtttaaagtgaagacatcgaaagacctcagagccgccgttcacaatggattttggtttttcaaaatcgccgcattaatcgggataatggtagggtcattttatatccccggcggttacttctccagcgtgtggttcgtcgtggggatgattggcgcggccctgtttattctcatccagttagtgctcctcgtcgactttgcccactcctggaatgaatcctgggtgaatagaatggaagaaggaaatcctcgcctgtggtacgcagctttgctctcattcacttccgctttttatatcctcagcattatctgcgtaggtctgctctatacctactataccaaaccggatggatgtaccgagaacaagtttttcatatctattaacctcattttatgtgtggtcgcatctattatcagcattcaccctaagatacaggagcatcagccaagaagcggcttactgcagtcttctctaattaccctttacacgatgtaccttacctggtcagccatgtctaatgagccagatcgatcttgcaatcccaacctgatgagcttcatcacacgaataaccgctcccacccttgccccagggaatagcactgcagtagtaccgactcccacgccaccttctaaaagtgggtctctgctggattcagacaactttatcgggctgtttgtgttcgtgctttgcctcctgtacagtagcattcggacatctacgaactcccaagtggataaacttacgctgagcggctccgactccgttattctgggtgataccacaacatctggagccagcgacgaagaggacggtcagccaaggagggcagtagataacgaaaaggaaggagttcaatatagttactctctcttccacttgatgctgtgtctcgcgagtctctatatcatgatgaccctgaccagctggtactcccccgacgcaaagttccagagcatgacctcgaagtggcccgccgtgtgggtaaaaatttcttcatcatgggtctgcctgctgttgtatgtgtggacgctggtggcgcctctggtgctgacatcacgtgactttagctag

SEQ ID NO: 133833 - DNA, 1422 bp, synthetic construct
  misc_feature 1..1422: note = Description of Artificial Sequence: Synthetic coding sequence
  source 1..1422: mol_type = other DNA
atggccacggcgaccgagcagtgggtgttagtggagatggtgcaggccctttacgaagcgcctgcctatcatttaattctggagggcatccttattctgtggattatcaggctcctgttctcaaagacttataagcttcaagaacggagcgacctaactgttaaggagaaagaagagctgattgaagaatggcagcccgagcccttagttccaccggtgcccaaggaccacccagccttgaattataatatagtgagcggccctccgagtcacaagacagtggttaacggcaaagaatgtatcaacttcgcatcctttaacttccttggtctgttggacaatcctcgagtgaaggcagccgctctcgcatctctgaagaagtatggcgtgggcacctgtggccctaggggattttacggtacctttgatgtccacctggacttggaggaccgactggctaaattcatgaagaccgaggaggccatcatttattcatatggcttcgccaccatcgcctccgcgattcctgcttattcaaagagaggcgacatcgtgttcgtggaccgcgccgcctgtttcgcaatacagaaagggttacaggcatctagatcggatatcaagctctttaagcataacgacatggctgatctggagaggttgctaaaggagcaagagattgaggatcagaaaaacccacgtaaggcgcgagtcacacgccggttcattgtggtagagggtctgtatatgaatacagggaccatctgtcctctgcccgagttagtgaagctcaaatacaaatataaggctaggatctttctggaggagtcactttctttcggggtgctgggagagcatggaaggggggtcactgagcactacggcataaatattgacgatatcgacttgatctccgccaacatggaaaatgccctcgcttccattggtggtttctgttgcggtaggagcttcgttattgaccaccagcggctgagcggtcagggttattgtttctcagcgtccctgcctccactgcttgccgcagcagccatagaggctctaaatatcatggaggaaaaccctggaattttcgccgtcctgaaggagaagtgtggacagattcataaggccctgcaggggatctcagggttaaaagtggtgggcgagtctctctcccctgctttccatttgcagctggaggaatcaacagggagtcgggagcaggatgttaggcttctgcaggaaatagtggaccagtgcatgaataggtcaatcgcactcacacaggcccgctatttagaaaaagaagagaaatgcctgccgccacctagcatccgcgtcgttgtgaccgtcgagcagaccgaggaagagttggagcgagccgcctctaccataaaggaggttgctcaggccgtgctcctgtag

SEQ ID NO: 133834 - DNA, 432 bp, synthetic construct
  misc_feature 1..432: note = Description of Artificial Sequence: Synthetic coding sequence
  source 1..432: mol_type = other DNA
atggccaccgctaccgagcagtgggtattggttgaaatggtgcaggcgctgtacgaggcacccgcctaccatctcattctggaagggatcctaattctgtggattatccgactcctattctcaaaaacctataagctacaggaaaggagcgatctgacggtgaaggagaaggaggaactaatcgaggagtggcagcccgaaccccttgtccccccggtgcctaaggaccatcccgcactaaactacaacatagtctctggccccccctctcacaagactgtcgtcaacggcaaagaatgcattaattttgcctccttcaacttcctgggactgctcgacaacccccgagtgaaggctgcagcccttgcttcgctgaagaagtatggggttggaacatgcgggccgcgcggtttttatggaaccttcgaatag

SEQ ID NO: 133835 - DNA, 1017 bp, synthetic construct
  misc_feature 1..1017: note = Description of Artificial Sequence: Synthetic coding sequence
  source 1..1017: mol_type = other DNA
atggcaaagtggggggagggtgatccgcggtggattgtcgaggagcgggccgatgccaccaatgtcaataattggcattggactgagcgggacgccagcaactggtccaccgacaagctcaagacactattcctggctgtgcaggtgcagaacgaggagggtaagtgcgaggttactgaggtgagcaaactcgatggagaagcctcaatcaataatcggaaaggcaagctgatttttttttatgaatggagtgtgaagctcaactggactggcaccagcaagagtggcgttcagtataaaggtcatgtcgagataccaaatctgtccgacgagaattccgtcgacgaggtggagatttctgtgagcctggccaaagacgaacctgacaccaatcttgttgctttgatgaaagaagagggggtcaaactattgcgcgaggccatgggcatctacatttcaacactcaagaccgagttcactcaaggcatgattctccccacaatgaacggcgaaagcgtcgacccggttggccagccggcacttaaaactgaggagagaaaagctaaacccgcccctagcaagacacaggcacgtccggtcggcgtgaaaattcccacttgtaagattacgttgaaggagacttttcttacctcaccagaagaactgtatcgtgtgttcaccactcaggagttggtgcaagcatttacacacgccccagccaccttagaagcagatcgcggcggaaaatttcatatggttgatgggaatgtgtccggagagttcacagacttggtgccagagaagcacatcgttatgaaatggcgcttcaagagttggcctgaggggcattttgctaccataacgctaacttttattgataaaaacggcgagactgaattgtgcatggaggggagagggatcccagctccagaagaagagaggacccgccagggttggcagcgctactactttgaaggaatcaaacagacctttggatacggggcaaggctgttctag

SEQ ID NO: 133836 - DNA, 990 bp, synthetic construct
  misc_feature 1..990: note = Description of Artificial Sequence: Synthetic coding sequence
  source 1..990: mol_type = other DNA
atggcaaatcctggcggaggtgctgtgtgcaacggcaagctgcataaccacaaaaaacaaagtaacgggtctcagtcccgaaattgcacgaaaaacggcattgtaaaggaagctcagcagaatggcaaaccacacttttacgataagctcatcgtggaatccttcgaagaggccccgctgcacgtgatggtctttacatacatgggatatgggatcggaacattattcgggtacttacgcgactttctgagaaactggggtatcgaaaaatgtaacgcggcggtggagcggaaggaacagaaggactttgtgcccctataccaggattttgagaatttttacaccagaaacctttacatgaggatacgggataactggaataggccaatatgttccgccccaggacctctttttgatttaatggagcgcgtgtctgacgactataactggacattccggttcacaggaagagttatcaaagatgtgatcaacatgggctcttataactttttaggtctggcggctaagtacgacgagtctatgcggaccattaaagatgttctggaggtatacggcaccggtgttgcttctacgagacacgagatggggaccctggacaaacacaaagaactggaggaccttgtggccaagttcttgaacgtagaagccgccatggttttcggtatgggtttcgccaccaactctatgaacatcccggctttggtgggcaaaggatgcctcattctgtccgacgaattgaaccacacaagtcttgtgctgggagcaagattaagtggcgccacaatcagaattttcaaacacaacaacactcagtcattagagaaattgttaagggacgctgtgatttacgggcagcctcgaacaaggcgcgcttggaaaaaaattttgatccttgtggaaggcgtgtatcgcacctcttggattatttacggcttcacgcggatcgttctcttcatgcttcacccatag

SEQ ID NO: 133837 - DNA, 1659 bp, synthetic construct
  misc_feature 1..1659: note = Description of Artificial Sequence: Synthetic coding sequence
  source 1..1659: mol_type = other DNA
atggccaacccaggtggaggcgccgtgtgcaacggaaagctgcacaaccataagaaacagagcaacggatctcagtcacgtaactgcacaaaaaacggaattgtgaaggaggcacagcagaacggaaaaccgcatttctacgataaactaatcgtcgagagcttcgaagaggcacctctgcacgtgatggtgttcacttacatgggatacgggattggcactctgtttgggtatctccgcgatttcttacgtaactgggggattgaaaagtgtaacgcagcagtcgagcgaaaagaacagaaggattttgtccctttataccaggatttcgagaacttctacacgaggaatctgtatatgagaattcgagacaactggaacaggcccatatgctccgcgccgggtccactgtttgatctcatggagagagtttcagatgactataattggacctttcgctttacgggtagagtgatcaaggacgtgattaacatgggaagctataattttctgggcttggctgcaaagtacgacgagtcaatgagaaccattaaggacgtcctggaggtgtacgggaccggtgtggctagcacccgccacgagatgggtacacttgataaacacaaggagttagaagatctcgtagccaaatttctcaacgtggaagcagctatggtttttggtatgggattcgccacaaattccatgaatatcccggcccttgtgggcaaaggctgtctgattttgtccgacgagctcaatcacacaagcctagtattaggtgccagactctctggagccacgattcggatttttaagcataacaacacccagtcacttgagaaacttctgagggatgccgtcatctatggccagcctcgcactcgtagggcatggaagaagatcctgattctggtcgagggcgtgtactccatggagggcagtattgtccatctgcctcaaattatcgccttaaaaaagaagtataaggcctatttgtacattgatgaggcacattcaattggtgccgtgggccccaccggaagaggggtcacagaatttttcgggctagacccacacgaggtggacgtcttaatgggcacatttaccaagagctttggagctagcggagggtacatcgctggcaggaaggacctggttgactacctgagggttcatagccacagtgccgtatatgcctcctccatgtccccacccatcgctgagcaaattataagatcactgaagctgatcatgggcctcgatgggaccacccagggacttcagagagtccagcagctggccaaaaatacccgttacttccgccagcgacttcaggagatgggattcattatctacggcaatgaaaacgcttccgtggtgccactgttgctctacatgccaggtaaggtggctgccttcgcccgccatatgctcgagaaaaaaatcggcgtagtggtggtcggcttcccagccaccccattagctgaggcgcgcgcccgcttctgcgtttctgccgcccatacccgggagatgctcgacacagttctggaggctctcgatgagatgggagacctcctgcagctgaagtacagcagacacaagaagagcgcacgaccagagctttacgatgaaacctcgtttgagctcgaggactag

SEQ ID NO: 133838 - DNA, 366 bp, synthetic construct
  misc_feature 1..366: note = Description of Artificial Sequence: Synthetic coding sequence
  source 1..366: mol_type = other DNA
taaagccctcccattgccgagcagatcatcagatcgctgaaattaatcatgggcctggacggaaccacacaagggctgcagcgggtgcaacagttggcgaaaaacacccgatacttccgccagcgcctccaggaaatgggtttcatcatttatggaaacgagaacgcgagcgtggtccctctgctattatatatgccaggcaaggtcgccgccttcgctaggcacatgctcgaaaagaaaatcggggtagtggttgtgggcttcccggcaacccccctggccgaggctagggctaggttctgcgtctcagcggcccacacacgagagatgcttgacactgtgatctgctgtgtgatgaagatctag

SEQ ID NO: 133839 - DNA, 420 bp, synthetic construct
  misc_feature 1..420: note = Description of Artificial Sequence: Synthetic coding sequence
  source 1..420: mol_type = other DNA
atggccaaccccggcggcggggcagtatgcaacggcaagctgcacaatcacaagaaacagagtaacgggtcccaaagccgtaattgtacgaagaacgggatcgttaaagaagcccaacagaatggcaagccacacttttatgacaagctaatagtcgagtctttcgaagaggcgccccttcacgtaatggtcttcacctatatggggtatggaattgggaccctgtttggctatctcagggacttcctccggaactgggggatagaaaagtgcaacgccgcagttgaacggaaagagcaaaaagacttcgtcccgttatatcaggatttcgagaacttttatacgcgaaacctttacatgcggattagagataactggaacagaccaatatgcagcgcacccggacccctgttcgattag

SEQ ID NO: 133840 - DNA, 648 bp, synthetic construct
  misc_feature 1..648: note = Description of Artificial Sequence: Synthetic coding sequence
  source 1..648: mol_type = other DNA
aattgcacaaagaatggtatcgtcaaagaggcccagcagaatggaaagccacacttttatgacaagttgattgtcgagagttttgaggaggccccgctccatgtaatggttttcacatacatgggttatggcattggcaccctctttggatatctccgagatttcctgcgtaattggggcatcgaaaagtgtaacgccgccgtggaaaggaaggagcagaaagatttcgtgccactttatcaggactttgaaaatttctacaccaggaacctgtacatgagaattagagacaattggaatcgtccgatctgttccgccccgggccccctgttcgatctgatggagagggtcagcgacgactataactggacctttcgcttcacggggcgggttatcaaggatgttatcaacatggggagctacaactttctgggcctcgccgccaagtacgacgagtctatgcgcaccataaaggacgtcttggaggtatatggcaccggagtggcatcaactcgacatgaaatgggggagtttacatctagttggcagaacgcactgtgcgtcggcggggtgctgcaggccgactcagtgccccaggggccaccatggtcatggaaaatgggaagacattcatcccttttagaatag

SEQ ID NO: 133841 - DNA, 360 bp, synthetic construct
  misc_feature 1..360: note = Description of Artificial Sequence: Synthetic coding sequence
  source 1..360: mol_type = other DNA
atggctttgagtgtgcttagacttgccctgctactcctggcggtcacttttgccggctccgcacggagcggccctggggaacggggccccccagaaaaatctggcttcggctcccaaacaggtggaggcccttgcccagctccaggcggcttgggtgacgcttctttgattccccaatttggtcttttttccaagtatagaacccctaactgttcacagtatcgtttgccaggttgccccagacacttcaatccagtgtgcggttcggacatgtcaacctatgctaacgaatgcacgctgtgcatgaagatccgcgagggcggacataacatcaagattattagaaatggaccctgctag

SEQ ID NO: 133842 - DNA, 405 bp, synthetic construct
  misc_feature 1..405: note = Description of Artificial Sequence: Synthetic coding sequence
  source 1..405: mol_type = other DNA
atggctctcagtgtgttacggctcgcactgctattgcttgccgtgacattcgccggctccgcgagatctgggcccggcgagagggggccccctgagaagtctggctttggctcccagactggaggaggcccctgcccggcaccaggcggtcttggcgacggcactcgagctccagtgacaggcggttctcccgaggatctcccggctagtctcataccccaattcggactgttctctaaatatcggacgcccaactgctctcagtaccgcctgccaggctgtcccagacatttcaatccagtgtgtggaagtgacatgagtacatacgcaaacgaatgtaccttgtgcatgaaaatccgggaggggggccacaacataaagatcatacggaatggcccatgttag

SEQ ID NO: 133843 - DNA, 240 bp, synthetic construct
  misc_feature 1..240: note = Description of Artificial Sequence: Synthetic coding sequence
  source 1..240: mol_type = other DNA
atgaaagtgacaggcatcttcctcctgtctgccctggccctcttgagcctgagtggaaacacgggggctgatagcctagggcgggaggcaaaatgctataacgaactgaatgggtgtacaaaaatttacgaccctgtttgcggaacagacgggaacacatacccaaatgagtgcgttctctgttttgagaatcggaagcgtcaaacttctattctgatacagaagtcgggaccttgttag

SEQ ID NO: 133844 - DNA, 255 bp, synthetic construct
  misc_feature 1..255: note = Description of Artificial Sequence: Synthetic coding sequence
  source 1..255: mol_type = other DNA
atggccctgtcggtgctccggcttgctctgttgctgctagccgtaacatttgcggccagcctgatcccccaattcggactgtttagtaaatacagaacacctaattgcagccagtaccgcctcccgggctgtcctcggcattttaaccctgtttgcgggtctgatatgagcacgtacgcgaacgaatgcacactttgcatgaagatccgcgagggcggccataatattaagatcatccgtaatgggccctgttag

SEQ ID NO: 133845 - DNA, 261 bp, synthetic construct
  misc_feature 1..261: note = Description of Artificial Sequence: Synthetic coding sequence
  source 1..261: mol_type = other DNA
atggccgtgcgtcagtgggttattgcactggcccttgccgccctgttagtcgtagaccgcgaggtgcctgtggccgccggaaaacttccattctcccggatgcctatttgtgaacatatggtggagtctcccacttgttctcagatgtccaacctggtatgcggtaccgatgggctgacctacaccaatgagtgccaactctgccttgcgcgaattaagaccaaacaagatatccagatcatgaaagatgggaaatgttag

SEQ ID NO: 133846 - DNA, 330 bp, synthetic construct
  misc_feature 1..330: note = Description of Artificial Sequence: Synthetic coding sequence
  source 1..330: mol_type = other DNA
atgatacttggtattggcagctctcctcacctgctgtggacccttgaaggcacacacatttggagtctgcttggggacgcctcacacaccgaccgcctgccggaggcgggggccggaaaacttctgtcagaagtgccagtggcagctggaaaactccctttcagccgcatgccgatttgtgaacacatggttgagagccctacatgcagccagatgtcgaatttggtttgcgggacagacggactgacctataccaatgaatgtcagttatgcttagcccgtatcaaaaccaagcaggatatccagatcatgaaggatggcaaatgctag

SEQ ID NO: 133847 - DNA, 330 bp, synthetic construct
  misc_feature 1..330: note = Description of Artificial Sequence: Synthetic coding sequence
  source 1..330: mol_type = other DNA
atgatcctcggcatcggctctagtccccatttactgtggacattagaaggcacacatatctggtccctgcttggggacgcatcgcacaccgatagactgcccgaggctggagcagggaagttgctgagcgaggtccccgtggcagctggtaaactgcctttttctcgaatgcccatctgtgaacacatggttgaaagcccaacctgctcacagatgagcaatctggtttgtggaacagatgggctcacatacacaaatgaatgccagctgtgcctggccagaatcaagaccaagcaagatatccagatcatgaaagacgggaaatgttag

SEQ ID NO: 133848 - DNA, 3195 bp, synthetic construct
  misc_feature 1..3195: note = Description of Artificial Sequence: Synthetic coding sequence
  source 1..3195: mol_type = other DNA
atgaagattgccacagtatccgtcctgctgcctctggcactttgtctgattcaggatgcagcctccaaaaacgaagaccaagagatgtgccacgaatttcaggcattcatgaagaacggtaaactattctgtccccaggacaagaagtttttccagtccctggatggcatcatgttcattaacaaatgcgccacctgtaagatgatcctggagaaggaagctaaaagccaaaagcgggcccgacatctagcacgagctcctaaggcaaccgctcccacagagctgaactgcgacgactttaaaaagggtgaaagagatggcgacttcatatgcccagattactatgaggcagtgtgcgggactgacggaaagacctacgacaataggtgcgctctttgcgccgagaatgcaaaaacaggttcccagataggcgtgaagagcgagggagaatgtaaaagctctaatcccgagcaagacgtctgcagcgcttttcgacccttcgttagggacggcagactgggatgcactcgcgaaaatgacccagtgctgggacctgacggcaagacacatggaaataagtgtgctatgtgcgccgaactcttcctgaaggaggctgagaatgccaaaagagagggggagacgcggatcagaagaaacgctgagaaagacttttgcaaagagtacgagaagcaggtaagaaatggacgactgttctgcacgcgtgagtcagaccccgtgagaggacctgatggcagaatgcatgggaataagtgtgcactgtgcgccgagatttttaagcaaaggtttagcgaagagaatagtaaaacagaccaaaatctgggaaaggccgaggaaaaaaccaaggtgaagagggaaatcgtgaaattgtgcagtcagtaccagaatcaggcaaaaaacggaatactgttttgcacccgcgagaacgaccccattcgcggaccagacggaaagatgcacggtaacctctgttccatgtgccaggcatactttcaggcggaaaacgaggagaagaaaaaggccgaggccagggcaagaaacaagcgcgagtccggtaaagcaacgtcttacgctgaattatgctccgagtatcggaagttggtgcggaatggaaagctggcatgtacaagagaaaacgaccctattcaaggccctgacggaaaagtccacggcaacacctgctcaatgtgcgaagtgtttttccaagcagaagaagaggaaaagaagaagaaggaaggtaagtcacggaacaaacggcaatccaaatctactgcatcttttgaggaactgtgctccgagtaccgcaaaagccgaaaaaacggtcgactgttctgcacgcgggagaatgatcctatacagggccccgacggcaagatgcacggcaacacctgttcaatgtgcgaagcttttttccagcaggaggagagggcccgagctaaggcaaaaagagaagccgccaaagaaatctgctcggagtttagagaccaggtcaggaacggaacgctaatctgcactagagaacacaaccctgtgcgcggccctgacgggaagatgcacggaaacaagtgtgctatgtgtgcttccgtgttcaaacttgaggaagaggaaaagaaaaacgataaagaggagaaggggaaggtcgaagctgagaaagtgaaacgggaggctgtgcaggagctatgctctgagtatcgccactacgtcaggaatgggcgactaccttgtacacgggaaaacgatccaattgaggggcttgacggaaaaatccatggaaatacttgctccatgtgcgaggctttttttcaacaggaggcaaaggaaaaggaacgcgcagagccacgagccaaagtcaaacgggaggctgagaaggaaacgtgcgatgagttccgccgcctgctacagaatggtaagctgttctgcactcgggaaaacgatcccgtgagggggccagatggtaaaactcacgggaataagtgcgcaatgtgcaaagccgtgtttcaaaaggagaatgaagagagaaaaagaaaggaagaggaggaccaaaggaatgcagccggtcacggctcctccggaggcggaggggggaatactcaagatgagtgcgcagagtaccgggagcagatgaaaaacggcagactgagctgtacgcgagaatcagatcctgtgcgcgacgccgatggtaagtcatataataaccagtgtacaatgtgtaaggcgaagttggaaagagaggcggaacgtaagaacgagtattcacggtcccgttcaaatggtacgggcagcgagtctggcaaggatacctgtgacgagtttaggtcacagatgaagaatgggaaactcatctgcacgcgggaatctgatccggtgagagggcctgacggcaaaacccatggcaataaatgcaccatgtgtaaggagaagttggagcgggaggcggcagagaaaaaaaaaaaggaagatgaagaccgctcaaacacaggggagcgaagcaacactggtgaacggtccaacgataaggaggacctctgtagggagttccgatctatgcaacgcaatggaaaactgatctgcacccgggagaataaccccgtcagagggccgtacggtaagatgcacataaataaatgcgccatgtgtcagtccattttcgatagggaggctaacgaacggaagaagaaggatgaggaaaaaagctcttcaaaaccttccaataatgcgaaagacgaatgctctgagtttcgtaactatatacgtaacaatgaactcatttgcccccgagagaacgacccggtacacggcgccgatggcaagttctatactaacaagtgttatatgtgtcgggccgtgtttcttaccgaagccctagaacgagcaaaacttcaagagaaaccaagccacgtccgcgctagtcaagaggaggactctcccgattccttctcttcactggactcagaaatgtgtaaagactacagggtgctccctcgaataggttacttgtgtcccaaggatctaaaacctgtttgcggcgacgacggccaaacatacaataatccttgtatgctgtgtcacgagaatctaatacggcagactaatacacacatcaggagcaccggtaaatgtgaagagtcatcgactcctgggactactgcggcctctatgcctccatcggacgagtag

SEQ ID NO: 133849 - DNA, 3285 bp, synthetic construct
  misc_feature 1..3285: note = Description of Artificial Sequence: Synthetic coding sequence
  source 1..3285: mol_type = other DNA
atgaaaattgcaactgtgtcagtgctgctccctcttgctctgtgccttatccaagacgctgcctcaaaaaatgaggaccaagagatgtgccacgagtttcaggcttttatgaaaaacggaaagctgttctgcccacaggacaagaaattctttcagtcactcgatggcatcatgttcatcaataagtgtgccacatgcaaaatgattttggagaaagaagctaagtctcaaaagagagctagacacctcgcccgggcccccaaggccactgcgcccaccgaactcaactgcgacgatttcaagaagggcgaacgggacggggacttcatttgtccagactactacgaagccgtgtgtggaacagatggcaaaacatatgacaaccgctgtgcactttgcgcagagaatgctaaaaccgggagccagataggcgtgaagtctgagggagaatgcaagtccagtaatcctgagcaggatgtgtgtagcgcctttcgtcctttcgttcgagatggacgccttgggtgtacccgcgaaaatgaccccgtgttagggcctgatggcaagacccatggtaataagtgtgcgatgtgcgctgagctgtttctgaaagaagctgaaaatgccaaacgcgagggcgaaacccggattaggcgcaacgctgaaaaggatttctgtaaagagtacgaaaaacaagtgagaaatgggagactgttctgtacacgcgagagtgaccctgtacgcggtccagacggccggatgcacggtaataagtgtgcgctgtgtgccgaaattttcaaacagcggttctctgaggaaaactctaagacagaccagaacctggggaaagcagaggagaagaccaaggttaagcgggaaatcgtaaagttgtgctcccagtatcagaaccaggccaaaaatggcatcctattctgcactcgcgaaaatgatccaatcagggggccggacggcaagatgcacggtaatctgtgctccatgtgtcaggcatacttccaggcagaaaatgaggaaaagaaaaaagccgaagctcgggcaagaaataagagagaatcaggcaaggccaccagctatgcagagttgtgtagcgaatatagaaaactggtgcgtaatgggaagcttgcgtgtaccagggagaatgatcccatccaaggccctgacggtaaagtgcacgggaatacatgcagcatgtgtgaagtgttttttcaggccgaggaggaggagaagaagaagaaggaggggaagagtcggaacaagaggcaatccaagtcgacagcgtcattcgaagagttgtgcagcgagtacaggaagtcccgtaaaaatggaagacttttttgcacgcgggagaacgacccaattcagggacctgatggtaagatgcacggaaatacgtgctctatgtgcgaagcattcttccaacaggaagagcgcgcgcgcgccaaggccaaaagagaggcagctaaagagatctgctcagaattccgtgatcaggtgaggaacgggacccttatctgtacccgggaacataatcctgtccgtggtcctgacggcaagatgcacgggaacaaatgtgcgatgtgcgctagtgtatttaagcttgaggaggaggagaagaagaacgacaaagaagaaaaaggtaaagtagaagccgaaaaagttaagagagaggccgtgcaggaattgtgttcagaatatcgtcactacgtgcggaatggcaggctcccgtgcacacgggaaaacgaccccatagagggtctggatggcaaaatccacgggaatacgtgttctatgtgcgaggcctttttccaacaggaggctaaggagaaggagagagctgagccgcgagctaaggtgaaaagggaggcagagaaggaaacatgcgatgagttccgacgcctgctacagaacggaaagttattttgtacgcgcgaaaacgatccagtccgaggtccagatgggaaaacacatggaaacaagtgcgctatgtgtaaagccgtttttcaaaaggagaacgaggagaggaagcggaaagaggaagaggatcagcggaatgcagccggtcacggctcatccggtggaggggggggtaacacccaagacgagtgcgccgaatatcgcgaacagatgaagaacggcagactctcttgtacaagggaatctgacccagtcagagacgccgatggcaaaagctacaacaatcaatgcacaatgtgtaaagctaaattagagcgagaagctgagaggaagaatgaatactcccgctcccgatcaaatggcactggatccgagagtgggaaagacacttgcgatgaatttaggtcacagatgaagaacggcaagcttatttgcacaagagagtctgatcccgtccgtgggcctgatggaaaaacacacggaaataagtgcacaatgtgtaaggagaaactggagagggaagccgcagaaaaaaaaaaaaaggaagatgaggacaggtcaaacactggtgaacgctctaatacaggcgaacgctcaaatgataaggaagacctgtgtcgagaattccgaagcatgcaacgtaacggaaagcttatttgtacacgcgagaacaacccggtgcgaggcccttacggaaagatgcacataaacaaatgcgcaatgtgccagtccattttcgaccgagaggcaaacgagaggaagaagaaggacgaggagaagtcttcctcaaagcctagtaacaatgcaaaagaccagtgtcgtcaggtgcaaaacgaggccgaggacgcgaagttcagacagccaggacgttctctcgcctctgtggcccgtatgagcaccgatgaatgctcagagttccggaactacataaggaataatgaactcatttgtcctcgcgaaaacgatcccgttcatggggctgacggaaagttttacacgaacaagtgttacatgtgccgcgcagtcttcctcaccgaggcgctggaacgggctaaactccaggaaaagccaagtcacgtgcgcgctagtcaagaggaggacagtcctgacagcttctccagcctggattccgagatgtgcaaagactatagggtattacccagaatcgggtatctctgccccaaagatctgaagcccgtctgtggggacgatggccagacttacaataacccgtgcatgctatgccatgaaaacctgattcgacagaccaatactcacattcgatctaccggcaaatgcgaagagagtagtaccccgggcacgaccgcggctagcatgcccccttccgacgagtag

SEQ ID NO: 133850 - DNA, 2751 bp, synthetic construct
  misc_feature 1..2751: note = Description of Artificial Sequence: Synthetic coding sequence
  source 1..2751: mol_type = other DNA
atgaaaattgctacagtgagcgtgctgctccctctggcactctgtcttatccaggacgctgccagcaagaatgaggatcaggagatgtgccacgagtttcaagcattcatgaaaaatggcaaattattctgtcctcaggacaagaaatttttccagagtctcgatggaattatgtttatcaacaagtgcgcaacttgcaagatgattctggagaaagaagctaaatcacagaaaagggcgagacacctggcccgcgcaccgaaagcaaccgcgcctaccgagctaaattgcgacgattttaagaaaggagagcgcgatggcgatttcatatgtccggattactatgaagccgtttgcggcacagatggcaagacttacgacaacagatgcgccttatgtgcagagaacgctaaaacgggaagccagattggtgtgaagagcgagggagagtgcaaatcctctaaccctgagcaggatgtttgttcagcttttaggccttttgttagggatggccgacttgggtgtaccagggaaaacgatcctgtgttaggacccgatggtaagacgcatgggaataaatgtgccatgtgcgccgagctttttctgaaggaggccgaaaacgctaagcgggaaggtgaaacccggattaggcgaaacgccgagaaggacttctgcaaggagtatgagaagcaggtgcgaaacgggcgcctgttttgcacccgggaatcagacccagtgcgaggccccgatggaagaatgcatggaaacaaatgcgcactctgtgcggaaatcttcaaacaaagatttagcgaggaaaactcaaaaactgaccaaaatctgggtaaagcggaagagaagacaaaagtgaagagggagatcgttaagctgtgcagtcagtatcaaaatcaagctaaaaatggaatactgttttgtacaagagagaacgaccctatcaggggccccgacggcaaaatgcatgggaatttgtgctctatgtgtcaggcttattttcaggccgaaaatgaagaaaagaagaaagctgaggccagggccagaaacaagagagaaagcggcaaagctacttcctatgctgagctgtgttcagagtatagaaaactggtccgaaacggtaaactcgcttgcacaagagagaacgatcccattcaggggcctgatggcaaagtgcacggcaacacttgctcaatgtgtgaggtcttttttcaggcagaagaggaagaaaagaaaaagaaagaaggaaagtcccggaataaaagacagagtaagtctactgcatccttcgaagaactgtgtagtgaatatagaaagtcccggaaaaatggccgccttttttgcacacgagagaacgaccctatccaaggccccgatgggaaaatgcacgggaacacctgctcaatgtgtgaggccttctttcagcaagaggagcgagctcgcgctaaggcaaaaagagaggccgccaaagaaatctgttcagaatttcgcgaccaagtgcgtaacggcacattgatttgtaccagggaacataacccagtgcgcgggcctgacgggaagatgcacggaaacaaatgcgcgatgtgcgccagcgtgttcaagctcgaggaggaggaaaaaaagaatgataaagaagagaaagggaaagtcgaagccgagaaagtgaaacgggaagccgtacaggagctttgctccgagtaccggcactacgtcagaaacggcagactgccatgtacaagagaaaacgatccgatcgagggtctcgacgggaagattcacggaaatacgtgttccatgtgtgaagcttttttccagcaggaggctaaggagaaggagagggctgagccacgagccaaagtgaagagagaagccgagaaggagacgtgtgatgagttcagacgcttgctgcagaacgggaagctattctgtacccgcgagaatgatcccgttaggggacccgatggaaagacgcatggtaacaagtgtgctatgtgcaaagctgtcttccagaaagaaaatgaggagagaaaacggaaagaggaagaagaccagcgtaatgccgccggacatggcagttcgggcggcggcggcggcaacactcaagatgagtgtgcagagtatagagagcagatgaagaacggccggctctcctgtaccagggaatccgaccctgttagagacgcagatggaaaaagttataacaaccagtgcaccatgtgtaaagcgaagctcgagcgggaggccgagagaaaaaatgaatacagccggagcaggtctaacggaaccggatctgagtcaggtaaggatacttgtgacgaatttcgcagtcagatgaagaacggaaaactaatctgcactcgagagtctgatccggttagaggtccagatggtaaaactcatggtaacaaatgtacgatgtgcaaggaaaaactggaacgcgaagccgcggaaaaaaagaagaaggaagatgaggatcggtccaatactggcgaacgctctaatactggtgagcggtccaacgacaaggaagatttatgtcgcgagttcagatctatgcaaagaaacggtaagctgatatgcacccgggagaacaatccagtccgggggccatacggaaagatgcatattaacaaatgcgctatgtgccaatctatcttcgaccgtgaggccaatgagagaaaaaaaaaagacgaggaaaagagctcctctaagccatcaaacaacgccaaggttatctactag

SEQ ID NO: 133851 - DNA, 261 bp, synthetic construct
  misc_feature 1..261: note = Description of Artificial Sequence: Synthetic coding sequence
  source 1..261: mol_type = other DNA
atgcgcgccacagctatcgtgcttctgctggccttgaccctcgcaaccatgttttcaatcgagtgtgcaaagcagacaaaacaaatggtggattgtagccattacaagaagctgccaccggggcagcaaagattttgtcaccacatgtatgatcctatatgcggatccgacggaaaaacttacaaaaatgactgctttttctgtagcaaagtcaagaagactgacgggacattgaaatttgttcacttcggcaagtgttag

SEQ ID NO: 133852 - DNA, 759 bp, synthetic construct
  misc_feature 1..759: note = Description of Artificial Sequence: Synthetic coding sequence
  source 1..759: mol_type = other DNA
atggcccaactgtgcgggttgaggagaagccgcgcatttttggctctcctggggtcactactcttaagcggagtgctcgcagctgatagagagagaagcatccacgatttctgcttggtttcaaaggtagtggggaggtgtcgtgcaagtatgccccgatggtggtataatgtcacagacggtagttgccagttatttgtgtatgggggctgcgatggcaattcgaataactacctgactaaagaagagtgcctcaaaaagtgtgcaacagtgacagagaatgccacaggcgacctggcgacttcaaggaacgccgcggactccagcgtgcctagtgctccccggaggcaggattcagaggaccactccagcgatatgtttaattacgaggagtactgtaccgcgaatgctgtgacaggaccctgccgtgcttctttcccaagatggtatttcgacgtggagcgcaacagctgcaataacttcatttacggaggctgccgcgggaacaagaatagttatcgaagcgaggaagcttgtatgttgcgatgtttcaggcagcaggagaatcctccactgcccttgggctctaaggtggttgttctggccggtcttttcgtcatggtcctaatcctgttcctgggcgcctccatggtttatctcatacgcgtggccagacgaaaccaggagagggccctgaggaccgtttggtcatctggcgatgataaggagcagctcgtgaagaatacctacgttctgtag

SEQ ID NO: 133853 - DNA, 588 bp, synthetic construct
  misc_feature 1..588: note = Description of Artificial Sequence: Synthetic coding sequence
  source 1..588: mol_type = other DNA
atggctcaattgtgcggcctgaggaggtcaagggcgttcctggctctcttggggagtctgctgttatctggagtactggcagccgatagggagaggtccattcacgagaacgctacaggggacctggcaacctcacggaatgcagcagactccagcgtacccagcgcaccgcgccgacaagactccgaggatcactcgagcgacatgtttaattatgaggagtactgtaccgctaacgcagtcaccggcccatgtcgggcttcctttccacgttggtactttgacgtggaacgaaacagctgcaataatttcatctatggcggatgtcgggggaacaagaacagctaccggtcagaagaggcttgcatgctccgctgctttagacaacaggaaaatcctcctttgcctctagggagcaaagtagtagtgcttgccggattgttcgtgatggtccttatcctgttcttgggggcgtcaatggtttatcttataagggtcgctcgaaggaaccaggagagggcccttcggactgtttggtcttccggggatgataaggagcaattggtcaaaaatacctatgtattatag

SEQ ID NO: 133854 - DNA, 1299 bp, synthetic construct
  misc_feature 1..1299: note = Description of Artificial Sequence: Synthetic coding sequence
  source 1..1299: mol_type = other DNA
atgagcgataaattaccatacaaagttgcggatatcggactggctgcatggggaaggaaagctctggacatagccgagaacgaaatgcccgggctgatgaggatgagagagaggtattcagcctccaaacctctgaagggcgccagaatagctggatgccttcacatgaccgttgagaccgccgtgctcatcgagaccctggtaacgttgggtgcagaagtgcagtggagctcttgcaacatattcagcactcaggaccacgctgctgctgcaatcgccaaggccggcatccccgtgtacgcgtggaagggtgaaacagacgaggaatatctgtggtgcattgaacaaacattgtatttcaaggatggccctttgaacatgatcttggacgatgggggtgacctgacaaacttgatccatacaaagtacccacaactccttcctggcattcgcgggatctccgaggaaactacaactggagtgcataacctgtataagatgatggcgaatggaatactgaaagtgccagcgatcaacgttaatgattcagtgactaagtcgaagttcgataatctgtacggatgccgggaatctttgatcgacggcattaagagggcaacagatgtgatgatcgccggtaaggtggccgtggtcgctggctacggggacgttggaaaagggtgtgcccaggctctgagagggtttggagcccgagtgattatcaccgaaattgaccccatcaatgccctccaggctgctatggaaggctacgaggtgaccaccatggacgaggcttgccaggaaggaaacatctttgtcactaccactggttgtattgacattattctgggtcggcacttcgaacagatgaaagacgatgcaattgtgtgtaatatagggcactttgatgttgaaattgatgtaaaatggctcaacgaaaatgccgtggagaaagtgaacataaagccgcaagtggaccgctatcgactcaagaacggtcgccgtatcatcctcctggccgagggccgcctggtcaatctgggctgcgcaatggggcacccttcattcgtgatgtccaactccttcacaaatcaggtgatggcccagattgaactgtggacgcatcctgataagtacccggtaggggtccatttcttgcccaagaaactcgatgaggcagttgcggaggcacatctgggcaaattgaatgtcaagctgacaaagttgacagaaaagcaagcccagtatctcggcatgtcttgtgacggaccatttaagccagaccactaccgctattag

SEQ ID NO: 133855 - DNA, 1023 bp, synthetic construct
  misc_feature 1..1023: note = Description of Artificial Sequence: Synthetic coding sequence
  source 1..1023: mol_type = other DNA
atgtgtgctcaatactgtatcagcttcgcagacgtggaaaaagcacacattaacattagagatagcattcacctcactcctgtattgacctctagcatcctgaatcagctgaccggacgtaatctatttttcaagtgcgagctctttcagaagaccggctccttcaagattaggggtgcccttaacgcagtcaggtcactggtccctgatgctctcgaacgaaaaccaaaagcagtggtgactcactcttcgggcaaccacggacaagcgctaacgtacgccgccaaactggaaggcattcccgcctacatcgttgtcccgcagaccgccccagactgcaaaaaactcgcaatccaagcgtatggggcgagtattgtgtactgcgaaccgtcagacgagagcagagaaaacgtggctaaacgtgtgacagaagaaactgaaggcataatggtgcaccccaaccaagagccggccgttatcgccggccaaggcaccattgcgctggaggtgctgaaccaggtgcctctcgtggacgcgttggtggtccccgttgggggcgggggcatgctggccggcattgcgataaccgttaaagccctgaagccttctgttaaggtttacgctgccgagcctagcaacgccgacgactgttatcagtccaaactaaagggcaagctgatgcctaacctctacccccctgagacaatcgcggatggagtgaagagttccattgggctaaacacatggcctattatccgagatctggtcgatgatattttcacagtgaccgaggacgagatcaaatgcgccacacagcttgtgtgggaaaggatgaagctgttgattgagccaactgctggtgttggggtcgccgctgtcttgtcgcagcacttccagacagtcagtccagaggtcaaaaacatctgcatagtgttgtcaggagggaacgtcgatcttacatcttcaatcacttgggtgaagcaagccgagcgccccgctagttaccagtctgtctcagtatag

SEQ ID NO: 133856 - DNA, 1638 bp, synthetic construct
  misc_feature 1..1638: note = Description of Artificial Sequence: Synthetic coding sequence
  source 1..1638: mol_type = other DNA
atggccgagccgtcagggagtcccgtgcatgtgcagttgcctcagcaggcggccccggtgactgcggctgccgctgccgccccagctgcggccacagccgccccggcgcctgcggcccccgctgcccctgcccccgccccagcccctgcagcacaagcagtgggatggcccatttgccgggatgcctatgaactacaggaggttatagggtccggcgccaccgctgttgtccaagctgcactgtgtaaaccaaggcaagaacgggtcgcaatcaaaagaattaacctggaaaaatgtcaaacttctatggatgaactgctgaaggaaattcaggccatgtcccaatgttctcaccccaacgtcgtgacgtactacacaagctttgtggtcaaagatgagctctggctcgttatgaaactgctgtccggagggagcatgctggatataatcaagtacatcgtcaaccggggggagcataaaaacggtgttctggaggaggctatcatcgcaaccatcctgaaggaagttcttgaaggactggactatctacacaggaacgggcagattcacagagatctgaaggctggtaatatactgctaggagaggatggatcagtgcagatcgcggacttcggcgtgtctgcttttttggctactggaggtgacgtaactcgcaacaaagtacgcaaaacgtttgtgggaactccatgttggatggctccggaagttatggaacaagtgcggggctacgattttaaggctgatatgtggtcttttgggatcacagccatcgaactcgctacgggtgcggctccatatcacaagtatccacctatgaaagtcttaatgctgacactccagaatgatccccctacactcgaaactggcgtggaagataaggagatgatgaagaaatatgggaagtccttccgcaagttattgagtctgtgtctgcagaaggatccctcgaagcgtcctacagctgcagaactgctcaagtgcaaatttttccagaaagcgaaaaatagggagtaccttattgaaaaactcctgacccgaaccccagacattgcacagcgggccaaaaaggtgcggcgggtaccaggatcctcgggccatttacataagactgaggatggcgactgggagtggtccgatgacgaaatggacgagaaatctgaggagggaaaggcagccttctcacaggagaaatctagaagagtgaaagaagaaaatccagagatcgcagtgagtgccagtacgatccccgagcaaatccaatctttatcggtacatgattcccagggcccacccaatgccaatgaagactaccgggaagcctcttcctgcgctgtgaacctcgtgttacgactccggaacagccgcaaggaacttaacgacattcgattcgagttcacacctgggagagacacagctgacggcgtctcgcaggaactcttctctgcgggcttggtcgatggacatgacgttgtaattgtggccgcgaatcttcagaaaatagttgacgaccccaaagccctcaagacgcttactttcaaactggccagtggttgtgatggatctgaaatccccgatgaggttaagttgattggcttcgcccagttgtcagtttcatag

SEQ ID NO: 133857 - DNA, 2715 bp, synthetic construct
  misc_feature 1..2715: note = Description of Artificial Sequence: Synthetic coding sequence
  source 1..2715: mol_type = other DNA
atggacgcagggtttttccggggtacctctgcagagcaagataatagatttagcaataagcagaaaaagttgttgaagcaacttaaatttgctgaatgcctggaaaaaaaggtcgatatgagcaaagttaacctggaagtcatcaagccatggattactaagagagtgaccgaaattctcggcttcgaagatgacgtggtaatcgaattcattttcaaccaactagaagtgaagaacccagactccaagatgatgcaaattaatctcaccggctttctgaatggcaagaacgccagagaatttatgggagaactgtggccgttgctgcttagcgctcaagagaacatcgctggcatcccgtcggcattcttggaattgaaaaaagaggagattaaacagcgccagatcgaacaggaaaagctggcctctatgaaaaagcaagacgaagacaaggacaagagggataaagaggagaaagaatcttcccgggagaagcgcgagcggtcacgttcgccacggcgccggaaaagcaggagcccaagccccagacggcgctcctctcctgtgcggcgggaaagaaaacgcagccactccagatcccctaggcacagaaccaaatcccgctctccttcccctgcccctgagaaaaaggaaaagactcctgaactgcctgagccatctgtgaaagtgaaagagccaagcgtccaggaggccacttccacgagcgatatcctcaaggtacccaaacccgagcctattcccgaacctaaggagccctcacccgagaagaattcaaaaaaggagaaggaaaaggaaaaaaccagaccgcgctctcgatccaggtcaaagtcccggagccgcacgaggagtcgttctcccagtcacactcgaccccgaaggagacacagatcgaggagccggtcttacagcccccgtcggcgaccatctcctcgacggcgcccaagcccgcgcaggcgcaccccacccaggcgcatgccaccccctccacggcatcgaagatcaagatcacccgtcagacgtaggaggaggtctagtgcctcgctgagtggttccagctcttcaagttcatcttccagatctcgctcccccccaaaaaaaccacccaagaggacttcttctccccctaggaaaacaagacggctcagtccttcagcctctccacccaggaggagacacagaccatccccgccagccacccccccgccgaaaaccaggcatagtccgactcctcagcagagcaaccgcactagaaagagtagagtgagcgtgtcccccggtcggacaagcggaaaagttaccaaacacaagggaaccgagaaacgagaaagtccatccccggccccgaagcctcgtaaagtcgaactgagcgagtccgaggaagacaagggagggaaaatggcagctgcagatagcgtacaacaacgccgacaatacaggcgacagaaccagcagtctagcagcgatagtgggtcaagtagttcgtctgaggacgagagacccaaacgtagtcacgtaaagaacggcgaagtgggtcgacggaggcgacacagtcctagccggtcagccagtccttcaccacggaaacgtcagaaggaaacctcccccagaggacgccgcagacggtcccctagccccccccctactaggcgccggaggagtccatctcctgccccccccccacgacggcgcagaactcctacacctccccctaggcggcgcaccccctccccgcctccacggcggcgcagcccgtcccctaggcgctattctccccctattcagcggaggtactctcctagccctcctccaaaacggcgaactgcctctcctccaccccccccaaagcgccgggctagtccttcaccacctccgaagaggcgtgtttctcatagccctccacctaaacaacgaagttcacctgtgactaagcgacgctcacctagcctgagctctaaacaccgtaagggcagcagccccagtaggagcacaagggaagcccgctcgccccagccgaataaaaggcattctcccagtccacgccctagagccccacagacaagcagtagtcctccccctgtgcgcagaggcgcctcatcgtcaccacagaggcgacagagcccatcaccttctacaagacccatccggagggtcagccgtacacccgagccgaaaaaaattaaaaaggcagccagcccctcaccccagtctgtgcgccgggtatcttccagtagatcagtctcagggtctccggaaccagctgccaaaaaaccacccgctcccccatcaccggtacagtcacaatccccatcaacgaattggtcaccggctgtgccggtgaagaaggccaaaagtcccacccctagtcccagcccgccccgtaatagtgaccaggagggcggcgggaagaaaaagaaaaaaaaaaaggataagaaacacaagaaagataagaagcacaagaagcacaaaaagcataagaaggagaaggcagtagcggctgccgccgccgccgccgtcacacctgcagcgattgccgcagccaccacaaccctggctcaggaagagccggtggccgccccagagccaaagaaggagaccgagtcagaagctgaagataacctcgacgatctcgaaaagcatctgcgagaaaaggctctccgcagcatgcggaaggcacaggtttccccacagtcctag

SEQ ID NO: 133858 - DNA, 2742 bp, synthetic construct
  misc_feature 1..2742: note = Description of Artificial Sequence: Synthetic coding sequence
  source 1..2742: mol_type = other DNA
atggacgctggatttttcagaggtacctccgccgagcaagacaataggttcagcaataagcaaaaaaagctgcttaaacagctgaaattcgccgaatgcctagaaaagaaagtggatatgtccaaagtcaaccttgaggtgattaaaccatggatcactaaacgtgtgaccgagattctagggtttgaagacgacgtcgtgatcgagtttatcttcaaccagttggaagtcaagaatcccgattcaaaaatgatgcagattaacctcactggttttctgaatggtaaaaacgccagggagtttatgggggagctttggcctctgcttctgtccgcccaggagaatattgccggaatcccatcggcctttttggagctgaagaaagaggagatcaaacagaggcaaattgaacaggagaagctggcatctatgaaaaagcaggacgaagacaaagataagcgggacaaagaagagaaggaatcttctagagaaaagagagagcgcagccggtcacctcggcgccggaagtcacgtagccccagtcctcgcagacgatcttctcctgtccggcgcgagcggaaacggagtcacagcagatcaccacggcacaggactaagtcccgcagccctagtcccgcacccgagaagaaggagaaaacccctgagctccctgagccctcagtcaaagtcaaagagccttccgtccaggaggctacttcaacgtctgatattctgaaagttccaaagccggaaccaatccccgagccgaaagagcctagtccggaaaagaatagcaagaaagagaaagagaaagagaagaccagacctagatctcggtcaagatctaaatcacggagccgcacacgcagccgatccccatctcacacaagaccacggcgtcgtcaccgctcccggagccgccgtcgccctagcccacggaggagaccctctcctcgtcgcaggacccccccccgccggatgcccccccccccgaggcacaggcggagccgcagcccagtgaggcggcgacgccgctcttctgctagtctgagcgggagttcttcgtccagcagctcttcacgctccagaagtccacccaaaaagcccccaaagaggacaagtagcccgcccaggaagactcggagactgtcaccatctgccagccccccgcggcgacgtcaccgtccttcgccgccagcaacacctccccccaaaactagacacagtcccacacctcagcaatccaatcggaccaggaagtcccgggtcagcgtctcccccggtcgtacctccggcaaagtcaccaagcacaaaggtacggagaagcgcgagtctccctctcccgctcctaagcctcgcaaggtcgaactgtctgaaagcgaggaagacaaaggtggcaagatggccgccgctgactcagtgcagcagaggagacagtaccgccgccagaatcaacagtctagctctgacagcggttcctcatcatcaagtgaagatgagcgacctaaacgatcccacgtgaagaacggagaggtgggaaggaggcgcaggcattctccgtcacgcagcgcatcaccaagtccccgcaagagacaaaaagaaacctccccccggatgcagatggggaagcgctggcagtctcctgttacaaaatcaggaaggcgcagaaggagtccatcacctcctccaactcgccgcaggaggtcgcccagtcccgcaccacctcctcgaagaagaaggacgcctactccaccccctagacgtcggacaccgtccccccccccccgtcgccggtctccatcacctaggcggtactcaccccccatccagcgcaggtacagtccgtctccccctcccaaacggaggaccgcgtcacctcctccaccccctaagcgccgggcttccccttcccccccaccgaaaaggcgcgtgagccattcacccccacctaagcagcgctctagtcctgtgaccaagcgtcggtcaccatcactaagcagcaagcaccggaagggctccagtccaagtagaagcactcgcgaggcgagatctccccagcccaataagcggcactctcctagtccccggcctagagcaccacaaaccagctcatctcctcctcctgtgaggagaggcgccagctcaagccctcagaggcgccagagtccgtcgcccagcacaagaccaatccgtcgggtgtcccgaacacccgagcctaagaaaattaagaaggccgcttccccaagtccacaaagcgtgcggcgggtgagctcatctcgaagtgttagcggctctccggagccagccgctaagaagccaccggctcctccaagccctgtgcaaagccagtcccccagcactaattggtctcccgccgttccagtgaagaaggccaagtcccccactcccagcccatccccaccaaggaacagcgatcaagagggaggtggcaaaaaaaaaaagaaaaagaaggataaaaaacacaaaaaagataagaaacacaaaaaacataagaagcacaaaaaagagaaggctgtggctgctgccgctgcggcagctgtgacaccggccgctatcgcagcagccaccacaaccctggcccaggaggaaccagttgctgctcctgagcccaagaaagagaccgagtcagaggctgaggacaacttggacgacttggagaagcacctgagagaaaaagccctcagaagtatgaggaaggctcaggtgtctccacagtcgtag

SEQ ID NO: 133859 - DNA, 2751 bp, synthetic construct
  misc_feature 1..2751: note = Description of Artificial Sequence: Synthetic coding sequence
  source 1..2751: mol_type = other DNA
atggatgccggtttttttcggggaactagcgcggagcaagataatagattttccaacaagcaaaagaaactcctgaaacaactgaaatttgcagagtgcctcgaaaagaaggtggacatgtccaaagtcaacctcgaagttatcaaaccgtggatcacgaagagggtgactgaaatcctcggtttcgaagatgacgttgtcatagagtttatcttcaatcagctagaggtcaagaatccagactctaagatgatgcagattaacctcaccggcttcctgaacggtaagaacgctagggagttcatgggcgagctctggccactgttacttagcgcgcaggaaaacatcgcggggatcccctcggcgtttcttgaactcaaaaaagaagagatcaaacaacggcaaattgaacaagaaaagttggccagcatgaaaaagcaggacgaagataaagataagcgggataaggaagagaaggaatcgagtcgcgaaaagagagagcgcagccgctcacccagaaggagaaaatctcgaagcccatcaccgagaaggaggtcttcccctgtcaggagagaaagaaagcgatctcattcaagaagcccgcggcatcggacaaaatcgcggtcgccctcccccgcacctgagaaaaaggagaagacccccgaactgccagaaccaagcgtgaaggtgaaggaaccatctgtgcaggaggccacatccacgtctgatatcctcaaagtcccaaagccggagccaatacctgagcccaaggagccatcccccgaaaagaactctaagaaagaaaaagaaaaggaaaaaactcgcccaagatctcgaagccgtagtaagagcagatcgcgcactcgcagccggtcgccatcccacacacgaccgcgacgcaggcaccggtcacgaagcagatcttacagccctcggcggcggccgtcgcctaggcgacgtccgtctccccggcggcggactccaccacgcagaatgcctcccccacccaggcatcgccgctcacgatcaccggtgcggagaaggcgccgttctagcgctagtttgtcaggtagcagttcgtcctcatcatcttccaggagcaggagcccacctaaaaagcccccaaaacggacttcgtcccctccacgcaagacaagaaggctgtccccgtccgccagcccacctaggcggcgccacaggccttcacctccagctacacctcctcccaagaccagacatagcccaacgccacagcaatccaatcgtacacgaaaaagccgagtgagcgtgtctcccggacggaccagcgtcaccaaacataaaggcacagaaaaaagagaaagtccatctccagcaccaaaaccccggaaagtggagctatctgagtccgaggaggacaagggaggtaagatggctgccgcggatagtgtgcaacaacgcaggcagtataggcgtcagaatcagcagtctagcagtgactccggaagttcatcaagctcagaggatgaaagacctaagcgctcccatgtcaaaaacggcgaagttggcaggcgccgtcgccatagcccatctcgaagcgcttccccctctccccgcaaaagacaaaaggagacaagtcctagaatgcagatgggtaagcggtggcagagccccgtgaccaagtctggtcgtaggcggagatctccctctccacctccaaccagacggcgacgatccccctccccagctcccccccccaggaggaggagaactcccactcccccgccccgcagaaggactccctcacctcctccccgtcgtcgttctccttcaccccgacgctattccccaccgatccagagaaggtactctccatcacctccacctaagcgcagaacagcttctcctccccccccccctaagaggcgggcctctcccagtcccccaccaaaacgcagagtctctcactcccccccacccaagcagaggagtagccctgttaccaaacgtcggtctccctcgctttccagtaagcataggaaaggttcaagcccaagccgcagcacgagggaggccaggtcaccgcagccaaataagcgtcatagcccatcacctcgtccccgggccccccagacttctagcagcccgccacctgtgcgtcggggagcatcgagctctccacaacgccgccagtccccttcgcctagcaccagacccatcaggcgggtgtctcggaccccagagcctaagaagattaagaaggccgcaagcccctccccacagagtgtgcgtcgcgtgagcagttccagaagcgtgtctgggagcccagagccagccgccaagaaaccccccgccccaccttctccagtgcagagccaatctccgtccacaaactggtcccctgccgtcccggttaagaaggccaaatcccctacacccagtccatcccctcctagaaacagtgatcaagagggaggcgggaaaaaaaagaagaagaaaaaggacaagaaacataagaaggataagaagcacaagaaacataagaagcacaaaaaggagaaggccgtggctgccgccgcagcagcagccgttacccctgcggcaatcgctgctgccactactacactcgctcaggaagagcccgttgccgcaccggagcccaagaaggaaaccgaaagcgaggctgaagataacttggatgaccttgaaaaacacctgagggaaaaagcccttagatcgatgcggaaggcccaggtgagccctcagagttag

SEQ ID NO: 133860 - DNA, 957 bp, synthetic construct
  misc_feature 1..957: note = Description of Artificial Sequence: Synthetic coding sequence
  source 1..957: mol_type = other DNA
atgggagagctttggcccctcctgctttcggcgcaggagaacatcgccggtatcccatcagcctttctggagcttaagaaggaagaaatcaaacaacggcaaatcgagcaggagaaattggctagcatgaagaagcaggacgaggataaagacaagcgggacaaggaagaaaaagaaagttcccgggagaaacgagaacgatccaggtctcccaggaggacaaagagcagaagccctagccctgcacctgaaaagaaggagaagaccccagagctgccagagccgtcggtcaaagtcaaagaaccaagcgtccaggaggccacctctacttccgacatcctgaaagtgccgaaacctgaacctattccagaaccaaaggagcctagtcctgagaaaaactccaaaaaagagaaggagaaagagaaaacaagacctcgcagtagatctaggagcaaatccaggagcagaacaagatctcggtctccgtctcatactcgccctcggaggcgccaccggtctagaagtcgttcctacagccccagacgccggccttctcccaggaggagacccagtccacgccggcgtacccccccacgccggatgcctccgccaccgcgccatcgcagatccagaagccccgttcggagattttcgggaattctgcctcccaaggtcaatagcgcggaggaggacgtccgtcagcatccatgtctgggggtggcccaccaccccttgcatctggtccacgggcatcaccaacgttctctccccagaggccacccagctccactggggaaattagttggctatttgctgcagcaagtacttcagggagagggcactggccaccatctgttgcaacttcaccatccaaaactgggcatccccttacacccttcctcacaaacagtgcaggagaaggtggtctttctgtgcctgcagggggagctccaatag

SEQ ID NO: 133861 - DNA, 8259 bp, synthetic construct
  misc_feature 1..8259: note = Description of Artificial Sequence: Synthetic coding sequence
  source 1..8259: mol_type = other DNA
atgtataacggaatcggactccctaccccccgcggtagcggaaccaatggctatgtccaacgcaatttgtctttggtgaggggacggcgaggcgagagacccgactacaaaggagaggaggaactgaggaggctggaggccgcactagttaaaaggccaaatcctgatatcttggatcacgaaagaaagagaagggtggagctcaggtgtctcgagctggaagagatgatggaggaacaggggtacgaagaacagcagatacaggaaaaggtagccaccttccgacttatgctgcttgagaaagacgttaaccctggtggcaaggaggaaactcccggtcagagaccagcggttactgagacacaccagctcgccgaactaaacgaaaagaaaaacgagcgcctgcgcgccgccttcggaatctctgatagctacgtggatggctcctctttcgaccctcagcggcgggcaagagaagccaaacagcccgctcctgagcccccaaagccctactctttggtgcgtgagtcctcctcttcaagatctccaacacccaagcagaagaagaagaagaagaagaaggatcggggccgcagatcggagagcagttcccctaggagggaaagaaagaagtcctccaaaaaaaagaagcataggtccgaatccgaaagcaaaaagcggaaacatcggtcccccacaccaaaatctaaaaggaagtcaaaggataaaaagcgcaagagatcaaggtccacaaccccagccccaaagtctcgccgagcgcacaggagtacctcagctgactccgcatcatcctctgataccagtaggagcaggagccgctccgccgcagccaagacgcataccactgcacttgcgggtcgttcaccatcgcctgctagcggtcggcggggagagggggatgctcctttcagtgagcctggcacaacgtctacacaacggcccagctccccagaaaccgccacaaagcagcctagtagtccatatgaggataaggacaaggataaaaaagaaaaaagcgccaccagaccgtctccctctcccgagagaagctccacaggtcccgaacctcccgcccccactcctctgcttgccgagagacacggggggtctcctcagccattggccaccactcccctgagccaggagcccgtgaatccacccagtgaagcaagcccaacaagggaccgctcaccacctaagagtccagaaaagttaccccagagcagctcatcagagagcagcccaccctctcctcagccaaccaaggtaagccggcatgcctcaagtagtccagaaagccccaagcccgcccccgcacctgggtcccacagggaaatatcctccagtcccacgtcgaaaaaccgctcccacggtagagctaagagggataagtcccattcccatacacccagtaggcgtatgggaagatcccgaagccctgccacagctaaaagaggaaggtcacgaagccgtacccctaccaagaggggacactctcgctctcgctcacctcagtggaggcgctcacggtcagctcagcggtggggccggtcccgctcaccccagcgtcgcggacggagtagaagtccacagaggccggggtggtcccggagcaggaacacacagcggcgtggccgttcgaggtccgcgcggagaggcaggtcccactcgcgatcacctgcaacacggggacggagcagaagtagaacacctgcaagacgaggtaggagccggagcagaacgcctgccagacgacgtagccgaagtcggactcccacgcgccggcgctccagatcacgcacgccagcacgtcgtggcaggtctcggagccgcacaccagccaggcgacgatctaggacaagaagtcctgtccggagacgctcccgttcccgaagccccgcacgaagaagtggacgtagcaggtctcgaacgcctgccagacggggccggagtagatcacgaacccccgcccgcagagggcgctccaggagccgcaccccagcgaggcgctcaggaagatctaggagtcggacccctgcgagaaggggacggtctcgcagtcggacacctcgcagagggcggagcaggtccaggtctctagtccgccgcggccgcagtcactcccgtaccccgcagagaagaggtcgctcgggtagctcctcagagcggaaaaacaagtccagaacctcccagcgacgcagccggagtaattcatcacccgagatgaagaagtctcgcatttcgtctcgccggagccgaagcttgtcttctcccagaagcaaggccaagtccaggctaagtttgcgtagaagcttgtcaggctcatcaccttgcccaaaacagaaaagccagacaccaccaagacgatctcgcagcgggtcgtcccagcctaaggctaaaagtaggacccccccacggcgcagcaggtcttcttcgtcccccccacccaagcagaaaagcaaaactccctctaggcagagtcatagtagttcctcaccccatccgaaagtaaagtcagggactcctcccagacaggggtccatcacctctccgcaggcgaatgaacagtccgtgacaccccagaggcgctcatgcttcgaatcaagtccagaccccgagctgaaatccaggactccaagtcgtcactcttgttctgggagctcgccccctagagtcaagtcctcgacccctccacggcaatccccttctcgctcttcctcccctcaacctaaggtgaaagcaatcataagcccaaggcagaggtcccatagtgggtcctctagcccgtcccccagcagagtgaccagtcgcaccactccgcgcagaagtcggagtgtgtcaccgtgctcgaacgtggaaagccgactgcttcccagatactcacacagtgggagctcctctcccgacactaaggtgaaaccggaaactccgcctcggcagagtcactcaggcagcatcagtccatatcctaaagtgaaagcccagactccccccggaccgagtctgtctggctccaaatccccatgcccacaggaaaaatccaaggattccctggtgcagtcttgccccggcagcttatccctgtgtgcaggtgtaaagagtagcacaccgccgggtgagagctacttcggagtatcttctttgcagctgaaaggtcagtcccagacttctccagaccacagatctgacacctcaagtccagaagttaggcagagccactcagagagcccctccctccagtcgaagtctcagacgtcccctaaagggggccggtcccggtccagctcgcccgttacggagctggcctcacggtcacctattcgtcaggataggggcgagttctctgctagccccatgttaaagtccggaatgtctcctgaacagtcaagattccagagcgattccagctcttatcccactgtggactccaatagcctgctgggacagtctagattggagactgccgaaagcaaggaaaagatggctttgccaccgcaggaggatgcgacagcctcccccccacgccagaaggacaagttttcccctttccccgtgcaggaccggcctgaaagctcattggtgttcaaagacactctccggacacccccaagagaaaggagtggcgcaggctcctccccggaaacaaaggaacagaacagcgccctgccaacctcttctcaggatgaggagctaatggaagtcgtcgagaagtcggaagaacctgcagggcaaatactgtcgcacctgtctagcgaactgaaggagatgagcacaagcaacttcgagtccagtcccgaagtggaagaacggcctgcggtgtccctgactctggaccagtcccagtctcaagctagcctggaggctgtggaagtcccctctatggcctcttcatgggggggtccccatttcagcccggagcacaaagagctgtctaatagcccgctgcgagaaaactcttttggttcgccccttgagtttcggaacagcgggcccctgggcacagagatgaacacagggttctcctctgaggtgaaggaggacctgaatggccccttcctgaatcagctcgaaacagatccctcccttgacatgaaagaacagtctacgagaagctcagggcattcgtcctcggagttgtctccagatgcagtggaaaaagccggaatgagcagtaatcagagtataagctccccggtccttgatgccgtacctcggactccctccagggagaggtcctcttctgctagctccccggaaatgaaggacgggctgccccggaccccttcccgtcgcagtcgatccggcagctctcccggcctgcgcgatggatctggcacacccagcagacactccctctccggatcttcccccggcatgaaggacattccccgcaccccttctaggggccgctctgaatgtgattcttcccccgaaccaaaggcgctcccacagacccctaggcctcgttcaagatcaccaagtagccctgagctgaataacaagtgtctgacgcctcagagggaacgttcaggctccgagtcatcagttgaccagaaaacagtagccaggaccccactcggtcaacgctccagaagcgggagtagtcaggagctggatgtcaagccctccgcttccccacaagaacgcagtgagtctgacagctcccccgatagcaaggcgaagacgcgtactccattgcgacaaaggtctcgctctggcagttcaccagaagttgacagtaagagccgcctgtccccaagacgatccagaagcgggagctcacccgaggttaaggacaaaccccgcgctgcacctagggcgcaatccgggagcgattcctctccagaacccaaggctccagcaccaagggctttgccacgccggtccagaagtggatcatcgagtaagggcaggggaccttctccagaagggtcaagttctacggagagttcccccgagcacccgcctaagagtcgtaccgctagacgcggctctcgatcatctccagaacctaaaaccaagagcagaacacctccccgccgcaggtcaagcagatcttccccagagctgacgcgcaaagccagattatcccgaagatcgagatccgcttccagcagccccgaaacccggagccgcactccacctaggcatcgacgtagccccagcgtgtcgtctccagagccggccgaaaaatctcgtagttccaggcggaggagaagtgccagttcaccccggactaaaactacatcacggagaggacggtcaccgtctcccaagcctcgaggcctgcagcgttcacggagtcgatctcggagggaaaaaacaaggaccactagacgccgtgacagatccggaagctcacagtccacctccaggcgccgtcaacgcagccgctctcggtctcgggtgactcggcgaagaaggggcggctccggctaccattcacgcagccccgcacgtcaggaaagcagtcgaacctccagccgcaggcgtagagggagatctcgaacaccgccaacctcaaggaaaagatccaggagccggacctccccagctccctggaagaggtcccggtctcgagcaagtcccgccacacaccggaggagccgaagcagaactcctctgatctccaggcggaggtccaggtcccgaacaagcccggtgtctaggcggaggtcccggtcgagaacttctgttacccgacggagatcacggtcaagggcgtcccctgtatcccggagacggtcgcggtctagaactccacccgtaacaaggaggcgctctcggagccgcacgccgacgaccaggaggagatccaggtctcgtacacctccagtgacccgaagacgctctagatcgcgcactcctccagtgacccgccggaggagccgcagtcgaacaagtcctatcacccggcgccgcagcagaagcaggacctcaccggtgaccaggcggagaagcaggtcacggaccagccctgtgacccgcaggcgctctcggagccggacaagtccagttacaaggaggaggagtaggtcgaggaccccacccgctatccggcggcgctcaaggagccggacccccctcttacctaggaagcgcagtcggtcacggtctcctcttgccattcgccgaagatcccgttcacgcacaccccgcaccgccaggggcaagcgctcgttgaccagatcacccccagctattcggaggcgcagcgccagcgggtcttctagtgaccgaagccgttctgcaacacctcccgcaactcgcaaccactccggttcccggaccccccccgtcgcactgaactcatcccggatgagctgcttttccaggccaagcatgtccccaacccccctggacagatgtcgctctcccggtatgttggagcctctgggctcgtctcggacccctatgagtgttctccaacaggcaggcggttccatgatggatgggcccgggcctcgtattccagatcatcagcggacaagtgtacccgagaaccatgcccagtctcgaattgcccttgcccttactgctatctctctgggaaccgctaggcccccacctagtatgagcgccgctggccttgcagctcgtatgtcccaggtacccgcccccgttccattgatgagcctgaggactgcgcctgccgctaaccttgccagtcgaattccggccgcctctgccgccgccatgaatctggcttccgctaggacccctgcgatcccaacagccgtaaacttggcagatagcagaacgccggccgccgccgctgcaatgaatctggcgtccccaagaactgcagtagcacccagcgcagttaatttggcagatcctagaacacccaccgcccctgctgtcaacctcgccggcgcacgcaccccagctgcgttggccgctctcagtctaactgggtccgggaccccgccaacggccgcaaactatccttcttctagtcgtactccacaagccccggccagcgcgaatcttgtcgggcctagaagcgcacacgccactgcccccgttaatattgctggatcccgtactgcggctgcattagcacccgctagcctcacgagtgctagaatggctcctgcgctgtctggtgccaaccttacctcccccagggtgcctctgtcagcttacgagcgcgtgtctggccggacgtctccccccctcctggaccgggcacgctcccggactcccccaagcgctccgtcccagtcgaggatgacctctgagagagcaccttcgccatcatcccggatgggtcaagccccctctcaatcccttctaccacctgcacaggatcagcctagaagccctgtgccaagtgcattttcagaccaatctaggtgcctgatcgcccaaacaacaccggtagccggttctcagagtctcagtagtggagccgtggctacaacaacttccagtgctggcgatcataacggtatgctgtcagtaccagctcccggcgttccccacagcgatgtgggggagcctccagcatccaccggtgcccagcaaccatctgctcttgcggcactgcagcccgccaaagaaaggcgctcatctagttcaagctcctcttccagcagcagcagctcctcctcaagttctagttcatccagctccagcagcagcggctcctcctcctctgatagcgagggtagctcccttcctgttcagccagaagtggctctcaagagggtcccctcacctacccccgcaccaaaagaagcagtccgggaaggacgaccacctgaacctactccagctaaacgcaaacggagatcctcctcctcctcctcaagctcttcctcaagcagttcatcttcttccagctccagctctagttccagttcttcctcttcgtcttcatcatccagcagtagtagctcatcttcctcatctagctcgcccagtccagcaaagcccgggcctcaggcactccccaaacctgcttcaccaaagaagcctcctcccggtgaacgcagatcccgatcaccccggaagccaattgattccctgcgggacagtcgctcacttagttacagccccgtggaacgccggaggccatccccgcagccgagcccaagagatcagcagagtagttcgagcgaacgtggctctcgccgagggcaacgcggggattcacgttccccctcccataagcgaaggcgggaaacaccatcaccgcgacctatgagacataggagcagccggtcaccatag

SEQ ID NO: 133862 - DNA, 702 bp, synthetic construct
  misc_feature 1..702: note = Description of Artificial Sequence: Synthetic coding sequence
  source 1..702: mol_type = other DNA
atgatctcttttccaagtttacagagaacggagttggaggagatggatctgatcctccagcaggagggatggcaactcgatctgaagcggaattcactgggttggaaggatcttcagcggagctcccatccatccccctgcttacaagctggtaggcccctcccacagcccacctgtacgcatcggggtctgcccaagctgcgacttagtgaggagggcgactaccctgcctctgcctccacacccgagccccggggcctgattcctccgtcagggacattcttgaggttcaacctggaccccctttgctgcgggcctcaacccgtggccagcgttagtcggggttgggtcagcagccatcactgttcccccgaaaactgttggctgacatggctgggcgagttacctgcccccttttctggcactccaccgcccaccgccgttcccccaggtcagggctcaaggagcagaagcccacggaaaccgatagactctctgcgcgattcacgttctctgtcatacagcccagtagaacgccgtaggccttcacctcagccgtcccccagggaccagcagtccagcagttccgagcgcggatctagacgggggcagcggggggattcccgttcaccctctcataagcgcaggcgtgagacacctagcccccgccccatgcgtcaccgctctagccgcagcccctag

SEQ ID NO: 133863 - DNA, 7005 bp, synthetic construct
  misc_feature 1..7005: note = Description of Artificial Sequence: Synthetic coding sequence
  source 1..7005: mol_type = other DNA
atgtacaatggcataggactgccaaccccgcgaggctctgggaccaatggatacgtgcaacggaatctgagcttggtgagagggaggcgaggggagaggcctgattacaagggcgaagaggagctccgtagactggaggcagccctcgtgaagagacccaacccagatatccttgaccatgagcgaaaacgcagggttgaactgcggtgtctagaattagaggaaatgatggaggagcagggctacgaagagcagcagattcaggaaaaggtggctacattccgtcttatgctcttggagaaggacgttaaccctggaggaaaggaagagacgccagggcagagacccgctgtgaccgaaacccaccagctggcagaactgaatgagaaaaagaacgagcgccttagggccgcatttgggattagcgactcatacgtggacggcagcagcttcgaccctcaacgccgggcccgggaagccaaacagcccgccccagaacccccaaagccctattccctcgttagggaaagtagtagctcccggtcccccacccctaaacaaaagaagaaaaagaagaagaaggaccgcggcaggcgcagtgagagctcaagtccaaggcgcgagcgtaagaaatcctccaaaaaaaaaaagcatcgcagtgaaagtgaaagtaaaaaacgtaagcatcgctcccctacccccaaatcaaagcgcaagtctaaagataagaagcggaagagatcccgaagcacgacccccgctcccaaaagtcgtagagcgcacaggtccactagcgcagactccgcatcatcaagcgatacatcgagatctaggtcacggtccgccgctgccaagacgcacactaccgccctggccggcaggagtccaagccccgcttctggccgaagaggtgaaggcgatgctccattttccgaaccggggacaacctcaactcagaggccatcctctcctgaaacagcaacaaaacagccaagttctccttacgaggataaagataaagacaagaaggaaaagtctgcaactcgcccctccccctcaccagagcgctcctcaacaggaccagagccacctgctcccacacccttactggcagagcgtcatggtggctctccacagcctctcgccacaacaccactgagtcaagaacctgttaacccccccagcgaggcttctccaaccagggatagatcgccgcctaagtctccggagaaactgccacaaagttccagcagcgaatccagtccaccttccccacaacctaccaaggtttcgagacatgcttccagttcccccgagagtcctaagcccgccccggcccccggcagccacagagaaattagctcctccccaacatctaaaaataggtcacatggtagggccaaacgggacaaaagtcatagtcatacaccctctaggagaatgggccgcagcaggagcccagctacggccaagagagggcgcagccgttctcgcacacctacgaagcggggtcattctcgatcaaggtcaccacagtggcgaagatctaggagcgcccaaagatggggtagaagcaggtccccccagcgcagggggagatcaaggtctccccaacggccgggttggagccggagtcggaacacacagcgcaggggccggtcaagaagcgcacgcagggggcgatcgcattccaggtcacccgcgacgcgaggccgaagtcggtcacgaacaccagccaggcggggtcgctcccgctcgcgcactcccgcgcgccgaagaagccgaagccgcacaccaacacgccggaggtccagatcccggactccagcacggaggggaaggagtcgttcacgtacaccagccagacgcagatcacggactcgttcccccgtgaggcgcaggtctagatccagatcccctgccaggcgatcaggccgcagtcgatcacggaccccagctcgtagaggccgtagcagatctcgtacccctgcacgacgcggccggtcacggagccggactcccgcacgtcgtagtggacggagtaggtcacggacgccggctcgacgaggtagaagcagatcaaggacaccaagacgagggcgcagccgcagtaggagtctggtgagaaggggtagatctcactccaggacaccacagcgtcgcggcaggagcggatcaagcagcgaaagaaagaataaatcaaggacatctcagcggcgctccagatctaactctagcccagagatgaaaaagagtcgaattagttccagaaggagcagatcactctcgtcccctcgttctaaagcgaaatcccgtctgagcttgcggcgctccctgtccggcagcagtccttgtcctaagcaaaaaagccagactcctcccaggcggtcccggtcaggaagttcccagcctaaggccaaatctaggacccccccccggcgaagccgctcaagcagctctccaccacctaaacagaaaagtaagacacctagccggcaatcccactcaagcagctccccacacccaaaggtcaaaagcgggacccccccaaggcagggttccataacttcccctcaagccaacgaacaaagcgttactccacagaggcgatcgtgtttcgagagcagccccgaccctgagctgaagagccggaccccatcccgccactcttgttccggctctagccccccgcgcgtgaagtcatccacacctccaaggcagtctcctagcaggtcctcctccccccagccaaaagttaaggcgattattagtccaagacagcgtagccattccggcagctcctcgccaagcccatcacgggtcacttcacgcactacgccacgccgttcccggtccgtgagtccttgctccaacgtagaaagtcgactcctcccaaggtacagccatagtgggagctcatctcccgacacaaaagtgaagcctgagaccccaccccggcagtctcattcaggaagcatcagtccgtaccccaaggtaaaggctcagactccccctggcccttccctcagtggttcaaagagtccctgtccccaggagaaatcaaaagattctctggtccagagctgtcccggtagtttaagcctgtgtgccggggtcaaaagttccactcccccaggggaatcatatttcggggtgagcagtcttcagttgaaaggccagagtcaaactagtcctgatcatagatctgacacctcgtcaccagaagtaaggcagtctcatagcgaaagtccttcactgcagtcaaaaagccagacatcgccaaagggcggacgatcccggagctcttcccctgtcactgagctcgccagcaggtccccaatacggcaggacagaggggagttctcagcttcccccatgctgaaatcaggcatgagtcctgagcagagcaggtttcagtcagacagtagtagctatccgaccgttgactccaattcactattggggcagtcgcggctggagaccgctgaaagcaaggaaaagatggccctgcccccacaggaggacgctactgcttcccctcccaggcagaaagacaaattttctcccttccctgttcaggaccgacccgagtcgtccctagttttcaaagatacactccgcactcccccaagagaacggagtggggctggtagctctcctgaaacaaaagagcaaaacagtgccctgcctacaagtagccaggatgaggagcttatggaggttgtcgagaaatctgaggagcctgcgggccagattctgtcacacctctccagcgagttaaaagagatgtcaacatctaacttcgaatcaagtccagaggtcgaagaacggcctgccgtttccctcacattggaccagagccagtcacaggcaagcttggaagctgtggaagtaccgtctatggctagttcgtggggggggccccacttctcccccgaacataaggagctctcgaattctccacttagagagaattccttcggctcacctttggaattccgtaactctggccccctgggcaccgaaatgaacacagggttctcatccgaggtgaaagaagacttgaatggaccatttctcaaccagctggagactgacccaagtctggacatgaaagaacagagtacacggtcgtctggccatagtagttccgaactgtccccggacgccgtcgaaaaggccggcatgtcttcaaaccaaagtatcagcagcccagttctagacgccgtgccaagaacgccctcgcgtgagcgctctagctctgcctccagcccggagatgaaagacgggctccctagaacaccttcgagacgctcaagatctgggtcctcaccaggattacgggatggctcaggcacgccttcaagacactcactgtctgggtcttctcccgggatgaaagatatcccacggacaccaagtagagggagatccgagtgcgacagcagtcccgaaccgaaggctctgccacagacacctagaccccggtctcgtagccctagctctcctgaattgaacaacaaatgtctcacaccacaacgagaaagatctgggagcgagagctcagtagatcaaaagactgtggctcgtacccctctggggcagaggtcccggagtggctcttcccaggaactcgacgtgaaaccttccgccagcccacaggagcgatctgaaagcgatagttctcctgattccaaggccaaaactcgaacaccactgcgccagagaagtcgctcggggtcctctcccgaagtcgacagcaagtccagactctcaccccgaaggagtcgctccgggtctagcccagaggtgaaggataagccccgagcagccccaagggctcagagtgggtccgattcttcacctgaacccaaagccccggcgccaagagctttaccccggcgaagtaggtcaggaagctcttccaagggtcgaggcccttctcccgagggaagcagttctaccgagtcttctcctgagcatcctcctaagtcaaggacagctaggaggggtagtcgctccagccccgaacctaaaactaaatcccgtacccccccaaggcgcagatcctccaggagtagtcccgaactaactcggaaggcacgactctcaaggcgctcgcggagtgcctcatctagtcccgagacacggtcacgcacgccaccacgacacaggagatctccaagcgtgtcctcccccgaaccggcagaaaaatcccgatcctcaaggcggaggcggagtgcctccagtcctcggacaaagacaacatctcgacgaggtcggtcccccagcccaaaaccaagggggctgcagagatcgcggtcgcgcagccgccgcgaaaaaacacgcaccaccagacgccgggatcggtccgggtctagtcaatcgacaagtcgtcggaggcagcgaagcaggtctcggtctagagtgacccgtagaaggagagggggtagcggataccatagtcgttccccggcaaggcaggagtccagccgaacatcctctcgtcgtcgacgtgggagaagcaggactccacccacctccagaaagagaagtaggtcccgcacgtcgccagctccgtggaagcggtccaggtccagggccagccctgccacccacagacgctcacgcagtaggactcctctgatctcgcgacggcgaagcaggagcagaacctctccagtttccaggagacgctcacgtagcagaaccagcgtgacacggcgccgatccagaagtagggctagccccgtgagtagacgtcgaagcaggtctaggaccccacctgtgacacgaaggcgttctaggagcagaactccaacaacccgtcggcggagtcggagcagaacgccacccgtaacccgcaggagatcccggagcagaacaccccccgtgacgagacgacgttctcgctcccggacgtcacctattactcgaagaaggtcccgatcccggaccagtccagtgacacggcgccgttcgagatcccgaacatcgcccgtcaccaggaggcggtcaagaagtcgcacttctccggtcacacgccgaagatctcgctcccggaccccacctgctcaagaccaacctagatccccggtgcccagcgcgttttctgatcagagtagatgcctgatcgcccagactacccccgttgccgggtcccagagtttgtcttccggcgctgtggctacgacaacctcttccgccggggaccataacgggatgctcagcgtacccgcgcctggggtgccacattcagatgttggtgaaccccccgcgtccacgggcgcacagcagccctccgccctcgctgcattgcagccggctaaagaaaggagatcatctagttcttctagtagttcctcctcatcttcaagttcaagctcttcgtccagctctagctcttcttcgtctggatcgagctcctccgacagcgagggctcttccctgcccgtacagcccgaggttgccctgaagcgagtacccagccctacaccagctcccaaagaagctgtgcgggaagggaggcctcctgagccaacccctgccaaacgcaagaggcgctcctcatcctcctctagcagcagctcttcctccagctcatcatccagctccagttctagctcctcttctagtagtagttcgtcatcttcttcatcttcgtcttcgtcctcctcttcctcttcatctccctccccagccaaacctggtcctcaggcccttcctaaaccggccagcccaaaaaaacctccgcccggcgaaagaaggtcgaggagcccgaggaaaccaattgacagtttgcgcgatagcaggtccctttcctactctcccgttgagcgccgaaggcccagccctcagccctctcctagggatcagcagtccagcagctctgaacgcggttcgcggcgcgggcagaggggagactcccgatccccctctcacaagagaaggagggagacaccttcaccccggcctatgagacacagaagctcacgatccccatag

SEQ ID NO: 133864 - DNA, 936 bp, synthetic construct
  misc_feature 1..936: note = Description of Artificial Sequence: Synthetic coding sequence
  source 1..936: mol_type = other DNA
atgttactggagaaggacgttaaccctggaggaaaagaagagacaccagggcagcggcccgcagtgaccgaaacacaccagttagccgaactcaacgaaaaaaagaatgagcgcttaagggctgcatttggcatcagcgattcctatgtagatggctcttcctttgatccccagcgcagggcgcgggaggcaaaacaacccgccccggagccgcctaaaccttattccctggttcgggagagctcaagctccagatctcccacccccaagcagaaaaaaaaaaagaaaaaaaaagaccgcggaagaaggtctgagtcaagttctccccgacgcgaaaggaagaaatctagcaagaagaaaaagcaccggtctgagagcgagtccaagaaacggaaacacaggagtccaacaccaaaatcgaagcgcaagtcaaaagataaaaagagaaagcgaagcaggagtacaacaccagctccaaaaagtagaagagcccataggtcaacttctgcggactctgccagtagcagcgacacatcccgctcgcggagtcgctctgccgctgcgaaaacccacactaccgcccttgccggccggtctccctctccagcctcaggcagaagaggggagggtgacgccccgttcagtgagcccggtaccacctctacccagcggccctcttctcccgagactgccactaagcaaccgagcagcccttatgaagacaaggacaaagacaagaaggagaaatcagcaacgaggccgtctcctagtcctgagaggtccagtacgggccccgaaccgcctgcaccaacgcctctgttagccgagagacatggcggaagccctcagccactggccactacccctctcagccaggaacccgttaacccttctccacagcttttcatgtttcttaagggcatcctggtgttctag

SEQ ID NO: 133865 - DNA, 2871 bp, synthetic construct
  misc_feature 1..2871: note = Description of Artificial Sequence: Synthetic coding sequence
  source 1..2871: mol_type = other DNA
cgccggagacgcctaagacgggctgaccgccgtggagaggcggcagctcccgggccacgcgatagcggggcacgagccgcggcggccgcacgcccactgccactgggtggagggggtcggcgaagacgcgtcaggggctatgaagaacagcaaatacaggagaaggtggccactttccggttgatgctactagagaaagatgtcaacccaggaggcaaggaagagacaccaggacagcggcctgctgtaaccgagacccatcagctggctgaacttaatgaaaagaagaatgagaggctccgcgccgcttttggcataagcgactcatacgtggatggatcttcttttgatcctcagaggcgagcgcgtgaagctaaacagcctgcccctgagccacccaagccatatagcctggtgcgggagtccagctctagcaggtccccaactccaaagcagaagaaaaagaaaaagaagaaagatcgcggcaggcgaagcgaatcctcaagccccaggcgggagcgcaagaagtccagtaagaagaagaagcatcgctctgagtcagagtcaaaaaaaagaaagcatcggagtccgactccgaaatcgaagcggaaatctaaggataagaaaaggaaacgtagcagatccacaactcctgcccccaagtccagacgggctcacagaagcacatctgccgactcggcttcctcctctgacacctctcgatcccgatctaggagcgccgctgctaagacacacaccaccgccctggcaggaaggtctccgtcacccgctagtggcaggaggggcgagggggatgcccctttctcggagcccggcacgacttccactcaaaggccctcctcccccgaaaccgctactaaacaaccaagctccccctatgaggacaaggacaaggacaaaaaagagaagtctgcaacacgaccttcaccttccccagaacgctcgagcacaggaccagaaccccctgcccctacccctctgcttgctgagcgacatggcgggtccccccagcccctggccacgaccccgctgtcacaagagccagtgaacccgcctagcgaagcctcacctactcgcgatcgctcccctcccaaatcccctgaaaagttgccccagagtagctctagcgagagctccccgccttcacctcagccaacaaaggtatcccggcatgcaagtagcagccccgagtctcctaagcctgcccccgcaccaggctctcacagggaaattagtagtagccccacatctaagaacagatcccacgggagggcgaagcgggacaagtctcattcgcacaccccctctcgcagaatgggcagatctagatcacctgcaactgccaaaagagggaggtctaggtccaggactccaaccaagcgcggccacagtaggagtcggtcaccgcagtggaggaggtcccgttcagcacaaagatggggacgcagccgcagtccgcagcggcggggccggagccgaagtcctcaaaggcccggatggtctcgtagccgcaacactcaaaggagaggacgatctaggagcgcacggaggggccggagccatagccgctcgcctgcgacccgaggaagaagtagaagccggactcccgcacggcgtgggcggtcccggagcaggacccccgcacggcggagatccaggagtcgaaccccaacgcggcgtcgctcacgcagtcgaacccccgcgcggcggggcagatcccgttctagaacgccagccagacggaggtcccggacccgttcacccgtcaggcggaggagccggtcaagatcaccagcccgccgttctggcaggtcccgcagtaggacacctgctcgaaggggccgctcgcgaagcaggacccctgcaaggaggggtcgctcccggagtagaacgccagcccgccgctctgggcgcagccgatctaggaccccagctagaaggggaaggtcgaggtcccgaactccgcgccggggcagatcccgttcacgttccctcgtgagaagggggaggtcgcatagtcggacgccacagcgacgcggaagaagtgggtcatcttccgagcgaaagaacaagagccggacgtcacaacggaggtccagatcgaacagcagccccgagatgaaaaagagcaggatctcatctcggaggtcccgctctttgagtagccctcggtcaaaggcaaagtctcggttgtctctgcggcgctctttaagtgggtcgagcccttgccctaagcagaagagtcagactccgccccgaaggagtaggtctggaagttctcagcccaaagctaagtcaagaacccccccaaggcggtcacgcagttcaagtagccctccacccaagcagaagtccaagactccaagcaggcagagtcattcaagttcttcgccgcacccaaaagttaagagtggcaccccgcccagacagggctccatcacttctccccaagccaatgaacagagtgtgacaccccaacgaaggtcttgctttgagagctccccggacccggagctcaagagtcggactccttcccgccattcttgttccggcagcagcccacctagagtcaagtccagtacaccaccccggcaaagtcccagtagatcctcctctccccaaccaaaggtgaaggccataatcagcccccggcagcgcagccactccggctcctccagtccgtctccaagtagggtcacatcgagaaccactccaagaagaagcaggtccgtgtctccatgcagcaacgtcgaaagccgcctgctgcctcgatactctcattcagggtcctcttcacccgatacaaaagtgaagccagaaactccacctcggcagtcccattccggttag

SEQ ID NO: 133866 - DNA, 6036 bp, synthetic construct
  misc_feature 1..6036: note = Description of Artificial Sequence: Synthetic coding sequence
  source 1..6036: mol_type = other DNA
atgaagaaatctcgcattagcagtagacggagccggtccctgtcctccccaaggtctaaggctaagagcagattgagcctgaggagatctctcagtggatcttccccctgtccaaagcagaagtcacagacaccacctaggaggtcccgttcagggtccagtcagccgaaagccaagagcaggactccgcctcgcaggtcaagaagctcctcatcccccccaccaaagcaaaagagcaagacaccttcgcggcagagccacagctcctcttcccctcacccaaaggtgaagtctggaacccccccacggcaggggagcattacgtctccacaggcgaacgagcaatcagtcaccccccaaagacgctcttgcttcgaatctagtccggatcctgagctaaaaagccgtacaccgtcaaggcactcctgttcggggagttccccgcctcgtgttaaaagtagcacaccgccaaggcaatccccttctagaagctccagccctcagccgaaggtgaaggccatcatttcaccacgccagcgcagtcactcagggtcttcctcaccgtctccctccagagtgacatcacgcacaacccctcgccgatcaagatccgtgtcaccttgcagcaacgtagagtcgaggttgcttccccgatactctcatagcgggtcaagttcacctgataccaaggtcaagcccgaaacaccgcccagacagagtcacagcgggtctatttcaccttaccccaaggtaaaagctcaaacccctcccggtcccagcttaagcggaagcaaatccccgtgcccccaggagaagagcaaggacagcttggtgcagtcctgcccaggtagcctttctctctgcgctggagttaaatcctccacgccacccggcgagtcttacttcggcgtgtcttccctgcagctcaagggacagagccagactagcccagaccataggtcagacacctctagcccagaagtaaggcagtcacactctgaatccccttctctccagtccaagagccagaccagcccaaaaggaggaaggagccgttcttcgtctccagtgacagaactggcctcaagaagccccattcgccaggacagaggtgaattctctgcctccccgatgctcaaatcgggaatgtctcctgagcagagcaggtttcagagcgactcttctagctatccaacggtggatagcaattcacttttgggacagtccagattggaaactgcggagagtaaggaaaaaatggcgttgcctccccaagaggacgcaaccgctagcccccctcgccagaaggataaatttagtcccttccctgtccaggatcggccggagagcagcctcgtgttcaaagatacactgaggacgcctcctcgcgaaagatcaggagccggctctagtcctgaaactaaagagcagaatagcgccctgccaacttccagtcaagacgaggagttgatggaagtcgtggaaaagagcgaggagcctgccggccagatccttagccatttgtcttccgagcttaaagagatgagcacctctaactttgagagctccccggaggtagaagagcggcccgccgtttccctcaccctggatcagtcacagtctcaggcctctctggaggcagtagaagtaccatctatggcctccagttggggtgggccccacttctcccctgagcataaggagttatctaactctccgctgcgagagaactcgttcggctctcccctcgaatttaggaactcaggacccctcggaacagagatgaacactggatttagttccgaggttaaggaggacctgaacggtcccttcctgaaccaactagagaccgatccaagcctagatatgaaggaacaaagcacaaggtctagcggccactcatcctcagagctgagtcccgacgcagtcgagaaggccgggatgagctcaaatcagtctattagcagcccggtcctcgacgctgtacccaggaccccatcaagagaacgcagctccagtgctagcagccctgagatgaaggacggactgccacgcaccccttcgcgtagaagcagatccgggtcatccccgggtttgcgggatggctcaggaaccccttcccgacattcccttagcgggtcctctcctggcatgaaagacataccccgcaccccatccagaggacgcagcgagtgcgactcctcacccgagccaaaggcacttccacagacgcctagacctcgcagccgttcaccgagtagtccagagctgaacaacaagtgcctgacacctcagagagaaaggtcaggaagtgagtcctcagttgaccagaaaaccgtcgccaggacacccctggggcaacgcagtcggtctggatcgagccaagagctggacgtgaagcccagcgcgtccccccaggaacgcagtgaatcagactccagccccgatagcaaggctaagacgcggactcctctacggcagagatctcgctccggcagctcgcccgaggtggattctaagagtcgactttccccccggaggagtagatctggaagttcccctgaggttaaggataagccaagagccgctcctagggcccagtcgggctcagacagctccccggagcccaaggcccccgcccctcgggccctgccgcgcagatctagatccggctccagttccaaaggaagaggcccaagccctgaaggaagtagcagcactgagtcatcaccggagcatccacctaagagtaggactgcacgccgggggagccggagctcccccgaaccaaagacgaagtctagaacgcccccccggaggagaagctccagaagttcacctgagctgactaggaaggcccgattatccagacggagtcgcagcgcttcctcttcccccgagactcgctcccgtactccaccgaggcacaggcgtagcccttcagtctctagccctgagccagcagagaaatcaaggagtagtaggcggcgacgttcagccagcagccccagaacaaagacgaccagtcgacggggacgctccccgtcaccgaaacctcggggccttcagcgctctagatcccgttcgcgacgggagaagactagaacaactagacgacgggatcggagcggatcttcccaaagtaccagtaggcgcaggcaaagatccagatctcggagtcgggtgacgcggagaaggagaggggggtccggctatcattcccggtcacctgctcgccaggaatcatcacggacaagtagtcgccggaggagaggccgttcacgcacccctcctacatccagaaaacgtagcagatctcggacctcaccagccccttggaaacggagccgaagccgtgcttcacctgcaacacaccgtcgcagcagatcgcgaacccccctcatctctcgtaggcgaagtaggtcacgcacaagccctgtgagtaggaggcggagcagaagccgtacttcagtcacacggagacgatctaggagcagggctagtccagtctcacggcgccggtctcggtcccggacgccgcctgtaacccgtcgccggtcgaggtcccgcaccccgacaactaggcgccgaagtaggagcaggacacctcctgtaacccgcagacgctcgcggtcaagaacgcctccagtgactcgacgccgatcacgctcacggacttcccccatcaccaggcgccgcagcaggtccaggacttcccccgtcaccagacgaagatctcgatccagaacctcccccgtgaccagacgacgctctaggtctcggactagcccggtaacacggcggcgtagccgctccaggacccctcctgctattagaaggcggagcagatcgcggacccccctcctgccacgcaaacgcagcaggtcgcgcagcccactggccatcagacgccgctcccggagccggactccgcgaacggcacgcggcaagaggtctctcactcggagtccaccagcaatccgccggcgttctgcatccggcagttcttcagacagaagcagatcagcaaccccaccagcgactcgaaaccacagtggctccaggaccccacctgtggcactaaattcctcccggatgtcatgcttctctaggcctagcatgtcgccaactcctctagatcgttgccggtcaccagggatgctcgagcctctcgggtctagcaggacgcctatgtcagttcttcagcaggcgggaggaagtatgatggacggaccgggccctcgcattcccgaccaccagcgtacatcagtccctgagaatcacgcacagtctagaattgcacttgccttgacagctatcagccttggtacagcacgccccccccctagcatgtccgccgccggcctggcagccaggatgagccaagtgccagccccggtacctctcatgtctcttaggactgcccctgctgctaacctcgcatcacgcatacccgctgcctcagcagcagcaatgaatttagccagcgcaaggacccccgcgatacctactgctgtgaatcttgctgattcaagaacccccgctgctgcagctgctatgaatctggcctcccccaggaccgcagtggccccgtccgctgtcaatcttgccgaccccagaacccccactgctcccgccgttaacctagcaggggcacgaactcctgctgccctggctgctctgtcgctcacaggatcagggacgcctccaacggctgctaactacccgagcagcagccgcaccccccaggctcctgcttccgcgaacctggtgggcccaagatcagctcatgctaccgcacctgtgaacatagctggctcgcgaacagccgccgcattggctccggccagcctcacctccgcccgtatggcccccgcgctgagtggggctaatctcacatcgccaagggtgcccctgagcgcctatgagcgcgtgagtggtaggacatcacctcctttactggatcgggcacgttcaaggacacctcctagtgcaccaagccagagtcgcatgacatctgaacgtgccccttcaccttcctcccgaatggggcaggctccatctcagagcctccttcctccggcccaggatcagcctcggtcacccgtgccctctgccttcagcgatcagagccggtgtcttattgcacagacaacgccggtggcaggctcccagtctctgtcatccggtgctgtcgcaacaacaacatcctccgcgggggaccacaacggaatgctgtccgttcctgcccctggagtgccacattcggacgtgggagagccccctgcaagcactggcgcccagcaacctagtgccctagccgctctgcagcccgccaaggagcggaggagtagcagcagttctagtagtagtagttcatcaagtagttccagtagctcttcctccagctcttcttcgagctccggctccagctcttcagattccgaaggctcatccttgccagtgcaacccgaagtagctcttaaaagagtaccctcacccacccctgcccctaaggaagctgtgagggagggccgtccgccggaacctacaccagccaagagaaagcggagatcctcgtctagctccagttcttcctcctcttccagctctagctcttcatcatcttcaagtagctcatcctccagcagttcctccagctcctccagcagctcttcatctagctcctctagctccagcccctccccagccaagcctgggccacaggctctcccaaaacccgcaagccccaagaagccaccacccggagagcgttccttattgccggtctcgccaagtccgcgacattccctgccccatgtggcccgaggcacgtttttaaagaggactagcgggtatttcccacccctgcacaaaagcttcggcacaccttgtggcctgcaggacaaagcgcctcctctgagggagtggcgcgtgcgccttttcacgaacggtccttgccctccttgtgtgcttctgctccccgccccgacccatgcactctgtagtagccatacacagaggctagcagtctag

SEQ ID NO: 133867 - DNA, 1836 bp, synthetic construct
  misc_feature 1..1836: note = Description of Artificial Sequence: Synthetic coding sequence
  source 1..1836: mol_type = other DNA
atggcaagcgtgcagcagggtgagaaacagttattcgagaagttctggcgaggcaccttcaaagctgtggccactccaaggcccgaatcaattattgtggcgtctatcaccgcgcgaaagccgttgccccggacagaacctcagaataatccggtagtgcccgctcaagacggcccctctgaaaaactcgggcagcacctggctacagaacccttggggaccaactcctgggaacgtgataaaacttgccgagaacttggcgccaccagaggccactccgcgtcgcacgataaggatctgactccccccccgtcctccaggggcaagaagaaaaagaagaaatccaccagaaagaagcgtaggagaagttcgtcttattcacccagcccagtcaagaagaagaaaaagaagtcatcgaagaaacataaacggcggcgcagctttagcaagaagagacgccatagctcttcgagtcctaagtccaagcgacgcgacgagaaacgacacaagaagcagtcccggtcgcggccacgaaagagtcacaggcatcggcaccatcgctgcccaagcagaagtcagagctccgagagcaggccgagctcttgtgagagccgtcaccgagggaggagtcccgaggagggtcagaagagcagaagaagacactcacggcgctgttccaaaacgttgtgcaaggactccccagaggcccagtcctccagacccccttctcagccactgcagatgttgggctacttatccgcccgcggagtcattactgggtctggatccgctgctgatctgttcaccaagacggcctctccactaacgacctccaggggcagatcacaagaatacgacagtggtaatgatacttctagtccccccagcacgcagacaagctcagcacgctcccggggccaggagaaaggctcaccgagcggaggattatcgaaatcccgggagctgaattctgggaacacgagtgacagtgggaattcattcaccacatcctcccctcagaataaaggggcgatgctggagaatctctcccctacgagccgggggagagaatcacggggcttccaatcaccgtgtctcgagtgcgccgaggttaagaagtcttcactggtccccagcaccgccaggtccagccctatgaaaggatgctccaggtcctcatcgtatgcttcgactagatcctcatcacattcttcacggagcccaaatccccgtgcttcgcctcggtacacgcaatctagatctacatctagtgaaaaacgaagttacagtcggagtccttcctattcctctaaatccggaaaacggagccccccaagccggagttcccgctctagaaggtccccctcatatagtaggtatagtccaagtcgagagcgggaccccaagtattcggagaaagacagccaacaacgagagcgcgagagggcacgacgacgcagacgctcttacagccctatgcgcaagagaagaagggacagcccgtcccacttagaggcgcgacgcataactagtgcaagaaagcggcctataccctactaccgacccagcccttcctcttcgggctccctgtccagtacaagctcgtggtactcttcaagcagctcccgatccgcgagcaggagctattcgcggtccagaagccggtcacggagcaggaggaggtcgaggacgagaacatcctcaagtagctcttccagatccccgtctcctgggagcaggtccagatcgcgaagccggtctcggagccgttctcggtcccggagccaaagcagaagctactcaagcgccgacagctacagttccacccgtcggtag

SEQ ID NO: 133868 - DNA, 747 bp, synthetic construct
  misc_feature 1..747: note = Description of Artificial Sequence: Synthetic coding sequence
  source 1..747: mol_type = other DNA
atgagcggaggaggcgtcattaggggacccgccggcaacaacgactgccgcatttacgtgggaaacctcccacccgacatcagaactaaggacattgaagatgttttctacaaatacggcgccatacgggacatagacttgaaaaacagaaggggggggccgcctttcgcgttcgtcgagtttgaggacccacgcgacgccgaagacgccgtttacggcagagacgggtatgattatgatggataccgtctccgggtcgagttccctaggtccgggcgaggcaccggtagaggcggtgggggggggggaggaggaggcgccccccggggcaggtacgggcccccaagccggagatccgagaatagggtggtcgtctcaggactccctccttccggcagctggcaagaccttaaagaccatatgcgagaggcgggcgacgtttgttacgctgacgtgtatcgtgacggcaccggggtcgtggaatttgttcgtaaagaggatatgacctacgcggttagaaaattagataatacaaagtttaggagccatgaaggggaaacagcctacatccgggttaaggtggatggacctcgctccccttcctacgggcgtagcagaagccggtctagatcaagatcacgttcccgctcacggtctaactccagaagccgtagttatagccctaggaggtctcggggctcccccaggtactcacctagacactcccgatcacgatccagaacctag

SEQ ID NO: 133869 - DNA, 606 bp, synthetic construct
  misc_feature 1..606: note = Description of Artificial Sequence: Synthetic coding sequence
  source 1..606: mol_type = other DNA
atgagcggtggcggggtgatcagaggccccgccgggaacaacgattgccggatctatgtcgggaatctaccccccgacatcagaactaaagacattgaggatgtattctacaagtatggggcaatccgagatatagatctgaaaaatcggcgtggcggccccccctttgccttcgtggaattcgaagacccacgggacgccgaagacgccgtgtacgggcgtgatgggtacgactacgacggctatagattgagagtagagttcccaaggtcaggacggggtacaggccgcggtgggggcggtggcggggggggtggcgcaccccggggtaggtatggccccccttccagaagaagcgagaacagagttgtggtgagtggactgccgccgtccggatcttggcaggatctcaaagaccacatgcgagaggctggagatgtgtgttacgcggacgtgtaccgcgacggaacaggagtggtggaattcgtacggaaggaagacatgacttatgcagtgcggaaactggataacacaaagtttaggagtcatgaagtggggtacacacgcatcctgttttttgatcagaattggatccagtggtcttag

SEQ ID NO: 133870 - DNA, 786 bp, synthetic construct
  misc_feature 1..786: note = Description of Artificial Sequence: Synthetic coding sequence
  source 1..786: mol_type = other DNA
atgtcccggtacctacggccacctaatacttcactgttcgtacgcaacgtcgccgacgacaccagatccgaggatctacggcgcgaatttggcagatatgggcccattgtcgacgtgtatgtccctcttgacttctacacaagaagaccgcgcggatttgcctacgtgcaattcgaggatgtgagagatgctgaagacgcactccacaacctggataggaaatggatttgcgggagacaaatcgagattcaattcgctcaaggcgatcgcaaaactcccaaccagatgaaggcgaaagagggtcgtaacgtttacagtagctcccggtacgacgactatgatcggtaccggagatcgcgcagcaggtcctacgaaaggaggaggtcccgctcccggagcttcgattataattatagacgcagctacagcccccggaaccgcccaacaggccgtcccaggcgatcccggtcacactcggataacgatcggtttaaacataggaataggtcattcagtaggtcgaagagtaattcaagaagcaggtcgaagtcccagccaaaaaaggagatgaaagctaaatcaagatcacgaagcgcttctcacacgaaaactcgcggcacatcgaaaaccgattccaaaacacactacaaatctgggagtagatatgaaaaggagtcccgcaaaaaggagcccccacgttctaaatctcagagcaggtcccagagtaggtctcggtctaaaagtaggagtcgctcatggacctctccaaaatcgtctgggcactag

SEQ ID NO: 133871 - DNA, 552 bp, synthetic construct
  misc_feature 1..552: note = Description of Artificial Sequence: Synthetic coding sequence
  source 1..552: mol_type = other DNA
atgagtcggtatttacgaccccctaacaccagtctctttgtgcgtaatgttgctgatgatacgagatccgaagatctgaggagagaattcggtagatatggcccgatagtggacgtgtatgtgcctctggacttctatacccggcgcccgagagggtttgcctacgtccagttcgaggacgtgcgggatgcagaggatgcgctgcataacctcgaccggaaatggatctgcggaagacaaatcgaaattcagtttgctcagggagacaggaagacgccaaaccagatgaaggccaaagaagggaggaacgtttatagctcctctagatacgatgactacgacagatatcgccgctcccgctcacgcagttacgaacggcgccgttcccggagcagatctttcgattataactacagaaggagctattcccccaggaactcccgacctactggccggccccgccgaagccggtcccattccgataatgaccggcccaattgctcatggaacacccagtactcaagcgcgtattacacgtcgaggaaaatatag

SEQ ID NO: 133872 - DNA, 522 bp, synthetic construct
  misc_feature 1..522: note = Description of Artificial Sequence: Synthetic coding sequence
  source 1..522: mol_type = other DNA
atgtcacggtacctgaggccacccaatacctcgctgttcgtcagaaacgtggcagatgatactcgtagcgaggatctgcgtcgggagtttgggcggtacggacctatcgttgatgtgtacgtacctcttgatttttatactcgccgcccgcgtggttttgcatatgtgcaattcgaagacgtgagagacgccgaagacgcgttgcacaacttggacagaaaatggatctgcggcagacagattgagatccagtttgcccagggagacaggaagacaccgaatcagatgaaggctaaggagggacggaatgtatacagcagttcaagatatgatgattatgaccgctatcgccgatcgagatccaggtcctacgagagacgtcgaagcaggtcaagatctttcgactacaactatagacggtcttactccccccgaaatagccgaccgacagggcgccccagacggtcacgcagccacagcgataacgacagccaggtgagtaagaaaaaaaatgagcggtag

SEQ ID NO: 133873 - DNA, 519 bp, synthetic construct
  misc_feature 1..519: note = Description of Artificial Sequence: Synthetic coding sequence
  source 1..519: mol_type = other DNA
atgagccggtatctgcggcctcccaacacctcactcttcgtccgcaatgttgctgatgacaccagatcagaagacctacgcagagagttcggaagatacggaccaatagtggacgtatacgtcccactggatttctacactagacgtccgcgcggcttcgcttacgtgcagtttgaggatgttcgcgatgcagaagatgccctacataatcttgatagaaagtggatatgtggccgtcagatcgagattcagtttgctcagggtgatcggaaaacaccaaaccaaatgaaggctaaagaagggcgcaacgtctacagctcctcccgatatgacgattacgaccgctaccggcgttctagaagccgttcttacgaaagaagacgatcacgtagcagatcatttgactataattataggaggtcatattcacccagaaacagaccaactggcaggcctaggcgcagtagatcccattccgacaatgactcccaagtgtccaaaaagaagaatgagagatag

SEQ ID NO: 133874 - DNA, 498 bp, synthetic construct
  misc_feature 1..498: note = Description of Artificial Sequence: Synthetic coding sequence
  source 1..498: mol_type = other DNA
atgagtcgttaccttcggccacctaatacttcgctgtttgtgcgcaatgttgccgatgacaccaggtctgaagatctgaggcgcgagttcggtcgttacggaccaatagtcgatgtttacgttcccctcgacttttacacacgccgacctcgggggttcgcctatgtgcagtttgaggacgtcagggatgctgaggatgctctgcacaacctcgaccgtaagtggatttgtggtagacagatcgagatccagttcgcgcagggggatagaaaaaccccaaatcagatgaaagcgaaagaggggcggaacgtatactctagttctaggtacgacgactatgaccgatatcgacgctcaagaagcagaagctatgaaaggcgtagaagtcgctcccggagcttcgactacaactatcgaagatcctattccccaagaaaaccaaattgttcatggaacacacaatattcgtccgcctattacacaagtcgcaaaatttag

SEQ ID NO: 133875 - DNA, 549 bp, synthetic construct
  misc_feature 1..549: note = Description of Artificial Sequence: Synthetic coding sequence
  source 1..549: mol_type = other DNA
atgtctagatacctgcgccccccaaacacctccctcttcgtccgcaatgtggccgacgacactaggtccgaggacctgcgccgcgagtttggaagatacgggcctattgtcgacgtgtacgtgcctctggacttttacactcggcgccccagagggtttgcctatgtgcaatttgaggacgtgcgtgatgcagaggatgctttacacaatctggacaggaaatggatctgcggtaggcagattgagatacagttcgctcaaggtgataggaagacccctaatcagatgaaagcgaaggaaggtagaaatgtctacagttcaagtagatatgacgattacgaccgttacagaagaagtcggagcagatcttacgaaagaaggagaagcaggagcaggtcgttcgattataactatagacgcagctattcacctaggaatcggcccaccggtaggcccaggagaagtcgatcccatagcgataatgacagaccgaactgctcctggaacacgcagtattccagcgcctactacacctcgcgcaaaatctag

SEQ ID NO: 133876 - DNA, 789 bp, synthetic construct
  misc_feature 1..789: note = Description of Artificial Sequence: Synthetic coding sequence
  source 1..789: mol_type = other DNA
atgtcccgatacctcaggccaccgaatacatccctgtttgttagaaacgtggctgatgacaccaggtctgaggacctgagaagggagttcgggagatacgggcccattgtcgacgtgtacgtgccactggatttttacacccgccggcctcgcggatttgcctacgtgcaattcgaggacgtgcgggacgctgaagatgcactccacaatttggatcgcaaatggatctgtggacgacaaatcgagattcagttcgcccagggcgatcggaagaccccgaatcaaatgaaggctaaggaggggaggaacgtgtatagcagttcccgctatgatgattacgaccgatatagacgttcccggtcacgctcttacgaacggcggagaagcagaagcaggtctttcgattacaattataggaggtcctattctcctagaaactcccggcccacaggtagacctaggagatcccggtctcacagcgacaacgatcgattcaagcaccgtaatcgatctttcagccgatccaagtcaaatagccgaagccgaagcaaaagtcaaccaaagaaagagatgaaggcaaaaagccgatctcgtagcgcgtcgcacactaagactcggggaacatccaaaactgattccaagacccattacaaatctgggagcaggtacgagaaagagtcccggaagaaggaacccccacgatctaaatctcagtcccgatcccagtccaggtcgcggagtaagtctaggtcgcgctcgtggacttctcctaaatctagcggccattag

SEQ ID NO: 133877 - DNA, 1275 bp, synthetic construct
  misc_feature 1..1275: note = Description of Artificial Sequence: Synthetic coding sequence
  source 1..1275: mol_type = other DNA
atgatcaataatcaccgcaatcaggcactctacttttcagaacataaatactttcaacagacccaggtcgtctatcagggtgacattttttgggtgttcctatgcgtgttttgcttgcggaaagagtgcgtgctcatgcaggggtgcttctctgctggcgtgatccctgatgaggctaaagctttgagtttgctggcacccgccaatgctgtggccggcttactgccagggggcgggttactacctacccccaacccactcacccagataggcgcagttcccctggctgctctgggcgctcccaccttggaccccgcactcgctgcactgggactaccaggagccaacctgaatagccagtctctggccgcggatcagctcttgaaattaatgtccaccgtggatcccaagcttaaccacgtcgcagcagggctggtgtctcctagcctgaaaagcgacactagtagcaaagagattgaggaggcaatgaagagggtacgcgaggcccaatccttaatatctgcagcaattgagcctgacaaaaaagaagaaaagagaaggcattcccggagccgtagccgctctagacgcagacgtaccccatcatccagccgccatcggagatcacggtctcgctctaggcgacggagccactccaagtcccgatcccgcagaagaagcaagtcccctcgtcggaggcgtagtcacagcagggagagaggacgtcggtccaggtctacatccaagacccgagataagaaaaaggaagataaagagaagaaacgatccaagaccccacccaagtcttactcaactgcaagacgctcaaggtcagctagtagagaaaggaggcgacggcgatctaggtctggcacacggtcacctaaaaagccgaggagccccaaaagaaagctttcgcggtccccttcccctcgacgacacaagaaagaaaagaaaaaggataaggataaagaaagaagcagagacgagcgggagagatcaaccagtaaaaagaagaaatcgaaggataaagagaaagacagggaaaggaagtctgaatcagataaggacgtaaagcaagtgactcgggattatgacgaggaagagcaggggtacgattcagaaaaagaaaaaaaggaggagaaaaagcccatcgagaccggttcaccgaagaccaaggaatgttctgtggaaaaaggtacgggagactcactgcgggaaagcaaggtgaacggagacgaccatcatgaggaggatatggacatgtccgattag

SEQ ID NO: 133878 - DNA, 1455 bp, synthetic construct
  misc_feature 1..1455: note = Description of Artificial Sequence: Synthetic coding sequence
  source 1..1455: mol_type = other DNA
atgtccaacactacggtggttcctagtaccgccggccccggccccagcgggggcccaggcggagggggcggaggaggaggaggtggcggaggcaccgaggtcattcaggttactaacgtcagcccctcagcctcatccgagcaaatgaggaccctctttgggttcttgggaaaaatagacgagctgcgattgtttccaccagacgattctccactacccgtcagctccagggtgtgtttcgtgaagttccatgatcctgattcggccgtggtggcccaacatttgacgaatacagtttttgtggatcgggcactgatagtagttccatacgccgagggtgtgatccctgacgaggcaaaagcactcagcttgctggctcctgctaatgcagtggcgggactgctgcccgggggggggcttctgccaacgcccaaccccctcacacaaatcggcgctgttccactggcggccttgggagccccaacactggacccggcactggccgcgctggggctgcccggggcaaacttgaactctcagtcactcgcagcagaccagctcctcaagctcatgtcaacagtggaccctaaattgaatcacgtggcagctggactggtatcgccctctctgaaatcggacactagcagcaaagaaatcgaagaagccatgaaaagagtccgtgaagcccagtccctgatcagcgccgcaatcgagcccgataaaaaagaggaaaaacggaggcatagtcgctctcgcagtcgatcgcgaagacgccgtactcctagttcctccaggcatcggagatcgcgttcaaggtcccggcgtaggtcgcactctaagagcagatcacggaggcgcagcaaaagcccccggcggcgtagatcccacagcagggagaggggcaggagatcacgtagcacctccaagactagggacaaaaagaaggaggataaggaaaagaagcggtccaaaacacctcccaagtcatactctactgctcgccgctccagaagcgcttccagagagaggaggcggagacgatccagatcaggcactcggagccctaagaaaccacgctctccaaaacgaaagttatcacgatctccgtctccaaggcgacacaagaaagaaaagaaaaaggataaagacaaggagcgatccagggacgagcgggagcgctccactagcaaaaagaagaaatctaaggataaggaaaaggaccgcgagcgaaagtccgagtcagataaggatgtaaagcaggtcacccgagattacgatgaggaagaacagggttacgactcagagaaagagaagaaggaagagaaaaagccaatcgagactgggagtccaaagaccaaagaatgtagcgtagaaaagggcaccggcgattctttacgggagagtaaggtgaatggcgacgaccatcacgaggaggacatggacatgagcgattag

SEQ ID NO: 133879 - DNA, 1452 bp, synthetic construct
  misc_feature 1..1452: note = Description of Artificial Sequence: Synthetic coding sequence
  source 1..1452: mol_type = other DNA
atgagcaacaccacagtggttccgtcgactgcggggccaggaccttcaggcgggcccgggggcggcggagggggaggcggaggtgggggcggaacggaggttatacaagtcacaaatgtctccccatcggcgtcatccgaacagatgcggacgcttttcggcttcctaggaaaaatcgatgagttgagactgttcccacctgatgactccccacttcccgtgagttctagagtgtgcttcgtcaaatttcatgatccggactcagccgtggtggcccagcatctgaccaacaccgtcttcgtggatcgggctctcatagtcgtaccctacgcagaaggggtgattcctgatgaagctaaagctctctctcttttggctcctgcaaacgccgtcgccgggctattgccgggcgggggattgctgccaacaccgaacccccttactcagatcggggctgtccccttggcagctttaggggcacccaccctcgacccagctttggccgcactgggactcccgggagccaacctgaacagccagtcgctggctgctgatcagctcctgaaactaatgagcaccgtagacccaaaattgaatcatgtggctgctggccttgtttcacctagcctcaagtctgatacaagctcaaaagagatagaggaggcgatgaaaagggtgcgggaagctcaatccctcatttccgccgctatcgagcccgacaagaaggaggagaagaggcgccactctcgatcccggagtcggtcacgccggcgtagaacaccctcaagctcccggcacagaaggtccagatccaggtcccggcgaagaagtcactcaaagagtaggagtaggaggcgatccaaaagccccaggcgtcggagatcgcattcccgggaacgaggcagacgtagtaggtcaacaagcaaaaccagagacaagaaaaaagaggataaagagaaaaaacgcagcaagactcctcccaagtcttacagcaccgcacggcgctctcggagcgcctctcgggaaagacggcgtcgccggagccggagtggaactaggtcacccaaaaaacctaggagcccaaagagaaagctgagccgttccccttcccctagaaggcacaagaaggagaagaaaaaggataaagataaggagcgctcccgggatgagcgagaaaggagtaccagtaaaaagaaaaaatccaaggataaggaaaaggacagggaaaggaagtctgagagcgataaagacgtaaaagtgaccagagattatgacgaggaggagcagggctatgactcagaaaaagaaaagaaagaagagaagaagcccatagaaactggttcccccaagaccaaggaatgcagcgtggagaaaggtactggcgactccctgagggagtctaaagtgaacggagacgaccatcacgaagaggacatggatatgtcagactag

SEQ ID NO: 133880 - DNA, 1170 bp, synthetic construct
  misc_feature 1..1170: note = Description of Artificial Sequence: Synthetic coding sequence
  source 1..1170: mol_type = other DNA
atgagtaacacaaccgtggtaccctccacagctggccccggacctagtgggggccccggtggcgggggcggcggcggcggaggcggaggtggtacagaggtcatacaggtcacaaatgtgtcccctagcgcttcatctgagcagatgcgcaccctgttcggattcctgggcaaaatcgacgaactgagactgttccccccggatgatagtcctttacctgtgagctctagggtatgtttcgtgaaatttcacgaccccgattctgcagtcgtggcacaacatctcaccaacactgtctttgtggatagagctttaatcgtggtgccctatgcagaaggcgttataccagatgaggctaaggccttgagcctcctcgctcctgctaacgcggtcgctggccttctgcctggcggcgggctccttcccacaccaaatcctctgacgcagataggcgccgttcccttggctgccctgggggctccaacccttgaccctgccctggctgccctggggctacccggggctaatttgaactctcagagcctcgccgcagaccagctcctgaaattaatgagcaccgtcgacccaaaactgaatcacgtagccgccggcctcgtgtctccttcccttaagtctgatacctcctccaaagagatcgaggaggcaatgaaaagagtgcgggaggcacaaagccttattagtgccgcgattgaacccgacaagaaggaggagaagaggcggcatagtcgatcaaggtcacgatcccggaggcgccgcactccttcctcaagccgccatcgacggagccggtcgcgaagtcggagacgctctcatagcaaatcccgttcgcgtcgaaggtcgaagtcgcctcgaagaagaagatcccattcacgggaaaggggccgcaggtcaagatccacaagtaaaacccgcgataaaaagaaggaggataaggaaaaaaagcgttccaagactcctcccaagtcttattcaactgcacgacgatccaggtcagcctccagccttcacatctgcgattctcgggaacgtcgacgtagacgctcgcgcagcggaactcggtctccaaagaagccccgatctcccaaacgtaagctctcaagaagcccctcgccgagacgccacaagaaagagaaaaagaaggacaagtag

SEQ ID NO: 133881 - DNA, 1455 bp, synthetic construct
  misc_feature 1..1455: note = Description of Artificial Sequence: Synthetic coding sequence
  source 1..1455: mol_type = other DNA
atgtctaatactacagtcgtaccctccaccgctggccctggaccctccggcggaccaggcgggggtggtggaggcgggggcggtggaggtggtaccgaagtaatccaagtcactaatgtctccccttccgcctcaagtgaacagatgcggaccctcttcggtttcctgggcaaaatcgacgaactgaggctgtttcctccagacgacagccccctgccggtctctagccgcgtctgttttgtgaaatttcatgatccagacagcgccgtggtggcacaacatctgaccaataccgtattcgtggatagggctctgatagtggtgccctacgcagaaggagtaattcctgacgaagcaaaggccctcagcttacttgcaccggccaacgctgtcgccggactgctcccgggcggaggcctgcttccaactccgaaccccctgacgcagattggagccgtgccgttggctgcactcggcgcaccgacactcgacccagccttggcagctctgggtctgcccggcgcaaacctaaactctcagagtttagcagcggatcaactgcttaagctcatgagtacagtagaccccaagctcaatcacgttgctgctggactggttagtcctagcctcaagtctgacacatctagcaaagagatcgaggaggccatgaagcgcgtgcgggaagctcagtcccttatcagcgccgcgatcgaacctgataagaaggaggagaagcggaggcatagcagatcacggagtcgaagtaggcgccggcgcacaccctctagtagccgccatcgccggtctcggagtaggagcagaaggcgatcccatagcaagtcccgctcacgtaggcggtccaagtccccgcgccggcgccgcagccactcgcgcgaacgaggacgcagatcacggtcaaccagtaagacacgtgataagaagaaggaggacaaagagaagaagcgttccaaaactcctcctaaaagttattctaccgcaagacgtagtagatctgcgtcccgggagcgcagacgacgccgctctcgctctggcacacgctcacccaaaaagcctcggtcaccaaagagaaaactgagccgttccccgtcccctcgacgccacaagaaagaaaaaaagaaggacaaagacaaggagcggtcccgggatgagcgtgaaagatccacttctaaaaagaaaaagtcaaaggataaagaaaaggaccgggagcgtaagagtgagtctgacaaagacgtcaaacaggtaaccagagattatgacgaggaagagcagggctacgactccgaaaaagagaagaaggaggaaaagaaaccaatcgagaccgggagtccaaaaactaaggagtgctccgtcgagaaggggacaggtgacagtctcagagagtcgaaagtgaacggagacgaccaccacgaagaggacatggacatgtctgactag

SEQ ID NO: 133882 - DNA, 387 bp, synthetic construct
  misc_feature 1..387: note = Description of Artificial Sequence: Synthetic coding sequence
  source 1..387: mol_type = other DNA
atgagcaatacaactgtggtgccaagtaccgcggggcccggaccttccgggggccctggaggcgggggtggtgggggggggggcggcggagggacagaagttattcaggtcactaacgtctctcccagcgcatcttccgagcagatgagaaccctcttcgggtttttagggaagatagacgagcttagactgttcccccctgatgattctcccttgccggtcagcagtcgtgtatgtttcgtgaagttccatgaccccgactccgcggtcgtggctcagcacctgactaatacagtgttcgtagatagggctctcatcgtagttccctacgcagaggtgaagcaacccaccagggtagttgtgcataagaccgcttttgagagttag

SEQ ID NO: 133883 - DNA, 396 bp, synthetic construct
  misc_feature 1..396: note = Description of Artificial Sequence: Synthetic coding sequence
  source 1..396: mol_type = other DNA
atgtcaaatacaactgtggtacctagtaccgccggcccagggccctctggaggaccagggggagggggtgggggcggtggcggcgggggcggcaccgaggtgatccaggtgaccaatgtgtccccctccgcgagctcagaacagatgcgcacactctttggcttcctaggaaagatcgacgagctccggctgttcccgccagacgattcccccttgccagtgtccagtcgggtgtgtttcgttaagtttcacgatcccgatagcgctgtcgtcgcccagcacctcacgaacaccgtcttcgttgatcgggcgcttattgtagttccatacgcggaagtatttcatggatccatcaaagccgcagtgaaaaagatcctgctgacacacgaaaactag

SEQ ID NO: 133884 - DNA, 630 bp, synthetic construct
  misc_feature 1..630: note = Description of Artificial Sequence: Synthetic coding sequence
  source 1..630: mol_type = other DNA
atgacaagtcttaaagtcgacaacctcacatatagaacctcccccgataccctgcgacgtgtgtttgaaaagtacggcagggtgggcgatgtatatattcctagagataggtacacaaaggaatcacgtggattcgctttcgtgaggtttcatgacaagcgtgacgccgaagatgctatggatgctatggatggtgccgtcctggacggcagggaacttagggtgcaaatggccagatatggaagacctcctgatagccaccacagtagaagggggccaccacctagacgttacgggggcgggggctacgggaggcggtccaggagccccaggagacgtcgccggtcaagatccaggtctcggtcaaggagccgttcccgctcacgctcccggtacagcagatccaagagtcgatctcggacaagatcccggagtcggtctactagcaagtcacggtccgccaggaggtccaagagtaagtcttcatctgtgagccggtctcgctcaaggtctcgctccagatctagatcacgaagcccccctcctgtgtccaagagagagagcaaaagtcgctctcgttccaaatccccaccaaagtcccctgaggaggaaggagctgtgtctagttag

SEQ ID NO: 133885 - DNA, 606 bp, synthetic construct
  misc_feature 1..606: note = Description of Artificial Sequence: Synthetic coding sequence
  source 1..606: mol_type = other DNA
atgagctatgggcggccgccaccagatgtggaaggcatgacatctctgaaggttgacaatctaacatataggacttcgcccgatacccttagaagagtattcgagaaatacggtagagtgggggatgtctacattcccagagatcggtacacgaaggagagtaggggcttcgctttcgtgcgatttcacgacaagagagacgccgaagatgctatggatgccatggatggcgccgtgttagacggaagggagctccgggtgcagatggcgaggtgtggcggctacgggcgtcgctccagatctccgagacgaagaagacgctcccgctcacgttcaagaagccgcagcagaagcagatcacggtctaggtatagcaggtctaaatccagatccagaacaagaagcaggtctagatccacgtccaagtctcggagcgcaaggaggtcaaaatccaaaagctccagcgtttctcggagcaggtcccggtctcgctcccggtcacggagtcgcagcccccccccagtgtcaaaaagagagagcaagagtcgcagccgctcaaagagcccacccaaatccccagaggaagagggggctgtgtccagctag

SEQ ID NO: 133886 - DNA, 666 bp, synthetic construct
  misc_feature 1..666: note = Description of Artificial Sequence: Synthetic coding sequence
  source 1..666: mol_type = other DNA
atgagctatggcaggccaccccccgatgtggaaggcatgaccagcctgaaggtggataacttaacctaccgcaccagtcctgatacacttcgacgggttttcgagaaatatgggcgcgtgggtgacgtctacatcccaagagatagatatacaaaagagagcagaggattcgccttcgtgcgcttccatgataaaagggatgctgaggacgcgatggatgccatggatggcgctgtgttggacggccgcgagttgcgcgtccagatggcaagatacgggcggccgccagacagccatcactccagacgcggacctccaccccgcagatatggtggaggaggttatggaaggaggagtcggagcccgcgcaggcgccggagatcccgcagcagatctagatctagatctcgctctagaagcagatctcgttactctcgttctaagtcccggtcaaggacaaggagcagatctcgttctacttccaagagcagaagtgccagacgctccaagagcaaaagtagttcggtgtctagatcaaggagccggagtcggtcacgcagccgctccagatcaccgcccccagtatcgaaaagggaatcaaagtcaaggtctcgttccaagtcccctccaaagtctccggaggaggaaggagccgtcagctcttag

SEQ ID NO: 133887 - DNA, 540 bp, synthetic construct
  misc_feature 1..540: note = Description of Artificial Sequence: Synthetic coding sequence
  source 1..540: mol_type = other DNA
atgtcgtatggccgcccccctccggatgtggaggggatgacttccctaaaggtggacaatctaacctaccgtacatccccagatacattaaggagggtgtttgaaaagtacggacgtgttggtgatgtatacataccccgggaccggtataccaaagaatcccggggctttgcttttgtgcggtttcacgataagagggatgccgaagatgccatggacgccatggatggggcagacccaggagtgggcgtcgtcccaggtctagccgccgacctggcaacggctgctaggtccttaggacccgccctggtgctggacctcggacgacccccatctcccgaccctcacgagggtccctctcccagccctaggagatcgccagatctggtccggggcccaggccccggactgggtccaggtgtactgccacagtgccccagagggaatcccaatccggggagggataggcgtgtgcctcctagtttattgaaaagaaaggagcgctgtccgctcaaaaagatgctgcggtctcctgtttag

SEQ ID NO: 133888 - DNA, 669 bp, synthetic construct
  misc_feature 1..669: note = Description of Artificial Sequence: Synthetic coding sequence
  source 1..669: mol_type = other DNA
cccgaacggcgaggagtggcaccccctagggcagaagaagcaggtgccagcagcaggggatctggaccaccgctgcgcgctatgagctatggtcggccaccaccagacgttgagggtatgacgagtctgaaagtggataacttgacctataggacatcacccgataccttaagaagggttttcgaaaagtacggacgggtgggcgatgtatacattccacgggaccgctatactaaggagagtcgcggatttgctttcgtgcggttccacgacaagcgtgacgcagaagatgccatggacgccatggatggagctgtgctcgatgggagggagttacgcgtacaaatggccagatacggccgacccccggactcacatcactctcggcggggaccaccgccccggcgctacggaggcgggggctatggacgccggtcgcgctcccctcggcggcggcgaagaagcagatcccggtctcgctcccgatcacgttcacggtctagatctcggtactcaaggagtaaaagcaggtcccgcaccaggagtcgctctagatctactagcaagagccgcagcgctcgccgcagcaaatctaagagctcctccgtcagtcgatctagatcaaggtctaggagtaggtctaggagccgttctcctccacctgtctag

SEQ ID NO: 133889 - DNA, 375 bp, synthetic construct
  misc_feature 1..375: note = Description of Artificial Sequence: Synthetic coding sequence
  source 1..375: mol_type = other DNA
atgcacagggatagttgcccactggactgtaaggtatacgtcggaaacttgggaaacaatggaaataaaacagagctggagcgggctttcggctactacggacctctgagatccgtgtgggtggcacgcaatcctcccggctttgcttttgttgagtttgaggatccccgagacgctgccgacgcagtgagggaattagatggccgcacgctttgtggatgtcgcgtgagagtcgaactctcgaatggggagaagaggtcacgcaatcgggggccgcctccttcatgggggcgccgccctcgcgatgactaccgacgacggtcacccccaccgagacgcagagtaacaatcatgtcattacttaccactctgtag

SEQ ID NO: 133890 - DNA, 495 bp, synthetic construct
  misc_feature 1..495: note = Description of Artificial Sequence: Synthetic coding sequence
  source 1..495: mol_type = other DNA
atgcacagggacagttgtccccttgactgtaaagtttatgtagggaatttggggaacaatggtaacaagactgagctggagcgcgcattcggctattatggcccattaagatctgtgtgggttgctaggaatccccctgggtttgcgtttgtggaattcgaagacccaagagatgccgccgatgccgtccgggagctggacggacggactttatgcgggtgcagagtgcgggtcgagttgagcaacggcgagaaaagaagtcggaataggggacctcctccctcctggggacgccgtcctcgcgatgattaccgcagaagatctccccctcctaggaggagaagccctagaagaaggtctttctcccgctctagatcacgttccctgagcagggacaggcgcagggagagaagccttagccgagagcgcaatcataaaccttctcgatccttctcccgctctaggagccgttctagatctaacgaaaggaaatag

SEQ ID NO: 133891 - DNA, 1485 bp, synthetic construct
  misc_feature 1..1485: note = Description of Artificial Sequence: Synthetic coding sequence
  source 1..1485: mol_type = other DNA
atgcctcgggtttatatcggtcgcttgtcttaccaagctcgggaaagagatgtcgagcggttcttcaaaggctatggtaagatcctcgaggtcgatttgaaaaatggctacggtttcgtggagtttgacgatttacgggacgccgatgatgcagtgtacgagctcaacggcaaggacttgtgcggcgaaagggtcatcgtcgaacacgccagggggccccgacgggatggctcctacggctccggtcgcagtgggtacggctatcgacggagtggaagggataagtacggccctcctacccggactgaatatagactgatagtggaaaatctgagcagcagatgttcatggcaagatctcaaagattatatgcggcaggctggggaagtcacgtatgcagacgcacacaaagggcggaagaacgaaggagtcatcgaatttgtgtcatactccgacatgaaacgggccttggaaaaactggacggcactgaagtgaacggcaggaagatccgactggtcgaagataagccagggagccgcagaaggcgatcatattctcgcagtcgctctcactcgcgctcgcgctcccgtagtcgtcacagtaggaagagcagatctcggtcaggctcttcaaagtcttcacatagtaaatcccggtctagaagccgttccgggtctcggagcaggagcaaatcgaggtcgcgtagtcagtcccgttccaggtctaagaaggagaaatctaggtcaccaagcaaggagaaatctcggtcccggagccactcagccggcaagtcccggagcaagtcaaaggatcaggcagaagagaaaatccagaacaatgataatgtgggaaaacccaagtcacggtcaccgagtagacataagagcaagagtaagtcacggagccggtcccaggagaggagagtggaggaggaaaaaaggggaagcgtgtctcggggacggtcacaggagaaatcactgcggcagtctagatctcgatcaagatctaagggaggcagccggagtcgatcaagaagtaggagtaagtctaaggataaacggaaagggaggaagaggagcagggaagaatcccgcagccgctcaagaagcaggtctaaatccgaaaggagcaggaagcgcggcagcaagcgcgactcaaaagccggcagcagcaaaaaaaaaaaaaaggaagataccgatcgctcacagtctcgaagtccttctcgttccgtgagcaaggagcgcgagcatgctaagtctgaatcctcgcaacgggaagggcgcggagagagtgagaacgctggaaccaaccaggagactaggtctaggtcccgctcaaactctaagagcaagcccaacctgccaagtgaatctcgcagtaggtctaagtccgcgagtaagaccagaagcagaagtaagagtagatcccgaagcgccagccgatcaccaagcagatccaggagtagaagccacagtaggtcctag

SEQ ID NO: 133892 - DNA, 1221 bp, synthetic construct
  misc_feature 1..1221: note = Description of Artificial Sequence: Synthetic coding sequence
  source 1..1221: mol_type = other DNA
atgcccagagtctacatcgggaggctgagttatcaagcacgggagagggatgttgagagatttttcaagggttacggtaaaatactggaggtcgacctgaaaaacggatacgggttcgtcgagttcgacgacttgagggatgccgatgacgcagtatacgagctgaacggcaaggatctttgcggtgagagagtgattgtcgaacacgcgagaggaccgcggcgcgacgggtcttacggaagcgggcgctctgggtatggataccgacggtctgggcgtgacaagtacggaccgccaaccaggaccgaatatcggctgatcgttgagaatctgagcagccggtgctcatggcaggatctgaaggattatatgcggcaagcaggggaggtgacatatgcggatgcccataagggtaggaagaatgaaggtgtgatcgaatttgtatcctacagtgacatgaagcgggccttggaaaagttggatggcactgaggtgaatggcagaaagatcaggctcgtcgaggataaaccaggctccaggagacgtcggtcctactcacggagtaggtcacacagccggtcccgctcccgctctcgtcattcacgcaaatcgaggtcccgtagcggctcatctaagtcatcccattccaaaagtcgcagtaggtccagaagtggcagtagatcaaggagtaaaagcagaagcagatcacagtcaaggtcacgcagcaagaaggaaaaatcacgttccccctctaaggaaaaatcccggagtcgatcccactccgccgggaagtcacggtctaaatccaaagatcaggccgaagagaaaatacagaataacgacaacgttgggaagccaaaatccagatccccatcaaggcataagtctaagagtaaatctaggagcaggtcgcaggagagaagggtggaggaggagaagcgtggttccgtgtctcggggtaggtctcaagagaaatccctccggcagtccaggtcccgctcacgcagcaagggcggctcgagaagtcgaagtcggtcacgtagcaaaagcaaggacaagcgcaagggacgaaaaaggtcccgcgaggaaagcaggtcccgaagcagaagcagaagtaaaagcgagcgctccaggaaacggggcagtctggcatttcgccctggcctgtcctaccgcgagctgtcaaatctggatgggtccaaggccggcatgaccacctag

SEQ ID NO: 133893 - DNA, 477 bp, synthetic construct
  misc_feature 1..477: note = Description of Artificial Sequence: Synthetic coding sequence
  source 1..477: mol_type = other DNA
atgcctagggtgtacatcggaaggctgtcatatcaggccagggagcgagacgtagagagattcttcaagggttacgggaaaatcctggaagtggaccttaagaacggatatggattcgtcgaattcgacgacctccgggatgcggatgatgctgtctacgagctaaacggaaaggacctgtgtggggagagagtgatcgtggaacacgcccgggggcccagacgagatggttcatacggaagcggccgcagtggctatggctatcgacgcagtgggagggacaagtacggtcctccgactaggactgagtataggttgatcgtggagaatctttccagcagatgcagctggcaagatcttaaggttgggctgccactgcccgagcaggagcccgaaccggaacccgaatcggagccagaacaagaacgagagaaacaggagccccagcagggtaaagagcctcaaccccagccctag

SEQ ID NO: 133894 - DNA, 819 bp, synthetic construct
  misc_feature 1..819: note = Description of Artificial Sequence: Synthetic coding sequence
  source 1..819: mol_type = other DNA
atgagcggttgccgggtgtttatcgggcgactgaatcccgccgcccgggaaaaggatgttgagagattcttcaagggctatggacgaatacgtgacatagatttgaagagggggtttggttttgttgagttcgaagatcctagagacgccgacgatgccgtctacgagctggatggaaaagaactgtgcagcgaacgagtgacgatcgaacatgctagagccagatctagaggcggcaggggtagaggcagatattcggacaggttttcatctcgaaggcctagaaatgaccgtcgcaacgctccccccgttcgcacagaaaacagacttatcgtcgagaacttatcctctcgggtctcttggcaagacctgaaagacttcatgcgtcaggcaggcgaggtgactttcgcagacgctcaccgcccaaaactgaacgaaggcgtcgtggaatttgcctcatacggcgacttaaaaaatgcaatcgaaaaactaagcgggaaggagataaatggcagaaaaattaaactgatagaaggaagcaaaagacattcgcggtcgcggtcccggagccggtcacggacacgctcaagttctcgatctcggtcccgtagcagatcccgtagcaggaagtcatattcaagatcacgctcgaggtcccgatctcgctcgcggtctaagtcccggtccgtgagccgtagccctgttcccgaaaagagccaaaagcgtggcagctcctcccggtccaagagcccggcatccgtcgaccgccagagatcgaggtccaggagcagaagtcggtctgtggacagtggcaattag

SEQ ID NO: 133895 - DNA, 417 bp, synthetic construct
  misc_feature 1..417: note = Description of Artificial Sequence: Synthetic coding sequence
  source 1..417: mol_type = other DNA
atgtccgggtgtagagtttttattgggagattaaaccctgccgctagagaaaaagacgtggagcggttttttaaaggctacggacggatcagagacatcgatctaaagcgcgggttcggattcgtggagttcgaggatcctagagacgcggacgacgctgtgtatgagctagacgggaaagagttatgctccgagagagtcaccattgagcatgcccgggcacggagtagagggggccgaggccgcggccgttattccgataggttctctagtagaagaccccgcaacgacagacggaatgcaccacctgtcaggacagaaaatcgattgatagttgagaatttgagctcaagagtgtcctggcagcccgtttgcgtcgtcggtttaatgacacgtagtgcctgcggccttagctag

SEQ ID NO: 133896 - DNA, 819 bp, synthetic construct
  misc_feature 1..819: note = Description of Artificial Sequence: Synthetic coding sequence
  source 1..819: mol_type = other DNA
atgtctggctgtcgcgtgttcatcgggcggttgaatccagccgcaagagaaaaagacgtagaaagattctttaaaggctacggtcggatcagggacattgacctgaaacgaggttttggattcgtcgagtttgaggacccccgtgatgctgacgatgccgtctacgaattagacggcaaagaattgtgtagcgagagggtgacgattgaacatgccagggcccgctcccgagggggtcggggacgaggacggtatagcgacagattcagctcgagacgccctagaaatgacaggcggaacgccccccctgtgcggaccgaaaataggttgattgtggagaacctcagcagccgcgtatcttggcaggaccttaaggacttcatgaggcaggccggagaggtcactttcgccgacgcacaccgtcccaagctcaacgaaggcgtcgtggaattcgcatcctatggtgacctgaaaaacgccatcgagaaattgtctggtaaagaaatcaacgggcgtaagatcaagctgattgagggctccaagcgacactccagatccagaagcagatccaggtcccgtacccgctcaagcagcaggtctaggagccgctcaaggtctagatctcgaaagagttacagccgctccagaagtaggtctaggtcaaggtctcggtctaagtctcggtccgtttcacgaagccccgttcctgagaagagccagaagagggggtcttcctcccggtccaagtctcccgcctccgttgataggcagagatcaagaagccggtctagaagccgcagcgttgattctggaaattag

SEQ ID NO: 133897 - DNA, 819 bp, synthetic construct
  misc_feature 1..819: note = Description of Artificial Sequence: Synthetic coding sequence
  source 1..819: mol_type = other DNA
atgtcgggctgtagggtgtttatcgggcgccttaaccccgccgcgcgagaaaaggacgttgaacgctttttcaagggctatggccgaattcgcgacatcgacctgaaacgaggctttggcttcgtggaattcgaggatcccagagatgccgacgatgcagtgtacgagttagatggtaaggagctttgctcggagcgggtgacaatcgaacacgcacgtgcgaggagccgagggggacgtggacgaggcaggtatagtgatcgattttctagcaggcggccccgaaatgacagacgtaacgccccccctgtcagaacagagaatcggcttattgtggaaaatctcagcagtagggtgagctggcaagatctgaaggatttcatgcggcaggcgggggaggtcacattcgccgacgctcatcgtccgaagctgaacgagggggtggtggaatttgcatcttacggggatctaaaaaacgctattgagaaacttagcggaaaggagataaatggacgtaaaattaagttaatcgaaggttccaagaggcatagccgaagcaggagtagatctaggagtcgtaccagatcctcctcaaggtcccgatccagatcacggagccggtctaggaagagctatagccgttctagatctcggtcacggagtaggtctagatccaagagtcgatcagtgtctcgatccccggtgccagaaaaatcccagaaaaggggcagtagttcacgctccaagagcccagcaagcgtagatcgacaacgcagcaggagccgttctagatccaggtcagtcgactctggtaactag

SEQ ID NO: 133898 - DNA, 1035 bp, synthetic construct
  misc_feature 1..1035: note = Description of Artificial Sequence: Synthetic coding sequence
  source 1..1035: mol_type = other DNA
atgcctcgcgtatatattgggcggctgtcctataacgtcagggagaaagacatccagcgttttttcagcggatacggacggttgttagaggtggacctaaaaaacggatacgggtttgttgaatttgaggacagcagggatgcagatgatgctgtgtatgaactaaacggtaaagagctgtgtggagaaagagtaattgtggaacacgcccgtggccctcgacgcgaccgcgacggatactcctacggcagtaggtccggtggtggaggctattcctcacgacgcacctcgggtagagataagtatggcccaccagtacgaacggagtatcgtctcatcgtggaaaacttaagttcccgttgctcctggcaagatcttaaggattttatgcgtcaggctggggaggtgacctatgctgatgcccataaggaacgcaccaatgagggtgtgattgagtttcggtcctatagtgatatgaagcgcgcattagacaaactcgatggcactgagatcaatgggcgaaatattcgactgattgaggacaagccgcggacctctcatcgaaggtcttactcagggtctcggtccaggtccaggagcagacgcaggtctcggagcaggtcgcggcgatcttcccgaagcagatctcgctcaatttctaagtcaagaagcagatcaagaagtaggtctaagggcaggtctcgaagcaggtcgaaggggagaaaaagccgtagcaaaagcaagtctaaacctaagtcagacagaggctcgcatagccacagtagaagccgctcaaaagacgaatatgaaaaatccaggtctcggtccaggtcccgctcccctaaagagaacggcaagggggacataaagagtaaaagtcgttctcgttctcagtcccgcagtaactctccactgcccgttcctccaagcaaggctaggtctgtttctcccccacccaagagggccacctctcggtcccggtcaagatcccgtagcaaaagccgatcccggtcaaggtcctcctcccgcgattag

SEQ ID NO: 133899 - DNA, 717 bp, synthetic construct
  misc_feature 1..717: note = Description of Artificial Sequence: Synthetic coding sequence
  source 1..717: mol_type = other DNA
atgagtcgctatggtaggtacggaggcgagaccaaagtttacgtgggtaatctgggtacgggggccggaaagggcgagttggagcgcgctttttcttattacggtcccctacggacggtatggatcgcacgcaatccacctggcttcgcatttgtggaattcgaggaccctcgggacgctgaggacgccgtgagggggcttgacgggaaagtgatatgtgggtcacgggtgcgggttgaactgagcacaggaatgcctcgtcggtcgcggttcgatagacctccagctcgaaggccttttgaccccaacgatagatgttatgaatgtggcgagaaggggcattacgcatacgattgtcaccgatattcgcgaagacgaaggagccggtctcgaagcagatcgcacagccgatctagagggaggcgatactctcgtagccggagccgttccagaggcagacgctcacgctccgcaagccccagacgcagtcgctcaatttcactgagaaggagtcggtctgcttccctgcgcagatctagaagcggatctattaagggttctcgctatttccagtcccctagccggagccgctcacggtcaagatccatcagtcgaccccggtcgtccagatcaaaaagcaggtctcctagccccaagcggtcccgctcaccgagcggctcgccccgaaggagcgctagccccgaacgaatggactag

SEQ ID NO: 133900 - DNA, 681 bp, synthetic construct
  misc_feature 1..681: note = Description of Artificial Sequence: Synthetic coding sequence
  source 1..681: mol_type = other DNA
atgtccaggtacggccggtatggcggggaaacaaaagtgtatgtcgggaatctcggtacaggcgcaggcaagggagagttggagagggctttctcttattacggacctttgcgaacagtctggatagcaagaaaccccccaggctttgcatttgttgaattcgaggaccctcgtgacgctgaagacgcagtaagggggttagacggcaaggtaatatgtggcagcagggtacgagtcgaattaagcacaggtatgccgcgccgctcgaggtttgaccgcccaccagctcgacggccattcgatcccaatgaccggtgttacgagtgtggtgaaaaggggcattacgcgtacgactgccacagatacagcagaaggagacgctccagatcccgatcccgcagccactccagaagtagaggccgacgctacagccgatctcggtcgagatctcgcgggcggaggtcacgctcggctagcccgagaaggtcacggtcgatctcactcaggaggtcacgttccgccagcctgcggagaagtagatccggttcaatcaaagggagtaggtattttcagtcaccgtccagaagtcggtctcggtctcggtcaataagtcggccacggagttcccgcagtcccagcggctcaccgaggcggtcggccagtcctgaaaggatggattag

SEQ ID NO: 133901 - DNA, 1926 bp, synthetic construct
  misc_feature 1..1926: note = Description of Artificial Sequence: Synthetic coding sequence
  source 1..1926: mol_type = other DNA
atgaattgggcagctttcggagggtccgagttctttatacctgagggcattcagattgatagcagatgcccactgagccgcaatattaccgaatggtaccattactatgggatcgctgttaaggaatcctctcagtactatgatgtcatgtacagcaaaaagggcgccgcatgggtgagcgagacaggcaagaaagaagttagtaagcaaaccgttgcttatagccccagaagtaagctcgggactctcctacctgagtttcctaatgtgaaagacctgaatctgcctgcgtccttgcctgaggaaaaggtgtcaaccttcatcatgatgtacaggacacattgtcaaaggatcctggatacagtgattagggccaactttgatgaggtccaaagctttctcctgcacttctggcagggcatgcctccacacatgttgcccgtcttaggttcttccactgtggtgaacatcgtgggagtctgcgatagtattctgtacaaggctattagtggggtcctgatgcccacagtcctgcaggcccttcccgattctcttacccaggtaattaggaagttcgccaagcagcttgatgagtggctgaaggtggcgctgcatgatcttcctgaaaacctccgaaatatcaaatttgaactcagcagaagattcagccagattctaagacgacaaacatctctcaaccacttgtgtcaggctagcagaacagtcattcactccgccgatattactttccaaatgctggaggattggcgcaatgtagacctgaattctatcacaaaacaaacgctttatactatggaggattcgcgcgacgaacacaggaagctcataactcaactctatcaagagtttgaccacttattagaagagcagtcccctattgagtcttacattgagtggctggataccatggttgatcggtgcgtggtgaaagttgctgcgaaaaggcagggctccctgaagaaagtcgctcagcagttcctcttaatgtggtcttgttttggcacgcgggtgatccgcgacatgaccctgcactcggcccccagctttggaagcttccatctgattcacctgatgttcgacgattatgtgctgtacctgctcgagtccttacattgtcaggaacgcgccaacgaactgatgcgagcaatgaagggcgagggatccactgccgaagtccgggaagaaattattctgaccgaggccgccgctcccaccccaagccccgtgcctagtttcagtcccgctaagagcgccactagtgtggaagtcccccccccctcttctcctgtgtctaacccatctcctgaatacaccgggctgtctacgactggggcaatgcagtcttatacctggtctctaacttacaccgtgacgacagcagccggttcacctgcagaaaattcccaacagctgccatgcatgcggaacactcacgtcccttcatcatcagtgactcatcgcatacccgtctacccccaccgggaagagcatggatacacaggatcatacaattacggctcttatgggaatcaacacccacaccctatgcagtctcagtacccagcactcccccatgacaccgccatctccggcccactgcactatgccccgtaccatcgttcctcagcccagtacccgtttaattcgcctacatccagaatggagccatgtctcatgagtagtaccccacgacttcatcctactcccgtcactcccagatggcccgaggttccaagcgcaaacacatgttatacctctccctctgtacatagtgcccggtacggcaactcaagtgatatgtatacccccttgaccactcggcggaattcagaatatgaacacatgcaacacttcccaggctttgcctacattaacggagaggcgagcacaggctgggctaagtag

SEQ ID NO: 133902 - DNA, 2907 bp, synthetic construct
  misc_feature 1..2907: note = Description of Artificial Sequence: Synthetic coding sequence
  source 1..2907: mol_type = other DNA
atggcatttgctaatttccgccgaatccttcggctttctacattcgaaaagagaaaaagtcgcgaatacgaacatgtgcgaagggacctggaccctaatgaggtgtgggagatcgttggggaactgggcgacggggctttcggcaaggtctacaaggctaagaacaaggagaccggggccctggccgctgctaaggtgatagagaccaagtcggaggaggagctcgaggactacattgtggagatcgagatactcgcgacgtgtgaccacccatacattgtcaaactccttggcgcctattatcacgatgggaaattgtggattatgatcgaattctgtccaggtggagctgtggatgccatcatgctggagcttgacagagggctgaccgaaccacaaattcaggtagtgtgtcggcagatgttagaagccctcaactttcttcactcaaaacgcattatccacagggatcttaaagctggaaatgtgctgatgaccctggaaggcgatataaggctggccgacttcggtgttagtgcaaaaaacctcaaaaccctgcagaaaagagactcttttatcggcaccccctattggatggccccagaggtggttatgtgcgagaccatgaaggacacaccttacgattacaaagcagacatctggagccttggcattaccctgattgaaatggcgcagattgagccaccacaccacgaactgaaccccatgcgcgtcctcctcaagattgctaaaagcgaccccccgactcttcttaccccaagtaagtggtctgttgaattcagggatttccttaagatcgcactggataagaatcctgagactcgccctagcgccgcacagctgctcgagcacccctttgtgagctctataacctctaacaaggctctgagagagctggtagcggaagccaaggcagaggtgatggaggagatagaggatggccgggacgagggagaagaagaagacgccgtcgatgccgcatccacgttagagaatcacacgcaaaactccagcgaggtaagcccaccttctctcaatgcggataagccgttggaggagagtcccagcacacctctggccccttctcagtcccaggattccgtcaacgagccctgtagccagccctcaggggacagatcccttcaaacaaccagcccccctgtggtcgcccccggtaacgaaaacggcctggccgtccccgtcccactccgcaagtctaggccagtctccatggatgccagaatccaggtggcccaggaaaaacaggtagcagaacagggcggcgacttgagtccagccgccaacaggagtcagaaggcctcacaaagtagacccaacagtagcgcattagagaccttaggcggggaaaaactggcaaacggcagcctcgagcctccagcgcaggcggccccaggaccctctaaacgtgacagcgattgtagttctttgtgcaccagtgaatccatggattatggaacaaacctctccactgatctttctctgaataaggagatgggatccctttcgatcaaagacccgaaattgtacaagaagacgctgaagaggacacggaagtttgttgtcgatggggtagaggtgagcatcaccacatccaagatcatctccgaggacgagaagaaggacgaggagatgcggtttctaaggcggcaggagctgagggagcttcggctgctccagaaagaggagcataggaaccagacgcagttgtcaaataagcacgaactccagcttgagcagatgcacaaaaggttcgagcaggagatcaatgcaaaaaagaagttcttcgatacagagcttgagaacttggagaggcaacagaaacaacaagtggaaaaaatggaacaggaccatgcagtgcgacgcagggaagaggctcggaggatccgattggaacaggaccgagactatacaagatttcaagagcagttgaaactcatgaagaaagaagtaaagaacgaggtggagaaactgcctagacagcagcgtaaagaaagcatgaagcagaaaatggaggaacacactcagaagaagcagctcctggaccgcgacttcgttgctaaacagaaggaggatcttgaactggccatgaagcggctgacgactgacaacagacgggagatttgcgacaaggagagggagtgccttatgaagaagcaggagctactgcgcgatcgggaagccgccttatgggaaatggaggagcatcagctgcaggaaagacaccagctagtgaagcagcagctgaaagatcagtattttctgcaacgacacgagttgttgcgaaagcatgaaaaggagcgtgagcagatgcaaagatacaaccaaaggatgatcgagcagcttaaggttcggcagcagcaagaaaaagcccggcttccaaaaattcagagatctgagggcaagacccgcatggccatgtacaaaaaatccttgcacataaatggaggggggtccgcggccgaacagagagagaagatcaaacagttcagccagcaggaggaaaagcgccagaaatccgagagactgcagcagcagcagaagcacgagaaccaaatgagagatatgctggcccagtgtgaaagcaatatgtccgagctacagcagctacagaatgagaaatgtcacctattagtcgagcacgaaacgcagaagctcaaggcgctggacgagtcgcacaaccaaaaccttaaggagtggcgggacaaacttagaccaagaaagaaagccctcgaagaagatctgaatcagaagaaacgtgagcaggagatgtttttcaagctgtccgaggaagcagaatgtccgaatccttccacaccctctaaggccgctaagtttttcccatattcctccgctgatgcctcgtag

SEQ ID NO: 133903 - DNA, 2907 bp, synthetic construct
  misc_feature 1..2907: note = Description of Artificial Sequence: Synthetic coding sequence
  source 1..2907: mol_type = other DNA
atggcttttgctaatttcaggcgcatactcaggctgtcaacctttgagaaacgtaagagtcgcgaatacgaacatgtccggcgcgacctcgatcccaatgaagtatgggagatcgtgggtgagctcggtgacggcgcgtttggcaaagtctacaaggcgaagaacaaagaaacaggcgctttggcagcagcaaaggttattgagacaaagtctgaagaagagctcgaagactacatcgtggaaatcgaaatccttgcaacgtgcgaccatccctacatagttaagctattaggagcatattaccatgacggtaaactctggattatgatcgagttctgcccaggcggtgctgtagacgctattatgctggaattggatcgggggctgactgagcctcagatccaggttgtctgccggcaaatgttagaagcattgaacttcttacactcaaagaggattattcacagggatctcaaagccggaaatgtgcttatgactcttgaaggggatattcgactcgcggatttcggagtctctgccaagaacctgaagacactgcagaaaagagactcgtttatcggcacaccttattggatggcacccgaagtagtgatgtgcgaaaccatgaaagacacaccctacgattataaggctgacatttggagtctgggaataactctcatcgagatggctcagattgaaccaccacatcatgagcttaaccccatgcgagtcttactgaagattgccaaatccgacccaccaactctgctgacaccttccaagtggagcgttgagttccgagatttcttgaaaatcgcgctcgataagaaccccgagacccgacccagtgctgctcagctccttgagcacccgttcgtatccagtatcacctctaacaaggctttgagagagctggtggctgaggctaaagctgaagtgatggaggagatcgaagacggcagggatgagggggaagaagaggacgctgtcgatgccgctagcacacttgagaatcatactcagaacagcagtgaggtgagcccaccaagcctgaacgccgataagcccctcgaggagagcccaagcactccactggcaccttcccagagccaggactctgtgaatgagccttgcagtcagccaagcggagatagatcacttcagaccacttctcctccagtggtggccccaggtaacgagaatggcctcgctgtacctgtacccctccggaagtctcggcctgtgtctatggatgcccgaattcaagtggcacaggaaaagcaggtcgctgagcaggggggcgacctctcgccagcggctaacagatcccagaaagcttcccagagcagaccaaacagttcagcattggaaacacttggcggtgagaagcttgccaacggatccctcgaacctcctgctcaggcagcccccgggcctagtaaacgcgactctgactgctcaagtctctgcacctccgagagcatggattacggtaccaatctctccacggatctgagcttaaacaaggagatggggtccctttccatcaaggatccaaaattatacaagaaaactctgaagagaaccagaaagtttgtggtggacggtgtggaggtctccattacgacctcaaaaatcatctcagaggacgagaagaaggacgaggaaatgaggttcttaagaaggcaagagctcagggaactgagattgctgcagaaagaagagcaccgtaaccagacacaattgagcaacaaacacgaactacagctggaacagatgcataaacgttttgagcaggagattaatgcaaaaaagaagttttttgacacagagctggaaaacctggagcggcagcagaaacagcaggtcgaaaagatggaacaggaccacgcagttcggagacgggaagaggcacggaggattcgccttgagcaggacagggactacaccaggttccaggagcagctaaaactgatgaagaaagaggtgaaaaacgaagtggagaaactgcctagacaacagcgaaaggaaagcatgaagcagaagatggaagagcatacccagaaaaagcagctgttggaccgcgactttgttgcaaagcagaaggaggacttggagttggcaatgaaaagattaaccacagataatcgtagggaaatctgcgacaaagagcgcgagtgcctgatgaaaaagcaagaactgctccgggatagagaggccgctctctgggagatggaggagcatcagctacaagaaaggcatcagcttgtgaaacagcagcttaaagatcaatactttctgcagagacacgagctactcagaaagcatgaaaaggagcgcgaacagatgcagcggtataaccagaggatgatcgaacaactaaaggtgagacaacagcaggagaaagctaggctgcccaaaatccagcgctccgaagggaaaacccgcatggctatgtacaagaagtcactacacattaacggaggcggctctgcggcagagcagagagaaaagataaagcagttctcgcagcaggaggagaagcggcagaagtcagaacggttacaacagcagcaaaagcatgaaaaccagatgagggatatgcttgcccagtgcgagtcaaatatgtccgagctacagcagctgcagaatgagaagtgtcacctccttgtggaacatgagactcagaagctgaaagccttggacgaatcccataatcagaacctgaaagagtggcgtgataagctgcgcccgagaaagaaggccctcgaggaagatcttaatcagaagaagcgggaacaggaaatgttctttaagctgtccgaggaagctgaatgccctaacccctctactccatctaaagccgcaaaattctttccgtatagtagcgcagacgcctcgtag

SEQ ID NO: 133904 - DNA, 3300 bp, synthetic construct
  misc_feature 1..3300: note = Description of Artificial Sequence: Synthetic coding sequence
  source 1..3300: mol_type = other DNA
cgctttggatctgctccacaaagacccgtagccatgactacagcacaacgggactctctactttggaagctggctggactcttacgagagtccggcgatgtggttctgagcgggtgctccacccttagcctgttgacacctaccctgcagcagctgaatcacgtgttcgaactccacctcggtccatgggggcctgggcaaactggttttgtcgcgttgccgtcgcatcctgcagacagccccgtgatcctgcagctgcagttcctctttgacgtgctacaaaagacactctctctgaaacttgttcatgtggccggtcccggtccaactggacctataaaaattttcccattcaaatcactccgccacctggagcttagaggcgtacctctccattgcctgcacggcctgagagggatttatagccagctggaaaccctgatctgttcgcgcagcctgcaggccttggaggaactgctgtcggcctgtggcggcgatttctgtagtgcactcccatggttagccctgcttagtgcgaatttttcatacaacgcactcactgcccttgactccagtctccgtttgctctcggccctaaggttcctgaacctgagccacaaccaagtgcaggactgtcaaggttttctgatggacttgtgtgagctgcatcacctggatatctcctacaatcgtttgcatttagtcccccgaatgggacccagtggggccgcccttggcgtcctgatccttcgtggcaacgagttgcgatctttacacggtctcgagcagctgcgaaacttgagacatctagacctggcttataatctgctcgaaggtcatagggaactgagtcccctgtggttgctggcagagctgaggaagctgtatcttgaaggcaacccactgtggttccatccggaacacagagctgccacggctcagtatttatctcccagagctagggatgcagccaccggcttcctgctcgacgggaaagttcttagtctaacagacttccagacccatactagcttgggactgagcccaatgggaccgcccttaccttggcctgttggctcaactcccgaaacatccggggggcccgatctgtccgacagtctgtcttccggaggggtggtcacccagcccctcctgcacaaggttaagagccgcgtacgcgtgagacgggcttctatttcagaaccatccgatacagacccagaacctaggacgttaaacccatctcccgcgggttggttcgtgcagcagcaccccgagttggaattgatgtccagcttccgcgagaggttcggtcggaactggctacagtataggagtcacctcgaaccctccggaaatccactccctgctacacccacgacaagtgcgcccagcgccccacctgcatccagccagggacctgataccgcccctcgcccatcacctccacaagaagaagcccgaggaccacaggaaagccctcagaaaatgtccgaagaagttagggctgaaccgcaggaggaggaagaagagaaggagggcaaggaagaaaaggaggagggggagatggtggagcagggagaagaagaagccggagaggaggaagaggaggaacaggatcaaaaggaagttgaggccgaactgtgcagacccttactagtttgtcctttagaaggccctgaaggggtgcgggggcgggaatgtttcttgcgggtaaccagcgcccatttattcgaagtagagctgcaggcggctagaacgttggagaggctcgaactgcagtcgctcgaggccgccgagatcgaaccagaagctcaagcccaaaggtcccccagacctaccggatcagacctacttccaggcgctccaatactttccctccgcttttcctatatatgcccagacagacaactgcggcgctaccttgtcctggagccagacgcccacgctgccgtgcaggagctccttgctgtcctgactccagtaactaatgttgcgcgggagcagctgggggaagcacgtgatcttctgctaggaagatttcaatgtcttagatgcggtcatgaattcaagccagaggaaccaaggatgggcctggactcagaggagggctggcgtccattgtttcaaaaaaccgaatcccctgccgtttgccctaattgcggcagcgaccacgttgtgcttctggccgtaagccgaggtacacccaacagagaacgaaagcaaggagagcagtctctggccccctcgccctccgcctctccagtgtgtcatcctcccggtcatggcgaccacctggaccgagccaaaaatagtccacctcaggcgccatcaactcgagatcatggatcatggagcctgtctcctccccccgagaggtgtgggctgaggtcggtggatcaccggctcaggcttttcctggatgttgaggtcttttccgacgcacaggaggagtttcagtgttgcttgaaagttccagtcgccctggccggccacaccggagagttcatgtgcttagtcgtagtctctgatagacgtttgtacctgttaaaggtcaccggagagatgcgggaaccacctgcatcttggctgcagctgacactagctgtaccgctccaggacctgagtggaattgagctgggtttggcaggccagagtctgaggctcgagtgggccgccggagctgggaggtgtgtccttcttcccagagatgcgcgacattgcagggcattcttggaggagctgctggatgttttgcagagtctcccccctgcctggcgaaactgcgtttccgcgacggaggaagaggttacaccgcagcatcgcctgtggcctttgttggaaaaagatagcagtttggaggccaggcaattcttttacctcagagccttcctggtcgaagggccatctacctgcctggtctctctgttattgacacctagtacactcttcctgctggacgaggacgccgccggatcccccgcggagccatccccgcccgcagcctcgggcgaggcctcagagaaagtgcctccatccggccctggccctgctgtgagggtgagggaacagcagccattaagcagtctgtccagcgtcctactgtatcggagcgctcccgaggatttacgactgctattctatgatgaggtgagccggctcgagtccttttgggcgttaagagtggtctgccaggagcagctcaccgcgcttctggcatggatccgcgaaccctgggaggaacttttctctatcgggcttcgcaccgtcattcaggaggctctcgctctggaccgatag

SEQ ID NO: 133905 - DNA, 1938 bp, synthetic construct
  misc_feature 1..1938: note = Description of Artificial Sequence: Synthetic coding sequence
  source 1..1938: mol_type = other DNA
cgattcggctccgccccccagcgccctgtcgcaatgacaactgcccagagggactccctgctgtggaagctggccggtctgctgagggagagcggcgatgtggtgttgtctggttgctccaccctcagcctcctgacgcctaccctgcaacagctgaatcatgtatttgaacttcatctggggccgtgggggccaggccagacgggtttcgtggccctgccttcccaccccgccgactctcctgttatccttcagctgcagttcctgtttgacgtgctccaaaaaactctcagccttaagcttgtccatgtggccggccccggaccaactggacctattaagatctttccatttaagagtcttaggcatttagaattgagaggggtgcctctccactgcctacatgggttgagaggcatttatagtcaattagaaactttaatttgctcccggagccttcaggcacttgaggagctgctgagtgcttgtggcggtgacttttgctcagcccttccttggctagctctgctttccgccaacttctcctataatgccctgacagccctcgactctagcctccgcttgctgagtgccctgcgatttctaaatctgtcccacaatcaagtgcaggactgtcaaggattcctcatggacctgtgtgaattacaccacctcgatatttcctataatcgactgcacctggtaccgcggatgggaccaagcggagctgcccttggggtgttaatcttgcgaggaaacgagcttcgaagccttcatggcctggagcagcttagaaacctgagacatctggatcttgcatacaatctgttagaaggccaccgggaactcagccctctgtggttgctggccgaactgcgcaaatttctcctggatggtaaagtcctaagtctcacagatttccagactcatacatctctgggactgtccccaatgggtcctccgctcccctggcccgtgggcagtactccagagacctctggtggacctgacttgtccgacagtctttcttcaggaggggtggtgacacagcccctccttcacaaagtgaaaagccgcgtgagggtccggagggcttcaatctccgaacccagcgacaccgaccctgaacccaggacactgaatccttctcctgctggctggtttgtgcagcagcatcctgagctagagctgatgtccagctttagggagagatttggcaggaattggctgcaatacagatcacaccttgagccaagtggcaatcccctgccggccaccccgaccactagtgctccgtctgcccctccagcatctagtcagggcccagatacagcccctcggccctccccacctcaggaagaagcacgcggaccccaagagagccctcagaagatgagcgaagaggttagagccgagccccaggaggaagaagaagagaaggagggcaaagaagagaaggaagagggtgaaatggtggaacagggggaggaggaggcaggagaagaggaggaggaagagcaggaccagaaagaagttgaggcagaactgtgtcgaccactcttggtttgcccccttgaggggcccgagggtgtgcggggaagagaatgttttcttcgagtcacttccgcacacctgtttgaggtagagttgcaggctgccaggacgctcgaacggttggagctgcagtcattggaggctgccgaaattgaaccagaagcgcaggctcagcggagcccacggccaacaggctccgacctgctcccaggcgcaccaatcctcagcttgcggttttcttatatttgccctgaccgccaattacggagatatctcgtgcttgagcctgatgcccacgctgccgtccaggtgatggcgccacgagtaggcgctcaggaagccgttgggatcaaacgcgccagagggaaatggcagcaggcatag

SEQ ID NO: 133906 - DNA, 1095 bp, synthetic construct
  misc_feature 1..1095: note = Description of Artificial Sequence: Synthetic coding sequence
  source 1..1095: mol_type = other DNA
atgcagaaatggtttagcgccttcgatgacgccattattcagagacagtggcgcgccaaccccagtcgggggggtggaggggtatccttcaccaaggaggtagacactaatgtcgcgacaggagcaccccccaggcgtcagcgtgtacccggacgcgcttgcccgtggagggaacctatcaggggccgtaggggcgctcgccctggcgggggtgatgcgggcgggacgccgggcgagaccgtgagacattgctctgcacccgaggatcccatctttcggttcagtagtttgcactcataccctttccccggcactatcaaatcccgagatatgtcctggaagcgacaccacttgattccagagacctttggtgttaagaggcggaggaagaggggacccgtggagtccgaccctctgcggggagaacccggctcggctagagccgccgtctccgaactgatgcagctgtttcctaggggactctttgaggacgcgcttccacctatcgtcctgaggtcccaagtttatagcttggtgcctgatcggacagtggccgatcgtcaactgaaagagttacaggagcagggcgaaattagaatagtgcagctgggcttcgatttggacgcccacggcattatcttcactgaggattatcgtacacgcgtgctcaaggcctgcgacggtcgaccctatgctggggctgtccagaagtttctcgccagtgtgctccctgcctgcggagatctgagttttcagcaggatcagatgacccagaccttcggatttcgcgatagtgagattacccacctggtcaatgcgggagtcctgacagtgagagacgctggctcgtggtggctcgctgtgccgggggcaggccgattcattaaatactttgtaaaagggcgccaggcagtgctctccatggttcgtaaggccaaatatcgggagctcctgctttcagaactcttggggaggagagcaccagtggtggtaaggctaggtctgacctaccacgtgcacgatttaatcggtgctcaattagtggattgtatctctacgacctccggaacacttctgcgcctcccagagacttag

SEQ ID NO: 133907 - DNA, 1107 bp, synthetic construct
  misc_feature 1..1107: note = Description of Artificial Sequence: Synthetic coding sequence
  source 1..1107: mol_type = other DNA
atgcagaagtggtttagtgcgtttgacgacgccatcattcaaagacagtggcgggcaaacccgtcccgaggaggagggggagtttcttttacgaaagaagtggacacgaatgtggcaactggtgcccccccacgccgtcagcgcgtgcctggcagagcctgcccatggagggagccaataaggggccggcggggggcccggcccggcggcggcgacgctgggggaacaccaggagagacagtcagacactgctccgctccggaggaccctatcttcagattcagcagcctccatagttatcccttcccaggcaccattaagagccgagatatgagttggaagcgtcatcaccttattcccgaaactttcggagtcaaaaggcgaaggaagaggggaccagtggaatccgaccctctgcgtggagagcccggaagtgctcgggctgctgtcagcgaattgatgcagctcttcccccggggactgttcgaggacgccctcccaccgatcgtcctgagatcacaggtctattcacttgtcccggacaggactgtggcggacagacaactgaaagaattgcaggaacagggggagatccggatagtgcagctcggctttgacctcgatgcccacggcataattttcaccgaggactatcgtactagggtttgtgactgtgttctgaaagcatgcgacgggcggccgtacgccggtgccgttcaaaaattcctggcatctgttctcccagcctgtggcgacctctcctttcagcaggatcaaatgacccagacttttggatttcgcgactccgagatcacacacctggtgaacgcaggagtgctcactgtacgggacgctggtagttggtggctcgcagtcccaggcgccgggaggttcataaaatactttgtcaagggcaggcaggctgtgctcagcatggtcagaaaagctaagtatagagaactcctgctttcagagcttctggggagacgtgccccggtcgtagttcgcctgggtctaacctaccacgtgcacgacctgattggggcccagttagtagactgcatctcgacaacaagcggtaccctcttgagactacctgagacgtag

SEQ ID NO: 133908 - DNA, 1107 bp, synthetic construct
  misc_feature 1..1107: note = Description of Artificial Sequence: Synthetic coding sequence
  source 1..1107: mol_type = other DNA
atgcagaagtggttttcagccttcgatgacgccataattcagcggcagtggagggctaacccatcaagaggaggtggaggggtgagcttcacaaaagaggtggacacaaatgtggcaactggagcccccccccgccgccagcgagtaccaggacgggcttgtccatggcgggaacccatcagaggtcgaagaggcgcaagaccaggcgggggcgatgctggagggactcccggggagacggttaggcattgttctgccccagaggatcctatttttcgtttctcctctctgcatagctaccccttccccggaaccatcaaatccagagacatgagttggaaaagacaccacctgatccccgagaccttcggcgtgaaacggagaagaaaacggggtcccgtggagtctgacccactaagaggcgagccaggcagcgcgagagctgcagtgtcagaattgatgcagctttttccccgaggcctgtttgaggacgccctgcctcccatcgtgctgcgtagccaggtgtactcactagtgcctgacaggaccgtggctgaccggcagcttaaagagctgcaggaacaaggagagatacgtatagtgcagctcggcttcgaccttgacgctcacggcattatcttcactgaagattatcgaaccagggtgtgtgattgcgttctgaaggcctgtgatgggcggccatatgcaggagctgtgcagaaattcttagcttccgttctccctgcatgcggcgacctgagtttccagcaggaccagatgacacaaacgttcggcttccgtgacagtgagatcacccacttagtcaacgcgggagtgttgactgtgagagacgccggaagctggtggctcgcagttcccggagctggaaggtttattaagtactttgttaaggggcgccaggctgtcctcggtatggtacggaaggccaagtaccgcgagctcttattaagcgagctgttgggccgtcgagccccggtggttgttcgtcttggactgacataccacgtgcacgacttaataggagctcagctagtggactgtatttcaacaacgagcgggacattgttgagactgcctgagacatag

SEQ ID NO: 133909 - DNA, 1095 bp, synthetic construct
  misc_feature 1..1095: note = Description of Artificial Sequence: Synthetic coding sequence
  source 1..1095: mol_type = other DNA
atgcagaagtggttttcagcttttgacgatgccatcatccagcgacagtggagagccaatccttccagaggtggaggcggcgtgagcttcaccaaagaggtggatactaatgttgcgaccggtgcaccgcctcgcaggcaacgggtgcctgggagggcctgtccttggagggaacctatcagaggtaggcgcggcgccaggcccggcggaggcgacgccggcggcactccaggcgaaacagtccgtcactgtagtgcccctgaagatcctattttccgcttctcttccctccacagctaccccttcccaggtaccattaaatccagggatatgtcctggaaacgccaccaccttattcctgaaactttcggagtgaaaaggaggcggaaaagaggccctgtggaaagcgatccgctccgtggagagcctgggtcagctagagcggcggtgtccgaacttatgcagctttttccacgcggcctttttgaagacgcactgccaccgatcgtcctgcggagccaggtttacagtcttgttcccgaccgtacagtagctgaccgccagcttaaggagctccaggaacaaggggaaattcgaattgtgcagcttgggtttgacctggacgcacacggcatcatcttcactgaggattaccgcacaagggtgcttaaagcgtgcgatgggcgcccgtacgccggggcagtccagaaattcctggcctccgtcctgccagcgtgtggcgatctgtcatttcagcaggaccaaatgacccagacattcggctttcgagacagcgagattacccatcttgtcaacgccggagtgctgacggtcagggacgctggctcttggtggttagccgtcccaggggctggcagatttatcaagtatttcgttaaaggaaggcaggccgtgctgggcatggtgcgtaaggctaaatatagagagctgctattgagcgagctgcttgggaggagagcacccgtggtggtgagactgggtcttacctaccacgtccacgatctcatcggtgcccagctggtggactgcatttctaccaccagcggcacacttctccgattaccagagacatag

SEQ ID NO: 133910 - DNA, 1095 bp, synthetic construct
  misc_feature 1..1095: note = Description of Artificial Sequence: Synthetic coding sequence
  source 1..1095: mol_type = other DNA
atgcagaagtggttcagcgcgttcgatgacgccatcattcaaaggcagtggcgcgctaatccctctaggggcggaggaggggtgagcttcaccaaggaggtggacacgaacgttgccacgggggcacctccgaggcgtcagagagtgcctggtagagcgtgtccttggagagagcccattagagggcgccgcggtgcccgtccaggtggtggcgatgctgggggaacccctggtgaaacagttaggcattgcagcgctccagaagatcctatttttcgattcagttcattgcacagctacccctttccaggtacaataaagagcagggatatgagctggaaacgccatcacctcatcccagagaccttcggtgttaaacgaaggaggaaaaggggccctgtggagagcgatcctctgcggggcgaacccggaagcgcgagagcagctgtttccgaactaatgcagctgttcccgcgaggcctgtttgaagatgcgctgccccccatcgtactgagaagtcaagtgtactctctggtgccagatcgaacggtcgccgacagacaactgaaggagctccaggagcagggggagattcggatcgtgcagcttggattcgacctggatgcgcacgggattatttttaccgaggactatcgcacacgcgtgctgaaggcatgcgatggacgaccctatgccggagctgtccagaagttcctcgcctccgtgttacccgcctgtggcgatctgtcctttcaacaggaccagatgacacaaaccttcggcttccgggattccgagatcacacatctggttaacgcgggcgtattgacagtgcgcgacgccggaagctggtggctggccgtgcctggggcaggtcgatttatcaaatacttcgtcaaaggccgacaggctgtactatctatggtgcgcaaggctaagtaccgggagctcctcctttctgaactattgggccggcgcgcccccgtggtggtgcgtcttgggctgacctaccacgtgcacgatctgatcggcgcacagcttgtagattgcattagcactaccagcggtactctcttgaggctccccgaaacttag

SEQ ID NO: 133911 - DNA, 1095 bp, synthetic construct
  misc_feature 1..1095: note = Description of Artificial Sequence: Synthetic coding sequence
  source 1..1095: mol_type = other DNA
atgcagaaatggttctccgctttcgacgatgccattatacagagacagtggcgggcgaatcccagtagggggggaggaggagtctcatttactaaggaagtagatacaaatgttgccacaggtgctccaccgcggcgccagcgggtccccggaagagcctgtccctggcgcgagccaattcgcgggaggcggggcgcaaggcctgggggaggggacgctggggggacccccggggagaccgtgcggcattgttcagcaccagaagaccccatcttccgcttctctagtctgcacagttatccctttccaggtacaattaagagtcgagatatgtcctggaagagacatcatcttatccccgagacctttggcgttaagcggcggcggaagagaggtccagtcgagtccgatccacttcgtggtgaaccaggtagcgcccgcgctgcagtgtccgagctgatgcagctatttccgaggggtctgttcgaggacgcactcccacccattgtcctgcggtcgcaagtgtattctctggtgcctgatcgtacggttgcggacagacaactgaaggaattacaggaacagggggagatccggatcgtgcagctcgggttcgacctggacgcacatggcatcatcttcaccgaagactataggacgagagttctgaaagcctgtgacggccgcccctacgccggtgcagttcagaaattcctggcttcagtgttacccgcttgtggggatctgagttttcagcaggaccagatgactcagacattcggcttcagggacagcgagatcacccacctcgtgaatgctggcgtgctcactgtcagagatgcggggtcatggtggttggccgtgcctggagccgggaggtttataaagtactttgtaaaaggaaggcaggcagtcctcagcatggtgcgtaaagccaaatatcgggaactcttgctgtcagagctgctcgggcggagagcacctgtggtggttaggcttggattaacatatcacgtgcacgacttgatcggggcccagctcgtagattgcatttcaacaacaagcggaactttgcttaggctgcccgaaacatag

SEQ ID NO: 133912 - DNA, 1095 bp, synthetic construct
  misc_feature 1..1095: note = Description of Artificial Sequence: Synthetic coding sequence
  source 1..1095: mol_type = other DNA
atgcagaagtggtttagcgctttcgatgatgcaattatccagagacagtggagagccaacccgtccaggggcggaggcggtgtgagcttcaccaaggaagtggacactaacgttgctactggggcgccgcctcggagacagagggtcccaggacgcgcatgcccttggcgagagcctatacgcggtaggcgtggagctcggccgggaggaggagacgctggcgggactcccggagagaccgtcaggcattgctctgctccggaggatccgatcttccggttttcatccctacactcatacccctttcctggtactatcaaaagtagagacatgtcctggaaacgacatcacttaatcccagaaacatttggggttaagcgacgccggaagcgcgggcctgtggagtccgaccccttgagaggggaacctggctctgcacgggcggctgtctccgagctcatgcagctttttccaagaggactcttcgaggacgctctgcctcccattgtccttcgatcccaggtgtactccttggtccctgacagaacggtggctgacaggcagcttaaagaactccaggaacagggtgaaattcgaatcgtccagctcgggttcgatctcgacgcccatggcattatattcactgaggattataggacgcgggtgctgaaggcatgtgacgggcggccatacgctggagccgtgcagaagttcttggcgtccgtgttaccggcctgtggagatctgagtttccaacaggaccagatgactcagacgttcggtttcagggactccgagatcacccatctcgttaatgctggagtgctaacagtacgggacgccggctcttggtggctggccgtaccaggagcggggagatttatcaaatactttgtgaagggaagacaagccgtcctgagcatggtgcgcaaggccaagtatagagagctgctgttaagcgagctgctgggacgccgcgcccctgttgtggtccgccttggtcttacctatcacgtccacgacctgattggcgctcagctggtggactgcatttccaccacaagcgggaccttactacgtctgccggagacttag

SEQ ID NO: 133913 - DNA, 1107 bp, synthetic construct
  misc_feature 1..1107: note = Description of Artificial Sequence: Synthetic coding sequence
  source 1..1107: mol_type = other DNA
atgcagaaatggttctctgccttcgatgatgcgatcatccaaaggcaatggagagccaatccttcgcgaggcggtggcggcgttagctttaccaaggaagtggacacaaatgttgccaccggcgccccaccgcgcaggcagcgagttccgggacgggcttgcccttggagggaaccaatccgggggcgaaggggcgcccgcccaggcgggggagatgcgggaggaactccgggcgagacagtccgccactgcagcgccccggaagaccctatattcaggttcagcagcctgcacagctaccctttcccgggcaccataaaatcccgcgacatgtcatggaaaagacatcatctgattcccgagacttttggtgtcaagcggcgacggaagcgaggccccgttgagtccgaccctctgaggggggaaccaggaagcgctagggcagccgtgtccgagctcatgcagctgtttccgcgtggccttttcgaagatgcgttgcctcctattgttctgagaagtcaggtgtattccctcgtccccgacagaaccgtggcagacagacaacttaaggaactgcaggagcaaggcgagattcgcatcgtacagctgggatttgatttagacgcccacggcatcatctttactgaagattaccggacccgggtctgcgattgcgtcctcaaagcgtgcgacggcagaccctatgccggagccgtgcagaagttcctcgcctccgtgttgcctgcgtgcggcgatctttcctttcagcaggaccagatgacacagaccttcggcttcagagactctgagattacacatctggttaatgccggggtccttactgttcgtgacgccgggtcttggtggctagccgttccaggagccggacggttcattaagtatttcgtaaaagggcgtcaggcagtgctgtctatggtgcgcaaagccaagtatagagaattacttttgagcgagctcctgggccgcagggcccccgtggtggtgcgtcttgggctgacataccacgtgcatgacctcattggagctcagctagtcgactgtatctcaacaacttcagggactctcctgagactccctgaaacttag

SEQ ID NO: 133914 - DNA, 1107 bp, synthetic construct
  misc_feature 1..1107: note = Description of Artificial Sequence: Synthetic coding sequence
  source 1..1107: mol_type = other DNA
atgcagaaatggttttcagcattcgacgatgccatcattcagcgtcaatggcgtgcaaatccctccagaggggggggcggcgtttcttttaccaaggaggtcgataccaacgttgcaaccggcgccccaccgcgccggcaaagggtcccggggcgggcatgtccgtggcgtgagcccattcgtggtcggcgtggggctagacccggcgggggcgacgccggcggaacacctggggagaccgtccgccactgcagcgccccggaggatccgattttcagattttcttcacttcactcttacccttttccaggaaccatcaagtcaagggacatgagttggaaacgccaccatctcatccccgaaactttcggggtgaaacggcgtaggaagagaggaccagtggaatccgacccactgagaggtgaacccggctctgcacgggctgcagtatctgaactcatgcagctgttccctcgggggctgtttgaggacgccctccctcctatcgtcttgaggagccaggtctactctctggtgccagaccgcactgttgctgacaggcagctgaaggagctgcaggaacagggcgagatacgtatagtccagctgggctttgaccttgacgcccacgggatcatctttactgaggactacagaacaagagtttgtgattgtgtcctcaaggcgtgtgacggccgcccttatgccggcgcagttcaaaagtttctagcctccgtcctgcccgcttgcggggatttatccttccaacaggatcagatgacacagacattcggattccgagatagcgaaataacgcatctcgtcaacgcgggcgtcttaactgtgcgagatgccggttcctggtggctggccgtcccaggtgctgggcgatttatcaagtacttcgtgaaaggacgacaagccgtgctgtctatggttcgcaaggctaagtatcgggagttgttactgtcagagttgttgggacgccgtgcccctgttgttgtgaggcttggcctgacgtatcacgtccacgatctgataggcgcgcagcttgtggactgcatctccactactagcgggactctgctacgcctccccgaaacatag

SEQ ID NO: 133915 - DNA, 1107 bp, synthetic construct
  misc_feature 1..1107: note = Description of Artificial Sequence: Synthetic coding sequence
  source 1..1107: mol_type = other DNA
atgcagaagtggttttctgccttcgacgatgctattatccagaggcagtggcgtgccaacccgagtagaggcggtggaggggtctctttcacaaaggaggtcgacactaatgtggccaccggggcacctccccgtcgacagcgcgtgcccggcagggcatgcccctggagggaacctatcaggggcaggcgcggggcccgcccgggagggggcgatgctggcggcacacccggtgagactgtgcgccattgtagcgcaccagaagatccaatctttcgattttcttcactgcactcatacccatttccagggacaattaaatctagagacatgtcatggaagcgtcaccaccttatcccagaaaccttcggtgtcaaaaggcgaagaaagcgaggccctgtcgaatccgacccactcaggggggagcccgggtccgccagggcagccgtttccgagctgatgcagctctttccgcgcggcctttttgaagatgccctccctccaattgtgctgcgatcgcaggtatattctctcgtgcctgatcgcacagttgcagaccgccagctgaaggagctccaggagcagggcgaaatcagaatcgttcagctaggctttgatctggatgcacatgggatcatcttcacagaagattaccggacccgggtctgtgattgtgtccttaaggcttgtgatggtcgcccttatgcaggcgcagtacaaaagtttctggctagtgttctacccgcctgcggggacctgagttttcaacaggaccaaatgactcagacctttggtttccgcgactcggaaattacccacctggtcaatgccggggtgcttactgtccgcgacgccggctcttggtggctcgcagttcctggtgccgggaggtttattaagtacttcgtgaagggccggcaggccgttctgtccatggtgcgcaaggcaaagtaccgcgaattgctgctgtctgaactgttgggccggcgagctccagtcgttgtgcggctaggtttaacataccatgtgcatgatctcataggcgcccagcttgtggattgcattagcacaactagcgggaccctcctgcgactgcccgaaacatag

SEQ ID NO: 133916 - DNA, 1095 bp, synthetic construct
  misc_feature 1..1095: note = Description of Artificial Sequence: Synthetic coding sequence
  source 1..1095: mol_type = other DNA
atgcagaagtggtttagcgcttttgacgacgctataatacagagacaatggagggccaatccctctaggggcggtggcggggtcagtttcactaaggaggttgacaccaatgtagccaccggtgcgccccctcggaggcagcgagtccccgggcgcgcctgtccctggcgggagcccatacgcggtcgcagaggggcccggccaggcggaggtgacgctggcgggaccccaggcgaaacagttcggcactgcagcgcccctgaggaccccattttcagattctcttctctgcatagctatccgttccctggaactatcaagtcccgagacatgtcttggaaaagacatcatctcatacccgagactttcggcgtgaaacgccgccgcaagcgaggccctgtcgaaagcgatccattacggggggagcctggctctgcccgtgccgctgtgtcagagctgatgcagctatttccaaggggattgtttgaggacgccctgcccccaatcgttcttaggtctcaagtgtactccctggtccccgaccggacagttgccgacaggcagctgaaggaattacaggagcagggtgaaattagaatcgtacagctcggatttgatctggatgcacacggaattatttttaccgaggattaccggacgcgcgttttaaaagcatgtgatggccggccttacgcgggcgccgtccagaaatttctcgcttcggttcttccagcctgtggtgacttgagtttccagcaagaccagatgactcaaacgtttgggtttagggacagtgaaattacgcatctcgtgaatgcgggcgtgctgacggttcgagacgccggatcttggtggctggctgtgccaggggcaggtaggtttataaagtacttcgtgaaggggcgtcaagccgtcttgtccatggtgcggaaggccaaatacagagagttgctgttgtctgagctgctgggccgtcgagcccctgtagtggtgcgattaggtctaacataccacgtacatgacctgattggtgctcaactggtggactgtatcagcacgacttcaggcacacttctgaggctgcctgagacttag

SEQ ID NO: 133917 - DNA, 1107 bp, synthetic construct
  misc_feature 1..1107: note = Description of Artificial Sequence: Synthetic coding sequence
  source 1..1107: mol_type = other DNA
atgcagaagtggttcagcgctttcgacgatgcaattatacagcggcagtggcgcgctaatcccagtagagggggtggaggagtgtcctttaccaaggaggtggacactaacgttgcaactggcgcaccaccacgtcgtcaaagagtgcccgggagggcctgcccatggagagagccaattcgtgggcggaggggggccagacccggcggcggcgatgctggcggcacaccaggtgaaaccgtgaggcactgctctgcgcccgaagaccctatctttcggttctcatcgctgcacagttatccctttccagggaccatcaaatcgagagacatgagctggaaacgccatcacctcatccccgagacatttggtgtgaaacgccggagaaagcgcggacctgtggaatcagatccattacggggagagccaggttctgcccgggctgctgtcagcgagctaatgcagcttttccctagaggcttgttcgaggatgctctgccgccaatagtgctgagatcacaggtttacagtttggtccccgatcgcaccgtcgcggatagacagctgaaagaattgcaagaacagggagaaattagaattgtgcaattgggcttcgatctggacgcacacgggatcatcttcaccgaggattatagaacccgagtgtgcgattgtgtgctcaaagcatgcgatggcaggccatatgccggcgctgttcagaaatttctcgcaagtgtgctcccagcttgtggggacctgtctttccagcaggaccagatgacccagacctttggattccgcgatagcgaaatcacccatctggtcaatgcaggagtgctcacggttagggatgctggatcctggtggctcgcagtaccaggggccgggcgcttcataaagtactttgttaaaggccgccaggcggttctctccatggtgcgcaaggccaaatatagagaactgctgctgagcgagctcctgggacggcgcgctcccgtggtagtcaggctgggactgacttatcacgttcatgacctcatcggggcacagctggtcgactgtattagcacgacatctggcaccctgctgagactaccagagacatag

SEQ ID NO: 133918 - DNA, 339 bp, synthetic construct
  misc_feature 1..339: note = Description of Artificial Sequence: Synthetic coding sequence
  source 1..339: mol_type = other DNA
atgcagaagtggttcagcgcttttgatgacgccatcatccagagacagtggcgggcaaacccctcgcgcggcggtggcggagtgtcctttacaaaagaggtggacactaacgtggcaacaggagcaccacctaggcggcagcgtgtccccgggcgggcttgtccctggagagaaccaatccgtggaagaaggggagcaaggcctgggggaggcgacgcgggcgggacacctggcgagacagtgcgccattgctctgcccccgaagacccgatcttcaggttcagttctttgcattcttaccccttccctggaactattaagtcacgcgatatgtcctag

SEQ ID NO: 133919 - DNA, 966 bp, synthetic construct
  misc_feature 1..966: note = Description of Artificial Sequence: Synthetic coding sequence
  source 1..966: mol_type = other DNA
atgttggtatgtgctagtcctccccccttgcccgcgttgaccggcttaagggatgacaaactcacactactttccagctctcccgggctgggcggtaccccgggtgagactgttcggcattgctccgctcctgaggaccccatattccgattcagttccctccatagctacccttttccaggaactatcaaaagtagagatatgagctggaagcgacaccatttgattcccgagacatttggagtcaagaggcggcgaaagcggggccccgtggagtctgatccactacgaggcgaacctggttccgcccgagctgctgtgtcagagctgatgcagctgttcccccgggggctattcgaggacgccttgccgcctatcgtgttacggtctcaggtgtacagcttagtccccgacagaactgttgccgataggcagttaaaggagctccaggaacaaggcgaaatccggatcgtccagctggggtttgacctggatgcgcatggtatcatattcacggaagattatcgcacaagggtcctgaaagcttgtgacggcagaccctatgcaggggctgtgcaaaagtttctggcgtctgtcctgcccgcttgcggcgacctcagctttcagcaggaccagatgacacaaacatttgggttccgcgatagcgagatcacgcacttggtgaatgctggcgtcttaacagtgcgagacgccggtagctggtggttggccgttcccggtgccggtaggttcataaaatactttgttaaaggcagacaagcggtgctcgggatggtgcgaaaagctaaatatcgcgaactgcttctaagtgaactccttggcagaagagccccggtggtcgttagactcgggctcacataccacgtccatgacctcatcggagcccaattggtggactgcatttctaccacttccgggacactgctgagactcccagaaacatag

SEQ ID NO: 133920 - DNA, 966 bp, synthetic construct
  misc_feature 1..966: note = Description of Artificial Sequence: Synthetic coding sequence
  source 1..966: mol_type = other DNA
atgttggtgtgtgccagtcctccaccattgcccgctctgacgggcttgcgagacgataaacttactctgttatcatcttcccctgggctgggcggaacccctggagagaccgtgcggcattgttcagctcctgaggatccgatctttagattctcttcactgcactcttacccattcccaggcacaataaagagtcgggacatgtcatggaaaagacaccacctcatccctgaaacctttggagtcaagcggcgaagaaagcgcgggcctgtcgagagtgacccactgcggggggagcctggctcggctcgcgccgcagtgagcgagttgatgcagctgttccctaggggattgttcgaggacgctctcccgcctatcgtgctgaggtcccaagtttacagtctcgtgccagacagaaccgtagccgatagacagctaaaggagctgcaggaacaaggagagatccggatcgtgcagctaggtttcgacctcgacgcacacggtattatatttacagaagactatcgcaccagggttttgaaggcctgcgacggccgaccctatgcgggcgccgtgcaaaaatttcttgcaagcgtccttccagcgtgcggtgacctgagctttcaacaagaccagatgacccagacgtttggctttcgggactccgaaattactcaccttgtgaacgctggagtcctgacagttcgtgacgctgggtcctggtggttggctgttcctggtgcaggaagatttataaagtattttgttaaagggagacaggccgtcctatctatggtgagaaaggcaaaataccgagagttgctgctctcagagctcctgggacgccgagccccggtggtggtgagactaggcttaacgtatcacgttcacgatcttatcggagcccaactggtggactgtatctcaaccacatcaggcacactgctccgtctcccagagacgtag

SEQ ID NO: 133921 - DNA, 966 bp, synthetic construct
  misc_feature 1..966: note = Description of Artificial Sequence: Synthetic coding sequence
  source 1..966: mol_type = other DNA
atgcttgtgtgtgcctctcccccacctctgcccgccctcacaggtctgagggacgataagttgactctactgtcttctagtcccgggctgggaggaacccctggcgagacagtgcgccactgctcggcacccgaggacccaatctttcgtttttccagtctccactcctatccctttccgggtacaataaagagcagggacatgagctggaagagacatcacctgataccagaaacctttggcgtgaagcggcggcgaaaaagagggccggttgagtctgatccactgcggggagagcccgggtcagcccgcgcggcggttagtgagctcatgcagttattccctcggggtctgttcgaggacgctcttcctcctattgtcttacgaagtcaggtgtatagtttggtccccgacagaacagtcgcagaccgtcagcttaaggagctgcaggagcagggtgagattaggatcgtgcagttgggattcgatttagacgcgcatggcattatcttcaccgaggattatcgtacacgcgtgctgaaggcttgtgacggtcgtccgtacgctggagccgtacagaaattcctggcgtctgtgctgcctgcctgtggcgatctgagttttcaacaggaccagatgacccagaccttcggattcagggacagcgagatcactcacctagtgaatgcgggggtccttacagtgcgggacgccggtagctggtggctggccgtacccggcgccggacgttttattaaatattttgtcaaagggcgacaggctgttctatctatggtcaggaaagccaagtatcgggagctcttgctgtctgagctgctgggaagaagagcccccgttgtggtgcggttgggccttacctaccatgtgcacgacctgatcggagcgcagcttgtggattgtatttctactacctcgggcacactgctcaggttgcctgaaacctag

SEQ ID NO: 133922 - DNA, 966 bp, synthetic construct
  misc_feature 1..966: note = Description of Artificial Sequence: Synthetic coding sequence
  source 1..966: mol_type = other DNA
atgctggtgtgtgccagtcctccccccctgccagcgctgacagggttgcgggatgacaagctgactctgctctcttccagtccaggtcttggaggaacacctggggagaccgtgagacattgttcagcccccgaagatcctatattccggttttcgtcgctgcactcttatcccttcccgggcactatcaaatcacgggatatgagctggaaaaggcaccacctcatcccagagacattcggtgtcaaacgtcggcgaaaacgcggccccgttgagtcagatcctctgcgcggcgagcccggcagcgccagggctgccgtctccgagctgatgcagctgtttccacggggacttttcgaagacgctctgccacctatagtattgcggtcccaggtgtactcacttgttcctgaccggaccgtcgctgaccgtcaacttaaagagcttcaagagcaaggtgagattagaatcgtgcaactgggcttcgatttggacgctcacggcatcatctttacggaggactaccgaacacgtgttcttaaggcttgtgacggcaggccttacgccggagctgtccagaagttcctagcctctgtgctgcctgcctgcggcgatctatctttccaacaagaccagatgacacagacgtttggtttccgcgattcggagatcactcatctggtcaacgccggagtcctgacagtgagagacgcaggttcctggtggctggcagtaccaggagccgggcggtttatcaaatatttcgttaaaggcaggcaagccgtactgtctatggtgcgaaaagccaaatatagagaactgctcctcagtgaactccttgggcggcgggccccagtcgtagtccgactgggccttacataccacgtgcatgacttgatcggagcgcaacttgtcgactgtatctccacaacgtctggaactttattgcgcctacccgagacatag

SEQ ID NO: 133923 - DNA, 966 bp, synthetic construct
  misc_feature 1..966: note = Description of Artificial Sequence: Synthetic coding sequence
  source 1..966: mol_type = other DNA
atgctcgtttgcgcctcccctccgccgctacccgcccttacaggattgcgggatgacaagctgaccctgctgagctcaagccccgggctcgggggaacccctggggagactgtgcgccattgcagcgctcccgaagatcccatttttagattcagttcccttcatagttatccttttccgggaactatcaagagtcgcgatatgtcatggaaaagacaccatctgatacccgagacatttggtgttaaacggagaagaaaaagaggaccggtcgagtccgatcctctccgcggcgaaccagggagcgcccgcgccgccgtgagtgaactgatgcagctgttcccgaggggtttatttgaggatgcactccccccaatagtgcttaggagtcaggtatactcacttgtgcccgacagaaccgtagctgatcgacaattgaaggaactgcaggagcagggggagatccgcatcgtccagttaggattcgacctagatgcacatgggatcatattcaccgaagattataggactcgcgtcctgaaggcatgcgacggccgcccctatgccggcgccgtccagaaattcttggcgagcgtcctcccagcttgtggcgacctcagttttcaacaagaccagatgactcagacctttggctttcgggattcagagataacacatctcgtaaatgccggcgtcctgactgtccgcgacgctgggagttggtggctggctgtaccaggtgctggccgatttatcaaatattttgtgaagggtagacaggcagtgctcagcatggtaaggaaagctaagtatcgcgagctgctgttgtcagagctgttgggaagacgggctcccgtcgtagtccgcttaggcctcacctaccacgtccacgaccttattggtgctcagcttgtcgactgtatcagcactacgtcagggacattgttgcggttacccgagacctag

SEQ ID NO: 133924 - DNA, 1320 bp, synthetic construct
  misc_feature 1..1320: note = Description of Artificial Sequence: Synthetic coding sequence
  source 1..1320: mol_type = other DNA
atgcagaatttgaaggctgaccccgaagaattattcacgaaactagagaaaattgggaaaggaagttttggagaagtgttcaaggggatcgataataggacccagaaggttgttgccatcaaaataatcgacttagaggaagccgaggacgaaattgaagatatacagcaggagatcactgtgttaagccagtgcgattcaccatacgtaactaagtattacggcagttacctgaaggacaccaagctttggattatcatggaatatctcggcggcggatccgcgttagacctgttagagcccggcccgctcgacgagactcagatagccactattttgagagagattctgaaaggacttgactatctgcacagcgagaagaagatccaccgagacattaaggccgccaacgttctactgtccgaacatggggaagtgaagctggcagactttggtgtggccggacagctcacagacacgcagatcaagcggaatacattcgtgggcacgccgttttggatggcacccgaggtaatcaaacagagtgcctatgactctaaggccgacatttggagcctgggcatcacagcaattgagcttgcacggggcgagcctccacactcagaactgcatcctatgaaagtgctgttcctcatccctaagaacaatccgcccaccttagagggaaattatagcaagccgctcaaagaattcgtggaagcatgcctaaacaaagagcctagctttcgtccaacagccaaagagctactcaagcacaaatttatactaagaaatgccaagaagacttcatatctcactgagctcatcgacaggtacaagcgttggaaagcagaacagagccacgatgacagctcttcagaagactctgacgccgaaacagatggccaagcctccggaggcagtgatagcggcgattggatctttacaatcagggagaaagaccccaagaatctggaaaatggcgctctgcaaccatctgatctagaccgcaacaagatgaaggacatccccaagcgaccattcagccaatgtttgtccacaatcatcagccccctgttcgctgagttgaaagagaagagtcaggcttgcggcgggaatttaggctccattgaagagctacgtggcgcgatctacctcgctgaggaggcatgcccggggatctccgatacaatggttgcgcaactcgtgcaaaggcttcaaagaagcatacatggcaaccaagcaccgcccgattgccatctagcacaagtccaggcctttggcggctcaggctgcgtgttaggcagcagatcggtgtag

SEQ ID NO: 133925 - DNA, 672 bp, synthetic construct
  misc_feature 1..672: note = Description of Artificial Sequence: Synthetic coding sequence
  source 1..672: mol_type = other DNA
atggccccagaggttatcaaacagagtgcctacgacagcaaggcagacatctggagtctgggcattacagctatcgagctggctaggggcgagccacctcactctgaactgcaccccatgaaggtactctttctgataccgaaaaataaccctcctacactcgagggtaattactccaagccgttgaaagagttcgtggaggcctgtttaaacaaggagccatcatttcgcccaactgcaaaagagctgctgaagcacaaattcatcctgcgtaatgcaaaaaaaacctcgtatctgaccgaattgatcgatcgctacaagcgctggaaagccgagcagtcacacgatgattcatcgtctgaagactctgatgcagagactgatggacaggcttccgggggctccgatagcggcgattggattttcacaattagggagaaagatcctaagaacctggaaaacggtgcccttcagccctctgacctagacaggaacaagctgaaggagaagtcccaagcatgcgggggcaacctggggagcattgaggaactgaggggagccatatacctggcagaggaagcttgtcccggcatatcggataccatggtagcgcagctggtgcagcggctgcagcgctactccctgtctggtggaggtactagtagccactag

SEQ ID NO: 133926 - DNA, 1332 bp, synthetic construct
  misc_feature 1..1332: note = Description of Artificial Sequence: Synthetic coding sequence
  source 1..1332: mol_type = other DNA
atggattctagggcccaattatggggacttgctctgaataaacgcagagctaccttacctcaccccggggggtccacaaatcttaaagccgaccctgaagagctatttaccaaattagaaaagattgggaaggggtcgtttggcgaagtcttcaagggcatcgacaatcgcactcaaaaagtggtcgccattaaaattatagaccttgaggaagccgaagacgagatcgaggacattcagcaggagataacggtgttgagccagtgtgactctccctatgtcactaaatactacgggtcatacttaaaggataccaagttatggatcatcatggagtacctcggcggagggtcagccctggatctccttgagcccgggccattggacgagacccaaatagcgacaatcttgagggaaatcctgaaaggactggactatcttcactccgagaagaaaatccatagagacatcaaagccgctaacgtgctgctctcggaacatggtgaggtaaagcttgccgattttggagtcgctggccaactgacagatacacagataaagcgcaacacgttcgtaggcactccattctggatggccccagaggtcattaaacaatcagcgtacgattcgaaggccgacatctggtcattagggatcacagccatcgagctggcgcgaggagaaccaccacattccgaattgcatcccatgaaggtgctctttctgatcccgaaaaataatcctcccactctcgaagggaactactccaaaccacttaaagagtttgtggaggcctgtcttaataaggagccatcttttcgccccaccgctaaggaactgctgaaacacaaattcatcctgcgaaacgctaagaaaaccagttatcttacagaattaattgaccgatacaaacgctggaaggctgagcaaagccatgatgactcttcatccgaggactccgatgcggaaacagatggccaggcttctggcggcagtgattccggagattggatctttactatacgagaaaaggaccccaagaacctcgaaaatggcgctctgcagcctagcgacttggatagaaacaaaatgaaggatatcccgaagcgaccctttagtcagtgcttgtcgacgattatttcacctctgttcgccgagttaaaagagaagagccaggcctgcggcggaaacttaggatccattgaagagctgcgcggcgccatctacttagcagaggaagcctgtcccggtatctctgatacaatggtggcacagctggtccagcgtctgcagcggtactccctgagtggaggaggtacatctagtcactag

SEQ ID NO: 133927 - DNA, 1296 bp, synthetic construct
  misc_feature 1..1296: note = Description of Artificial Sequence: Synthetic coding sequence
  source 1..1296: mol_type = other DNA
atggcccactctccagttcaatcaggcctcccagggatgcagaatctgaaggccgaccccgaggaactctttaccaaattagagaagattggcaaggggagcttcggagaagtatttaagggaatagacaaccggacccagaaagtggttgcgatcaagattatcgacctggaagaagctgaagacgaaatcgaggatatccagcaagaaattacagtgctatcccaatgtgactctccctacgtcacaaaatactatggctcatatctgaaagacacaaagctgtggatcattatggagtatcttggcggcggctccgccctagatttgctggagcccgggccactggatgagacccaaatcgccaccattctgcgcgaaatcctgaaaggactggactaccttcattccgagaaaaaaatccatagggacattaaagcagccaatgttctcttgagcgagcatggcgaggtaaaactcgctgatttcggggtggccggtcagctcacagatacacagatcaagcgaaatacctttgttggcacgcccttctggatggctcctgaggtaatcaaacaatccgcctatgacagcaaggccgatatctggtcacttggcatcacggccatcgaactcgctaggggcgagcccccccactctgagctgcatcctatgaaagtgttgtttctcatccccaagaataacccccctaccctcgaggggaattattcaaagccactgaaagagttcgtggaggcttgccttaataaggagccaagctttaggccgactgctaaggagctgctgaagcataagttcattttacgcaacgccaaaaaaaccagctacctaactgagttgatcgacagatacaagaggtggaaggccgaacagtctcatgacgattcaagcagtgaggattcggatgctgaaacagacggacaggcatcaggcggttcagatagcggcgattggattttcaccatccgcgaaaaggatccgaagaacctggaaaacggcgcacttcagccctcagatcttgacagaaataagatgaaggacattcccaaacgaccattcagtcagtgcctgtctacaatcattagtcccctctttgctgaattaaaggagaagtcccaagcctgcggcggcaatctggggtctatcgaagagttaagaggagccatctatcttgcagaggaggcttgcccggggatctcggataccatggtcgctcagctcgtgcagagactgcaaagatatagcctttcgggtgggggtactagtagtcattag

SEQ ID NO: 133928 - DNA, 1239 bp, synthetic construct
  misc_feature 1..1239: note = Description of Artificial Sequence: Synthetic coding sequence
  source 1..1239: mol_type = other DNA
atggctcacagtcccgtccaaagcgggctcccggggatgcaaaacttaaaggccgacccagaggaattgtttaccaaactcgagaaaataggcaagggatcgttcggggaggtgttcaaaggaatcgataatagaacacagaaagttgtggccattaaaatcatcgacctggaagaggcggaggacgagattgaggacatacagcaagagatcaccgtgctgtcccagtgcgattctccgtatgttaccaaatattacggcagttacctgaagttggaacccgggcccctcgatgaaacgcagattgctaccattcttagggagattctcaaaggcctcgactacctccactcagagaaaaagattcatagggacattaaggccgctaacgtgctgctaagcgagcacggagaagtcaagcttgcggatttcggagtggctggtcagttaactgatacccagatcaagaggaatacgttcgtcggcacacctttctggatggctcctgaggtcattaaacaatccgcatacgactcaaaagcggacatctggtcgctggggattacggccatcgaactggctaggggcgagccaccacattccgagctccacccaatgaaagtgctgttcttgatcccaaaaaacaacccccccacactggagggcaactacagtaaacctctcaaggagttcgtggaagcctgtctgaacaaggagccaagttttcgacctaccgctaaggagctgctgaaacacaaatttattctgagaaatgctaagaaaacatcctaccttactgaacttatcgatcgatacaagaggtggaaggctgaacagtcgcacgatgactccagctcggaggattcagacgcagaaactgacggtcaggcttctggcgggtcagactcgggggactggatcttcactataagggaaaaagaccctaaaaacctcgaaaacggtgccctgcagcccagcgaccttgacaggaacaagatgaaggacatccccaaacggccattcagtcagtgtctctcaaccataatctcccctctgttcgccgagttaaaggaaaaatcgcaagcatgcggaggcaatcttgggtccatcgaagagttacggggtgcaatatacctcgctgaagaggcttgtcccggcatatctgataccatggtggctcagttagtgcagagacttcaacgttacagcctgagcgggggcggtacttctagtcattag

SEQ ID NO: 133929 - DNA, 1029 bp, synthetic construct
  misc_feature 1..1029: note = Description of Artificial Sequence: Synthetic coding sequence
  source 1..1029: mol_type = other DNA
atggcacattcccctgttcaatcaggtttgcccggaatgcagaacttaaaagccgaccctgaggagctgttcaccaagctcgagaaaatcggtaagggctcttttggagaagtcttcaaaggcattgacaataggacgcagaaggtggtagccattaagatcatagacctagaagaggctgaagacgagatcgaagacatacagcaggagatcaccgtgctctcccagtgtgactctccctatgtgacaaagtattatggatcgtatttgaaggatactaaactatggataattatggagtacctcggtggcggttccgctctggatctgcttgaacccgggcctctagacgaaacccagattgcaaccattctgcgcgagatcctgaagggactcgactacctgcatagtgaaaaaaaaattcaccgggacatcaaagccgcaaatgtgctgctttcagaacacggggaggttaagctggccgacttcggtgttgcaggccagttaaccgacacacagattaaaagaaatacctttgtaggcacaccattctggatggctcccgaggtgataaaacagagcgcatacgacagcaaggccgatatctggagcttgggaatcacagccatcgaacttgcacggggggagccaccacactctgagctgcacccaatgaaggtgctattcctgattcccaaaaacaatccccccacccttgaggggaattattcaaaacctttaaaggagttcgttgaagcgtgcctgaacaaagaaccatctttcaggccaactgctaaggaactcctgaaacacaaattcatactcaggaatgccaagaagactagttacctgaccgagctgatcgaccgctataaacgctggaaagccgaacagtcacacgacgactcttcctccgaggatagcgatgccgagactgatggtcaagcgtcaggggggtcagattcaggcgactggatctttaccatacgggagtggagcagtagtgctatcggtctaggccagaagtag

SEQ ID NO: 133930 - DNA, 2991 bp, synthetic construct
  misc_feature 1..2991: note = Description of Artificial Sequence: Synthetic coding sequence
  source 1..2991: mol_type = other DNA
atggatgaggacacccactacgacaaggtggaggacgtggtcggctcacatattgaggatgccgtcaccttctgggctcagagtatcaacaggaataaggacatcatgaaaattgggtgctccttatccgaggtttgtccccaagcatcttccgtcctgggaaatctcgatcccaacaaaatatacggtggtctcttcagtgaggatcagtgttggtaccggtgtaaggtgctcaagattattagtgtggaaaagtgcttggtgaggtatatagattatggtaacaccgagatattgaaccggagcgacattgtcgagatcccactggagttgcagttctcttccgtggccaagaaatataaactgtggggattgcacattccatctgatcaggaagtgacacagttcgaccagggtactacattcctgggctctcttatcttcgaaaaggagattaaaatgaggattaaggccacttcagaagatggaaccgttatcgctcaggctgaatacgggtccgttgacatcggtgaggaggtactcaagaaaggattcgccgaaaaatgcagactcgcaagccgaaccgacatttgtgaggagaagaaactcgacccgggtcagctcgtgctgagaaacctgaaatctcctattcccctgtgggggcaccggtcaaatcagtccacattctcccgaccaaaagggcacctgagtgaaaagatgactctagacttgaaagacgagaatgacgctggcaatctcatcacatttcctaaggagagtctggcagtaggggactttaatcttggttcaaatgtgagtttagaaaagatcaaacaggaccagaagttgatagaggaaaatgagaagctgaaaacagaaaaggatgccctgctagagtcatataaggcactcgaactgaaagtggagcagatagcccaggaactgcagcaggagaaggctgccgcagtcgacttgactaatcacttggagtacacattaaagacatatatcgacacacgcatgaaaaacttagcagctaagatggagatcctgaaggagatgaggcacgtggacattagtgtgagatttggcaaagacctgtcggacgccatacaagttctcgacgaggggtgtttcaccacccccgcctcactaaacggactcgagataatctgggctgagtacagccttgcccaagagaacattaagacgtgcgagtatgtgtcagaaggcaatattttaatcgcacagaggaatgagatgcagcagaaactttacatgtctgtagaggatttcattctggaggtggatgagtcatccctgaataagcggctcaagactctgcaggacttgtctgttagtctggaggctgtgtatggacaggcaaaggaaggagcaaacagtgacgaaattctcaaaaaattttatgactggaaatgcgacaagagagaggaattcacttccgtgcggtcagagacagatgccagcctccatcgacttgtagcatggtttcagcgcactcttaaagtcttcgacctatctgtggaaggctccttgatctctgaagatgctatggataacattgacgaaatcttggagaagacagagagcagtgtgtgtaaagaactggaaatcgcattggtggatcaaggagatgccgacaaggagattattagcaatacttattcgcaggtattgcagaaaatacactctgaagaaagactaattgccaccgtgcaggccaagtacaaggattctattgaattcaagaagcaactgattgagtacctgaacaagtccccgtccgtggatcacttgttgtctatcaaaaagacgctgaaaagtctgaaggcacttctccgctggaagttggtggaaaagtcgaatttagaggagagcgacgaccctgatggttcgcagatcgaaaaaatcaaggaagaaatcacacagctaaggaacaatgtcttccaggaaatatatcatgaaagggaggagtacgaaatgctaacatctttggcccagaagtggtttccagaactgccgttactccatccggaaataggcctgttgaagtatatgaactccggaggtttgctaaccatgagtctggagcgggatctcctcgatgctgagcctatgaaggaactgagcagcaaaagaccactggttaggagcgaggtgaacgggcagattattctccttaagggatactcagtagatgtggacaccgaggctaaagtgatcgagagagccgctacatatcatagagcttggcgagaagccgagggggacagcgggctcctgcccctgatattcttgtttctgtgtaagtccgacccaatggcttatctcatggtgccttactaccctagagccaatctgaacgccgttcaggctaacatgccattgaactcagaagaaaccctgaaagttatgaagggggtcgcacaaggactgcacactcttcataaagccgacattatccacggttcccttcatcaaaacaatgtgtttgcgctgaaccgtgagcaaggcatcgtgggagattttgacttcaccaagagcgtttcccagcgcgcaagtgtgaacatgatggttggcgatcttagtctgatgtcccctgagctcaaaatggggaaacctgcgagcccaggctccgatttgtacgcatatggatgcctgttgctctggctaagcgttcagaatcaggaattcgaaattaacaaagacggcatcccaaaagtggaccagtttcatctggatgataaggtgaaatctctgctctgctcgctcatttgctatcggtccagtatgactgccgagcaggtgctgaatgcagaatgcttcttaatgcccaaagaacagtctgttcctaatccagaaaaagatactgaatataccctgtacaaaaaagaggaagaaattaaaacagaaaacttggacaagtgcatggaaaagacacggaatggggaggccaatttcgattgctag

SEQ ID NO: 133931 - DNA, 3060 bp, synthetic construct
  misc_feature 1..3060: note = Description of Artificial Sequence: Synthetic coding sequence
  source 1..3060: mol_type = other DNA
atgtgggtacaggggcacagctcgcgagcgtccgctactgagtccgtctctttctcaggaatagtccagatggatgaggacacccactatgataaggtagaagacgtcgtgggttctcacatagaagacgccgttacgttttgggctcagtccatcaataggaataaggatatcatgaagatcggatgttccctctcagaagtgtgccctcaggccagctctgtattggggaacctggaccctaataaaatttatggcgggcttttcagcgaggatcagtgctggtacagatgcaaggtcctcaagatcatctctgtggagaaatgcctggttcgttacattgactacggaaatactgagattttgaacagatccgacatcgttgagataccactcgagcttcagttttctagtgtcgctaagaaatataaattgtgggggctgcacataccttctgatcaagaagttacgcagttcgaccaggggacgacgttccttggttccctgattttcgagaaagagatcaagatgcgcataaaagccacatccgaggatggaacagtgatcgcgcaagccgagtatggctccgtggacataggagaggaagtgctgaaaaaaggatttgcagaaaagtgtcgactggcaagtcgtaccgacatttgtgaagagaaaaagctggacccaggtcagctggtactgcgtaacctgaagtcgccgattcccctctggggccatagaagtaaccaatctacattctcaagaccaaagggtcatttatcagagaagatgaccctggacctcaaagacgaaaatgatgctggaaacttgatcacctttccaaaagaatcattggcagtcggcgattttaatctgggcagtaacgtcagtcttgagaagatcaagcaagaccagaagcttatcgaggaaaacgaaaaactaaaaacagaaaaggatgccctcctggaatcgtacaaagcgcttgaactaaaggtggaacagattgctcaggagctgcagcaggagaaggcagccgcggtagatctgacaaaccaccttgagtacacacttaaaacgtacatcgatacaaggatgaagaacttagctgcaaagatggaaatcctcaaggagatgcgtcacgtcgatatatcagtgcggttcggcaaggacctttctgatgcaatccaggtacttgatgagggttgcttcaccaccccggcgagtttgaatgggcttgaaatcatctgggcagaatattccctcgcacaagagaacattaaaacttgcgagtacgtgagtgaaggcaatattttgattgcgcaacggaatgagatgcagcaaaaactgtacatgagcgttgaggatttcatcctagaggtggacgagtcttcactgaacaaacgccttaagaccttgcaggacctcagcgtgtcgctggaagccgtttatggccaagcgaaggagggggctaacagtgatgaaattcttaaaaaattctatgattggaaatgcgacaagagagaggaatttacgtcagtgcgcagcgagacagacgcgagtcttcaccgcctcgtggcgtggtttcagaggaccctgaaggtgtttgacctttcagtagaaggctccttgatctccgaggacgcaatggacaatattgatgagatactggagaaaaccgaatcatccgtgtgcaaagagttggagatcgcactcgttgaccaaggcgatgccgataaggaaataatctccaatacatatagtcaggtcctgcagaagatccacagtgaggagcggctgatcgctaccgttcaggcaaaatacaaagatagcattgaattcaaaaagcagctcatcgagtatctaaacaaatctccgagcgtggatcacctgctttctatcaaaaaaaccttgaagtcgctaaaggccctcctgaggtggaaactcgtggagaaaagtaatctggaggaatccgacgaccctgatggctcccagatcgaaaaaatcaaggaagagatcacacagcttcgcaacaacgtgtttcaggagatatatcacgaaagagaagagtacgagatgctgactagcctggcccagaaatggtttcctgaacttcctttattgcacccggaaatcgggctccttaaatatatgaacagcggcggactgttaacaatgagccttgaacgagacctcttggacgccgaacccatgaaagagctgagttcaaaacggccactggttcggagtgaagtgaacggacagatcatcctcctgaaggggtatagcgtggatgtagacactgaggctaaggtcatcgagagggcagccacttatcatagagcttggagggaagctgagggcgatagtggactgcttcctcttatcttcttatttctgtgcaagtccgaccccatggcatacctgatggtgccatactaccctcgagccaatcttaatgcggtgcaggccaatatgcccttaaactcggaagagaccctgaaagtaatgaaaggagtggcccagggattacatactctacacaaagcggacatcatccacgggtctctccaccagaacaacgtcttcgccctaaaccgcgaacaggggattgtgggggatttcgatttcacgaagagcgtatcccagcgcgcatccgtaaacatgatggttggtgacttgagcttgatgtccccggagctcaagatgggcaagcctgcttcacctgggtctgacctgtatgcctacggctgccttttgctctggttaagcgtccagaaccaggagtttgagattaataaagatggcatccctaaggtcgatcagtttcacctcgacgacaaagtgaagtctctcctgtgttccctcatctgttatcggtcatctatgaccgccgagcaggtgctcaacgcagagtgcttcctcatgcccaaagaacaatctgtgcctaaccccgagaaagataccgagtataccctatataaaaaagaagaggagattaagactgagaatctggataaatgtatggagaaaacccgcaacggcgaggcaaactttgactgctag

SEQ ID NO: 133932 - DNA, 2991 bp, synthetic construct
  misc_feature 1..2991: note = Description of Artificial Sequence: Synthetic coding sequence
  source 1..2991: mol_type = other DNA
atggacgaggacacacactatgataaagttgaagatgttgtgggatctcatattgaggacgccgtgacgttttgggcgcagagcattaacaggaacaaggacattatgaaaattgggtgctcactgtccgaagtctgcccccaggcctccagcgtcctcggaaacttggacccgaataaaatttacggcggtcttttttccgaggatcagtgttggtatagatgcaaggttctgaaaataatctctgtcgagaaatgtttagtgcgctacattgactacgggaataccgaaatcctaaatcgcagtgacatcgtcgaaatcccccttgaactccagttctcctccgtggccaaaaaatacaaactgtgggggcttcatattcccagcgaccaggaagtcacccagtttgaccaaggcactaccttcttgggctcattaatctttgagaaggagattaaaatgaggataaaggccacgagcgaggatggcaccgttatcgcgcaagccgagtacggaagtgtggatatcggcgaagaggtccttaagaaaggcttcgcggagaagtgtaggctcgctagtaggacagacatatgtgaagagaaaaagctggatcccggacagcttgtactcaggaacttaaagtcaccaatccctctatggggtcaccgaagtaaccagtccacattcagccggcctaagggacacctctcagagaagatgactctggacctcaaggacgagaatgatgccggcaatctcatcacattcccaaaagagtctctagccgtgggggattttaaccttggcagcaatgtgtcattggagaagattaagcaagaccagaagcttattgaagagaacgaaaagctgaagacagagaaggatgccttgcttgaatcctacaaagccctggagcttaaggtggaacaaatcgcacaggagttacagcaagagaaggccgctgccgttgaccttactaaccacctagaatacacccttaagacctacattgacactagaatgaagaatttggccgccaagatggagatcctgaaagagatgaggcatgttgacatatctgttaggttcggcaaagaccttagcgatgctatacaagtgttagacgagggctgttttactacacctgcatccctcaatggacttgaaataatatgggcggagtactcactcgcgcaagagaacatcaaaacatgcgaatacgtgagtgaggggaacatccttatagcgcaaagaaatgaaatgcagcaaaaattgtacatgtccgtggaagatttcattctggaagtggatgaaagcagtctcaataagcgcctgaagactttgcaagatctgtccgtgagcctggaggctgtgtacggccaggcaaaggagggagccaatagtgatgaaatcttaaagaagttttacgactggaagtgcgataagcgcgaggaattcacctctgttaggtcggagactgacgcttccctgcataggcttgttgcttggttccagagaacgttgaaagtgttcgatctctccgttgagggaagcctgatatccgaggacgccatggataacattgacgagatcctcgaaaagacagagagctccgtctgcaaagaattggagatcgctttggtggaccagggcgacgccgacaaggagataatctccaatacctattctcaggtgttgcaaaaaatccattcggaggagcggctgatcgccactgtgcaagccaaatataaggattcgattgagttcaagaaacaacttattgagtacctgaacaagagcccgtcagtcgaccatctgttgagcataaaaaagaccctaaagtccttaaaagccttgctgagatggaagctggtggaaaaatctaatctcgaggagtccgatgatccagacgggtcgcagattgagaagatcaaagaggagatcacacagctgcgaaataacgtctttcaggagatttaccacgaaagagaggaatatgaaatgctcacgtcgctggcacagaaatggtttcctgaattacctcttttgcaccccgagataggtctgctgaaatatatgaattccggaggcctgctcaccatgtcacttgagcgggacctgctggatgctgaacccatgaaggagctgtcctctaagagacctctcgtcagatccgaggtcaatggccaaatcatcctgctgaagggctactccgttgacgtggacacagaggccaaagtgattgagagagcagcaacataccaccgcgcttggagggaagcggagggtgatagcgggttgctgcctctaatattcttatttctgtgtaagagcgacccaatggcgtacctcatggtcccttattatcccagagccaatttaaacgcagttcaggccaacatgccactgaactctgaagagaccctcaaagtaatgaagggagtcgcgcaaggcttgcacactctgcataaggcagatatcatccatgggtcattgcatcaaaataatgtgtttgcacttaatcgtgagcagggcatagttggcgattttgacttcacgaaatccgtgagccagcgcgcatctgttaatatgatggtcggcgacttatctctgatgtccccggagctgaagatgggcaagcctgcaagccccggaagcgacttgtacgcctatggttgcctccttctttggctaagcgtgcagaatcaggagttcgagataaacaaggacggtattccaaaggtagatcaatttcaccttgacgacaaagtcaaaagtcttttatgctccttgatttgctatcgatcatccatgacggctgaacaagttctgaatgctgaatgttttctgatgcctaaagagcagtcggtacccaaccccgagaaagacacggaatacacattatacaaaaaagaggaggagattaagacagagaacttggacaaatgtatggagaagacgaggaatggcgaggctaactttgactgttag

SEQ ID NO: 133933 - DNA, 285 bp, synthetic construct
  misc_feature 1..285: note = Description of Artificial Sequence: Synthetic coding sequence
  source 1..285: mol_type = other DNA
atggacgaagatactcattatgacaaggtcgaggacgttgtggggagccacattgaggatgccgtcaccttctgggcccaaagtatcaaccgcaataaggatataatgaaaatcggatgtagcctgtctgaagtttgccctcaggccagcagtgtgctcggaaacctggatccaaacaaaatctatggcgggttattcagtgaagaccagtgttggtatagatgtaaagttctgaaaattatctccgtcgagaagtgtttggtgagatatatagattatggatag

SEQ ID NO: 133934 - DNA, 132 bp, synthetic construct
  misc_feature 1..132: note = Description of Artificial Sequence: Synthetic coding sequence
  source 1..132: mol_type = other DNA
atggacgaagacacgcattacgataaagtagaggatgtggtggggtcacacatcgaggacgccgtcaccttttgggcccagagcattaataggaacaaagacatcatgaagatcggttgctctctgtcctag

SEQ ID NO: 133935 - DNA, 2991 bp, synthetic construct
  misc_feature 1..2991: note = Description of Artificial Sequence: Synthetic coding sequence
  source 1..2991: mol_type = other DNA
atgtgggtacaagggcattcttcaagggcttcggccaccgagtccgtctccttctcaggtatcgtacaaatggatgaagatacacattatgacaaggttgaggatgtggtgggctcacatattgaggacgctgtgacattttgggcacagtctattaaccgaaataaggatatcatgaagataggttgctccctttccgaggtctgtccacaggcaagttctgttttgggaaacctcgaccctaataagatctacggcggcctgttttctgaggaccaatgctggtatcgttgcaaggtgcttaagatcattagcgtggagaaatgcttggttcgatatatagattacggcaacactgagattttgaatcgctctgatatagtcgagattccgcttgagctgcaattctcatctgtcgccaagaagtataaactgtggggtcttcatatacccagtgatcaagaggtcacacaatttgatcagggaaccacctttcttggctcactcatttttgagaaggagattaaaatgcgcattaaagcaacctccgaggatggaacagtgatcgcgcaagccgaatatggtagtgttgatatcggagaagaagttctgaaaaagggcttcgctgagaaatgccgactggcttcaagaacagatatctgcgaagaaaaaaaactcgatcctggccagctggtgctccgtaacctaaaatccccaatacctctttggggccaccggtcgaaccaaagtacattctcgcggccaaaaggccacctctcagagaagatgactctagatctgaaagacgaaaatgatgccgggaatctgatcacattccctaaagaatcactcgccgtgggagatttcaatttaggttcaaacgtcagccttgaaaaaataaaacaagaccagaagctcattgaagagaacgagaagcttaagaccgagaaggatgcactcctggaaagttacaaagctctggagctgaaggtggagcagatcgcacaggagctgcaacaggaaaaagcagcggcagtcgatttaactaaccacctggaatatactttgaagacctatattgacactcgtatgaagaacttagccgcaaaaatggagatcctgaaggagatgcgccacgttgatatctcagtccggtttgggaaggacctttctgatgccattcaggtgctggacgagggctgcttcaccacacctgccagtttgaatggtctggaaatcatctgggccgagtatagcctagcccaggaaaatattaaaacatgcgagtacgtcagtgagggtaacatactgatcgcccaacggaacgaaatgcaacagaaattatacatgagcgtggaagattttatccttgaggtggatgagagctcccttaacaagaggctgaaaactctgcaggacctgtccgtgagtttggaagccgtgtatggccaggccaaggagggagctaacagcgacgaaatcctgaaaaagttctatgattggaagtgcgacaagagagaggagttcacttccgtacgctcagagactgacgccagtttgcatagactggtggcttggttccagaggactctgaaggttttcgatttgtccgtggaaggctctctcatctccgaagacgctatggataatattgatgagattctcgaaaaaaccgagagtagtgtctgtaaagagctggaaatagcactggtcgaccagggagacgccgacaaggaaattatctccaatacctactcacaggtgttacagaagattcactcggaggagcggctaatcgctactgtacaagcaaagtacaaagacagcattgagtttaagaagcaactgatcgagtatctgaataaaagcccaagcgtggaccatttgttgagcattaaaaagacacttaagagtctgaaggctctgctgcggtggaaattggttgaaaagtccaatctcgaagaaagcgatgatcctgacggcagtcaaatagagaaaatcaaagaggaaatcacacaactgaggaataacgtttttcaagaaatttatcacgagcgcgaggaatatgaaatgctgaccagcctcgcacagaagtggtttcctgagctgcccctcctgcaccctgaaatcggcctgcttaaatacatgaattctggggggctcctcactatgagcttagaacgcgatttgctagacgcggaaccaatgaaggagctcagcagcaaacggccgctggtccgatccgaggtgaatggacaaatcattctgttaaaaggctattcagtggacgtcgataccgaagccaaggtaattgaaagggcggcaacctaccacagggcttggcgggaagcagaaggggatagcggtcttctgcctctcatcttcctcttcctgtgcaaaagcgatccgatggcatatttgatggtaccatactaccctagagcgaatctgaacgctgtgcaagccaacatgcctttgaattccgaggagacactgaaagtcatgaagggggtggcccaaggtctgcatacgttacataaggctgatataattcacggctctctacaccagaacaatgtttttgccctgaaccgcgaacagggcattgtgggcgatttcgacttcacaaaatcagtgagccagagggccagcgtgaatatgatggtgggcgacctaagtctgatgagccctgagctcaaaatgggaaaacctgcgtctcctggatctgatctgtacgcctacggatgtctcctcctttgggacgacaaggtaaaaagtctcctttgctcactcatctgttacagatcctctatgaccgcagaacaggtgttaaacgctgaatgcttcctaatgcctaaggagcagagcgtcccaaatccggaaaaagataccgagtacactttgtataagaaagaggaagagattaagacggagaatttagacaagtgtatggaaaaaaccaggaacggggaggcaaatttcgattgctag

SEQ ID NO: 133936 - DNA, 1545 bp, synthetic construct
  misc_feature 1..1545: note = Description of Artificial Sequence: Synthetic coding sequence
  source 1..1545: mol_type = other DNA
atggcagattccggactcgataagaaatccaccaagtgccccgattgctcttcagccagtcagaaagacgtgctttgcgtctgttcctccaaaacgagagtccctccagtgctggtcgttgaaatgagccagacatcctctattggctccgcggagtctttgatttctcttgagcggaagaaggagaagaacatcaatagagatataaccagtagaaaagacctgcccagtcgaacaagcaacgtggaaagaaaggcttcccagcagcagtggggcagagggaatttcacagaaggaaaagtgccccacatcagaatcgagaatggagccgccattgaggagatttacactttcggccggatccttgggaagggctcatttggcatcgtgatagaagccactgataaagagacagaaacgaagtgggccataaagaaagtgaataaagaaaaggccggcagttccgccgtcaaacttttggaaagggaggtcaatatcctcaaatccgtgaagcacgagcacataattcacctagaacaggtgtttgaaacacctaagaagatgtatcttgtcatggaactctgtgaggatggagagctgaaggagatcttggaccgcaaagggcatttctccgagaacgaaactcgatggattatccagagcctcgcttccgccattgcttatcttcataataacgacatagtgcaccgggatctgaaactggagaatatcatggtgaagagctccctgatcgatgacaacaatgaaatcaacctcaatattaaagtcactgacttcgggcttgctgtgaagaagcagtctaggagcgaagctatgctccaggcgacctgcggcactccaatttatatggctccagaagtgatcagcgctcacgactactcgcagcagtgcgatatttggagtatcggcgttgtgatgtatatgctgctgcgaggggaacccccattcctagcctcgtccgaagaaaagttgtttgaacttataaggaagggcgagctgcatttcgaaaacgctgtctggaatagcattagtgattgtgccaagagcgtgttgaaacagctgatgaaggtggacccggcccaccgaataactgcaaaggagttgcttgataaccagtggctcacagggaataagctgtccagtgtgcgcccaaccaacgtgctggagatgatgaaggagtggaagaacaaccccgagtctgtggaagaaaacactacagaggaaaaaaataagccgtccacagaggagaaattgaaatcctatcaaccttgggggaacgtgcccgatgcaaactatacctcggatgaggaggaagaaaagcaatctaccgcatacgagaagcaattccccgccacttccaaagacaactttgacatgtgctcgagcagtttcactagtagtaaacttctgcccgccgagattaaaggagaaatggaaaagaccccagtaactcccagccagggaaccgccacaaaataccctgctaaatccggcgctttgtccagaaccaagaagaagctatag

SEQ ID NO: 133937 - DNA, 1545 bp, synthetic construct
  misc_feature 1..1545: note = Description of Artificial Sequence: Synthetic coding sequence
  source 1..1545: mol_type = other DNA
atggccgatagcggtctggacaagaaatccactaaatgccccgattgcagttctgcatctcaaaaggacgtcttgtgcgtttgcagctcaaaaacccgggtgccaccggtgctggtggttgagatgagtcagacaagctctattggtagcgctgagtctctcatctctctggagaggaagaaggaaaaaaacattaacagagacatcactagcagaaaagacctgccatctcggacgtctaatgtggaaagaaaagcatcccagcagcagtgggggcggggaaactttactgaaggaaaagtgccgcacatcaggatagagaatggtgcagccattgaggaaatctatacttttggtagaattctcggcaaagggagctttgggatcgtcatcgaggctaccgacaaggaaacagaaacgaaatgggccataaagaaagtgaataaggagaaggctggctctagcgccgttaagttgctcgaacgggaagtgaatatcctgaaaagtgtcaaacacgagcacatcatccacttagaacaggtgtttgagactccaaagaagatgtacctggtaatggagctgtgtgaagacggggaactgaaagaaatattggatcggaaaggccattttagtgagaacgaaacacgctggattatccagtcgctggcctcggcgatagcctaccttcataataacgatatcgtccatcgagacctgaaattagaaaacattatggttaagagttcgttaattgatgacaacaatgagatcaatttaaatattaaggtcactgacttcggcctcgctgtgaagaagcagtctaggtcagaagctatgctccaggctacctgcggcacaccaatctatatggcccccgaggtcatttctgcacacgactacagccagcagtgcgacatttggtctatcggagtggtgatgtacatgctgttaaggggtgagccaccattcctggcatcctctgaggaaaagctattcgagctcatcaggaagggagagctccactttgaaaacgccgtgtggaattccatctctgactgcgccaaatcggtgctcaagcagcttatgaaagttgatcccgcccatcggatcacggccaaagagctgctggacaaccaatggttgactggcaacaaattgtcctcagtgagaccaacgaatgtgctagagatgatgaaggagtggaaaaataatcccgaaagcgttgaggaaaacactacggaggagaaaaataagcctagcaccgaggagaagttgaagtcctatcagccttggggtaacgttcccgatgctaactacacaagcgatgaggaagaggagaagcagtctaccgcctatgagaagcaattcccagctacgtccaaggacaatttcgatatgtgtagttcaagtttcacaagttccaaactgctacctgccgaaattaagggcgagatggagaaaacccccgtcactccatcccaagggactgctaccaaataccccgctaagagtggagccctatccagaacaaagaagaagttgtag

SEQ ID NO: 133938 - DNA, 1347 bp, synthetic construct
  misc_feature 1..1347: note = Description of Artificial Sequence: Synthetic coding sequence
  source 1..1347: mol_type = other DNA
atggcagacagtggattggacaaaaagtccactaagtgccccgactgttcgagcgccagtcaaaaagatgttctgtgtgtatgtagcagcaagacacgcgtgcctcccgtgctcgtggtcgaaatgagccagacctccagcatcggttcagccgagtccctcataagtctggagcgcaaaaaagaaaagaatattaatcgtgatatcacatctcggaaggatctgcccagcagaaccagtaacgtggagcgcaaagccagccagcagcaatggggcaggggcaatttcactgaggggaaagttccccatatcaggattgagaacggagctgcaattgaagagatttataccttcggccggatccttggcaagggctcgtttggcattgtaattgaggccaccgataaggaaactgaaacgaagtgggctattaagaaggtgaataaggagaaggccggatcctccgcagtaaagctgttagaaagagaagtgaatattttgaagtcagtcaagcatgagcacattattcaccttgagcaagtgttcgaaacgcctaagaaaatgtatctcgttatggagctgtgtgaggatggagaactgaaggagatccttgacaggaaaggacatttttcagaaaacgagactcgatggatcattcaatcccttgcctccgctatagcctacctccataataatgatattgttcacagagatctgaaattagagaatattatggtaaaatctagcctgatcgatgataacaacgaaattaacctcaatattaaggtgacagattttggattagccgtgaaaaagcagtcccggagcgaagctatgcttcaagctacctgtgggacaccaatctacatggcccctgaagttatctctgcccatgattactcccagcaatgcgacatttggagcatcggggtcgtaatgtacatgcttctgagaggggagcctccctttttagcatcgtctgaggaaaagctgtttgagttgattagaaagggtgaactgcacttcgaaaacgctgtttggaatagtatcagcgactgcgccaaatccgtgctgaagcaactgatgaaggtagatccagctcatcgcatcaccgctaaagaactccttgataatcagtggttgacaagcaccgcttatgaaaaacagtttcctgctacctccaaggataacttcgacatgtgctcaagtagtttcacctcgtcaaagctgctgcctgccgaaatcaagggcgaaatggagaagacacccgtcacaccttctcaagggacggccacaaaatacccagctaagagtggggccctgagcaggacaaaaaaaaagttgtag

SEQ ID NO: 133939 - DNA, 192 bp, synthetic construct
  misc_feature 1..192: note = Description of Artificial Sequence: Synthetic coding sequence
  source 1..192: mol_type = other DNA
atggccgacagcggtttggataaaaagagtacaaagtgccccgattgttcgagtgctagccagaaagacgtgttgtgcgtgtgctcttctaagacacgggttccccctgtgctggtcgttgaaatgtctcagacgtcgtccataggatctgcagagtccctgatatccttagagcggaaaaaagaaaaatag

SEQ ID NO: 133940 - DNA, 1545 bp, synthetic construct
  misc_feature 1..1545: note = Description of Artificial Sequence: Synthetic coding sequence
  source 1..1545: mol_type = other DNA
atggctgattcaggcctcgataagaaatctaccaagtgtcccgattgttcaagtgcctctcagaaagacgtcttgtgcgtgtgcagctcaaagacaagagtcccccctgtactcgttgttgagatgtcacaaaccagctcaattgggtccgctgagtcgttaatcagcctggagcgcaaaaaggagaaaaacattaaccgcgatatcacaagtcgcaaagacctcccatcccggacaagtaacgtggagagaaaagcctcacagcagcaatggggccgtggcaacttcacggagggcaaagttccccacatccgcatagaaaacggggccgccatcgaggaaatctacactttcgggagaatcttgggcaagggttcgtttggcattgttattgaagctacggataaggagaccgagactaagtgggctatcaagaaggttaacaaagaaaaggcggggagttcagccgtcaagcttctggagagggaggttaacatcctaaaaagcgttaagcacgagcatatcattcatctagaacaggtcttcgagactcctaagaagatgtatctcgtgatggagctgtgcgaggacggtgaactcaaggaaatccttgatcgcaaaggccatttttcagagaacgagacgcgttggattatccagtccctggcgtccgctattgcctacttacacaacaatgacattgttcacagggacctgaagctggagaacatcatggttaaatcttcacttatagacgataacaatgagatcaacctcaacatcaaggtcactgatttcggtttggctgtgaagaagcagtccagaagtgaagctatgcttcaggctacttgtggcacaccgatctatatggcaccggaggtcatatcagcacacgactacagccagcagtgtgacatttggtctataggcgttgtgatgtacatgcttctaagaggagaaccgccgtttctcgcaagcagcgaagagaagctcttcgaactgattaggaagggagaattacactttgagaacgcagtgtggaacagcatcagtgactgcgccaagagcgttctaaaacagctgatgaaagtggaccctgctcatagaatcactgccaaagagcttttggacaaccaatggctgaccgggaacaagttgtctagcgtccgccctacaaatgtactggaaatgatgaaggagtggaaaaataaccctgaaagtgtggaagagaataccacggaggagaaaaacaagccttctaccgaagaaaagctcaagagttaccagccatggggtaatgtccccgatgccaactatacatctgatgaagaagaggagaaacaatcgacggcctatgagaagcaatttcccgctacgtctaaagataacttcgacatgtgcagctcaagcttcaccagttcaaagctgctcccggccgaaattaagggggagatggaaaaaacacccgtcaccccaagccagggcactgccacaaaatatccagccaaatcgggtgcactttcgcggacaaagaagaaactgtag

SEQ ID NO: 133941 - DNA, 114 bp, synthetic construct
  misc_feature 1..114: note = Description of Artificial Sequence: Synthetic coding sequence
  source 1..114: mol_type = other DNA
atggccgactccggactcgataaaaaatctactaagtgtcctgactgctcttccgcctctcagaaagatgtgttgtgtgtctgctcatccaaaacccgagtgccccctgtgtag

SEQ ID NO: 133942 - DNA, 516 bp, synthetic construct
  misc_feature 1..516: note = Description of Artificial Sequence: Synthetic coding sequence
  source 1..516: mol_type = other DNA
atggctgactccgggctagacaagaagtctaccaagtgtcccgactgcagctccgcctcccagaaagacgtgttgtgcgtgtgctccagcaaaactcgagttccccccgtgctggtggtggagatgtcgcagacttccagtataggttcagctgagtctctgatttctctcgaaaggaaaaaggaaaagaacattaatagggacatcacatcaagaaaggacctgccttcacgaacttcaaacgttgagcgaaaagccagccagcagcagtggggccgaggcaacttcactgagggcaaagttccccacatccggatagagaacggcgctgctattgaggagatctacactttcgggcggatcttggggaaagggtctttcggtatcgtgatcgaagccactgataaggaaacagaaactaagtgggcaattaagaaggtgaataaggaaaaggctggttcttccgcagttaaactgcttgagagggaggtgaacatactgaaaagtgtgaagtag

SEQ ID NO: 133943 - DNA, 90 bp, synthetic construct
  misc_feature 1..90: note = Description of Artificial Sequence: Synthetic coding sequence
  source 1..90: mol_type = other DNA
atggcagacagcggtctcgacaaaaagtcaactaagtgccccgattgttcatccgcctctcagaaggacgttctgtgtgtgtgttcctag

SEQ ID NO: 133944 - DNA, 1206 bp, synthetic construct
  misc_feature 1..1206: note = Description of Artificial Sequence: Synthetic coding sequence
  source 1..1206: mol_type = other DNA
atggaaaccgggaaagatggggccaggagaggaacccagtctcccgagaggaagcggaggagcccagtcccaagagccccttctactaagctgcgcccggctgccgcagcaagggcaatggaccctgtggcagctgaggctcctggagaagctttccttgccaggagaaggcccgagggcggggggggcagtgcgaggcccaggtactctctcctggcggagatcgggcggggttcatacggagtggtgtatgaagccgtggcaggccggagtggggcaagggtggcagtgaagaagatcaggtgcgacgctcctgaaaatgtggagctggcacttgccgagttttgggctctaacatctcttaagaggcgccatcagaatgttgttcagtttgaggaatgtgtcctgcaacgcaacggcttggcgcagcggatgagccacgggaacaagtcttcacagctctacctgaggctcgtggagactagcctgaagggggaacgcatcctcgggtacgccgaggaaccttgctacctctggttcgtcatggagttctgtgaagggggggacttgaaccagtatgtgctttcaaggagacccgaccccgcaaccaataagagcttcatgctccagcttaccagtgctatcgctttcttgcacaagaaccacatcgtgcatagggatctgaagcctgataatattctcataacagagcgtagcggaacccctatactaaaggttgcagactttggcctctcgaaagtgtgcgccggactcgccccccgaggcaaagagggcaaccaagataacaaaaacgtcaacgttaacaagtactggctctcctccgcttgcggctccgatttctacatggcccccgaagtatgggagggacactatactgccaaggccgacatctttgccctcggaatcattatttgggctatgatagaaaggattaccttcatcgactctgaaactaaaaaggagctgctgggaacgtacataaagcagggcactgaaattgtgccagtaggcgaggctctgctcgaaaacccaaagatggaattgcatatcccgcagaagaggcgaacatcaatgagcgagggaattaaacagctcctcaaggacatgctcgcagccaaccctcaagacagaccagacgctttcgagttggagacgcggatggaccaagttacatgtgccgcttag

SEQ ID NO: 133945 - DNA, 1605 bp, synthetic construct
  misc_feature 1..1605: note = Description of Artificial Sequence: Synthetic coding sequence
  source 1..1605: mol_type = other DNA
atgggacatcaggagagtccactcgccagggctcctgccggcggcgctgcttacgtgaagcgattatgtaagggcttaagctggcgagaacatgtggagtcgcacgggtcactcggagctcaggcgtctcctgctagcgcagccgccgccgagggttcggcgacacgccgggctagagctgccacgagccgtgcggcgcgatctcgacggcagcctgggcccggtgctgaccacccacaggctggggccccaggcggcaagcgtgccgccagaaagtggagatgtgccgggcaggtcaccatccagggacctgccccaccaagacctcgcgctggccggagagacgaagcaggcggagcacgagccgcgcctctgctgctcccgccacccccagccgccatggaaactggtaaagacggggctcgtcgtgggactcagagccccgaaagaaagcgcagatctcctgtgccccgtgccccaagcacaaaattgcgtccggccgctgccgccagggctatggatcccgtggcagccgaggcccctggggaggctttcttagcaaggagacgcccagaaggtgggggcggaagtgcacgtccacgatacagtctcctcgccgagatagggcgagggagctatggggtggtctatgaggctgtcgctggtcgctccggagcacgggtcgcagtcaaaaaaattcggtgtgacgctccggagaacgtggaacttgccctcgccgagttctgggctctgacaagtctcaagaggcggcaccagaacgtcgtgcaatttgaggagtgcgtgctacagaggaatggcttggcacagcgtatgtcacatgggaataagtcttcccagctgtacttacggctagtggagacttcccttaagggggagaggatcctcggctacgctgaagagccatgctatctctggtttgtgatggaattctgcgagggtggcgacctaaaccaatacgtgctctcacgccgcccagaccctgccaccaataagtcgtttatgttacagttaactagtgcaatcgccttcctgcacaaaaaccatatcgtacacagggatttaaaaccggacaatatcctgatcaccgaacgcagtggcacccccatcctcaaggtggctgacttcggattatctaaagtgtgtgcgggtctggctccaagagggaaggaaggcaaccaggataataaaaatgtcaacgtcaataagtactggctgagttcggcctgtggctcggatttctatatggcccccgaagtgtgggagggccattatactgccaaggccgatatatttgcccttgggattattatttgggccatgattgagcggattacatttatagattccgaaaccaagaaggagctcctgggaacgtacatcaagcagggcaccgagatcgtccctgttggcgaggcactattagaaaatcccaagatggagttgcacatccctcagaaaagacgtaccagcatgagcgagggcatcaaacagttacttaaagatatgctagcggcgaatcctcaggaccgtcctgatgcattcgagctagaaacaagaatggatcaagtcacctgtgcggcctag

SEQ ID NO: 133946 - DNA, 489 bp, synthetic construct
  misc_feature 1..489: note = Description of Artificial Sequence: Synthetic coding sequence
  source 1..489: mol_type = other DNA
atggacccggttgctgccgaagcgcctggtgaagcctttctggctcgaaggcggcctgagggagggggtggaagcgctcgccccagatactctctcctagcagagattgggcgcggcagttacggagtggtctatgaagcagtcgcagggagatctggagcgcgtgtcgccgtgaagaagatccggtgtgatgcacctgagaatgtcgagctggctcttgctgaattctgggccctgacatcacttaaaaggcggcaccaaaacgtggtgcagttcgaggagtgtgtcctgcagcgcaacggcctagcccagcgcatgtcccacggcaacaagtcttcacagttatacctcaggctcgttgaaacatcactgaaaggtcgattcctgggcactcatagtctgaccacatccccccccgaggacgggcggggctacagatggtggcctggccggttagccatctcgcgtcagctagatccagctatgtag

SEQ ID NO: 133947 - DNA, 3948 bp, synthetic construct
  misc_feature 1..3948: note = Description of Artificial Sequence: Synthetic coding sequence
  source 1..3948: mol_type = other DNA
atggaaaagtaccacgtcctggaaatgatcggcgagggatcctttgggagggtctataagggcaggcgcaagtactcagcccaggtagtcgcactgaaattcattcctaaattgggtcggtcggagaaagaactgaggaatttgcagagagagattgaaatcatgaggggcctcaggcaccccaatattgttcacatgctggattctttcgaaactgataaagaagttgttgtcgtgaccgactacgccgaaggcgagctgttccagattctcgaagatgacggcaagctgccggaagaccaggtgcaggccatcgctgcgcaactggtgtccgcgctgtattatctccactcccaccggatcctgcatagagatatgaagccccagaatatcctgctcgcgaagggaggtggaatcaaattgtgcgacttcggcttcgccagagctatgtcgacgaacaccatggttctcactagtattaaaggcacccccctatacatgagtcccgaactggtggaggagagaccctacgaccacacggcagatttatggtccgttggctgcatcctatatgaattggctgtaggaacgccaccattttatgctaccagcatcttccagttagtctccctgatcctgaaagatcccgttcgctggcccagtaccatatctccgtgctttaagaatttcctccagggcctgctgacaaaggatcctcggcagcggttgtcatggcccgacttgctgtaccatccctttattgcgggccacgtcactatcatcacggaacccgccggtcccgacctcgggactccatttacgtctagactcccccccgagctgcaagtgcttaaggacgagcaggcgcatcgactggctccaaaaggcaatcagtctcgcattttgacccaagcttacaaacgcatggctgaggaggctatgcagaaaaaacatcagaacactggccctgctttggagcaggaggataagacatctaaggtggctcccggaaccgctccacttccacggctcggagctacgcctcaagaaagtagcctcctcgcagggatccttgcctccgagctcaagtcttcatgggctaagtcgggaactggcgaggtcccaagtgccccaagggaaaaccgaactacccctgattgtgagagagcgtttcccgaggagaggccggaggtcctgggacagcgaagtactgacgttgtggacttggaaaatgaggagcctgactcggataacgaatggcagcatcttctagaaactaccgaaccagtacctattcagctcaaagcgccgctgactctgctgtgtaatccagatttttgtcagcggatccagtctcagttacacgaggccggcggacagattctgaagggaatattggaaggggccagccatattctgcctgcatttcgcgtgttgtcaagccttctgagctcctgcagcgactcagttgccctctacagcttctgtcgcgaggcgggcctcccgggcctgctgctgagcctactgagacactctcaggaaagcaactcgttgcagcagcagtcctggtacggcactttcctccaggaccttatggccgtgattcaagcttactttgcttgcacctttaatttggagagatcacagacctctgattctctgcaggtttttcaggaggccgcgaatctctttctggacctgcttgggaaactacttgcccaaccggatgatagtgagcagactttgcggcgggactccctgatgtgtttcactgtactctgtgaagccatggatggtaactcacgggccatctcaaaggccttttatagctccttgctcaccacgcagcaggtcgtattggacgggttgcttcacggtctcaccgtgccccagctgcccgtgcataccccccagggcgcaccccaggtgagccagccacttagagagcagagcgaggatatcccgggggctatcagttctgctttggctgctatttgcaccgcccctgttgggctcccagattgctgggacgccaaggaacaagtgtgttggcatttggccaatcagctaactgaggactcttcgcagcttagaccttcattaattagtggacttcagcatcctatcttgtgcctccatctgctgaaagtgttgtactcatgttgtttggtaagcgaaggattgtgtaggctcctgggtcaggagccgttggctctagagtctctctttatgttaatccaaggaaaggtcaaagtcgtagattgggaggaatcgactgaggtaaccctctacttcctgtcacttctggtttttcgactgcaaaacttgccgtgcgggatggaaaaacttgggtcagacgtagcgaccttgttcacacacagccacgttgtgagtttggtgtcagccgccgcctgtctcctggggcagctcgggcagcagggtgtgacatttgacctgcagccaatggaatggatggctgccgctacccacgcccttagcgcccctgcagaagttagactcacaccgccagggagttgcggattttatgacggcctccttatcctgctgctgcaattgttaactgagcaggggaaggctagcctgatcagggacatgtccagctccgaaatgtggactgtgctttggcatcggttcagcatggtcctgcggcttccagaggaagcctctgcccaggagggcgagctcagcctgtcatctcctccgtccccggaacctgactggacgctgatcagcccacagggcatggctgcccttcttagtttggcgatggccacctttacacaggaaccccagctgtgcctcagctgtcttagccagcatgggtccatccttatgtccattctgaagcacctgctgtgcccctcgtttctcaatcagttgagacaggcaccccatgggtctgagtttctaccggtcgtggtgctcagtgtttgtcagctgctgtgttttcctttcgcccttgacatggacgctgatctgctcatcggcgttctcgcagatctcagggactctgaggtggcagctcacctgctccaggtttgttgctatcacctgcccctcatgcaagttgagctgccgatctcactgttgacacgtcttgcactgatggaccccacatcccttaatcaatttgtaaataccgtgtcggcaagccctagaacaatcgtttcatttctgtccgtggctctgctgtcagaccaacctctgctgacttcggacctcctgtcccttcttgcacacacagcccgagtgctcagcccatcacatctcagctttattcaggagctgctggccggaagcgacgaatcctatcggccgctgaggtctttgctagggcatccagaaaactccgtgagagcccatacataccgcctccttggacatctgcttcagcattctatggctctgcggggagccttacagagtcagtcgggcctgcttagtcttctgctcctagggcttggagataaggaccccgtggtgcggtgttctgcaagttttgccgtgggtaatgctgcctatcaagcgggccccctgggcccagccttggcagccgctgtaccatcaatgacgcagctgttgggagatcctcaagcaggcatcagacgcaatgttgcgagcgccctcggaaacctgggacccgagggtcttggagaggagctactgcaatgcgaggtgccccaacggctgcttgagatggcttgcggagatcctcagccgaacgtcaaggaagctgctcttatcgcattgcgcagtctgcagcaggaacctggcatccaccaagtgttggtgagtcttggtgcaagcgagaagctttcccttctgtctcttggaaaccagagcctaccgcatagcagcccacgaccagcctcagccaagcattgtaggaagctcatccacctgctacgccccgctcatagcatgtag

SEQ ID NO: 133948 - DNA, 3885 bp, synthetic construct
  misc_feature 1..3885: note = Description of Artificial Sequence: Synthetic coding sequence
  source 1..3885: mol_type = other DNA
atggagaagtatcatgtgctggagatgataggtgaaggaagtttcggccgagtctacaagggtaggagaaagtatagcgcgcaggttgtggctctgaaatttatacctaaattgggccggagcgagaaggaactgcgcaaccttcagagagaaatagaaataatgagaggtctgcgccacccgaatatcgtccacatgttggactcattcgagacagacaaggaggtggtggtggtaactgactatgcagaaggggagctcttccagatcctcgaagatgatggaaagctgcccgaagatcaagtacaggctatcgcagcccagttggtctctgccctgtattacttacacagccacagaattctgcacagggacatgaagccccagaacattctgctggccaaggggggtgggatcaaactctgtgattttgggtttgctcgtgcaatgagcactaacacaatggtgctgacatccattaagggcaccccgctttatatgagtccagagcttgtcgaggaaaggccttacgaccatactgccgatctatggagtgtgggatgcatcctgtacgaacttgctgtggggaccccacctttctacgctacttctattttccagctggtgagccttattctgaaggatccggttcggtggccctccaccatatccccctgttttaaaaactttctacagggcttattgactaaggatccgcgacagcgcctaagttggcctgatcttctgtaccaccctttcattgctggacacgtaacaatcatcacagaacccgccggcccagacttgggtacaccctttacttctaggctgccacccgagttacaggtcttgaaagatgaacaggcacaccgattggcgccaaaggggaaccagtcgaggatcttgacacaggcatacaagcgcatggcagaggaggcaatgcagaagaagcatcagaacacaggccccgctctggaacaagaagacaaaacctccaaagttgctcctgggactgcgcctctaccacggctgggcgctacaccacaagagtcgagcctcctcgctggaattctggcgagcgagctgaagtcaagttgggcaaagtcaggcactggcgaagtgcccagcgctccccgcgagaatcggactactccggactgcgaaagagctttcccggaggaacggcccgaagtgctcggccagagatccaccgacgtggtagacttagagaacgaggagcccgattcagataatgagtggcagcacttgctggagaccacagagcccgtccctatccaactcaaagcaccgctgacactcttgtgtaacccagatttttgccaacgtatccagagtcaactgcacgaggccggtggccagatattaaaaggcatattagagggcgcgtctcatatcttgcccgctttcagggtgctgagctcgctgttgagcagctgtagtgatagcgtcgcactgtacagcttttgcagggaagctggcctgccaggtctactgctgagcctcctgaggcatagccaggagagcaattctttacaacagcagtcctggtatgggaccttcctgcaggatctgatggctgtgattcaggcttactttgcatgcacctttaacttagagcgcagtcagacatccgattcccttcaggtatttcaggaggcggccaacttattcctggacctgttagggaagctgctagcgcagccagatgactcagagcagacactaaggagggactccctcatgtgcttcacggtgctgtgcgaagccatggacggcaatagccgtgctataagtaaggctttttatagctcactattgaccacccagcaggtggttctcgatgggctccttcacgggttaactgtgccacagctgcctgtgcacaccccccaaggggccccccaggtctcccagccactgcgagagcaatccgaagatattcccggagcaatatcgagcgctctggccgccatttgcactgcaccagtgggtttgccagactgttgggatgcaaaggaacaggtgtgctggcaccttgcaaaccagctgaccgaggattctagccagctccgtcctagcctgatctccggactgcagcatcctatcctttgccttcacttgctgaaggtgctttatagttgctgcctagtctctgaaggcctgtgcagactgctgggccaggaacccctggcactagagtccctgtttatgctcatccaaggcaaagtcaaagtggttgactgggaggagtctacagaagtgacattgtattttttgtcactattggtctttcgcttgcagaatcttccgtgtggaatggaaaagctcgggtcagacgtagccacgcttttcacacattcccatgtggtcagcttggtctctgccgctgcttgtctgctagggcagttggggcagcagggcgtaacatttgaccttcagccaatggaatggatggcagcagccacccatgccctttccgcccccgccgagctgttaaccgagcagggcaaagcctccttgatcagagacatgagcagttctgaaatgtggaccgttctgtggcatcgcttcagcatggtcctgcggctgcccgaggaagcttccgctcaggagggggagctctcgttgtcaagtcctcccagccccgagcctgactggacccttatcagccctcagggcatggcggccctgttgtctctcgctatggccactttcactcaggaacctcagctgtgcttaagttgccttagccagcacgggtcaattctaatgagtattcttaaacatctactctgcccaagctttctcaaccagctgcggcaggccccccatggatccgagttcctgccagtggtcgtgctgtccgtgtgtcaactgctctgctttcctttcgctctagacatggacgcggacctcctaatcggggtgttagcagacttgagggattctgaagtggccgcccaccttcttcaagtctgttgttaccacctcccccttatgcaggtagagctgccaatttcactgctgacaaggttggctctgatggaccccacatcacttaaccagtttgtgaacacagttagtgctagcccccgcacgatcgtgtccttcctttcagttgctctactctcagaccagcccctgctcaccagcgacttattatccctcctagcgcacaccgcaagagtgttgagtccatctcatctgtcttttatccaggagttgctggccggaagcgatgagtcttatcgacctctccgctcactgctcggacaccccgagaacagtgtccgagctcacacataccgactattagggcatctcctgcagcattcaatggctctcagaggcgccctccaatcccaatcaggcttactgtccctgctactactgggtcttggagataaagaccctgttgtgaggtgttcagcatctttcgccgtgggcaatgcggcgtaccaggccggacccctcggccctgccctggccgccgcggtgcccagcatgacccagctgttgggcgacccgcaggctgggatcaggcgtaatgttgcttctgcactgggcaacctcggcccggaaggtctgggtgaggagctgctgcagtgcgaagtaccacagcgccttcttgagatggcttgtggagaccctcagcctaacgtgaaagaggccgccctcattgccctgcgatcacttcaacaagagccaggcatacaccaggtgctggtttctctgggtgcgagcgaaaagctgtcactactaagcctgggcaatcagtccttgccccattcttcaccccgcccagcttccgctaaacattgtaggaagctgattcatttactccgaccagcccatagtatgtag

SEQ ID NO: 133949 - DNA, 3885 bp, synthetic construct
  misc_feature 1..3885: note = Description of Artificial Sequence: Synthetic coding sequence
  source 1..3885: mol_type = other DNA
atggagaaataccacgtgctggagatgatcggagagggcagttttgggagggtttataagggtcgccgtaaatacagtgcccaggtcgtggctctcaagttcatacccaaattgggaagatccgaaaaggagctcaggaacctgcagagagaaatcgagattatgagggggcttcgtcacccaaacatcgtgcatatgctcgatagttttgaaaccgacaaggaggtggtggtggttaccgattatgctgagggcgaacttttccagattctcgaggacgatggaaaattgccggaagatcaggtccaggcaatcgcagcccagcttgtttcagctctttactatttgcattctcatcgcatcctgcaccgggatatgaagccccagaatattctgctggccaaagggggtgggattaagctgtgcgacttcggcttcgcccgcgccatgtcaacaaatacaatggtgcttactagcattaaaggaacccctctgtatatgtctcctgaacttgtggaggagcgaccctatgatcataccgcggacctttggtccgtcggctgtattctgtacgagttggcagtgggaacgccccccttctacgccaccagtatctttcagctggtcagcctcattctgaaggacccagtaagatggccttccacgatatccccatgtttcaaaaactttctgcaagggctgctcaccaaggaccctcgccaaaggctttcatggcctgatctattgtaccacccattcattgccgggcatgttactatcattactgaacccgctgggcctgatctgggcaccccattcacaagtaggctgccccccgaacttcaagtactcaaagacgagcaggcccaccgtctggcccccaaaggcaatcaatctagaattctaacacaagcgtataagcgcatggctgaagaggctatgcagaagaaacaccagaacaccggtccagctttagaacaagaagacaagacatctaaagtagcaccgggaactgctccgttaccccggctgggagcaactccccaagagtcatctctgttggcaggcattttggcgtctgagctgaaatccagctgggccaagtctggcaccggagaagttccatccgcacctagagaaaacaggacgaccccagattgcgagagagcctttcccgaagagcgacccgaagtgttgggccagcggagcaccgacgtggtggacctcgagaacgaggagcccgacagcgataatgaatggcaacacttacttgagaccaccgagccggtacccatccagctcaaagccccacttaccctactgtgcaaccccgatttttgccagaggatccagagtcagctgcacgaggccggcgggcagattcttaagggcattctggaaggggcgtctcacattctccccgccttccgggtgctgtcctccctcctcagcagctgtagtgactcggtggcactgtacagcttttgccgcgaggctggattgcctggattgctcctaagcttactgcggcactctcaagagtccaatagcctgcagcagcaatcctggtatggcacatttttacaggacctcatggctgtgatccaggcttattttgcttgtacgttcaatttagagcgctcccagacaagcgatagcttacaggtcttccaggaagccgccaatctctttcttgacttgctggggaaactgctcgcacagcctgatgacagcgaacagacactgcgccgagattcccttatgtgctttaccgttctttgtgaggctatggacggtaactcacgagctatttccaaagctttctactccagccttttaaccacacagcaggtcgtcctcgatggattgctgcatgggctgactgtaccccagctgccggtgcacactccacaaggcgcccctcaggttagccagccccttagggaacagtcagaggatattcctggcgctatttcaagtgctcttgccgccatttgtacagccccagttggtttgcccgattgctgggatgctaaggagcaggtgtgctggcatctcgccaaccagctgaccgaagattcaagccagctgcggccatctttaatttccggcctgcagcaccctatcttgtgcctccacctgttgaaggtgctgtacagctgctgtttagtgtctgaaggactgtgcagacttttgggccaagaacccctggcactggagtctctcttcatgctcatccagggaaaggtaaaagtggtggattgggaagagagcacagaggtaacgttgtattttttgtccctgcttgtcttcaggctccaaaacttgccctgcggtatggaaaagctgggaagtgatgtggccacactgtttacccactcgcacgttgtcagtctagtgtcggcagcggcatgtctgctcgggcaactggggcagcagggagtcacctttgacctgcagcccatggagtggatggccgcggcaactcatgcgcttagtgcccccgcggaaatgagctgtgaacaaggaaaggcaagtctaattagagatatgtcctccagcgagatgtggaccgtcctgtggcaccgttttagtatggtgttgcgattacctgaagaggcctcggcccaggagggagagttatccctctctagccctccatcacccgaacccgattggacattgatctctcctcaagggatggcagcgttgttaagcctggctatggcaacatttacacaggagccacagctgtgtctgtcctgtctgagtcagcatggatccattttaatgtctattttaaagcatcttctgtgtcctagttttctgaatcaattgagacaagcgccccatggttctgaatttttgcccgttgtcgtcctcagcgtgtgccagttgctctgcttcccgtttgctttagatatggacgctgatctcctgattggagtgctggccgaccttcgggattctgaggtggcagcacatttgcttcaggtttgctgctaccacctgccgctgatgcaggtggagctccctatctcgctcttgacgcgcctggccctgatggacccaacctctctcaaccagtttgtcaacaccgtgtccgcaagcccccgcacaatagtgtctttcctaagcgtagcacttctatccgaccagcccctgctgacttcggatctcctcagccttttagcacacaccgcccgggtgctgtcaccaagccacttgtccttcatccaggagctgctcgcaggatccgatgaaagctacagaccactgagatccctcctgggtcatcccgaaaattccgttcgcgcacacacttacagattactgggacacctgttgcagcactcaatggctctccggggggcactccaaagccagagcggccttttgtctcttctgctgctgggacttggggacaaggatcccgtggttcgatgttccgccagctttgccgttgggaacgctgcctatcaggcaggtccactcggacccgccctggccgcagcagtcccctcaatgactcagcttttaggcgatccacaggccggcattaggcgaaatgtggctagcgctttgggtaatttgggacccgagggccttggagaggagcttcttcagtgcgaagtgccacaacggctgctggagatggcctgcggcgatccccagcccaatgtcaaagaggccgctcttattgccctgcggtccttacaacaggaacctggcattcaccaggtgttagtctcattgggagcctccgagaagttaagcttactgtccctcggcaaccagtctctgcctcactccagtccacgcccagcctcagccaagcactgccgcaagctgattcacctcctaagacccgctcattccatgtag

SEQ ID NO: 133950 - DNA, 840 bp, synthetic construct
  misc_feature 1..840: note = Description of Artificial Sequence: Synthetic coding sequence
  source 1..840: mol_type = other DNA
atggagaaataccacgtcctggagatgataggagaaggaagcttcggcagggtgtacaaggggcggaggaaatattcggctcaggtggtggccttgaaattcattcctaagctgggcagaagcgagaaagagctgaggaatctgcaaagagagattgagatcatgcgcggattgcggcaccccaatatcgtgcatatgttggatagctttgagactgataaggaagtggtggtggttaccgattatgctgagggggagcttttccagatattagaagacgatgggaaactgcctgaagaccaggttcaggcgatcgccgcccagctcgtgtcagccctctattatctgcattcacacagaattctccatcgcgacatgaagcctcaaaatattttactggccaaaggagggggaataaaactgtgcgattttgggttcgccagagcaatgagtacaaacaccatggtcttaacctcaatcaagggaacgcccctgtatatgagtccagagctcgtggaggagagaccctacgaccacactgccgatttgtggtcagttggctgtatcctgtacgagctggcggtgggcacccctccattctatgccacttccatctttcagctggtgtcgcttatccttaaagatcccgtccgctggccctccacaatctctccttgctttaagaatttcctacagggacttctgacaaaagaccctaggcagagactgagctggcctgacctgctgtaccatccattcatagcaggccatgttacgataatcacagaaccagcgggaccagatttggggacaccgttcaccagccgcctgccgccgtag

SEQ ID NO: 133951 - DNA, 3948 bp, synthetic construct
  misc_feature 1..3948: note = Description of Artificial Sequence: Synthetic coding sequence
  source 1..3948: mol_type = other DNA
atggaaaaataccacgtgctggaaatgataggcgagggcagctttgggagggtttataagggaaggaggaaatattccgcacaggtcgtcgcccttaagttcatcccaaagcttggcaggtctgagaaagagctccggaatctccagcgcgaaatcgaaatcatgcgagggctgcgacaccccaatatcgtccacatgctggactcgtttgagaccgataaagaagtagttgtcgtgactgattacgccgaaggtgaactgttccaaatactcgaggatgacggcaagctaccagaagaccaggtgcaggccatcgctgcacagctcgtaagtgccctgtactacctgcattcacaccggattctacacagagacatgaagcctcagaacatcctgctcgcaaaagggggaggcataaagctgtgcgatttcggcttcgccagggccatgtcaaccaataccatggttctgacaagtattaagggcaccccactttacatgagccctgagctggtggaggagcggccttatgaccacaccgctgatctttggtcagtggggtgtatactgtatgagttggctgtgggtacaccacctttctacgctacctcaattttccaacttgtctcgcttattttgaaagaccccgtgagatggcctagcaccatctccccgtgcttcaaaaacttcctgcaaggactgctcacaaaggatcctcgccagcggctttcctggcccgaccttctataccatccattcattgccgggcacgtaaccatcatcaccgagcctgcaggcccagatttaggcactccctttacctccaggctgcctccagaactgcaggttttgaaagatgagcaggcccacagactcgctccaaaagggaatcagagcaggatactaactcaggcgtataaacggatggctgaagaggcaatgcagaagaagcaccagaacaccgggccggcacttgaacaggaagacaaaacgtccaaagtggccccagggacagccccactgccccgcctcggggctacaccccaggagtcctctttactagccggaatcctggcttctgagctgaagtcatcttgggctaagtcgggcacaggggaggtacccagcgccccccgggagaaccgcacgactccagattgcgaaagggcttttccggaggaacgccccgaggtcctgggacagagatcaaccgatgtcgtggacctagaaaatgaggaacccgatagcgacaatgagtggcagcacctcctggaaaccacagaaccggtccctattcagctcaaggctcctcttacactgctgtgcaaccctgatttctgtcagagaatccagtcacagctccatgaggccggaggacagatactgaagggaatcctcgaaggcgcgtcccacattcttcctgcctttagagtcctgtcttctttgctgtcgtcttgtagtgactctgtggctctctatagtttttgtcgcgaagcagggttaccaggccttctgctctctttactgcgtcattcacaggaatcgaattccttgcaacagcagtcctggtatgggaccttccttcaagatttgatggctgttatccaggcatactttgcatgcactttcaatctggagaggtcgcagacttcagacagcctgcaggtcttccaggaggccgctaatctgtttcttgacctcctggggaagctcctggctcagccagacgattctgaacagactttacgccgcgatagcttgatgtgtttcactgtgctgtgtgaggctatggacggcaactcccgggctatttcgaaagctttttattcaagtttgctaaccacccagcaagtcgtgctcgacgggctgctgcatggactgaccgtccctcaattacctgtccataccccccagggggctccccaggtcagccaacccctgagagaacagagtgaagacatccccggagcgatctccagcgcattggctgccatctgtactgctcccgtggggttgccagattgttgggacgccaaggagcaagtgtgctggcaccttgcaaaccaactgaccgaggacagctctcaactgcgcccatctctgatctccggtctgcagcacccaattctctgcctccacctcctgaaagtgttgtacagctgctgtcttgtctctgagggactatgccggctgctcggccaggagcccctggccctcgaatcactgttcatgctgatccagggcaaagtgaaagtggtggattgggaagaaagcacagaggtgactttgtacttcctcagcctgttagtttttcgattgcaaaatctcccatgtggtatggagaagctgggtagcgacgtcgcgactctcttcactcacagccatgtcgtctctctggttagcgccgccgcctgcctgctcgggcaacttggccagcagggggtaacattcgacttgcaaccaatggagtggatggcggccgcaacccacgctctgtccgcccccgcagaagtccgcctgacccctccaggaagttgcggcttctacgatggcctccttatcttactgctgcagctgctcacagaacaagggaaagcgtctctgatcagagatatgtccagtagcgagatgtggacagtactatggcatcgattctccatggtgctgcggctaccggaagaggcatctgcacaagaaggggagctatctctgtcgtctccaccatccccagaacctgactggactctgatctccccccaggggatggccgcactcctgagccttgccatggccaccttcacccaggaaccgcaactttgtctatcctgtctgtcccaacatggcagtatcctaatgtctattctgaagcatttgctatgcccctcgtttctcaatcagctgcgccaggcgccacatggctccgagttcctgccagttgttgtcctgtcagtatgccaacttctgtgttttccctttgctctggacatggacgctgatttgctgatcggcgtcttggctgatttacgcgattctgaagtcgcggctcatctactacaggtatgctgttaccatctgcccctgatgcaggttgagctccccataagcctgctcactcgactggcacttatggacccaaccagcttaaaccagtttgtcaacaccgtgtcggcaagtcccagaacaattgtcagctttctgtcagtggcattgcttagtgatcaaccattattgacctcagatctgctttcattgctggcccatacagcccgcgttctgtcacccagtcatttatcgtttattcaggaactgttggccggttccgatgaatcttacagacccctgcggtctctcttgggccacccggaaaactccgtcagagcccacacttatcgtctgcttggccacctcctccagcactctatggctcttaggggggccctgcaatcgcagtcagggttactatcactgcttctgctcgggctgggagataaagatccagtggtgaggtgctctgcttcctttgctgtggggaacgcagcttatcaagccggccccctaggccccgcattggctgctgccgttccgtctatgacacaactgctgggggatccccaggcgggtatcagaaggaacgtcgccagcgcactgggcaatctaggcccagagggattgggagaggaactgttacaatgcgaggtcccccagcgcctgctagagatggcctgcggcgacccacagcctaacgtaaaggaggcggccctcatagccctgagatccctgcagcaggagcctggaattcatcaggtgctagtttctcttggagcctcagagaagctgtctctattgagtctcgggaatcagtcccttccccacagttcaccacgcccggctagcgctaaacattgtaggaagctgattcacttattaaggcctgcgcacagcatgtag

SEQ ID NO: 133952 - DNA, 1056 bp, synthetic construct
  misc_feature 1..1056: note = Description of Artificial Sequence: Synthetic coding sequence
  source 1..1056: mol_type = other DNA
atgcggtttaccttccctctgatggctattgtcttggaaatcgccatgattgttcttttcgggctgtttgttgagtatgaaaccgaccaaaccgttcttgagcagttgaatataaccaaacctactgatatggggatcttctttgagctgtacccactatttcaggacgtccatgtgatgatctttgtaggtttcggattcctcatgactttcctcaaaaagtatgggttctcatcggtggggataaatctgctggtcgccgccttgggcttgcagtggggcacgattgttcagggaatattacagagtcagggccaaaaatttaacattggcattaagaacatgatcaacgccgatttttccgctgccaccgtgctcataagcttcggcgcagtactggggaagacgtctcctacccaaatgttgattatgacgatcctcgaaatcgttttctttgcacacaacgaataccttgtcagcgagatctttaaggcgagcgatatcggcgcaagtatgactattcacgctttcggggcctattttggcctggctgtggcaggcatcctctaccggtctgggctccggaaaggccacgagaatgaggagtcagcatattacagtgacctgttcgctatgatcgggacactattcctttggatgttctggcccagcttcaacagtgctatcgccgagcccggtgacaagcagtgtcgggccattgtgaacacctactttagtctggctgcttgcgtgctgactgcttttgccttttcctcgcttgtggagcaccggggcaaactaaacatggttcatatccagaacgctacattggcgggcggggtagccgtaggcacatgcgccgacatggccattcatccttttggatccatgattattggcagtatcgcggggatggtgtctgtcctggggtataaattcctgacagtttacggccatgcggggagctgcacaggcttcttataccggaattcttcttgttggaggagcgacgataggttcaactcgaaggtggcctccctcgggactgccatttag

SEQ ID NO: 133953 - DNA, 1389 bp, synthetic construct
  misc_feature 1..1389: note = Description of Artificial Sequence: Synthetic coding sequence
  source 1..1389: mol_type = other DNA
atggagactgtgcagttgaggaatccacctaggagacagctaaagaaactggacgaggactccctgacaaaacagcccgaggaggtctttgacgtgcttgaaaaactcggcgagggatcctacggcagtgtgtataaggccatccacaaggagacggggcagatcgtggccattaagcaggtgccagtggagtctgatctacaagagattatcaaggagatctcaatcatgcagcagtgcgactctccacacgtggttaagtattatggaagttactttaagaacactgacttatggatcgttatggaatactgcggcgcggggagtgtgagcgacattatcagactgaggaataagacactgacagaggacgagattgccactatcctgcagtccacactgaagggtcttgaatatctccactttatgcgcaaaattcaccgtgacattaaggccgggaatatcctgctcaataccgagggacacgctaagctggcagactttggagttgccggacagttgacagacacaatggcgaagcggaatactgtgataggaactcccttctggatggctccagaagtaatacaggaaattggctataactgcgtggctgatatatggtcgctcggcatcacagctattgaaatggctgagggaaaaccaccttatgccgacatacatccgatgcgggctatcttcatgatccctacaaatcctcctccaacgtttagaaagcccgaactgtggtccgacaacttcaccgattttgtgaagcagtgcttggtcaagtcccccgaacagagagcaacggccacccagctgttgcagcatccattcgtgcggtccgccaagggcgtgtcgatcttgagagacctcatcaatgaagccatggatgtgaaactcaaaaggcaggagagtcaacagcgtgaagttgatcaggatgatgaggaaaatagcgaagaagatgaaatggacagcggaaccatggtacgcgcggtgggcgacgagatgggcaccgttcgagtagccagtaccatgaccgatggagcaaacaccatgattgagcacgatgacaccttgcccagccagctcggtaccatggtgataaacgcagaagacgaggaagaggaaggcacaatgaaacgcagggacgagacgatgcaaccggccaagccttctttcctcgagtatttcgaacagaaggagaaagagaatcagatcaactcattcgggaagtcagtgccaggccccctgaaaaattccagcgattggaaaatcccccaggatggggactacgagtttaagacatcacaagagcagcagtctgggaaagacatctgtatccaaaattgtcagggaaatctgctgtgtagatatgctttttag

SEQ ID NO: 133954 - DNA, 1464 bp, synthetic construct
  misc_feature 1..1464: note = Description of Artificial Sequence: Synthetic coding sequence
  source 1..1464: mol_type = other DNA
atggaaaccgtgcagctgcgaaatcctccccggcggcaactgaagaaactcgatgaagattcacttaccaaacagccagaggaggtgttcgatgtgctcgagaagcttggggaagggtcctatggaagtgtatacaaggctatccataaagagacaggccagattgtagctatcaaacaagtgcctgtcgagagcgacttgcaggaaattatcaaggaaattagcatcatgcagcagtgtgactcaccgcatgtggtaaagtattatgggtcttacttcaaaaacactgatctgtggatcgtgatggagtattgtggcgccggctccgttagcgatattatccgcctgagaaataaaaccctcaccgaggatgaaattgctacgatcctccagagcacgctgaaggggctggagtatctgcacttcatgcgcaagatccatagagacatcaaggcaggaaatatcttactaaatacagagggccacgctaagttagcggactttggggtcgccggacaacttaccgacacaatggccaaacggaatacagtaattggtacccctttttggatggcacccgaagtgatccaggagatcggctataattgtgtcgcggatatttggtctctggggatcaccgccatagagatggctgaggggaagccaccctatgctgacatccaccctatgcgggcgatttttatgatccccaccaacccaccaccaacattccgaaaacccgaactgtggtctgataattttacagacttcgtgaagcagtgtttagtcaaatcccccgaacaaagagcgactgcaacacagctgctgcagcacccatttgtacgcagcgctaagggcgtgtccatcctaagggatttgattaacgaagcaatggacgttaaactgaaacggcaggagtctcagcagcgtgaggtagaccaagacgacgaagaaaattcagaggaggatgaaatggactccggaaccatggtgcgcgccgtaggtgatgagatgggcactgttagggtcgcctcaacgatgaccgatggcgccaataccatgatcgagcatgatgacaccctgccatcgcaacttggaaccatggtgattaatgccgaagatgaagaagaggaaggaactatgaagagacgcgacgagactatgcagcctgctaagccatcctttcttgagtattttgaacaaaaggagaaagaaaaccagattaattcctttggcaagtccgtccccggtcctctcaagaatagttccgactggaagatccctcaagatggggattatgagttcttgaagtcttggacagtggaagatctccagaagagactgctcgcattggatcccatgatggagcaggagatagaggaaatacggcaaaagtatcagagcaaacggcagccgatcctcgatgctattgaagccaaaaagaggcggcagcaaaatttttag

SEQ ID NO: 133955 - DNA, 1389 bp, synthetic construct
  misc_feature 1..1389: note = Description of Artificial Sequence: Synthetic coding sequence
  source 1..1389: mol_type = other DNA
atggaaaccgtgcagctgcgcaaccctccacggaggcagttaaagaagctggatgaggatagcttgacgaaacaacccgaggaagtgttcgatgtcctcgaaaagctgggcgaaggaagttacggatctgtctacaaggctatccacaaagaaacaggtcaaatagtggctattaagcaggtgccagtcgaatcggatctgcaggaaatcataaaagagatctccattatgcaacagtgcgattccccccacgtggtgaagtactatgggtcgtactttaagaatacagacctctggattgtcatggaatattgcggcgccggcagtgtgtcggacattattaggctgaggaataagaccctcaccgaagatgagattgccacgatccttcaatctaccctcaaaggactcgaatacttgcactttatgcgtaaaattcatcgggacattaaggccggcaatattctgctcaatacagagggtcacgccaagttagcggacttcggtgtggccggacagctgacagatacgatggcgaaaagaaacacagtgatcggaacccccttttggatggcaccggaagttatccaggagatcggatacaactgtgttgccgacatctggtccctgggcatcaccgctatcgagatggctgagggaaaaccaccttacgcagatatccacccgatgagggctatttttatgatcccaacaaacccaccccccacttttcgaaagccagaactgtggtctgacaacttcacagacttcgtgaagcaatgcctggtcaaatcccccgaacagcgcgctacagctacacaactcctgcagcaccctttcgttcgaagtgcaaagggagtctctatccttagggacctgatcaatgaagccatggacgtgaagctgaaacgtcaagagtcacagcagagggaggtagatcaggatgacgaggagaactccgaggaggatgagatggactccggtactatggtccgggccgtaggagatgaaatgggcacagtccgcgttgcctccaccatgacagatggtgctaacacaatgattgaacatgatgataccctgccaagtcagctcggcacgatggtgatcaatgcagaggacgaagaggaggaaggaactatgaaaaggcgagacgaaacaatgcaaccggccaagccctcatttctcgaatattttgagcagaaggagaaagaaaatcagatcaattcattcggcaagtccgtgcctggacctttgaaaaatagctctgactggaagatccctcaggatggagactacgaatttaagacaagccaggagcagcagagcgggaaggacatctgcatccagaactgtcaggggaaccttctgtgcaggtatgccttttag

SEQ ID NO: 133956 - DNA, 1299 bp, synthetic construct
  misc_feature 1..1299: note = Description of Artificial Sequence: Synthetic coding sequence
  source 1..1299: mol_type = other DNA
atggagaccgtgcagttgcgtaatccaccccggcgccagcttaagaagctcgatgaggactcactgacaaaacagccagaagaggttttcgatgtgctggagaaattaggtgagggatcctatggctcagtgtacaaggccatccacaaagagacaggccagattgttgccatcaagcaggtgccagttgagtccgacctgcaggagatcattaaggagatctctatcatgcaacaatgcgattcccctcacgtggtgaagtattacgggtcctacttcaagaatactgatctgtggatcgtgatggagtattgcggcgctggcagcgtaagcgacatcatccgtttacgcaacaaaactgacacgatggctaagaggaacactgtgattgggactcccttctggatggcacccgaggtgatccaggagatcggctataactgcgtggctgatatctggtccctggggataactgcaattgaaatggcagagggtaagcccccttacgccgacattcacccaatgcgggctatcttcatgattcctaccaacccccctccaactttcaggaagcctgagttgtggagtgacaacttcacggatttcgtgaagcagtgcctcgttaaatcccctgaacagcgagcgactgccactcagttgctacaacatccatttgtcagatctgctaagggagtgagtattctgagagatctcatcaacgaggccatggatgtgaaactgaaaaggcaggaatcacagcagcgcgaggtggatcaggatgacgaggaaaacagtgaggaggatgaaatggattcaggcacaatggttcgtgcagtgggtgacgagatgggtacagtcagggtggcctccacaatgactgacggagctaacacgatgatcgagcacgacgacacactccctagtcagcttggcaccatggtgatcaatgccgaggacgaggaggaggaggggaccatgaagagaagagatgagacgatgcagcccgccaagccgtcatttttggagtactttgagcagaaagaaaaagagaatcagatcaacagctttggtaaatccgtccccggccctctgaagaactcctccgactggaaaataccgcaagacggagactacgaatttctcaagagttggaccgtggaggatttgcagaagcgcctgttggccctggatccaatgatggagcaggaaatcgaggaaattagacagaaatatcagtcgaagagacagcccatactggacgcaatcgaagctaaaaaacgcaggcaacagaatttctag

SEQ ID NO: 133957 - DNA, 1254 bp, synthetic construct
  misc_feature 1..1254: note = Description of Artificial Sequence: Synthetic coding sequence
  source 1..1254: mol_type = other DNA
atgaaacgcagggcttcagacagaggagctggcgagaccagtgcccgggcaaaagctcttgggtcggggatttccggcaataatgcaaagagagctgggccctttatccttggtccgagactgggcaacagccctgtaccatcgatcgttcaatgcctggcccgaaaggacggaacagacgacttttatcagctaaagatcctaacattggaagagaggggggaccagggtatcgagtcgcaggaggagagacaagggaaaatgctgctgcatacagaatactcattgttaagtctcttgcatacccaggatggggtggtgcaccaccatggccttttccaggacagaacgtgcgagattgtggaagatacagagagttccagaatggtgaagaaaatgaaaaaaaggatctgcctggtactggattgcctgtgtgcacacgatttctctgataagaccgccgaccttatcaacctgcagcactatgtcattaaagagaaacgactgtctgaacgcgagactgtcgtaattttctacgacgtcgtgagagtcgttgaggctcttcaccagaagaatatagtgcacagagatctaaagctgggtaacatggttctgaacaagcggacacaccgcatcactattacaaacttctgcctcggcaagcatctcgtgtctgagggtgatctgttgaaggatcaaaggggatccccagcttacattagccctgatgtactgagcgggagaccctaccgtgggaaacccagtgacatgtgggctctcggcgtggtcttgttcacaatgctttacggacaatttcccttctacgacagcattccacaagagctgttccgtaagatcaaagcggccgaatacactatcccagaagatgggcgagtttccgaaaacacggtgtgcctaattcggaagctcctcgttctcgacccccagcagcggctggccgctgccgatgttctggaagctctgtcggcaatcatcgcttcttggcagtcactcagctcattgagcggcccgctgcaggttgtgcccgatatagatgaccagatgtctaacgcagactcgtcccaggaagtgtcatgggggggacagatgggacactaccccgcccctcgggatcgcttattgggggccggaagagccagagccgaggtggccgctacccgtagaccacagagcttcctgggcctattaccccagccttgggggggcaagggcagactgcagtcgagcgcctag

SEQ ID NO: 133958 - DNA, 1308 bp, synthetic construct
  misc_feature 1..1308: note = Description of Artificial Sequence: Synthetic coding sequence
  source 1..1308: mol_type = other DNA
atgaagcgccgggcatcagatcggggggcaggagagaccagcgcaagggccaaggccctgggctccggaatttctggaaataatgccaaacgcgccggtccttttatccttggtccacggctcggcaatagccccgtgccgtcaattgttcagtgtctcgcacgcaaggatggtaccgacgacttttatcaactcaaaatcctgacactggaggagcgaggggatcagggcattgagagtcaagaagagcgtcagggcaaaatgttgctgcacactgagtactcgctcctatccctactccatacccaagacggagtggtgcaccatcacgggctgtttcaggataggacctgcgagatcgttgaagacacggaatcctctcggatggttaaaaagatgaagaaaagaatatgtttagtactcgactgtctatgtgcccacgacttttctgataaaaccgccgatttgatcaatcttcaacactatgtaatcaaggagaaaagactctctgagcgggaaaccgttgtgattttctacgacgtggttagggtggtggaggctcttcatcagaagaatattgtgcacagagatttgaagctggggaacatggtcctcaataaacgaacacaccgaattactataacaaacttttgtcttggcaagcatctggtgtcagaaggagatctgctcaaggatcagcggggtagccccgcttacatcagtcctgacgtgctgagcgggaggccctatagagggaaaccttccgatatgtgggcgctgggtgttgtactgttcacaatgctctatgggcagttcccgttctacgacagcatcccccaggaactcttcagaaagattaaggctgcagaatataccatcccagaggacggaagggtgagtgaaaacaccgtctgcctgatccggaaactgttggtgctggacccgcagcagagactggcagctgccgatgtcctcgaggcactctccgcaatcatagcctcctggcaatccctctcctctctgtcagggcctctccaggttgtccctgatatcgatgaccaaatgagcaacgcggattccagccaagaggctaaagtcacagaggagtgcagccagtacgagtttgagaactacatgagacaacaactgttactggccgaagaaaagtcttccattcatgatgcaaggtcatgggtgcctaaaagacaatttggaagcgcgccccccgtgcgacgcctggggcatgatgcccaacccatgacatccttggacacggctatccttgcccagcgctacctgcggaaatag

SEQ ID NO: 133959 - DNA, 1323 bp, synthetic construct
  misc_feature 1..1323: note = Description of Artificial Sequence: Synthetic coding sequence
  source 1..1323: mol_type = other DNA
atgaaacggagggcatccgatcgaggggccggtgagaccagtgcaagagctaaggctttaggatctgggatctccggaaacaatgccaagagggcaggccccttcatcctggcattatgcgccgtggggcctaggcttggaaatagccctgtgccgtccatagtccagtgcctggcccggaaggacggcaccgatgacttttaccagctgaaaatcttgaccttagaagagcgaggagaccagggaatcgagagccaggaggaacgacagggcaagatgcttttgcacaccgaatattccctactcagtctgctgcacacccaggatggcgtcgtgcaccatcacggactgttccaagaccgaacctgtgagatagttgaggacacagaaagcagcaggatggtcaagaaaatgaagaagagaatctgtctcgtgctggattgcctgtgtgcccacgacttttcggataagaccgccgatctaatcaacctgcagcactatgtgattaaggagaaaagattgagcgagagagaaacagtggtgatattttatgacgtggtgagagtagtggaagcactgcatcagaagaacatcgttcaccgagatctcaagttaggtaacatggtgcttaacaaacgaacacaccgaatcacaataactaatttttgtctgggcaaacacctggtatccgagggagacttactgaaggatcagcgcggaagcccagcttacatctcccctgacgtgttatctgggagaccatatcgtggaaagccatcggatatgtgggcattgggagttgtgttgtttaccatgctatatggccagtttcctttttacgacagtataccccaggaactgttcaggaagatcaaggccgccgagtatactatccctgaagacgggagagtttcagagaatactgtgtgtctgatcaggaaattgttggtcctcgatccccagcagcgtctggccgcggccgatgtgctcgaggccctgagcgcaataatcgcctcttggcagagcctgagtagcctctccggaccactgcaagtcgtgcctgacattgacgaccaaatgtctaacgccgacagctctcaggaagcgaaggtcaccgaggaatgttcgcagtacgaattcgagaactatatgcgacagcagttgttactggcagaagagaagtctagtatacatgatgcccgttcttgggtgccgaaaaggcagttcggctcagctcctcccgtccggagattgggccatgacgcacagccaatgacgtccctggatactgccatcctggcccagaggtacttaaggaaatag

SEQ ID NO: 133960 - DNA, 1308 bp, synthetic construct
  misc_feature 1..1308: note = Description of Artificial Sequence: Synthetic coding sequence
  source 1..1308: mol_type = other DNA
atgaagcgcagggcaagtgatagaggagcaggtgaaacatctgccagggccaaggcactgggctccggcatctcggggaataacgccaagcgggcagggcccttcatcttaggcccacgccttggcaacagtcctgtaccctccattgtccagtgtctggctaggaaggatgggaccgatgatttttatcagctcaaaatactgactctcgaggaacggggggaccagggtatcgaatcccaggaggaaaggcaaggaaagatgctactgcatactgaatattcgcttctctctttactgcacacgcaggacggcgtagtgcaccaccacggtctgttccaggataggacttgtgagatcgtggaggacactgagtcctcaagaatggttaagaagatgaaaaagcggatttgtttggtgctcgactgtctctgcgcacatgacttcagtgataaaacagccgacttgattaatttgcagcactatgtgattaaggaaaagcggttgagcgagcgcgaaactgtggttatattttacgatgtggtgcgagtcgtggaagccctgcatcaaaagaatattgtgcaccgcgacttgaaacttgggaatatggtgctgaataagagaacacatagaattactatcaccaatttttgtctaggaaagcacctggtgagcgaaggagatcttttgaaagaccagagaggctcaccagcctacatctctcccgacgttttaagcggcagaccatataggggtaagccaagcgatatgtgggccctcggggtggtacttttcacaatgttatacgggcagttccccttttatgacagtattccacaagaactgttccgaaaaattaaggctgcagaatataccatccccgaggacggcagagtctcagagaatacagtgtgcttgatccgcaagctgctcgttctagacccacaacaacgcctggctgccgccgacgttctggaagctctcagtgcaatcattgcaagttggcagtctctgagtagcctctccggacccttgcaggtcgtgccggatatcgatgaccagatgtccaacgccgacagcagtcaagaagccaaggtcacggaagaatgttcccaatacgagtttgagaattatatgcgccagcaactcctgctagccgaggaaaaatcctctatccacgacgcccggtcttgggttcccaaaagacagttcggctccgctcccccggtccgacgcctgggacacgacgctcagcctatgacctctctggacacagcaatccttgctcaacgctacctaaggaagtag

SEQ ID NO: 133961 - DNA, 1092 bp, synthetic construct
  misc_feature 1..1092: note = Description of Artificial Sequence: Synthetic coding sequence
  source 1..1092: mol_type = other DNA
atggccatgcgccaaacaccgctcacctgcagtggccacactcggcccgttgtggatctcgcattctcggggatcactccctatggctactttctgatatctgcttgtaaaggagcaggtcagcaccttccgagactctctggtcagcatgacggaaaacccatgctaagacagggcgatacgggggattggattgggacctttttaggccataaaggcgcggtgtggggagcgaccttaaataaggacgccaccaaagctgcaactgcagcagcagacttcaccgctaaagtctgggatgctgtgtcaggagatgaactcatgacacttgcgcacaagcacatcgtcaagactgtggacttcacccaagattccaactaccttctgactggcgggcaagacaaattgcttcggatctacgacttaaacaagcctgaggcagaacccaaagaaattagcggacatactagtgggatcaagaaagcactgtggtgttctgaggataaacaaattttaagcgccgatgacaagacagtgcggctgtgggaccatgccaccatgactgaggtgaaaagcctgaactttaatatgtcagtgtcttcaatggagtatatccctgagggagaaattctagtcatcacctacggtcgaagcatagcctttcactctgccgtatccctggacccaataaagagttttgaggccccggcaaccatcaatagtgccagcttgcaccccgagaaggaatttctcgttgcgggcggagaagactttaagttgtataagtatgactataattccggcgaggaactcgaaagttacaagggacattttggcccaatccactgtgtgagattttcaccagacggagagctctatgcttctggcagcgaagacggaacactaagactgtggcagacagtggtgggaaagacctatggactgtggaaatgcgtgctgcccgaggaagacagcggggagcttgccaaacccaaaatcgggtttcctgagacaaccgaagaggagctggaggaaattgcctccgagaactccgactgcatattcccgtccgccccggatgtcaaggcatag

SEQ ID NO: 133962 - DNA, 1053 bp, synthetic construct
  misc_feature 1..1053: note = Description of Artificial Sequence: Synthetic coding sequence
  source 1..1053: mol_type = other DNA
atggccatgcggcagactccacttacatgcagcggccacacacgtccagtcgttgacctggccttctcaggtatcacgccgtatggctattttctgatttccgcctgcaaggacggtaaacccatgcttagacagggcgacaccggcgactggattggcactttcttgggacacaaaggcgctgtttggggggccacactgaataaagacgccacgaaggcggcaaccgccgctgccgatttcaccgcgaaggtgtgggatgcagtcagtggggacgaattgatgacactggcacacaagcatatcgtgaagactgttgatttcacccaagactccaactaccttctgaccggagggcaggataagctgcttaggatttatgatttaaacaagcccgaagccgaaccaaaggagatctctgggcacaccagtggaatcaagaaagcactgtggtgctccgaagataaacagatcctaagcgccgacgacaagacagttaggctttgggaccacgccacgatgactgaggtcaagagtctaaattttaatatgtctgtgtctagcatggaatacattccagagggggagatcctcgttattacctacggaagaagcatcgcatttcattcggctgtgtctcttgatcctattaaatcttttgaggccccggcgactattaactcggcctctctgcaccctgaaaaggagtttctggtggctggcggagaagactttaagctttacaaatatgattataatagtggcgaagagttagagtcctataagggacatttcggcccgattcactgtgtgcgctttagtccagacggcgagctctacgcctccggctctgaagatgggacccttcgactgtggcaaactgtggtgggaaaaacttatggactctggaaatgcgttttacctgaggaggatagcggggagctggccaagcctaagattggctttccagagacaaccgaggaagagttggaagaaattgctagtgaaaactccgactgcatatttccatctgcgccggatgtgaaggcttag

SEQ ID NO: 133963 - DNA, 771 bp, synthetic construct
  misc_feature 1..771: note = Description of Artificial Sequence: Synthetic coding sequence
  source 1..771: mol_type = other DNA
atgaccctggcgcacaagcacattgtcaaaactgtggactttacacaggactccaactacctgctgacaggtggccaggataagttgctccggatttatgatctcaacaagccagaggcagagcctaaggagatctccggacacacgagcggtatcaaaaaggccctatggtgctcagaggataaacagatattgtctgccgatgataagaccgtgcggctttgggaccacgccaccatgacagaggtgaaatcactcaacttcaatatgtccgtatcatccatggagtatatacccgagggagagatactcgtcatcacatacggccggagtatcgccttccacagcgctgtgagcttggaccctattaaaagttttgaggctccagcaaccattaactcagcttctctgcatcctgagaaagagttcctcgtggccggaggggaggattttaaactgtacaaatacgactataactctggagaggagcttgaaagctacaaggggcacttcggcccaatccactgcgtccggttctcccccgatggggaactgtacgcctccggatccgaagacggaacattgcgcctgtggcaaaccgtcgtgggaaagacctatgggctttggaagtgcgtcctacccgaggaagactcgggagagctggcgaagccaaagataggattccccgagacaaccgaagaggaactggaggaaattgcctccgaaaattccgactgtatattcccatccgcccccgacgtcaaggcttag

SEQ ID NO: 133964 - DNA, 1707 bp, synthetic construct
  misc_feature 1..1707: note = Description of Artificial Sequence: Synthetic coding sequence
  source 1..1707: mol_type = other DNA
atgaagaataaaattcaggtggtagtactggagaacgaaggcctccagcagcagctcaaatcccagcgacaggaggaaacactcagagagcagacactgctggatgctagtggcaacatgcacaacagctggatcaccactggagaagactctggtgtcggcgagacaagcaaacgaccattctcacatgataatgcggattttggcaaagcggcctccgctggcgaacaactggagctcgagaagcttaaactgacgtacgaagagaagtgtgagatagaagagtcgcaactcaaattccttcgaaacgatctggcagagtatcagcgaacctgtgaagatctcaaggagcaattaaagcacaaagagtttctgctcgcagctaatacttgcaacagagtcggtggtttatgtctgaagtgtgcccagcatgaggccgttctatcccagactcatactaatgtgcatatgcaaacaatcgaaaggcttgtgaaggagagggacgacctcatgtctgccttggtttccgtacgttctagtttggccgacacgcagcaacgagaagcctccgcttatgagcaggttaagcaggtgcttcaaataagcgaagaagccaacttcgaaaaaaccaaggccctcattcagtgtgaccagctccgcaaagaactcgagaggcaggccgaaagactggagaaagagctagccagccagcaagaaaagcgcgcaatagaaaaagatatgatgaagaaagaaatcactaaagaaagggaatacatgggcagcaagatgctgatcctgtctcaaaatatcgcccaacttgaggctcaggtggagaaggtaaccaaggaaaagatctcagccatcaatcagctggaggagatccagagtcaactcgcatccagggaaatggacgtcaccaaggtctgcggcgagatgcgttatcagctgaacaaaacaaatatggagaaagacgaagctgaaaaagagcaccgagagtttagagccaagacaaaccgtgaccttgagatcaaggaccaagagattgaaaagttgcgcatcgaactagacgaatctaagcaacacttagaacaggaacagcagaaagcagcactcgcgagggaggaatgcctgagactgacggaactgctcggcgaatccgagcatcagctgcatctgacacgccaggaaaaggactcgatccagcagagcttcagcaaagaggccaaggctcaggcactgcaggctcagcagcgggagcaggaactgacgcaaaaaatccaacagatggaagcccagcatgataagacagaaaatgaacagtacctcctgctgactagccaaaataccttcctgaccaaactgaaagaggagtgttgcacactagcgaagaagttggagcagatttcccagaaaaccaggagcgagatcgcccagctgagccaggaaaaacgatacacctacgacaagctgggcaagttgcagagaagaaacgaagagctggaggagcagtgcgtccagcacgggcgagtccatgagactatgaaacagcggttacgtcagctggacaaacattctcaagctacagcacagcagttggttcagttactctcaaagcaaaatcagctcttactagagagacaatcactgtctgaggaagtggaccggttgcggactcaactcccctctatgcctcagtccgattgttag

SEQ ID NO: 133965 - DNA, 2013 bp, synthetic construct
  misc_feature 1..2013: note = Description of Artificial Sequence: Synthetic coding sequence
  source 1..2013: mol_type = other DNA
atggctaagtcccctgagaactccacattagaggagattcttggacagtatcaaaggtccttacgggagcatgcctcgaggagcattcaccagctcacctgtgcactcaaagagggggacgtgacaatcggtgaggatgcccctaatttaagcttttcaacgagcgtggggaacgaggatgcgagaaccgcgtggcctgagttgcagcagtctcacgctgtaaatcagctgaaagacttactccggcagcaggcagataaggagtcagaagtttccccatctcgacgacggaagatgagtccactcagaagcttggagcatgaagagaccaacatgcccaccatgcacgacctcgtacacacaataaacgaccagtcacaatacattcaccaccttgaggccgaggtcaagttctgtaaggaggagctaagcggaatgaaaaacaaaatccaggtagtggtgctggagaatgagggcctccaacagcaactgaaatcccagcgccaggaagagactctgagagaacaaaccctcctggacgcatccgaaaagttgaaacttacgtacgaggagaagtgcgagatcgaggaatcccagctgaaatttctcagaaacgacctggcggagtatcagagaacttgcgaagacctaaaggaacagctcaagcataaagagttcctgttggctgcaaatacttgcaacagggtgggagggttgtgtctgaaatgcgctcagcacgaagcagtgctaagccagacacacactaatgtgcacatgcagactatcgagcggctggtgaaggaacgtgacgacttaatgtccgcattagtaagcgttcgctccagtctggcggatacgcagcagagagaggctagtgcgtatgaacaggtcaagcaagtgttgcaaatctcagaagaagcaaacttcgaaaaaaccaaggcactcatccagtgtgatcagttgcggaaggagctcgaacgccaggccgaacgcctcgagaaagagttggcctcccaacaagaaaaacgggccatagagaaagacatgatgaagaaggagatcaccaaagagagagaatatatggggagcaagatgctaatactgtcacagaatatcgctcaactggaagcccaggttgaaaaagtgaccaaagagaagatttccgcaattaatcagctcgaggaaatccaatcccagctggcaagccgcgaaatggatgtaaccaaagtttgtggagaaatgcgttaccaattgaacaaaaccaacatggagaaggacgaggccgagaaagagcacagggaatttcgagccaaaacaaaccgagatctggagatcaaggatcaggaaatcgaaaagctacggattgagctggatgagagcaaacagcacctcgagcaggaacaacagaaggctgctctggctagagaggagtgcctgcgcctgacggaactcttgggcgagtccgagcaccaactacacctaacccggcaggaaaaggactcaattcagcagtccttttctaaggaggccaaggcccaggcgctccaggctcagcagagggagcaggagctcactcagaagattcaacaaatggaggctcagcatgataagacggaaaatgaacagtatctcctgctaaccagccagaatacatttctgacgaagctgaaagaggagtgctgtactcttgcaaagaaattggaacaaattagtcaaaagacccgtagcgagatcgctcagctgtctcaggaaaaacgctacacctacgataagctcggaaagttacagcggcggaatgaggaactcgaagaacaatgtgtgcagcacggcagagtacacgagaccatgaaacaaagactgaggcagctggacaaacattctcaagctacagctcaacagctggtgcagctgctctccaaacagaaccaactgctcctcgaacgccagtcactaagcgaggaggttgatcgcctcagaacccaactgccaagtatgcctcaaagcgactgttag

SEQ ID NO: 133966 - DNA, 2142 bp, synthetic construct
  misc_feature 1..2142: note = Description of Artificial Sequence: Synthetic coding sequence
  source 1..2142: mol_type = other DNA
atggcaaaaagccctgaaaattccacactggaggagatcctgggtcagtatcaacgaagcctgagggagcatgcatctcggagtatacaccaacttacatgcgcgttgaaggaaggcgatgtgacaattggtgaagacgctccaaatctcagcttctccacgagtgtgggaaacgaggatgccaggacagcttggccggaactgcagcagtcccacgcagttaaccagctgaaggacttgctcaggcagcaggcagacaaggagtccgaggtgagtcctagtcgtcggcggaagatgtcgcctctgcggtctctcgagcacgaggagaccaatatgccaactatgcacgatcttgttcacactatcaacgatcaatcccagtacatccaccacctcgaggccgaggtcaaattttgcaaggaagagctgtcagggatgaagaataaaattcaagttgtcgtcctcgagaatgaagggctgcagcagcaactgaaaagccagcgccaagaggagacactccgtgagcagaccctgcttgacgcatccgggaacatgcataattcctggatcactactggcgaagacagcggagtcggggagactagcaagcggcctttttctcacgacaacgccgatttcggcaaggccgcttcggctggcgaacagcttgaattggaaaaactgaagcttacatacgaggaaaagtgcgaaattgaggaaagccagttaaagttcctacgcaatgacctcgccgaataccagagaacatgtgaagacttgaaggaacaattgaaacacaaggaattcttactggcggccaacacttgcaaccgagtagggggactgtgcctgaaatgtgctcagcacgaagctgtgttgagtcagacacataccaatgtccatatgcagacaatcgagcggctcgtgaaagagagagatgatcttatgagcgcgctggtgtctgtgagatccagcctagctgatactcagcagagagaggcatccgcttatgaacaagtaaaacaggtgctccaaatcagcgaggaggctaacttcgagaaaaccaaagcactgatccaatgcgaccagctgaggaaagaactggaacggcaagccgagagactcgaaaaagagctcgcatctcagcaggaaaagcgggctattgagaaagacatgatgaaaaaagaaataactaaagagagagaatatatgggcagcaagatgctaatcctgagccagaacattgctcagctggaagcccaggtcgaaaaggtcaccaaagaaaagatttctgcgatcaaccagctcgaagaaatccagtctcagctggcctcccgagaaatggacgtgacaaaagtgtgtggcgagatgaggtatcaattaaataaaacaaacatggagaaagacgaagcagagaaggagcacagggaatttagggcaaagacaaatcgggatctggagatcaaggaccaagagattgaaaagctgagaatcgaactggacgaatcaaaacaacacttagagcaggaacaacaaaaggccgccctggccagggaggagtgcctgcggcttacagagttgttgggtgaaagcgaacaccagctacatctgacgagacaagagaaggatagtattcagcagtctttttccaaggaagccaaagcccaagccttgcaggcgcagcagcgggagcaggaacttactcagaaaatccagcagatggaggcccaacacgataagacggaaaacgaacagtatcttctgttgacgtcgcagaacacttttcttactaagttgaaagaagaatgttgcactctcgctaaaaagctagaacagattagccagaagacccggagcgagattgcccagttgtcacaggagaagcgctatacgtacgacaaactcggcaagcttcagagacgtaacgaggagctggaagagcagtgcgttcagcatggaagggtacacgaaaccatgaaacaacgcttacggcaactggacaagcactcacaagctacagctcaacagctagtccagctgctgagcaagcagaatcagctgctgctggaacggcagagtctcagtgaggaggtagatcggctgcgaactcaacttccatctatgccccaatctgactgctag

SEQ ID NO: 133967 - DNA, 1083 bp, synthetic construct
  misc_feature 1..1083: note = Description of Artificial Sequence: Synthetic coding sequence
  source 1..1083: mol_type = other DNA
atggccaagtctcctgaaaattccactcttgaagaaattctgggccaataccagagatcgctcagagaacacgcctcacgtagtatccatcaactgacatgcgcacttaaagagggtgatgtgacaatcggggaggacgcccctaatctctctttttccacatcagtgggaaatgaagatgctagaacagcctggcccgagctgcagcagagccacgctgtgaatcagctcaaggacctgctacgccaacaagccgacaaagagagtgaggtgagcccatcccgacggcggaaaatgagcccactgcgctctctggagcacgaagagaccaatatgccaacgatgcacgaccttgtgcacaccatcaatgatcagagccagtacattcaccatctggaggctgaggttaaattctgtaaggaagagctgtctggaatgaaaaacaaaatccaagtggtggtcctcgagaacgaaggactgcaacagcagctcaagagccagcgacaggaggaaaccctgcgagagcagacactcctggacgccagtggcaatatgcataattcttggattacgactggtgaggactcaggtgtgggcgagaccagcaaaaggccgttctcgcatgataatgcggactttgggaaagcggctagcgcaggtgagcaactcgaattggaaaaactgaagctgacttatgaggaaaagtgtgagatcgaagaaagtcaattaaaattcttgcgaaatgacctggccgaatatcagagaacgtgcgaagacctcaaagaacagctcaagcacaaggaattcctccttgctgccaatacgtgtaaccgtgtgggaggcctgtgcttgaagtgcgcacagcatgaagcggtgctttcccagactcacaccaatgttcacatgcaaaccatcgagcgtctcgtgaaagaaagagacgacctgatgtccgctttggtctccgtgaggtcatctctggccgacacacagcagcgtgaggcgagcgcatacgagcaggtaaagcaggtgctacagattagcgaggaagcaaattttgagaagacaaaacatccaagtcagtag

SEQ ID NO: 133968 - DNA, 1245 bp, synthetic construct
  misc_feature 1..1245: note = Description of Artificial Sequence: Synthetic coding sequence
  source 1..1245: mol_type = other DNA
cttctggacgcgtcagagaaactgaagttgacgtacgaggaaaagtgcgaaattgaggagagtcagttgaagttcctccgcaatgatctggccgaatatcagcgtacatgcgaggacctgaaggaacaactgaaacacaaggaatttttgttagcagccaacacctgtaaccgggtagggggcctgtgtttgaaatgcgcacaacatgaggccgtcctttctcagacccacactaacgtccacatgcaaacaatcgaaaggctcgtaaaagagcgagacgatctgatgtccgcgttggttagtgtgcggtcttcccttgctgacacccaacagcgggaggcatccgcatacgaacaggtgaaacaagtcctgcaaatttcagaagaggcaaactttgaaaagacgaaggctttaattcagtgcgaccaactgcggaaggagttggaaaggcaggccgagcgtctggaaaaagaactcgcttcccagcaggaaaagagggccattgagaaagatatgatgaagaaggaaatcacaaaggagcgcgagtacatggggtcaaaaatgctgatcttaagtcagaacatagcacagctcgaggctcaggtggaaaaggttaccaaagagaagatatcagccataaaccaacttgaagagatccaatcgcagcttgcttctagagagatggacgtgacgaaagtgtgtggagagatgaggtaccagcttaataaaaccaacatggaaaaagatgaggcggaaaaggaacaccgggagttcagagccaaaaccaatcgcgacctcgaaatcaaagatcaggaaatcgagaagctgcgaatcgaactggacgaaagcaagcagcatcttgagcaagaacagcaaaaggccgctctggctcgggaggagtgcctgcggctcactgaactactgggcgagtccgaacaccagcttcaccttacccggtctgaaattgctcagctctcacaggagaagcgctatacctacgataagttgggcaaactgcagcggcggaacgaggaacttgaagagcaatgcgtacagcacggtcgagttcatgaaacaatgaaacagcgcctgaggcaattagataaacatagtcaagctacagcccagcagctggtgcagctgttgtcaaaacaaaaccagctacttctcgagcggcagtctctctcagaggaggtggatagactacgaacgcagctgccatcaatgccacagagtgactgttag

SEQ ID NO: 133969 - DNA, 729 bp, synthetic construct
  misc_feature 1..729: note = Description of Artificial Sequence: Synthetic coding sequence
  source 1..729: mol_type = other DNA
atggatgatttatgtgaggcaaacggaacattcgcaatctcattgtttaagattcttggcgaagaggataattctcggaatgtgttctttagtcctatgtctataagctcggccctggccatggtgtttatgggcgctaaaggttccactgcagcacaaatgtcccaggctctctgtctctacaaggacggagatatacaccgtggattccagtctctgctcagcgaagtcaaccgtactggaacccaataccttctccgcaccgcgaacaggctgtttggcgaaaagacatgcgactttttgcccgactttaaagagtattgccagaagttctatcaagccgagctggaagaactctcctttgcagaggacaccgaagagtgccgcaaacacataaacgactgggtggctgagaagaccgaggggaaaatctctgaggtgctggatgccggaaccgtcgaccctttaaccaagctggtgctggtgaatgcgatctactttaaaggtaaatggaacgagcagttcgatcgaaagtatacaagagggatgttgtttaagaccaacgaggagaagaagactgtgcagatgatgttcaaggaggctaagttcaaaatggggtacgcggatgaggtgcatacgcaggtgcttgaattgccatacgtcgaagaagaacttagtatggttatcctgctgcccgacgataataccgatcttgccgtcaaggaatag

SEQ ID NO: 133970 - DNA, 1335 bp, synthetic construct
  misc_feature 1..1335: note = Description of Artificial Sequence: Synthetic coding sequence
  source 1..1335: mol_type = other DNA
atgaaagttgttccatcactcctcctctctgtcttacttgcgcaggtgtggttagttccaggactggcccctagcccccagtctccagagacacccgcgccacagaatcagactagtcgggtggttcaggccccaaaggaagaggaagaagacgaacaggaagcatctgaagagaaggccagcgaggaggaaaaggcctggctgatggcaagccgtcagcaacttgcaaaagagacatccaacttcgggttcagtctgctgcgcaaaatctcaatgaggcacgatgggaacatggtgtttagtcccttcggcatgtccttggctatgacagggctgatgctgggcgctacagggcccaccgagactcagatcaagcgggggctgcacctgcaagccctgaagcctacaaaaccgggcctcctgccctcattgtttaagggactacgcgagacgctgagccgtaatttggagcttggtctgacgcaggggagttttgccttcatccataaggattttgacgttaaggaaacttttttcaacctcagtaaaagatattttgacacggagtgtgttccaatgaacttcaggaacgctagccaggcgaagcgtctgatgaatcattacattaataaggaaacccggggaaagatacctaaacttttcgatgaaataaaccctgagaccaagttgattctggtggattatatcctttttaaagggaaatggctgacgccctttgaccctgtcttcactgaagtggacacgttccacttagataaatataaaacaattaaggtacctatgatgtacggtgccggcaagtttgccagcacctttgacaaaaatttccggtgtcacgtattgaagttgccatatcagggcaatgcaacaatgctggttgtcctgatggagaagatgggcgatcacctggccctcgaggattaccttaccaccgatctggtggagacatggcttcgcaacatgaagaccagaaatatggaggtgttctttcccaaattcaagctggaccagaaatacgaaatgcacgaactgttgcgccagatgggcattcgcagaattttcagcccctttgccgatctctccgagctgagtgccacgggacgaaacctgcaggtctcccgggtcctgcagaggacagttattgaggtggacgagagaggtactgaggctgtggcgggcatactcagcgagattactgcctattctatgccccccgtcatcaaggtggaccggcctttccactttatgatctacgaggagacgagcgggatgctgctatttctcggacgagttgtcaatccaaccctcctttag

SEQ ID NO: 133971 - DNA, 1335 bp, synthetic construct
  misc_feature 1..1335: note = Description of Artificial Sequence: Synthetic coding sequence
  source 1..1335: mol_type = other DNA
atgaaggtggtgccatcccttttgcttagtgtgctattggctcaagtgtggctggtgcctggcctggcgccttcgcctcaaagtcccgagaccccggcgccccagaaccagacatctcgggtcgtacaggctccgaaagaggaggaggaagacgagcaggaagccagcgaggaaaaggcctcggaggaagaaaaagcatggcttatggcaagcagacagcaattggcgaaagaaacctctaactttgggttctcactgcttcggaaaatatcaatgcggcatgacggtaacatggtcttcagccctttcggcatgtccctcgccatgacaggcctgatgctcggcgccaccggaccaacggagacacagattaaaagaggattgcacctgcaggccctcaagccgaccaagcctggtctgctgccatctctctttaaaggcttgcgtgagactcttagcagaaaccttgagctcgggctgactcagggctcttttgcgtttattcataaggattttgatgtgaaagagaccttctttaatctgtccaagcggtacttcgacaccgaatgcgtgccgatgaatttccgaaacgcgtcccaggcaaaacgcctgatgaaccactatattaataaagagacccgtggcaagatcccgaaattattcgatgagatcaatccagagaccaagctgatccttgttgactatatcctgttcaaggggaaatggctgacaccctttgaccctgttttcaccgaggtggatacattccacctggacaaatataagacaatcaaagtaccgatgatgtatggcgccggtaagttcgcaagcacctttgataagaattttcgttgccacgtccttaagttaccctaccaggggaatgccacaatgctcgtggttctgatggagaagatgggcgaccatttggcgttggaggattatttgacgaccgatcttgtggagacatggttgcgcaacatgaagacacgtaatatggaggtgttcttccctaagttcaagttggaccagaagtacgaaatgcacgagttactgagacagatggggatacgccgcatcttctcaccatttgcagacttgagcgagctgagcgctaccggtcggaacctacaggtgtctcgagtgttgcagcgcaccgtaattgaggttgacgagcgaggcaccgaagccgtggctggcatcctgagcgagatcaccgcttattctatgccaccagtgatcaaggtcgatagaccttttcactttatgatctacgaggagacatctggaatgctgctcttcttgggtagggttgttaacccgactcttttgtag

SEQ ID NO: 133972 - DNA, 1335 bp, synthetic construct
  misc_feature 1..1335: note = Description of Artificial Sequence: Synthetic coding sequence
  source 1..1335: mol_type = other DNA
atgaaggtagtcccatcactgttactctctgtcctgctggcccaggtgtggctcgtacctggcctcgccccatcaccacagagccccgaaacacctgccccccagaaccagacatcaagagtggtccaggcacccaaagaggaggaggaagacgagcaagaggcatccgaggagaaggccagtgaggaagaaaaggcctggttgatggctagtagacagcagctggctaaagagacctcaaattttggcttttctctgcttagaaaaatttctatgcggcatgacgggaatatggttttctccccttttgggatgtccctggccatgaccggcctcatgctaggcgccacagggcccactgagacccagattaaacggggcctccacttgcaggcgcttaaacctaccaaacctggtttactacctagccttttcaaaggactgagagagaccctgtctaggaatctggagcttggcttgacccagggaagttttgccttcatccataaggactttgacgtcaaggaaaccttctttaacctttctaaaagatattttgacactgaatgtgtgcccatgaattttcggaacgcttcacaagcgaagagactcatgaatcattatattaataaagaaacccgcgggaaaatccctaagctatttgatgaaatcaaccccgagacaaaattgatcttggtcgattatatactgttcaagggcaagtggctgactccatttgatccggtgtttaccgaagtggacacgtttcatctcgataaatataagacaattaaagtgccgatgatgtatggagcaggcaagttcgcgtccacctttgataaaaatttcagatgtcacgtgctgaaattgccctatcagggtaacgctactatgctcgtggttttaatggagaagatgggggatcatttggctttggaggattatctgacaaccgacctagtggaaacctggctcaggaatatgaaaacgagaaacatggaagtgttttttccaaagtttaagttggatcagaagtatgagatgcatgagttgctgcgtcagatgggaatcagacgcattttttctccttttgccgacctgtctgagttgtcagccacggggagaaatctgcaagtttcccgcgtacttcagaggaccgtaattgaggtggatgagagaggcaccgaggcagtggctggaattttatccgagattacagcctattccatgccacctgtaatcaaggttgacagacctttccactttatgatctacgaggaaacaagtggaatgctgctgttcctgggaagggtcgtcaatccaacgctgctgtag

SEQ ID NO: 133973 - DNA, 1455 bp, synthetic construct
  misc_feature 1..1455: note = Description of Artificial Sequence: Synthetic coding sequence
  source 1..1455: mol_type = other DNA
atgagtcgcagcacccaggaacttctcggataccattgtcgactccaggacaagctccaggagcaggagggttccttggcagccgaaggcagacactccctggcctccgcagccgatcatatgaaagtcgtgccttctctgctcctgagtgtattactggctcaagtttggctcgtcccaggtctggcccctagcccacaaagcccagagacccccgccccacagaaccagacatcacgcgtcgtgcaggccccaaaagaggaggaggaagatgagcaagaggcatccgaggaaaaggctagcgaagaggagaaggcttggctgatggcgagccgacaacagctggccaaggaaactagtaatttcggctttagcttgctgcggaagatcagtatgagacacgacggcaatatggtgttctcaccttttgggatgtcgctggcaatgaccggcctgatgcttggtgccaccggacccactgagacccagattaaaagaggtcttcacctgcaagcactcaaacctaccaagcctggtctcctaccttcgctcttcaagggcctccgtgaaacgctctcccgaaatctcgagttagggctgacgcaagggagttttgcttttatccacaaggattttgatgtcaaagagactttttttaatctgagcaaacgatattttgataccgagtgcgtccccatgaacttcaggaacgcttcacaagcaaagcgcctcatgaaccactatataaataaagagacccgggggaaaattcctaaactctttgatgaaatcaaccctgaaaccaagctgattctggttgattacattctgtttaaggggaagtggcttacaccgtttgatccagttttcaccgaggtcgataccttccacttagataagtacaagaccattaaagtgcccatgatgtatggggccggtaagttcgcttccacctttgataagaacttcagatgccacgtactgaaactgccttaccagggcaatgcaactatgttagtggtcctcatggagaaaatgggcgaccacctggctcttgaggactatctcaccaccgatctcgtcgagacatggctgcggaatatgaagacacgaaacatggaagttttcttccctaaatttaaactggatcagaagtatgaaatgcacgagctgctcaggcaaatgggcattcgacgcatcttttctccgtttgccgaccttagcgaactgtcagctacaggaaggaatctgcaggtttctcgggtgttgcagcgtaccgtgattgaagtggacgaaagaggaaccgaggccgtggccggaatactgtctgaaatcacagcgtactccatgccaccagtcattaaggtggatcgccccttccatttcatgatctacgaggagacaagcggcatgttactgtttctgggtcgagtggtgaacccaaccttactgtag

SEQ ID NO: 133974 - DNA, 288 bp, synthetic construct
  misc_feature 1..288: note = Description of Artificial Sequence: Synthetic coding sequence
  source 1..288: mol_type = other DNA
atggagagaatgctgcccctccttgcattaggtctgcttgctgcagggttctgtccagctgtcctgtgccatcctaactctcccctcgacgaggagaatctgacccaggaaaaccaagatcggggaacacacgtagatctggggctggcttccgcaaatgtggattttgccttcagcctctataagcaccctcatcggtggtccatccgcctgtgtctgatgtaccttagacgtgctcagaagcatctcctgccccagcaatctaagagtccatcattcctccattag

SEQ ID NO: 133975 - DNA, 1272 bp, synthetic construct
  misc_feature 1..1272: note = Description of Artificial Sequence: Synthetic coding sequence
  source 1..1272: mol_type = other DNA
atggaacgcatgttgcccttgttggctctgggcctccttgctgccggattttgtccagccgttctgtgtcatcccaattcccccttagatgaggaaaatctgactcaggaaaaccaggatagagggacccatgtggacctcgggctggcttctgcaaatgtggacttcgccttttctctatataaacaactggtcctcaaggcaccagataaaaatgtaatcttctcacccctgtcaatctccacggccctagcatttctcagcctgggggcccataacacgacgctgaccgagattttaaagggccttaaattcaacctcacagagacaagcgaagcggaaattcatcagtcatttcagcacctgctgaggactctgaaccagtccagcgatgagctccagctctccatgggcaacgcaatgtttgtcaaggagcagctgtccctattggaccggttcacagaggacgccaagaggctgtatggcagcgaagccttcgccacggatttccaagattccgcggcagcaaaaaagctgatcaacgattatgtaaagaatggaacgcgaggcaagatcaccgacctcatcaaagacctggattcccagaccatgatggtactagtgaactatatcttctttaaggcaaaatgggaaatgccatttgacccccaggacacacatcagagccggttttacctgagcaaaaagaagtgggtcatggtcccaatgatgtcactacatcatctaacaattccttatttccgggacgaggaattgtcgtgtaccgttgttgaactgaaatatactggcaacgctagcgccctgtttatcctacctgatcaggacaagatggaggaggttgaagccatgctgctgcccgaaacgctaaaacgctggcgcgacagtctggagtttagagagattggcgaactatacttacccaagttttctatatcccgtgattacaacctcaacgatatccttcttcagctcggcatcgaggaggcttttacatcaaaagccgatctgagcggaataaccggggcccgcaacctagcggtatcccaagtggtccacaaggcagttcttgatgtgttcgaggaaggcaccgaggcatcagcagccaccgctgtcaaaatcacactcctttccgcattggtggagacaaggacgatcgtcagatttaaccgtccgtttttgatgattatagtgcccactgacacacagaacatcttttttatgagcaaggtgaccaacccaaagcaggcttag

SEQ ID NO: 133976 - DNA, 1272 bp, synthetic construct
  misc_feature 1..1272: note = Description of Artificial Sequence: Synthetic coding sequence
  source 1..1272: mol_type = other DNA
atggagaggatgctgcccctgctggcacttggcctgctcgcggccggattttgcccagcggtgctgtgtcacccaaattcaccattggatgaggagaacttgactcaagaaaatcaagacagaggtacccatgttgatctgggcttagccagcgctaatgttgattttgcctttagtctgtacaagcagctggtgcttaaggcacctgacaaaaacgtgattttcagccctctatcaatttccaccgcactggcttttctgtccctcggcgcccacaatacgacccttactgaaatcctcaagggccttaagttcaacttgacagagacttcagaggcggagatacaccagtcgttccaacatctcctgcgcacattaaatcaatcctccgatgagctgcagctgagcatgggcaacgccatgtttgtgaaggagcagctatctttgttagaccgttttaccgaggacgctaaacggctgtacgggagcgaggcctttgcgaccgactttcaggacagcgccgctgccaaaaaacttatcaatgattatgtcaagaacggaacacgcggaaagattacagacctgatcaaagatttggactctcagactatgatggtgctggtcaattatatattttttaaagcaaagtgggagatgccatttgatccacaggacacccatcaatcccggttctatttgagtaagaaaaaatgggtgatggtccctatgatgtctcttcatcacctcaccatcccttacttccgggatgaggagttatcctgtacagttgtggagctgaaatatactggcaacgcttctgccctcttcattctcccagatcaggataagatggaagaggtggaagcgatgctgttacctgagaccctgaaacgatggagggactccctcgaattcagagagatcggcgagctatatttgccgaaattttctatcagtcgtgactacaatcttaatgacatcttgctgcagctcggaatcgaggaggcctttacctccaaagcagatctgtcaggtatcacgggcgcaagaaacttggcagtgagccaagttgtccataaggcagttttggatgtgtttgaggaagggaccgaggccagtgctgccaccgcagtgaaaatcacgcttctgagtgctttggttgaaacaagaacgattgtcagatttaacaggcccttcctgatgattatagtgcccactgatacccagaacatcttcttcatgagcaaggttacaaatccgaaacaggcgtag

SEQ ID NO: 133977 - DNA, 1272 bp, synthetic construct
  misc_feature 1..1272: note = Description of Artificial Sequence: Synthetic coding sequence
  source 1..1272: mol_type = other DNA
atggaaaggatgctccctctcctcgcccttgggctcttggcagccggcttctgccctgcggtgttatgccatcctaacagccccttggatgaagagaatctgacccaggaaaatcaggatagaggcacacatgtcgatctgggactggcatcagcgaacgttgacttcgccttttctctgtacaaacagctggtgttgaaagccccagacaagaacgtaatctttagcccgctatccatttcaacagctctggccttcctgagcctcggagcccacaataccacactcaccgagatacttaaagggctgaaattcaatttaacagagactagcgaagccgagatacatcagagcttccagcacctcctgaggactttaaatcagtcatctgacgagttgcagctaagcatgggcaacgccatgttcgtgaaagagcaactgagtcttctggaccggttcactgaagatgcgaagcgactgtatggtagcgaagcctttgctacggactttcaggattctgcagcggccaagaagctcataaatgactacgtgaaaaacggcacacgagggaaaattacggatctgattaaggatctagacagccagacaatgatggtcctcgtgaactatatctttttcaaagctaaatgggagatgccgtttgacccacaggacacccatcagagtcggttctatctgagcaagaaaaagtgggtcatggtgcctatgatgtcactgcatcatctcaccattccttactttagagatgaagaactctcctgcacagtggtcgagctcaagtacactgggaacgcatctgccttatttatccttcctgatcaagataaaatggaggaggttgaggctatgcttctgccggaaacactcaaacgctggcgtgatagcctagagtttcgagagataggggaattgtatttgccaaagttttccatcagccgagattataatctcaacgatatactcctgcagcttggcatcgaagaagcttttacaagtaaggccgacctgtccggcatcaccggtgctcgcaatttggccgtttcgcaggttgtccacaaagctgtgctagacgtctttgaagagggaacagaagcctccgcggccacggcagtaaagatcactctgctgagtgcccttgtggagaccaggaccattgtccgatttaatcgcccctttctcatgattatcgtgccgactgacacacagaacatatttttcatgtcaaaagtgacaaacccaaagcaggcgtag

SEQ ID NO: 133978 - DNA, 1347 bp, synthetic construct
  misc_feature 1..1347: note = Description of Artificial Sequence: Synthetic coding sequence
  source 1..1347: mol_type = other DNA
atgaagatccactactctaggcaaacagctctcgagagtacgtcatacattcagttgcctgaagcagaactgagaatggaacgaatgctaccgctgcttgcactgggcctgctggcggccgggttctgtcctgccgtcctgtgccatccaaattctcccctggatgaggagaacctgactcaggagaaccaggatagggggactcacgtagaccttggactcgctagcgccaacgtggatttcgctttctctctgtacaagcagctggtactcaaagcccccgacaagaacgtcatcttttcccctttatcaatttccacggccctcgctttccttagtctgggagcacataatactactctgactgaaattttgaaggggctcaaatttaacctgaccgagacgagtgaggccgaaatacaccagtctttccagcatctgcttcggaccttgaaccaaagctctgacgagctgcagctgagcatggggaacgccatgtttgtcaaggagcagctttccctgctggaccgattcactgaggatgcaaaaagattgtacggcagtgaggccttcgctaccgacttccaggactctgccgccgcaaagaagttaatcaatgattatgtgaaaaacgggacccgaggcaagatcactgacctcatcaaggatctggactcacagaccatgatggtactggtgaactatattttttttaaggcgaagtgggagatgccttttgacccacaggacactcaccagagcagattctatctctctaaaaagaaatgggtgatggtaccaatgatgagtcttcaccacctgacaatcccctattttcgggatgaagagctgagctgtaccgtggttgaactcaaatacaccggcaatgccagcgctctcttcatcctccccgaccaggataaaatggaagaggtcgaggccatgttgcttcctgagactttaaaacgatggcgagattctctcgaatttagagagattggagaactgtatctcccaaagttctccatttctagggactataatctcaacgatatcttgctacagcttggtattgaggaggccttcaccagcaaagcagacttgagcggaatcacaggagccaggaatctcgccgtgagtcaggtagttcataaagccgtgctcgacgtgttcgaggagggcaccgaggctagtgccgcaacagccgtgaagatcacgctactcagcgcccttgtcgaaacaaggacaatcgtgcgattcaatcgcccttttctgatgatcatcgtccccacagacacacagaatattttcttcatgagtaaggtgaccaaccccaagcaggcctag

SEQ ID NO: 133979 - DNA, 918 bp, synthetic construct
  misc_feature 1..918: note = Description of Artificial Sequence: Synthetic coding sequence
  source 1..918: mol_type = other DNA
atggaacggatgcttccccttcttgccctgggactcctggcagcaggcttttgcccagccgtgctttgtcatcctaattctccccttgacgaggagaacctcacccaggagaaccaggaccgtggcacacatgtcgacctcgggctagcttcagctaacgtggactttgcgttctccctctacaagcagctcgtgctaaaagccccagataaaaatgttattttctcgcctttatctatcagtaccgctttagccttcctctctctgggggcccataacacaacgttgaccgagatcttaaaggggctgaagttcaatcttactgaaactagcgaagccgagatccaccagtctttccaacacctgcttcggacattgaaccagtccagcgatgagcttcagctgtctatgggaaacgccatgtttgttaaggagcagctgtcacttcttgatagattcacggaagatgcgaaacgattgtatgggtccgaggcttttgctacagacttccaagatagcgcagccgccaaaaagttgattaatgattatgttaagaacggaacacgtggcaagattaccgatttgatcaaagacttggacagtcagacaatgatggtgcttgtaaattacattttctttaaagccaaatgggaaatgccattcgatccacaggatactcatcagtcacggttttatctgagcaagaaaaagtgggttatggtgccaatgatgtcgctccaccacctgacaataccttattttagagacgaggagctctcatgtacagtggtggaactgaaatacacaggaaacgcttccgccctcttcatcctgcctgatcaagataagatggaagaggtcgaagcgatgctcttgcccgagaccctgaaacgctggagggatagcctggagttctag

SEQ ID NO: 133980 - DNA, 1284 bp, synthetic construct
  misc_feature 1..1284: note = Description of Artificial Sequence: Synthetic coding sequence
  source 1..1284: mol_type = other DNA
atgcatctgattgactacctgctgctgttgctcgtaggactgctggcattatcccacggacagctgcacgttgagcacgacggcgagtcttgctctaacagtagtcatcaacagatcttggagactggcgaagggagcccttccctcaagattgccccagcaaatgccgactttgctttccgattttattatctcatcgccagtgaaacacctggtaagaacatattcttctctccactttctatctcagctgcctacgcgatgctgtcccttggcgcttgttcccatagtcgatctcagatcttagaaggcctcgggtttaacctgactgagttatctgaatccgacgtgcatagagggttccagcatctactgcatacccttaatctgcctggtcatggactggagacgagagtaggttccgccttatttctgagccacaacctgaaatttctggccaaatttttgaatgataccatggctgtctacgaagccaagctcttccataccaacttctacgataccgtgggtacgatccagctcattaacgatcacgtgaagaaggaaactcgaggcaaaattgttgatcttgtgtccgaactaaaaaaggatgtccttatggtgctggtcaattacatttactttaaagccctgtgggaaaaaccattcatctcatctcgcaccacacccaaggatttctacgtggatgagaacaccacagtcagagtacccatgatgcttcaggatcaggagcaccactggtacttacacgaccggtaccttccctgttctgtgttgaggatggattacaaaggcgacgcaactgtgttttttatcttgcccaatcagggtaaaatgagagagatagaggaagtgctgacccccgagatgttaatgagatggaacaatcttttgagaaaacggaacttctataagaaactggagctccacttgcccaagttttccatcagtgggtcatatgtcctcgaccagatcctcccaagactggggttcacagatctgtttagcaagtgggcggacctgagtggaataacgaagcaacagaaactggaagccagtaaatcattccacaaagccacactcgatgtggacgaagccggcaccgaagccgcagccgccacgagcttcgccatcaaatttttttctgcccaaaccaaccgtcacatactgcggttcaacaggccctttctcgtagtgatattctctacctctactcagagtgttctgttcctcggcaaagtagtggatccaactaagccctag

SEQ ID NO: 133981 - DNA, 1284 bp, synthetic construct
  misc_feature 1..1284: note = Description of Artificial Sequence: Synthetic coding sequence
  source 1..1284: mol_type = other DNA
atgcacctgattgattaccttctgctattactcgtgggcctgctagccctgtcccatggtcagctgcatgtggaacacgacggggagagctgttccaatagcagtcaccaacagatcctggaaactggggaagggagcccatctttgaagatcgcgcctgctaacgccgactttgcgtttcgattctattacctgatagctagcgagacacccggcaagaacatctttttcagtccgctctctatcagcgccgcctatgccatgctctctctgggggcttgttcccactcacgcagtcagatcttggaaggactaggatttaatttaactgagctcagcgagagcgacgtacacagaggcttccagcatctactccacacactgaacctgcctggtcatggcctggagacccgtgtcgggagtgctttgttcctttcccacaacctgaaattcctggccaagtttctcaacgatacaatggcagtctatgaggccaaattgttccacaccaatttctacgatacagtcggtacaattcaactcatcaacgaccatgtgaaaaaagaaacacgcggaaaaatcgtggacctcgtcagcgagctaaaaaaagatgtgttgatggtcctggtgaattatatatatttcaaggccttgtgggagaagccttttatttcctcacgtactactccaaaagatttctatgtcgatgaaaacacaactgtaagggttccaatgatgctgcaggaccaggaacatcactggtacctccatgacagatacttaccgtgcagcgtcctccgcatggactacaagggcgatgccacagttttctttattctgccaaaccagggcaagatgagggaaattgaggaggtcctgaccccagaaatgctgatgcgctggaataatctgctccgaaaacgcaatttttacaaaaagttggaactacatctcccaaaattttcgatcagcggtagttatgttctggaccaaattcttccacgccttggcttcacggacctgttcagcaagtgggcagaccttagcggcataaccaagcagcaaaagctcgaggcctcgaagagcttccacaaagcgacactggacgttgatgaagcgggaacggaagccgccgctgctacttcatttgctataaagttcttctcggcccaaacaaatcgacacatccttcgattcaatcgcccgttcctggtggtgattttctcaacatcaacccagagcgtgctgtttctcggtaaggtagtcgatccaacaaagccctag

SEQ ID NO: 133982 - DNA, 1284 bp, synthetic construct
  misc_feature 1..1284: note = Description of Artificial Sequence: Synthetic coding sequence
  source 1..1284: mol_type = other DNA
atgcatctgattgattatctccttctgctgctcgtgggcctgcttgccttgtcccacggccagctccatgttgagcacgatggggagtcttgctctaatagttcacaccagcagattcttgagactggcgagggctctcctagtctgaaaatagcccctgccaacgcagattttgccttccgcttttactacttaattgctagtgagacccccgggaaaaatattttcttctccccactgtcaatcagtgccgcgtacgccatgctttctcttggagcctgtagccactcaaggtctcagatccttgaaggtctggggttcaacttgacggagttgtccgagtctgacgtgcaccgtggtttccagcatctgctccacactctcaatctcccgggccacggcctcgagacaagggtggggtctgccctgtttctgtcccataatcttaaattcttagcaaagttcctgaacgacacaatggcagtatatgaggcaaagctcttccacactaatttctacgacacagtcgggacaatccagcttattaacgaccacgtgaaaaaggagactcgaggaaaaatcgtggacttggtgtcagagctgaaaaaggacgtccttatggtccttgtgaattacatctactttaaagccctgtgggagaaaccatttatctcctcccgtacgacgcctaaggatttttacgtggacgaaaacaccacagtgagagtacctatgatgctacaggaccaagaacatcactggtacctccatgataggtacctcccgtgtagcgtcctgaggatggactataagggcgatgctactgtcttcttcatactgcctaatcaggggaaaatgagggagatcgaagaagttctcacacccgaaatgcttatgagatggaacaacctgttgcgaaaacgtaacttttataaaaaactggagctgcatctgcctaaattcagcatttccgggtcttacgttctcgaccaaattctcccacgacttggcttcacagacctgttcagtaagtgggcagacctttccggtataaccaagcaacagaaacttgaggcatcgaaatcctttcataaggctaccctggacgtcgatgaggccggcaccgaggctgccgccgctacttccttcgcaatcaaattcttctcagctcaaacgaacaggcacatcttaagattcaatcgaccgttcttggtcgtcattttttctacctctacacaatccgtactgttcctgggtaaagtggtggatcccacgaaaccatag

SEQ ID NO: 133983 - DNA, 1218 bp, synthetic construct
  misc_feature 1..1218: note = Description of Artificial Sequence: Synthetic coding sequence
  source 1..1218: mol_type = other DNA
atgcccctgttgttgtacacctgcctgctgtggctgccaacaagcggcttgtggaccgtccaagccatggatccgaacgccgcttacgtgaacatgtcgaatcatcaccgaggactggcgagcgcaaacgtggattttgcatttagcttgtataagcatctcgtagcactctccccaaaaaaaaacatattcatttctcccgtgtcaatttctatggctctagccatgctgagcctgggaacatgtgggcacacacgcgctcagttactgcagggtcttggcttcaacttgactgaaaggtccgagacagagatccatcaaggctttcagcacctgcaccagctatttgctaagtccgatacatccctcgaaatgacgatgggcaatgctctgttcctggacggcagcctggaattgctggagtctttctcggcagacataaaacactattacgaaagtgaggtactggctatgaactttcaagattgggcaactgcctcgaggcaaatcaattcctacgtgaagaacaagacgcagggaaagatcgttgatctgttttccgggctggactctccagcaatccttgtcctggtcaactacatcttcttcaagggaacatggacacaaccttttgatctggcctctacaagagaagagaacttttacgtagatgagacaacagtcgttaaagttcccatgatgctgcagagcagcactatctcttacctgcatgacagcgaattaccatgccagcttgtgcagatgaactacgttggaaacggcactgtgtttttcatccttccagacaaggggaaaatgaataccgtcatagccgctctgagccgtgatactatcaacaggtggtcagctggactgacaagttctcaggtagatctgtacattccaaaagtcaccatcagtggggtttacgacctgggcgacgtgcttgaggagatgggcatcgccgacctctttacaaaccaagctaacttttcgcggattactcaggatgcccaactgaagtctagcaaagttgtgcataaggccgttctgcaactgaatgaggagggtgtggacactgccggatccacaggcgtaacattgaatcttacatccaaacctatcatcctgcggtttaatcagcccttcatcataatgatttttgaccacttcacttggtcgtctcttttccttgcccgcgtgatgaatcccgtctag

SEQ ID NO: 133984 - DNA, 411 bp, synthetic construct
  misc_feature 1..411: note = Description of Artificial Sequence: Synthetic coding sequence
  source 1..411: mol_type = other DNA
atgcctctgttgctttacacctgcctgttgtggttgcctacttctggcctgtggacagtgcaggctatggacccaaacgcagcctatgttaacatgtctaaccaccaccgcgggctagcctctgcaaacgtcgatttcgccttctcgttatacaaacatctggtggccctgtcccctaagaaaaatatttttatctccccagtcagcatttcgatggcgctcgccatgttatctttggggacatgtgggcatactcgcgcacagcttctgcagggattggggttcaacctgaccgaacggtctgagacagagatccaccaggggtttcagcacctacaccaactgttcgccaagtccgacaccagcctcgaaatgacaatggggaacgcattattccttgatggctcatag

SEQ ID NO: 133985 - DNA, 1194 bp, synthetic construct
  misc_feature 1..1194: note = Description of Artificial Sequence: Synthetic coding sequence
  source 1..1194: mol_type = other DNA
atggactccctggccacgagtatcaatcagttcgcactggaactgagtaagaaacttgccgaatctgctcaggggaaaaacatattcttttccagctggagcatcagcacgagtctgacgattgtatacctgggagccaaaggcacaacggcggcccagatggcccaggtgctacagtttaacagagatcagggcgttaagtgtgatcccgagtccgagaagaaacgaaagatggagtttaatctttccaactcagaggagatacactcagacttccagactttaatcagcgagatcctgaaacctaacgacgattatctgctaaaaactgcgaacgcgatctacggggagaaaacctatgccttccacaacaagtacttggaggatatgaagacttattttggggcggagccccaaccagtaaactttgttgaggcatccgaccagattagaaaagatattaactcctgggtggagcgacagacagagggaaaaatccagaatcttctgcccgacgattcagttgacagcacaacgcgaatgattctggtgaacgcactgtactttaagggcatttgggagcaccagttcctggtgcaaaatactaccgagaaaccttttaggataaatgaaactacgtctaagcccgtccaaatgatgttcatgaagaaaaagctgcacatttttcacattgagaagcccaaggctgtcggcctacagctttattataaatcacgtgatcttagcctgcttattctactaccagaagatatcaacggacttgagcagcttgagaaagcgattacatacgagaagcttaacgaatggacatccgctgatatgatggagctttacgaggttcaattgcacctcccaaagttcaaactcgaagacagctatgatttaaagtcgaccctgagctctatgggcatgtcagacgctttttcccaaagcaaagctgacttttccggcatgagcagcgcacgcaacctgtttctgtccaatgtgtttcacaaagcatttgtggagatcaacgagcaggggaccgaagctgccgctggaagtggctctgaaattgatattagaattagggtcccgtcgatagaattcaatgctaatcacccttttctgtttttcatccgccacaacaaaacgaacactattttattttatggcaggctgtgctctccttag

SEQ ID NO: 133986 - DNA, 1020 bp, synthetic construct
  misc_feature 1..1020: note = Description of Artificial Sequence: Synthetic coding sequence
  source 1..1020: mol_type = other DNA
atggatagtttgggggccgtctctaccaggttggggttcgatctctttaaagagttgaagaagactaacgacggcaatatcttcttcagtcctgtgggcatactgaccgctatcggaatggtcctattgggtactcgaggggctactgcatcccagcttgaagaggtattccattcagaaaaagaaaccaagtcctcaaggatcaaggccgaggaaaaggaggtcatcgagaatacggaggctgtgcaccagcagttccagaagtttttgacggagatcagcaaactgacaaatgactatgaattgaatattactaacaggttgttcggcgagaagacctatctctttctgcagaagtacctggattatgttgagaagtattaccacgcttcactcgagcctgttgatttcgtcaatgccgctgatgaatccaggaaaaagatcaatagctgggttgagtccaaaacaaacgagaaaatcaaggacctgttcccagacgggtcaatcagcagcagtaccaagctggttctggttaatatggtttatttcaaaggccagtgggacagggagttcaaaaaagaaaacacaaaagaggagaagttctggatgaataagattattgataagattagtcccgagaaactagtggagtggacatcccctggacacatggaggagcgcaaagttaacctccacctacctaggttcgaggtggaggacggctatgacttagaagcagtccttgctgcaatgggcatgggcgatgcatttagcgaacacaaagcagattacagcggtatgtccagtgggtccgggttatacgcacaaaagtttcttcactcctcctttgtagcagtgacagaagaaggaactgaggctgctgccgctaccggaattggatttaccgtgacatccgcaccggggcatgagaatgtacactgcaatcacccctttctattcttcatccggcataatgagtccaattctatactctttttcggaaggttcagttcaccgtag

SEQ ID NO: 133987 - DNA, 1176 bp, synthetic construct
  misc_feature 1..1176: note = Description of Artificial Sequence: Synthetic coding sequence
  source 1..1176: mol_type = other DNA
atggactccctcggggccgtaagcaccaggctcgggtttgatctgtttaaagagctgaagaagactaacgacggaaacattttcttcagccctgtgggtatcttgaccgccattgggatggttttgctcggaaccaggggcgctaccgcttcccaactcgaggaggtattccatagcgaaaaagagaccaagtcctctcgcatcaaagcagaggagaaggaggttattgagaatactgaggctgtgcaccaacagtttcagaagtttttgacggagatctctaaactaacaaatgactatgaacttaatattacgaatcggttgttcggcgaaaagacttacttattccttcaaaaatacctcgattacgttgaaaaatattaccacgctagtctggaaccagtcgacttcgtcaacgccgcggatgagtcccggaagaagatcaatagctgggttgagagcaaaactaacgaaaagatcaaggacctgttccctgacggaagcatatcgagcagtaccaaattggtcctcgttaacatggtgtactttaagggtcagtgggatcgtgagtttaagaaggaaaacacaaaagaagagaaattttggatgaataagtccacctctaaatccgtacagatgatgacccaatctcactccttctcttttacgttccttgaggacctgcaggccaaaattctgggcatcccatataagaataatgacttatctatgttcgtgctacttcctaacgacatcgatggtctcgagaaaattatcgacaaaatctcacccgagaagctggtcgagtggacgagtcccggccacatggaagagcgtaaggtgaacttgcacctccccaggttcgaggtggaagacggatatgacctggaagccgtgctggctgctatggggatgggcgatgccttcagtgaacataaggccgattactccgggatgtcatcggggtcaggtctgtatgcccagaagttcctgcacagctcctttgtcgccgtcaccgaggagggcaccgaagccgcagcagccacaggaatcggatttaccgtgacgtctgcgccgggtcacgagaacgtgcactgcaaccacccctttctcttttttatcagacataatgagtccaatagcattctgttcttcggcagatttagctctccttag

SEQ ID NO: 133988 - DNA, 930 bp, synthetic construct
  misc_feature 1..930: note = Description of Artificial Sequence: Synthetic coding sequence
  source 1..930: mol_type = other DNA
atggattctctgggggctgtatctacccgtttgggctttgatctgtttaaggagttaaagaaaacaaatgatggcaacatctttttcagcccagtgggaattctgacagcgatcggcatggtgctgctgggaactaggggtgcaacggcaagccagctggaggaggtgttccacagcgagaaggaaaccaaatcttctcggattaaagctgaggaaaaggaagtggagaaaatcaaagatctcttcccagacggctcaatcagtagcagtactaaactcgtcttggtgaacatggtgtactttaaggggcaatgggatcgcgagttcaaaaaggaaaacaccaaagaagagaagttctggatgaataagagcacatctaagtccgtccagatgatgacacagagccattccttctcattcacctttcttgaggacttacaggcaaagatcctgggcattccgtacaagaacaacgatctgagtatgtttgtcctgctgcctaatgatattgatggtctggagaagattattgataaaatcagtcctgaaaaactggtggaatggacctcccctggccatatggaggagcgtaaggttaatctgcacctgcctcgctttgaagtcgaggacggatacgatctggaggccgtgttagctgccatgggcatgggcgacgcttttagcgagcacaaagcggattacagcggaatgtctagtgggagcggcctctatgcgcagaaatttctgcactcatcttttgtagccgttactgaggaagggactgaggctgctgcagccaccggtatcgggttcaccgtgacctctgcacccggacatgagaatgtccattgcaaccaccctttcctgttctttatccggcacaatgagtctaattcaatactcttcttcggccgcttctccagcccttag

SEQ ID NO: 133989 - DNA, 1173 bp, synthetic construct
  misc_feature 1..1173: note = Description of Artificial Sequence: Synthetic coding sequence
  source 1..1173: mol_type = other DNA
atgaactctcttagcgaggccaacactaagtttatgttcgatttatttcaacagtttcggaaatcgaaagagaataacattttctacagccctattagtatcaccagcgctctgggtatggttttactgggcgctaaagacaatactgcccagcagatcaagaaagttctccatttcgatcaagtgaccgagaataccacgggcaaagctgccacctaccatgtggaccggtccggcaatgtgcaccaccagtttcaaaagctcctgactgaattcaacaaatctacggacgcctacgagttaaaaatcgctaataaattgttcggcgaaaagacatacctgtttttgcaagaatacctcgacgcaattaagaaattttaccagacgtctgtagaaagtgtggatttcgctaatgccccggaggagagtaggaagaagataaattcttgggtggaatctcagaccaacgagaaaatcaagaacttgattccagaggggaacatcggctcaaacaccacactggtactcgtcaatgccatctattttaaggggcagtgggagaaaaagttcaataaggaggacactaaggaggaaaagttctggccaaacaagaacacctataagagtatccagatgatgcgtcagtacactagcttccacttcgcatccctcgaagatgtgcaggcaaaagtcctggagatcccttataagggtaaagatctctcaatgatagtcctgctgccaaacgagatcgacggactgcagaaactggaggagaaattaaccgccgaaaaactgatggagtggacctctttgcaaaatatgcgagagacccgggtggacttacacttgccgcggttcaaggtggaggaatcctatgacctcaaggatactctgagaactatgggaatggtggacatcttcaacggagacgctgatctcagcggaatgaccggctctcggggtctagttttatccggcgtactgcacaaggccttcgtcgaggtaaccgaggagggagccgaagccgcagccgcgaccgccgtggtcgggttcggatcttcccccacatctacgaatgaggaatttcactgcaatcatccattcctgtttttcataagacaaaacaagacgaatagtatcttgttctacggtcggtttagctctccctag

SEQ ID NO: 133990 - DNA, 1173 bp, synthetic construct
  misc_feature 1..1173: note = Description of Artificial Sequence: Synthetic coding sequence
  source 1..1173: mol_type = other DNA
atgaattctctgagcgaggctaataccaaattcatgtttgatttgtttcagcagttccgtaaatcaaaagagaataacatcttctattcccctatctcaatcacctctgctctggggatggtgttactgggggccaaagacaatactgcccagcaaatcagcaaggtactacacttcgatcaggtgacagagaacacaactgagaaggccgccacgtaccacgtggatagaagcggaaatgtgcaccaccagtttcagaaattgttaacagaattcaataaatccactgatgcttacgagttgaaaatcgctaataaactattcggcgagaaaacctatcagtttttgcaggaataccttgatgccataaaaaagttttaccagactagtgtggagtctaccgacttcgctaatgccccagaggaaagcagaaaaaaaattaactcctgggttgaatcccagaccaacgaaaagatcaagaatctttttcccgacggtacaatcgggaacgataccacccttgtgttggtgaatgctatctatttcaagggtcagtgggaaaacaaatttaaaaaagaaaataccaaggaagagaagttttggccaaacaagaacacctacaagtctgtacagatgatgcgtcaatacaatagcttcaatttcgctctgttagaggatgtccaggccaaggtactcgagataccttacaaaggcaaggacttgtcaatgattgttctgttgccaaatgaaatcgacgggctccaaaagctagaggagaagctgaccgctgaaaaactgatggaatggacaagcctgcagaatatgcgagagacctgcgtggatctgcatctgcctcggtttaaaatggaagagagctacgacctcaaagatacactgcgaactatgggcatggtgaacattttcaacggcgatgctgacctcagtgggatgacttggagccatggcctgtcggtgagtaaagtactccacaaggcattcgtggaggtgacagaagagggtgtggaagcagctgctgcaaccgctgtcgttgttgtggaactttccagtccatcaaccaacgaggagttctgctgcaaccacccatttctcttcttcatacggcagaataaaaccaacagcattctattctacgggagattctcatctccgtag

SEQ ID NO: 133991 - DNA, 1017 bp, synthetic construct
  misc_feature 1..1017: note = Description of Artificial Sequence: Synthetic coding sequence
  source 1..1017: mol_type = other DNA
atgaactccttgagcgaagcgaatacgaagttcatgtttgatcttttccagcagttcagaaaatccaaagagaacaacatcttctattctcctatcagtatcactagtgccttgggcatggtacttttaggcgcaaaagataacaccgcccagcagataagtaaagtattgcactttgaccaagtaactgagaataccacagagaaggcggctacctatcacgtggacagaagcggtaatgtacatcaccagtttcagaagctgctcacggaattcaacaaaagcaccgacgcttacgaacttaaaatcgctaacaaactgtttggagagaaaacataccagtttctccaagagtacctggatgctatcaagaagttctatcagaccagtgtggaatctaccgacttcgctaatgcacctgaagaatccaggaagaagattaatagctgggtggaatcacagaccaacgagaaaattaagaacctgttccccgatggaactattggtaatgacacaaccttagtgttggtcaatgcaatctactttaaggggcaatgggaaaacaagtttaaaaaagagaacactaaagaagagaagttctggccgaataagctggaggagaaactgactgctgagaagcttatggagtggacatccctgcagaacatgcgcgaaacttgtgtcgacctgcacctcccgagatttaagatggaggagtcatacgatcttaaagacacgttgcggactatggggatggtgaacatttttaacggcgacgcagatctgagtgggatgacctggagccacggactctcagtgagcaaggtgctgcacaaggcattcgttgaggtaactgaagagggtgttgaggccgccgccgcaaccgccgtagtggtggttgagctgtctagcccatccaccaatgaggagttctgttgtaatcatcctttcctgttttttatccgacagaacaagacaaactcaatcttattttacggacgatttagttcaccgtag

SEQ ID NO: 133992 - DNA, 1128 bp, synthetic construct
  misc_feature 1..1128: note = Description of Artificial Sequence: Synthetic coding sequence
  source 1..1128: mol_type = other DNA
atggacgctcttcagctcgccaattccgcgttcgcagtggatctgttcaaacagctgtgtgagaaagaacctctcggaaacgtgctattctcgcccatatgtctatctacttcactatcactggctcaggtgggagccaagggagacacggctaatgaaattgggcaggttctacattttgagaacgtcaaagatgttccatttggtttccagacagttacctctgacgtcaacaagctcagctcattctatagcctgaaactgattaaacggctgtacgtcgataagagcttaaaccttagtacagaatttatcagcagtacaaagagaccatacgctaaagaactcgagactgtggattttaaagacaagctcgaggaaactaaaggacagatcaacaattccatcaaggatctgaccgacggacatttcgagaatatcctggcggataactctgtgaacgaccaaacaaaaatattagttgtcaacgctgcgtatttcgtcgggaagtggatgaaaaaattctcagaatccgaaaccaaggaatgcccttttagggtcaataagacggatactaaaccggtacagatgatgaatatggaagcaacgttctgtatggggaacatcgattctatcaattgcaagatcattgaactgccttttcaaaacaaacacctttctatgttcatcctgcttccaaaggacgtggaagatgagagtactggcctcgaaaagattgaaaagcagctgaacagcgaatcactgagccagtggacaaacccctccactatggccaatgctaaagttaaactttccatccccaagtttaaggtagagaagatgattgacccaaaagcatgtctggaaaacctaggactcaaacacatctttagcgaagacacatcagacttttctgggatgagcgaaacaaagggagtggcactctctaacgtcatccacaaagtctgcttggagatcaccgaggacggaggagacagcattgaggtgcccggggctcggattttacagcacaaggacgaactcaacgcggatcacccttttatttacattattagacataataaaacgagaaatatcatcttctttggtaaattctgcagtccatag

SEQ ID NO: 133993 - DNA, 390 bp, synthetic construct
  misc_feature 1..390: note = Description of Artificial Sequence: Synthetic coding sequence
  source 1..390: mol_type = other DNA
atggatgccctgcagctggcgaatagcgctttcgccgtggatctgttcaaacaactgtgcgaaaaagagccactggggaacgtattattttccccaatctgcctcagtacctcattgtccctggctcaggtgggcgcaaaaggggacactgctaatgagatcgggcaggtgcttcactttgaaaacgttaaggacgttcctttcggattccagactgtcacctcagatgtaaataaactgtcttccttctatagccttaaactgattaagagactttatgttgataagagcttgaacctcagcaccgagttcattagtagtacaaaaaggccctacgccaaagagcttgagactgtcgacttcaaggataagctggaagaaacaaagtag

SEQ ID NO: 133994 - DNA, 1131 bp, synthetic construct
  misc_feature 1..1131: note = Description of Artificial Sequence: Synthetic coding sequence
  source 1..1131: mol_type = other DNA
atggacgtcctggccgaggcaaacggaacctttgctctgaacctgctcaagaccctgggaaaagacaattccaagaatgtgtttttttcacccatgagcatgtcctgcgccttggccatggtgtatatgggagctaagggcaatactgccgctcagatggcccagattctttccttcaacaaaagcggcgggggcggtgacatccatcagggattccagtccctgttgaccgaagttaataaaactgggacacaatacctcctgcgcatggcaaaccgcctgttcggggaaaagagctgcgatttcctttccagctttagagacagctgtcagaagttctatcaggctgaaatggaggagttggatttcatctcagccgtggagaagagccggaaacacatcaacacttgggtggctgagaagactgaaggaaagatcgccgagcttttaagcccaggatctgtggatcccctgactaggctagtgctagttaatgctgtttacttcagaggcaattgggacgaacagtttgacaaggagaataccgaggaaagactgttcaaagtgagcaagaatgaggagaagcctgtccagatgatgttcaagcagtctacctttaaaaaaacttatataggggagatcttcacccagatcctggttctcccctatgtggggaaagagctcaacatgattatcatgctgcctgacgaaacaacagacctgagaaccgtggagaaggagttgacctacgagaagtttgtggagtggacacggcttgatatgatggacgaagaggaagtggaagtgtcactcccgcgttttaagctcgaggagagctacgatatggagagcgttctgagaaacctcgggatgacggatgccttcgagctggggaaggcagattttagcggtatgtctcaaacagacctctcactcagtaaagtggtgcacaagtcatttgtcgaagttaacgaggagggcaccgaggccgccgcggctaccgctgccatcatgatgatgagatgcgcccgatttgtaccaaggttttgtgctgatcacccatttcttttcttcatccagcattcgaagacaaacggcatccttttttgtggtcggttttcaagtccgtag

SEQ ID NO: 133995 - DNA, 546 bp, synthetic construct
  misc_feature 1..546: note = Description of Artificial Sequence: Synthetic coding sequence
  source 1..546: mol_type = other DNA
taacttaatctgctgaaaactctgggcaaagataacagcaagaatgtgttctttagccccatgagcatgagctgtgcgctggccatggtgtatatgggagctaaagggaatacggctgcccaaatggcacagatactcagcttcaataaatcaggcggagggggagacatacaccagggatttcaatccctgttaaccgaggtcaacaaaacaggcacacagtatctgctgaggatggcaaatcgagagagttacgacatggagtcagtgttaagaaatcttgggatgactgacgcgtttgaactgggcaaagctgacttttctggtatgtcacaaaccgatctgtctttgtccaaagtcgtgcacaagagctttgtagaagtgaatgaggaaggaaccgaagcagctgccgcaacagccgctataatgatgatgagatgtgcgcggttcgtgccgagattttgcgcagatcacccttttctattcttcatccaacacagcaaaactaatggtatcctcttctgtggcagattttcctctccttag

SEQ ID NO: 133996 - DNA, 1131 bp, synthetic construct
  misc_feature 1..1131: note = Description of Artificial Sequence: Synthetic coding sequence
  source 1..1131: mol_type = other DNA
atggatgttcttgccgaggccaacggtacgtttgcactcaacctgctgaagaccctaggcaaggataattccaagaatgtattcttctcccctatgtctatgagctgcgccctggccatggtttatatgggagcgaagggaaacaccgccgctcagatggctcagatcctgtcattcaataagagcggtggagggggcgatattcaccagggttttcagagtctgctgactgaagtgaacaagacagggacacagtaccttttacggatggccaatcgcttgttcggggaaaagtcatgtgatttcctctcctcatttcgcgatagttgtcagaaattctatcaggccgaaatggaagagttagacttcatcagcgcagttgaaaagtctcgcaaacacatcaatacttgggtggccgagaagacagaaggaaagattgccgagctcctgtcacccgggtcggtcgacccccttacacgactcgtcctggtcaatgccgtgtacttccgcggaaattgggacgagcagtttgataaggaaaatacggaggaaagactctttaaggtcagcaagaatgaagaaaagcctgtccaaatgatgtttaaacaatcaacttttaagaagacctatattggagagatcttcactcagattctcgtgttgccatacgtggggaaagagctgaacatgatcataatgttacctgatgagactactgatctgaggactgtggagaaggaactaacctatgagaagttcgttgagtggacccgcctcgatatgatggacgaagaggaagtggaagtgtcacttcccagattcaagttggaggagagctatgacatggagtctgttcttagaaatctgggcatgacagacgccttcgagctggggaaagccgatttcagcggcatgtcacaaaccgatctgagcctctccaaggtcgtccacaaaagttttgtcgaagtgaacgaagagggcaccgaggcagccgccgccactgcagccatcatgatgatgaggtgcgctcgcttcgttccaaggttttgtgctgatcatcccttcttgttttttattcagcacagcaaaacaaacggcatactcttctgtggccgcttttcatcaccatag

SEQ ID NO: 133997 - DNA, 1131 bp, synthetic construct
  misc_feature 1..1131: note = Description of Artificial Sequence: Synthetic coding sequence
  source 1..1131: mol_type = other DNA
atggacgttttggctgaggccaacggcacctttgccctcaacctccttaaaaccttgggcaaagataattccaagaacgtctttttttcccccatgtccatgagctgtgccctagcaatggtgtacatgggggcgaagggcaacacagccgctcagatggcccaaattctgagctttaacaagtcagggggtggcggagatattcatcagggcttccagtcgttgctcacggaggttaataagaccgggacgcaatatctcctgcgcatggctaatagactcttcggggaaaagtcatgtgattttctgtccagtttccgggattcctgccagaaattttaccaggccgagatggaggagctagactttatttccgcagttgagaagtctagaaaacacattaacacatgggtggccgaaaaaaccgaaggcaagatcgctgaattactgagtcccggaagcgtggatccactgactagactggtcctggtcaatgcagtgtacttcagagggaattgggacgagcagttcgataaggagaacaccgaagaacggctgtttaaggtgtccaagaatgaggagaaaccagtgcagatgatgttcaaacagtcaacgtttaagaagacctacatcggtgagatctttacccagattcttgtattaccttacgtgggtaaggagctcaacatgataatcatgttgccagacgagactaccgacctgcgcaccgtggagaaggaactgacctatgaaaaattcgtcgaatggacacgcctggatatgatggatgaggaggaagtggaggtgagccttcccaggttcaaactggaggaatcatatgacatggaaagcgtcctccgaaacttgggtatgaccgatgctttcgaactggggaaagctgacttcagcggaatgtcccaaaccgacctgtctctatcaaaggttgtccacaagagctttgtggaggtcaatgaagaagggacagaggctgcggctgctactgccgccatcatgatgatgaggtgtgcccgtttcgtgcctagattttgcgcagaccatcccttcttgttcttcattcaacattctaagaccaatgggatacttttttgtggacggttctcatcgccatag

SEQ ID NO: 133998 - DNA, 1131 bp, synthetic construct
  misc_feature 1..1131: note = Description of Artificial Sequence: Synthetic coding sequence
  source 1..1131: mol_type = other DNA
atggatgtgctcgccgaagccaatggaacttttgcgctcaacctgctaaagacgttgggaaaagacaattctaaaaatgtcttcttctctccaatgtccatgtcctgtgcactcgccatggtgtatatgggcgctaaggggaacactgcagctcaaatggcacagatcctgagcttcaacaaaagcggaggcggaggggatattcaccaaggtttccagagtttactgactgaagtcaacaaaactggtacacagtacctcttacgcatggccaatcgacttttcggagaaaagtcctgtgacttcttatccagttttcgggactcctgtcagaaattttatcaggctgagatggaggaactggatttcatcagtgccgttgagaaaagtcggaaacacatcaacacatgggtggctgaaaaaacagaagggaagattgccgaacttcttagtcctggatcagtggatccacttacaagactggttctcgtcaatgctgtgtatttccgtggcaattgggacgagcaatttgataaggaaaacaccgaagagcgcctgttcaaggtctcgaagaacgaggaaaagccagtacagatgatgtttaagcaaagcacttttaagaaaacttacattggtgaaatctttacccagattttggtgctcccctatgtagggaaggaactcaatatgataattatgctgccagatgagacaaccgatctgaggaccgtcgagaaagagctcacctacgagaaattcgtggaatggacaagacttgacatgatggatgaagaagaagtagaggtctccctgcctcgcttcaagctggaggagtcttacgacatggagtctgtgctacgcaatctcggaatgaccgatgcttttgagcttggcaaggccgacttcagcgggatgagccagaccgatttgagcctttccaaggttgttcataagtcttttgttgaagtgaacgaagagggcacggaggctgcagctgcaaccgccgcgatcatgatgatgagatgcgctcgttttgttcctcggttttgcgcggatcaccccttcttgttcttcatacagcattcgaagaccaatggcatcctgttttgcggtagattctcaagtccatag

SEQ ID NO: 133999 - DNA, 1131 bp, synthetic construct
  misc_feature 1..1131: note = Description of Artificial Sequence: Synthetic coding sequence
  source 1..1131: mol_type = other DNA
atggacgtccttgcagaggcaaatggaaccttcgcactcaacttgctgaagactttaggcaaagataacagcaagaatgtgttctttagccctatgtccatgagttgcgcgctggccatggtgtatatgggtgctaagggtaacactgccgcacagatggcccagattctcagcttcaataaatcgggcggagggggcgatattcatcaaggctttcaatcactgctcacagaggtaaataagacagggactcagtacctgttacgtatggctaatcgactgtttggagagaaatcatgtgacttcctctccagtttcagagattcctgccagaaattttatcaggccgagatggaggagctggattttatttctgcagtcgagaaaagtaggaagcatatcaatacttgggtggccgagaagacggaaggaaaaattgcggagctgctctcacccggatcagtggaccctctgactcggttggtgttagtgaatgctgtgtactttcgtggaaactgggacgagcagttcgacaaagagaatacagaggaacggctgtttaaagtatccaagaacgaggagaagcccgtgcagatgatgttcaaacagagcacttttaaaaagacctatatcggcgaaatctttacccagattctggtacttccttacgtgggcaaagagctcaacatgatcatcatgctgccggatgagaccactgaccttagaactgtcgagaaggagcttacctacgagaaattcgtggaatggactcgattagacatgatggacgaagaagaggtggaggtgagccttccgcgattcaagcttgaggaatcctatgacatggaatctgtactgcggaaccttggtatgaccgacgcctttgagctcggtaaagctgacttctccggaatgtcacaaaccgacttgagtctctctaaggtggttcacaaaagctttgtcgaggtgaatgaagaagggacggaggctgccgccgcaaccgcggcgattatgatgatgaggtgtgccagattcgtgccacgattctgcgccgatcacccattcctgtttttcatccagcacagtaagaccaacggcatactcttttgtggccgcttcagttcaccttag

SEQ ID NO: 134000 - DNA, 1131 bp, synthetic construct
  misc_feature 1..1131: note = Description of Artificial Sequence: Synthetic coding sequence
  source 1..1131: mol_type = other DNA
atggacgtgttggcagaggccaatgggacttttgcccttaacctcctgaaaactctaggcaaagacaatagcaaaaatgtgttcttctcaccaatgagcatgagctgtgcccttgctatggtctacatgggagctaaaggtaatacagcagcccagatggcccagatccttagctttaataagtccggcggaggcggcgatatccatcagggctttcagagccttctaactgaagtgaataagaccggaacccagtacctgctaaggatggccaatcgcttatttggggaaaagtcttgtgatttcctcagctcatttcgggattcctgtcaaaagttctaccaggcggagatggaggaactggattttatctctgccgtggaaaagtcacggaagcacatcaacacatgggtggcggagaaaactgagggtaagatcgcggagctattatcacccggcagtgtggatcctctaacaaggctggttttagtcaacgccgtatatttccgcggaaactgggatgaacagttcgacaaagaaaacactgaagagagactgttcaaggtgagtaagaacgaagaaaaacccgtccagatgatgttcaaacaatctacctttaagaaaacctacatcggcgaaatattcacccagatattagtgctgccgtacgttggcaaagaactgaacatgatcataatgctgccagatgaaactaccgacctccgaaccgtggagaaagagctgacatacgagaaatttgtcgagtggacacggctcgatatgatggacgaagaagaagtagaagtgtctctgcccaggtttaagctggaagagtcgtatgacatggaatccgtcctccgtaatttggggatgactgacgcttttgagctcgggaaagctgacttctctggaatgtcccagaccgacctgtccctctctaaagtggtgcacaagtcttttgtagaagttaacgaggaaggaacggaagctgccgctgccacagccgctatcatgatgatgaggtgcgctagattcgtcccacgcttctgcgcagaccaccccttcctcttctttatccaacattcaaaaaccaacgggatcctcttctgtggccgctttagcagcccctag

SEQ ID NO: 134001 - DNA, 579 bp, synthetic construct
  misc_feature 1..579: note = Description of Artificial Sequence: Synthetic coding sequence
  source 1..579: mol_type = other DNA
atggacgtcctagccgaggccaacggcaccttcgccctgaacttacttaagaccctggggaaagacaattctaaaaatgtgtttttcagcccaatgagtatgtcttgcgcgctagccatggtctatatgggtgcaaagggaaacacggcagcccagatggcacaaattctgagcttcaacaaatccggtggcgggggcgatattcaccaaggattccagtcgttgctgacagaggtaaacaaaacagggacccagtatctcctgcgcatggcaaacagagaaagttatgatatggagagcgtgctcagaaatcttggcatgaccgatgccttcgagttaggcaaggccgatttttcgggcatgtctcaaaccgacctgtcgctgagcaaggtggtccacaagtcatttgtggaagtgaatgaggaaggcactgaggctgccgctgccacggctgcaattatgatgatgaggtgtgccagatttgtgccgaggttttgcgccgaccaccctttcctcttcttcatccagcactctaagaccaatggcattctcttctgtggacgtttttctagcccttag

SEQ ID NO: 134002 - DNA, 1143 bp, synthetic construct
  misc_feature 1..1143: note = Description of Artificial Sequence: Synthetic coding sequence
  source 1..1143: mol_type = other DNA
atggcgtccctcgccgccgctaacgccgaattctgctttaacctattccgggagatggacgataatcagggcaatggcaacgtgttcttctcttctcttagcctttttgccgcactggcactggtgcggctcggggcccaggacgacagtttatcccagattgataagcttctgcatgtcaacacagcctctggctatgggaacagttccaatagccagtccggcctgcagtcccagctcaagcgagtgttctcagatatcaatgcctctcacaaggactatgacctatcaatcgtgaacgggctgtttgccgaaaaggtgtacggatttcacaaggactacatcgaatgcgccgagaagctttacgacgctaaggtcgaacgtgtagatttcaccaatcatctagaagacacacggcggaacatcaataagtgggtggaaaatgaaacacacgggaagatcaaaaacgttattggagaaggaggtatcagcagcagtgccgttatggtgctcgtcaatgcggtttatttcaaaggaaagtggcagtctgcattcacaaaatcagagacaatcaactgccacttcaaatctccaaagtgttctggaaaagccgtggctatgatgcatcaggagagaaaatttaacctgtctgtgatcgaggaccctagtatgaagatccttgaactcagatataatggaggcatcaatatgtacgtgttactgccggagaatgacttatccgagatcgagaataagctgacttttcagaacctgatggaatggactaatcctcgccggatgacttctaagtacgtggaagtgttttttcctcagttcaaaatcgagaagaattacgaaatgaagcagtatctgagggccttgggactgaaagacatttttgacgaatctaaagccgacctgtccgggattgcttcaggcgggaggctttatatcagtcggatgatgcacaaaagctatatcgaagtcacagaggaagggaccgaggcaactgccgctacaggttctaatatagtggaaaagcaactgcctcaatcaaccctgtttagagcggatcacccattcctctttgtcattcgcaaagatgacattattctgtttagtgggaaggtgagctgtccatag

SEQ ID NO: 134003 - DNA, 1143 bp, synthetic construct
  misc_feature 1..1143: note = Description of Artificial Sequence: Synthetic coding sequence
  source 1..1143: mol_type = other DNA
atggcaagtctcgccgcagccaatgctgaattttgttttaacctttttcgagaaatggatgataatcaagggaatggcaatgtgtttttctcttctcttagcttgtttgcagcactggcacttgttagactgggtgctcaggatgactcattatctcagatcgataagctactacacgtgaacactgcctccggctatggtaactcctctaactcgcagtctggattacaatcccaattgaaaagggtgttttcggatatcaacgcatcacataaggactatgacctgagcattgtaaatggccttttcgccgaaaaagtgtatgggtttcataaggattacatcgaatgtgccgaaaagctctacgacgccaaagtggagcgagtcgacttcaccaaccacctagaggacacccgaaggaatatcaacaaatgggtggagaacgaaacacacggcaaaatcaagaatgtaatcggcgagggaggcatatccagctcagctgtgatggtccttgtgaacgcagtgtattttaaaggaaaatggcagtccgcatttacgaaaagtgaaacaatcaactgtcacttcaaatcacccaagtgctcagggaaagctgtcgcaatgatgcatcaagaacggaaattcaatcttagtgttatcgaagatccgagcatgaagatcctggaacttagatacaatggcggtattaatatgtatgtgctgctacccgagaacgatctgtccgaaatagagaacaaacttaccttccagaacctgatggaatggacaaacccccgcaggatgacgtcaaagtatgtggaagtcttctttccacaatttaaaatcgaaaaaaattacgagatgaagcagtacctccgcgccctgggactgaaagacatcttcgatgaatccaaggcggacttatccggaatagccagcggagggagactgtacatctccaggatgatgcataaatcctacattgaagttactgaggaagggacagaggctacagccgccaccggctctaacattgtggagaagcagctgcctcaaagtactctattccgggcagaccatccattcctcttcgtgattcggaaggacgatataatcttgttcagtgggaaggtcagttgtccgtag

SEQ ID NO: 134004 - DNA, 387 bp, synthetic construct
  misc_feature 1..387: note = Description of Artificial Sequence: Synthetic coding sequence
  source 1..387: mol_type = other DNA
atggcttcccttgccgcagctaatgccgaattctgctttaacctcttcagagagatggacgataatcaaggcaacgggaatgtatttttcagttcattatctctattcgcagccctggctctggtgagactgggcgcccaagatgacagccttagtcagattgataaactgttgcacgtaaacaccgcctcgggatacggtaacagttcaaatagccagtctggtctccagtcgcagttgaaaagggttttttccgacatcaatgccagccacaaggattatgacctgagcatcgtgaacgggctatttgccgaaaaagtgtacggctttcataaggattatatcgagtgtgcggaaaaactttacgatgcgaaagtggagagatag

SEQ ID NO: 134005 - DNA, 387 bp, synthetic construct
  misc_feature 1..387: note = Description of Artificial Sequence: Synthetic coding sequence
  source 1..387: mol_type = other DNA
atggcatccttggctgcagccaatgctgaattttgcttcaacttgttcagggagatggatgataaccaggggaatggcaatgtgtttttttcttccctctcactgttcgccgctctggcgttagttcggctcggcgcacaagatgatagtttgtcccagatcgataagcttttgcacgtgaatacggctagtggctacgggaacagctccaattcacaatcaggactgcagagccagcttaaacgtgtattctcggatatcaacgcctctcacaaggactatgacctatctatcgtcaacggattatttgccgaaaaagtctacggttttcataaagattacattgaatgtgcagaaaaactttacgatgctaaggtggagcgatag

SEQ ID NO: 134006 - DNA, 498 bp, synthetic construct
  misc_feature 1..498: note = Description of Artificial Sequence: Synthetic coding sequence
  source 1..498: mol_type = other DNA
atggcctctctggcagcggcaaacgcggaattttgctttaacctgtttcgagaaatggatgacaaccagggcaatgggaatgtctttttcagttccctgtccctgttcgccgccctggcactggtgcggctgggggcccaagacgactccctcagccagatcgacaaactacttcatgttaacacagcatccgggtacggcaacagttcaaactcgcagtcgggcctgcagtcccagcttaaacgagtcttctctgacattaatgccagccataaggattacgatctgtcgatcgtgaacggcctgtttgcagaaaaagtatacggcttccacaaagactatatcgaatgcgctgaaaagctttacgatgccaaggttgaacgcgttgacttcacaaatcaccttgaagacacaaggcggaatataaacaaatgggtggagaacgagacccacggaaaaatcaaaaacgtcataggggagggcggaatcagtagctag

SEQ ID NO: 134007 - DNA, 1092 bp, synthetic construct
  misc_feature 1..1092: note = Description of Artificial Sequence: Synthetic coding sequence
  source 1..1092: mol_type = other DNA
atggcttcactggcggccgccaatgctgagttctgcttcaatctgtttagggaaatggacgataatcagggcaatggcaacgtgttctttagctctttgtcgctgtttgcggcgcttgcgctggtcagattaggcgcgcaggatgatagtctctctcagattgataaatccggtctgcaatcacagttgaaaagagtcttctcggacataaatgctagccacaaggactacgatctctcaattgtgaatgggctgtttgctgagaaggtgtacggctttcacaaggactacattgagtgtgccgagaaactatacgatgctaaagtggaaagggtcgatttcactaatcacctcgaggacactaggcgcaacatcaacaagtgggtagagaacgagacgcatggaaagattaagaatgtgattggcgaggggggcataagctcatctgctgtgatggtgctagtcaatgctgtgtattttaagggaaagtggcagtctgcctttacgaaatcagagaccatcaattgccacttcaagtctcctaagtgttcaggcaaagctgttgccatgatgcaccaggagagaaaatttaatctgtcagtaatcgaggatccttcgatgaaaatcctcgaacttcgttacaacggcgggattaatatgtatgtcctcctccccgaaaatgacctgagcgagatagaaaataaacttaccttccagaacttgatggagtggacgaacccgcggcgcatgacttccaaatatgtcgaggtgtttttcccgcaatttaagattgagaagaattacgaaatgaagcaatacctgcgcgccttgggactcaaagacatcttcgatgagagtaaagccgatctgtccgggatcgcctctgggggtagactttacataagccgaatgatgcataagagctacatcgaggtgacggaagagggaaccgaggctacagccgcaaccggcagcaacatcgttgagaagcagttacctcagtccacactgttcagagccgaccatcccttcctgttcgtgatacgtaaagatgacattatcctcttctcagggaaggtaagctgtccatag

SEQ ID NO: 134008 - DNA, 1143 bp, synthetic construct
  misc_feature 1..1143: note = Description of Artificial Sequence: Synthetic coding sequence
  source 1..1143: mol_type = other DNA
atggcctcactggccgctgcaaacgctgaattctgctttaatctgtttagagaaatggatgacaaccaggggaacgggaatgtctttttctcttcattgagcctctttgctgcgctggcgctggtgaggcttggcgcccaggatgatagtctcagtcaaattgacaaacttctgcacgtcaacacagcctctggatatggaaactctagcaactctcagtcagggctgcaatctcagctcaaacgggtcttttctgatataaacgctagtcataaagattacgatctatcaatcgtgaacggattgtttgcagaaaaagtgtacggcttccataaagattacattgagtgcgcggaaaaactgtacgacgccaaggtggagagggtggacttcactaaccaccttgaagacactcgtcgtaacatcaataagtgggttgaaaatgagactcatgggaagatcaagaacgtgatcggagagggaggaataagctcctctgccgtgatggtgctggtgaacgccgtgtattttaagggtaagtggcaaagtgccttcacaaagtccgagacaattaactgtcatttcaaatccccaaaatgctctggtaaagcagtagcgatgatgcatcaagagcggaaattcaacctgtctgtgattgaagatccttcaatgaagattctcgagctccgatacaacggcggcatcaatatgtacgtcctcctgcctgaaaatgacttgtcagagatcgagaacaagctgaccttccagaacctcatggaatggactaatcctaggaggatgacttccaagtatgtggaggtcttcttcccccaattcaagatcgagaagaactacgaaatgaaacagtaccttagggcactgggcctgaaagacatcttcgatgagtctaaagctgatctttcagggattgcgtcaggaggtcgcctgtatatctcaaggatgatgcacaagagctacatcgaggtgactgaagagggcaccgaggctacagccgcgacaggctctaatatcgtggaaaagcaactgccccagagcacactgtttcgcgcagaccacccatttctttttgtcatcagaaaagacgacatcatccttttcagcggcaaagtttcatgcccctag

SEQ ID NO: 134009 - DNA, 1125 bp, synthetic construct
  misc_feature 1..1125: note = Description of Artificial Sequence: Synthetic coding sequence
  source 1..1125: mol_type = other DNA
atggacgacctttgcgaagccaatggaacttttgccatctccctctttaagatcctcggtgaggaagacaattctcggaatgtattcttttctcccatgtcaatttcttcagcgttagctatggtgttcatgggcgctaaaggatcaactgctgcgcagatgagccaggctctgtgtctctacaaagacggagatatccaccggggtttccagagcttactttctgaggtgaaccgtactggtacacagtacctgctgaggaccgcgaacaggctctttggcgagaaaacctgcgatttcctgcccgatttcaaggaatactgtcagaagttctatcaggctgagctggaggaactgagtttcgccgaagacacagaagagtgccgaaaacatatcaacgactgggtcgcggaaaaaaccgagggaaagatttccgaggtgctcgacgcgggcactgttgacccccttaccaagctggtgctggtgaatgctatttattttaagggcaagtggaacgaacagttcgaccggaagtacactcgcgggatgctctttaagactaacgaagagaagaagacagtgcagatgatgtttaaggaagctaagtttaagatgggttacgcagacgaagtacatacacaggtgcttgagctgccctacgtggaggaagaattgtcgatggtgattctgttgcccgacgataacaccgatctggcagtggtggagaaagcgctcacatatgagaagtttaaggcatggacgaatagtgagaagctcactaagtcaaaggtgcaagttttccttccaagactcaagctcgaagagtcatacgacctggaaccatttctgcggcgcctgggaatgatcgacgcattcgatgaagcaaaggccgatttcagcggcatgtcaacggagaagaacgtgcccctgtccaaagttgcccacaagtgcttcgtggaggtgaacgaagagggaacggaagccgctgctgccactgccgtcgttcggaactccagatgctcgagaatggagcccagattttgcgctgatcacccctttctattcttcattcgtcaccacaaaaccaactgtatactgttctgcgggagattcagctctccttag

SEQ ID NO: 134010 - DNA, 1125 bp, synthetic construct
  misc_feature 1..1125: note = Description of Artificial Sequence: Synthetic coding sequence
  source 1..1125: mol_type = other DNA
atggacgatctctgcgaggcgaacggcacctttgcgataagtctgtttaaaatactgggcgaggaggataactcccgcaatgttttctttagtcccatgtccatatctagtgccttggcgatggtttttatgggggcaaaagggtctacagcggctcagatgagtcaagccttgtgcctatataaggatggcgacatccataggggctttcagtcactcctttcggaagtaaatcggaccggaactcagtacttgctccggaccgctaacagactcttcggggagaagacctgcgacttcctacctgatttcaaggagtactgccaaaagttctaccaggctgagctggaggaactctcctttgccgaggataccgaagaatgtcgcaagcacatcaatgattgggtggcggagaaaacagaagggaaaatcagcgaggtactggatgcagggacagtcgatccactcactaaactagtccttgtcaacgcaatctatttcaagggaaaatggaatgaacagtttgaccggaagtatactaggggaatgctcttcaaaaccaacgaggaaaaaaagaccgttcaaatgatgtttaaagaggcaaagtttaagatgggttacgccgatgaggtgcatacacaggtgttggaattaccttatgtggaggaggaactaagtatggtaattctgttgccggacgacaacacggatcttgcagttgtcgagaaggccctgacctacgaaaaattcaaggcctggaccaactctgaaaagctgacaaagtcgaaggtacaagtctttctccccagactgaagctcgaagagtcctatgacctggaacctttccttaggcggctggggatgattgatgctttcgatgaggcaaaggcagacttttccgggatgagtacggagaagaatgtgccactaagcaaggtcgctcataagtgcttcgtggaggttaacgaggagggaactgaggcagccgcagctacggccgtcgttaggaattcgaggtgctctaggatggaaccaaggttctgtgctgaccacccatttttgttcttcatccgacatcataagaccaactgcattctgttttgcgggcgcttttccagcccttag

SEQ ID NO: 134011 - DNA, 495 bp, synthetic construct
  misc_feature 1..495: note = Description of Artificial Sequence: Synthetic coding sequence
  source 1..495: mol_type = other DNA
atggacgatctgtgcgaggcaaatggaacatttgccatttcactgttcaaaattctgggagaagaagacaatagcagaaatgtattcttttcccctatgtccatctcatcagccctcgctatggtcttcatgggcgctaaaggaagtaccgccgcacagatgagccaggccctttgcttgtacaaggatggggacattcaccgtgggtttcagtccttactctcagaggtcaatagaacagggacacagtacctactccgcacagcaaaccgattatttggcgagaagacttgtgactttttgccagatttcaaggagtattgccaaaagttttaccaggccgagctcgaggagctaagctttgccgaggataccgaggaatgtcggaagcatattaacgactgggtggcagagaaaacagaaggaaagatatcagaagtgctggacgccgggactgttgatccccttaccaagctggtactcgtgaatgcttag

SEQ ID NO: 134012 - DNA, 375 bp, synthetic construct
  misc_feature 1..375: note = Description of Artificial Sequence: Synthetic coding sequence
  source 1..375: mol_type = other DNA
atggacgacttatgcgaagccaatggtacgtttgcaatatcattgtttaaaatcttgggagaagaagacaatagtcgaaatgtattcttttcacccatgtccattagctcagcactggctatggtgttcatgggtgcgaaaggcagcaccgcggctcaaatgtcgcaagctctgtgcctgtataaggacggagatattcatcggggcttccagagcctgctcagcgaagtcaatcgcacaggaacgcagtacctgctcagaaccgccaaccgcctcttcggggaaaagacctgcgactttctccctgattttaaagagtattgtcaaaagttctaccaggcagagcttgaggagctcagtttcgcggaagattag

SEQ ID NO: 134013 - DNA, 579 bp, synthetic construct
  misc_feature 1..579: note = Description of Artificial Sequence: Synthetic coding sequence
  source 1..579: mol_type = other DNA
atgttgttcaagaccaacgaagagaagaaaactgtccagatgatgtttaaagaggcaaagtttaaaatgggatatgctgacgaggtgcacacgcaggtgcttgaactgccttatgttgaggaggagctgtccatggtgattttgctgcctgacgataacaccgacctggccgtggtggagaaggctttgacttacgaaaaattcaaggcctggaccaattcagaaaagctgaccaaaagcaaggtccaggtcttccttccccggctgaagctcgaagagagctatgacctcgagccgttccttcgcaggctcggtatgattgacgcattcgacgaagctaaggcagatttctccggcatgagcacagagaaaaatgtaccactttcaaaggtggcccacaaatgcttcgtagaggtgaacgaggagggtacagaggctgcggctgccactgcagttgtccggaatagccggtgttcccggatggagcccaggttttgcgcagaccacccgtttctctttttcataagacatcataagaccaactgtatcttgttctgcggtaggttttcttccccttag

SEQ ID NO: 134014 - DNA, 1131 bp, synthetic construct
  misc_feature 1..1131: note = Description of Artificial Sequence: Synthetic coding sequence
  source 1..1131: mol_type = other DNA
atggagacattatccaatgcctccggaaccttcgcgattaggctgctgaagatcctatgtcaagataaccctagccacaacgtgttctgctctccagtgagcatcagcagcgctcttgccatggtgctgctgggagcaaaaggtaacaccgctacgcagatggctcaagcactttccttgaataccgaggaggatatccatcgggcgtttcagtccctcttgacagaggtgaacaaggccggaacccagtaccttcttagaaccgcaaatcgcttattcggggaaaaaacctgccagtttctcagtacctttaaagaatcttgcttgcagttctaccacgctgagttgaaagaactaagcttcatccgtgcggccgaggaatctcggaagcacatcaatacctgggtcagcaaaaagacagaaggaaagatagaggagctcctccctggttcaagcatcgacgccgaaacccggctggtgctcgtgaacgccatctattttaaggggaaatggaatgaaccctttgatgaaacttacacccgtgagatgcccttcaagatcaaccaggaggagcaacgacccgtccagatgatgtatcaagaagcaacatttaaactggctcacgtcggagaagtgcgagctcagctcttggagctcccctacgcaaggaaagagctgagcttactggtgctcctccctgacgatggcgtagagctgtctaccgtggagaagagcctgaccttcgagaaactgaccgcttggactaagccagactgcatgaaatcaaccgaagttgaagtgctgctccctaagttcaaattacaggaagactatgatatggagtcagtgttgcggcacttggggatcgttgacgctttccagcaagggaaggccgatcttagcgcgatgtccgccgagcgtgacttatgtctctccaaatttgtccataagagctttgttgaagtgaatgaagaagggaccgaggcagctgctgcctcctcatgtttcgtggtggcagagtgttgtatggagagtggccccagattttgcgcagatcaccctttcctcttttttattcggcataatcgggctaactctatcttgttttgtggacgattcagcagtccctag

SEQ ID NO: 134015 - DNA, 1104 bp, synthetic construct
  misc_feature 1..1104: note = Description of Artificial Sequence: Synthetic coding sequence
  source 1..1104: mol_type = other DNA
atgagctccccccctcctgcccgctcggggttctaccggcaggaagtgacaaagaccgcttgggaggtcagagctgtataccgagacttacagcctgtgggcagtggtgcttacggagctgtatgttccgccgtggacgggaggacgggcgccaaggtggctatcaagaagctgtataggccttttcagagcgagctgtttgccaaacgcgcataccgagagctgcggttgttgaagcatatgcgccacgaaaatgtgattggcttactcgatgtgttcacacccgatgagaccctggatgattttactgatttctacctggtgatgccatttatgggaactgacctcggcaaattgatgaaacacgagaaactaggtgaagaccgcattcagttcctggtgtaccagatgctcaaaggactgcggtacattcatgctgccggtattattcacagagatctgaagccggggaacttggcagtcaatgaggattgcgagttaaagatattggactttggcttggctagacaagccgactcagagatgaccggatatgttgtgacacggtggtatcgggcccccgaggtcattttaaactggatgaggtatacgcagactgtggacatctggagcgtggggtgcattatggccgagatgattactgggaagaccctctttaaaggctctgatcacctggaccagctcaaagaaatcatgaaggttacaggaaccccgcctgccgagtttgtccagcggttacaatccgatgaagccaagaactacatgaagggtctcccggagctggaaaagaaagacttcgcttccatcttgacgaatgctagcccattggctgttaatcttttggagaagatgctcgtcctggatgccgaacagcgggtgacggctggagaagccctcgcccacccctatttcgagtcgttgcatgacaccgaagatgagcctcaggtccagaaatacgacgattcctttgatgatgtggatcgcacactcgacgaatggaagcgcgtcacctacaaggaggtactgtcatttaaacccccccggcagctgggagccagggtgtccaaagagacccctctgtag

SEQ ID NO: 134016 - DNA, 1500 bp, synthetic construct
  misc_feature 1..1500: note = Description of Artificial Sequence: Synthetic coding sequence
  source 1..1500: mol_type = other DNA
atgaagcattcattgaacgccctgcttatattcctgataataactagtgcctggggcggctcaaagggccccctggatcagctggagaaaggaggagaaacagctcaatcggccgatcctcagtgggagcagctcaataataagaatttgtccatgccactcttaccagcggactttcataaggagaatactgtgacaaatgactggatacctgagggggaagaggatgatgattatctggacctcgagaagatctttagcgaagacgatgattacattgatatcgtcgactctctctcggtttctccaactgatagtgacgttagtgcaggtaatatactccagcttttccatggcaagagcaggattcaacgactcaacatcctcaatgcaaagtttgcatttaacttgtatcgagtgcttaaagaccaggtgaatacgttcgataatatcttcatagccccagttggaatttccaccgcaatgggtatgattagcctaggactgaagggtgaaacacacgagcaggtgcactcaattctgcattttaaggacttcgtcaatgcttcttccaagtacgaaatcaccactattcacaatctgttccgaaagctcactcaccgactgttccgccggaattttggatacactctgcgaagtgttaatgacttgtacattcagaaacagtttcccatcctcctggacttcaagacaaaggtgcgcgagtactacttcgccgaagcccaaatagccgatttcagtgaccctgctttcattagcaagactaataaccatattatgaaacttactaaaggactgatcaaggatgcactcgaaaacatcgacccggctacacagatgatgatcctgaactgcatctatttcaaagggtcctgggtcaacaagttccctgtcgagatgacacataatcacaatttccgcctgaatgaacgggaagtggtcaaagtgagtatgatgcagacgaaaggaaactttctcgcggcaaacgaccaggagctggattgcgatatcctgcagttggaatacgtaggggggatctcgatgctgattgtagttccccataagatgtcaggtatgaaaaccctggaggcacagctgacccccagagtcgtcgaaaggtggcagaagtctatgaccaatcggactcgggaggtgctcttgcccaagtttaagctcgaaaaaaattataacctcgttgagagcctgaagctgatgggcataagaatgctgttcgataaaaatggtaatatggcaggaatctctgatcagcggattgctatagatctgtttaagcaccagggtaccattacagtgaacgaggagggcacccaagcgacaacagtcacaaccgtcggatttatgcccctgagcacccaggtgagattcaccgttgacagaccgttcctgttcctgatctacgagcaccggaccagttgtctcctgttcatgggccgcgtagccaaccctagccgaagctag

SEQ ID NO: 134017 - DNA, 1197 bp, synthetic construct
  misc_feature 1..1197: note = Description of Artificial Sequence: Synthetic coding sequence
  source 1..1197: mol_type = other DNA
atgaactggcacttgcctctttttctgctcgcttccgtgactctgcctagtatttgctcacattttaacccactgagcctggaggaactcggatctaacaccggcatccaggtgttcaaccagatagtcaaaagtaggccacatgacaatatcgtcattagccctcatggcattgctagtgtgttgggaatgttgcagctgggggctgacggaagaaccaaaaagcaactcgccatggttatgcgctatggcgtgaatggtgttggtaaaattcttaaaaaaattaacaaagcaattgtgtccaagaaaaataaggacattgttactgttgctaatgctgtctttgtaaaaaacgcgtctgagatcgaagtgcccttcgttaccaggaacaaagatgtctttcagtgtgaggtgcggaacgtgaattttgaggatcccgcgtctgcctgtgacagtatcaacgcatgggtgaagaatgaaacgcgggacatgattgataatcttttgtctcctgacctcatcgacggtgtgttaacacggctggttctggtgaacgcagtctactttaaggggctatggaaaagcaggtttcagcccgagaataccaagaagagaacgtttgtggccgcagacggaaagtcatatcaggtcccaatgctggcccagctaagcgtgttcaggtgcgggtcaacatctgcccccaacgatctgtggtataactttatagaacttccatatcacggcgagagcatcagcatgctgatcgcgctgcctacagaaagtagcacccccctctcggctattatcccacacattagtacgaaaactatcgattcttggatgtctataatggttccaaagagagtgcaggtcatcctcccgaaattcacagctgtggctcaaaccgacctcaaggagccactgaaggttctgggcattactgatatgttcgattcttcaaaggccaattttgccaagatcacaaccggatctgaaaaccttcacgtgagtcacattctccagaaagccaagatcgaggtatctgaggacgggactaaagcctctgcagccacgactgctattctgatcgcccggagctcaccgccttggttcatcgtcgataggcctttcctgttctttatccgccataatccgaccggcgcagtgctctttatgggacagattaataagccctag

SEQ ID NO: 134018 - DNA, 1194 bp, synthetic construct
  misc_feature 1..1194: note = Description of Artificial Sequence: Synthetic coding sequence
  source 1..1194: mol_type = other DNA
atgaattggcacttgccactttttttacttgccagtgtgactttacccagcatctgttcccattttaaccctctatcactagaggaactggggtcaaatacaggtattcaagtgttcaaccaaatagtgaagtcccgaccacatgataatattgttatcagccctcacggtatcgccagcgtcctgggtatgctacagctgggagcggatggacgcactaagaagcaattagccatggtcatgcgctacggcgtcaacggcgttgggaagatcttgaagaagattaataaggccattgtgtccaagaagaacaaggatatagtgaccgtggctaacgcggtcttcgttaagaatgctagcgagatcgaggtacctttcgtcactaggaataaggatgttttccagtgtgaggtacggaatgtgaacttcgaagatccagctagcgcatgtgacagtatcaatgcttgggtcaagaacgaaaccagggacatgatcgacaatctgttatctcctgaccttatcgatggagtactgaccaggcttgtactagtgaatgcagtttacttcaagggattatggaaatctagattccaaccggagaatacaaaaaagaggacattcgtggccgccgatggcaagagttatcaagtgccaatgctagcccaactctccgtgtttcgatgtgggtctacttcagccccaaatgatctatggtataatttcatcgaactcccataccacggcgaaagcatctctatgctcatcgccctacctactgagtcatctacccctctttcagccatcatcccacatatctctactaagacaatcgatagctggatgtccataatggtgcctaagagagtccaagtgatcctgccaaagttcaccgctgtcgcccagaccgacctgaaggaacccctgaaagtcctgggaattactgacatgtttgactccagcaaagcaaactttgctaaaattacacggagtgaaaatctgcacgtgtcacatatcctgcagaaagctaagattgaagtgagcgaagacgggacgaaagcttccgccgctacgacagccatccttatcgctcggtcatcaccaccctggttcattgtcgatcgcccattcctgtttttcattaggcataacccaacaggtgctgtgctgttcatgggccagattaataagccttag

SEQ ID NO: 134019 - DNA, 1194 bp, synthetic construct
  misc_feature 1..1194: note = Description of Artificial Sequence: Synthetic coding sequence
  source 1..1194: mol_type = other DNA
atgaattggcaccttccgctgttcctgctcgccagcgtaactctaccctcaatctgcagtcacttcaaccccctgagtctcgaggagctggggtccaataccgggattcaggtattcaatcaaattgtgaagtcaaggccacacgacaatatcgtcataagtccacacgggatcgctagcgtgctggggatgttgcagctgggggccgatggaagaaccaagaagcaattggccatggtgatgcggtacggcgtgaacggcgtaggtaaaattctgaagaaaataaataaggctatagtgagtaagaagaacaaggatatagtcaccgtggcaaacgccgtatttgtgaaaaatgcatctgaaatcgaggtcccattcgtgactcgcaataaggatgttttccagtgtgaagtcaggaacgtaaacttcgaggatcctgcctctgcttgcgacagtattaacgcatgggtgaaaaatgagacccgggatatgatcgataatcttctgtcaccagatctgattgacggagtccttacaaggctcgtgctggtgaacgccgtgtacttcaagggactgtggaagtcccgattccaacccgagaacaccaaaaagcggaccttcgtggcggcggatggaaagtcttatcaagtgcccatgttagcacagctgagtgtatttcggtgtggttctacgtcggcccccaatgacctgtggtacaattttatcgaattgccgtatcacggcgagtccatctccatgcttatagccctgcccaccgagagttccacacctctttccgcaatcattccacacatttccacaaaaactatcgactcatggatgtctataatggtgccaaaacgagtgcaagtcatactgcccaagttcaccgctgttgcccagaccgatctcaaggagcccttgaaggtcctagggattactgatatgtttgattcaagcaaggcaaactttgcgaagataacaaggtctgaaaacctacatgtgagccacatcttgcagaaagctaaaatcgaggtgtctgaggacgggacaaaggctagtgccgccaccaccgccatccttattgcgcgttctagcccaccttggtttatagtcgaccgtccatttttattttttatccggcataatcccacaggggcggtgctttttatggggcagattaataagccctag

SEQ ID NO: 134020 - DNA, 129 bp, synthetic construct
  misc_feature 1..129: note = Description of Artificial Sequence: Synthetic coding sequence
  source 1..129: mol_type = other DNA
atgaactggcacctccccctgtttctcctcgcctcagtcaccctaccttctatctgcagtcacttcaatccactttcactggaagaactggggtctaatacaggcatccaggtttttaatcagatctag

SEQ ID NO: 134021 - DNA, 831 bp, synthetic construct
  misc_feature 1..831: note = Description of Artificial Sequence: Synthetic coding sequence
  source 1..831: mol_type = other DNA
atgaattggcaccttcccctgttcctgctcgcatctgtgacgctccccagtatttgctcccacttcaatccactgtccctggaggagctgggcagtaatacaggaatacaggttttcaaccaaatagttaaaagcagaccacacgataatattgtgattagcccacatggcatcgcctcggtactcggaatgctgcagttgggagctgatggacgaacgaaaaaacaactggccatggtcatgcggtacggggtcaacggggtaggaaagatactcaagaagatcaacaaggctatcgtgtctaaaaaaaataaggacatcgtaacagtggcgaatgccgttttcgtgaagaatgctagtgagatcgaggtcccttttgtaacccggaataaggatgtgtttcagtgtgaggttaggaacgtgaactttgaggatcctgctagcgcatgtgacagcattaacgcctgggtaaaaaatgaaacaagggatatgatagacaatcttctgagccccgatttgatcgacggcgtgctgacacgcctcgttttggtaaacgccgtgtattttaagggactatggaaaagcagattccagcccgagaacacaaagaaacgaacatttgtcgctgcagacggtaagtcctatcaggtgccgatgctggctcagctgtctgtattccgctgcgggtcaacaagcgccccaaatgacttgtggtacaatttcatcgagttgccttaccacggggagagtatctcaatgctgatcgccctgcccacagagagcagtactcccctctccgctatcatcccccacatatccacgaaaacctag

SEQ ID NO: 134022 - DNA, 1230 bp, synthetic construct
  misc_feature 1..1230: note = Description of Artificial Sequence: Synthetic coding sequence
  source 1..1230: mol_type = other DNA
atgtcggattgtcgcagtagcttagtggaggggactatgaattggcaccttccgctgttcctacttgcttccgttacccttcccagcatctgctcccacttcaatccattgtccctcgaggaactgggatccaacacagggattcaggtcttcaaccagatcgtgaagagccgaccccacgataacattgtgatcagtccgcacggaattgcgagcgttctggggatgctgcagctgggggccgacggcaggacaaagaagcaactggcgatggtgatgagatacggagtcaatggcgtgggcaagatcctgaagaaaattaataaggccatcgtaagcaaaaagaataaggacattgttaccgtcgctaacgccgtctttgtgaaaaacgccagtgaaattgaggtcccattcgtcacacggaataaagacgtcttccagtgtgaggttcgcaacgtgaattttgaggatcctgccagtgcatgtgatagtatcaacgcctgggtgaaaaacgagacaagggacatgattgataacttgttgagccccgacctcatagacggggtcctaacccggttggttctcgtgaatgctgtgtactttaagggtctgtggaaatctcggtttcagcccgagaatactaaaaagcgaacgttcgtggccgccgatggtaaaagctatcaagtacccatgctggcacagcttagcgtcttccgctgcggtagcacaagcgccccaaacgacctttggtacaatttcatcgaacttccctaccatggggagtcaatctcaatgctgatagccctcccaactgagtccagcacacccctgtccgctattatcccccacattagcactaagaccatcgactcctggatgtcaattatggtgcccaagcgggtgcaggtgatcctgccaaagtttactgccgtggctcagacggatctaaaagagccgctaaaagtccttggaatcacagatatgtttgactcatctaaagccaatttcgccaaaatcaccaggtccgaaaatcttcacgtttcacatattttacagaaggccaaaattgaggtttcagaagatggcacaaaggcaagtgcggccactaccgccatattaatagccaggtcttcccccccttggtttatcgtcgacaggccctttctgtttttcatcaggcacaatccaacaggggcggtcctttttatggggcagatcaataagccctag

SEQ ID NO: 134023 - DNA, 264 bp, synthetic construct
  misc_feature 1..264: note = Description of Artificial Sequence: Synthetic coding sequence
  source 1..264: mol_type = other DNA
atgaattggcacctcccactatttctcctggccagtgtgacactcccatccatttgcagccacttcaaccccctcagcctggaagaactgggatccaacaccggcatccaggtgtttaaccagattgtgaagtccaggccacacgacaatatcgttatctctccacacggcattgcatcagtgttgggaatgcttcagttgggcgccgacggccgaaccaagaaacagctcgccatggtgatgaggtatggcgtcaacggttag

SEQ ID NO: 134024 - DNA, 1257 bp, synthetic construct
  misc_feature 1..1257: note = Description of Artificial Sequence: Synthetic coding sequence
  source 1..1257: mol_type = other DNA
atgcaggcccttgtgctgctgctgtgtattggtgcattgcttggccactcttcttgccaaaaccctgcgtctcctccagaagaaggctcccccgatcccgacagcaccggtgctctagtggaagaggaggatcccttcttcaaagtgccggtaaacaaactggcggccgccgtgtctaactttggatacgatctttacagagtaaggtcatcaacctcccccacgacaaatgtgctgctgtcccctctgtcagtggctacagcactgtctgctctgagcctgggggcagagcaacgaacggagagtattatccatcgtgccctgtattacgacctgatctcatctcctgacatacatggaacctataaggagttgctcgacacagtgacagcgccccagaagaacctgaaaagtgcttctaggatcgtgttcgagaagaagctgcgaattaagagttctttcgtagctcccctggagaaaagctacggcactcgccccagagttcttacgggcaaccctaggctggacttgcaggaaataaacaattgggtccaggcacagatgaaagggaagcttgcgcgctcaacaaaggagattcccgatgagatctcaatcctactcctgggtgttgcccactttaaaggccagtgggtcaccaaatttgattcgcgaaagacgtccctcgaagacttttacctagatgaagagaggacagtgcgggtgccaatgatgtcagatcccaaggcagtgctgcgttatggcttagattccgacctgtcctgtaaaatcgcacaactaccgcttacaggctccatgtctatcattttctttttacccctaaaagtaacacaaaacctcactttgattgaggaaagcctcacatcagagttcattcacgatatagaccgggagctgaagaccgtgcaagcggtcctgactgtgcccaagctgaaactatcttatgagggcgaggttacgaaaagccttcaggagatgaaattgcagtctctattcgattcaccagacttttctaagattaccgggaaaccaatcaagctgacgcaggttgaacacagagcggggttcgagtggaacgaagacggcgcaggtactactccctcacccggcctccagccagctcacctcacctttccccttgactatcacctgaaccagccatttattttcgtgctgagggacaccgatacgggcgctctcctattcatcggcaagatcctagatccgaggggtccctag

SEQ ID NO: 134025 - DNA, 1233 bp, synthetic construct
  misc_feature 1..1233: note = Description of Artificial Sequence: Synthetic coding sequence
  source 1..1233: mol_type = other DNA
atggcttttttgggactgttttctctgctggtcctgcagtcaatggccacaggcgccacattccccgaagaagcaatcgctgacttatctgtgaacatgtacaacaggctccgggcaactggagaagatgagaatatactgttcagcccattgtcaatcgccctggctatgggcatgatggagctgggagcccaggggtctacgcaaaaagagattagacactctatgggctatgattcgctcaaaaatggggaggagttctcattcctgaaggaatttagcaatatggtgacagccaaggagagccagtatgttatgaaaatcgccaatagcctcttcgtacagaacgggtttcacgtgaatgaggagttcctccagatgatgaagaagtattttaacgctgccgtgaaccacgtggacttttcacagaacgtcgcagtagctaattacatcaataagtgggtagaaaataacacaaataatctggtcaaggacttggtgtcaccccgcgacttcgacgccgctacgtatctggctctgatcaatgcggtctatttcaagggcaactggaaatcccagtttcgccccgagaacacacgcacctttagttttaccaaggacgacgagagcgaagttcagatccctatgatgtaccagcagggcgagttctactatggagagttcagtgacggctccaatgaggccggaggaatctatcaggtgctggagattccatacgaaggtgatgaaatcagcatgatgttggtcttgagcagacaggaagtcccattggcaactctggagcccctggtcaaggcgcagctggtcgaagagtgggcaaattccgtaaagaagcagaaagtcgaagtgtatctgcccaggtttactgtggaacaggagatcgacctgaaggatgtactgaaagctctgggcattactgaaatctttattaaggacgctaaccttactggactctcagataacaaggagatctttctttctaaggccatacataagtcatttctagaggtgaatgaggaaggttctgaggcagctgccgtttcggggatgatagcaatttctcgcatggccgttctctatcctcaggtgattgtggaccacccattttttttccttatcagaaatagaaggacggggaccatcctatttatggggagagttatgcacccagagactatgaataccagcggacacgatttcgaggaactgtag

SEQ ID NO: 134026 - DNA, 1233 bp, synthetic construct
  misc_feature 1..1233: note = Description of Artificial Sequence: Synthetic coding sequence
  source 1..1233: mol_type = other DNA
atggcattcctgggcctgttcagcttactagtgctccagagtatggctaccggagctacctttccggaggaggctattgccgatctaagcgtgaatatgtacaataggctacgggctaccggagaggacgaaaacatactattttcccccctgagtatcgccctcgcaatgggcatgatggagctgggcgcacaagggagcactcagaaagaaattcgccacagtatggggtacgatagccttaaaaacggcgaggagttcagcttccttaaagaattcagtaacatggtcaccgctaaggagtctcagtatgtaatgaagatagctaactcactgtttgtgcagaacgggtttcatgtgaacgaagagtttctgcagatgatgaagaaatacttcaacgcagctgtcaatcacgtcgacttctcacagaatgttgccgttgccaactatataaataaatgggtggaaaataatactaacaatctcgttaaggacctagtcagccccagggatttcgacgctgccacgtacttggccctcattaacgctgtgtatttcaagggcaattggaaaagtcaattccgtcctgaaaacactcgaaccttcagcttcaccaaggatgacgaatctgaggtacagatccccatgatgtaccagcaaggggagttctactatggggagtttagcgacgggagcaacgaggctgggggcatttatcaggtgctggagataccatatgagggagatgagatctcaatgatgttggttctcagccggcaggaagtgccgctggccacactggagccccttgtgaaagctcagctggtagaagagtgggctaatagcgtcaaaaagcaaaaggtggaggtgtatctgccccgctttaccgtcgaacaggaaattgatctgaaggacgtgctgaaagcgttgggcatcacggagatttttatcaaggacgcgaacctgaccggtctttccgataataaggagatatttctgtccaaggctattcacaagagtttcctggaagtcaacgaggagggtagtgaagcagccgccgtgagcggaatgatcgctatctctcgcatggccgtactctaccctcaggtcattgtagaccacccctttttttttctgattcgaaataggaggacaggcaccattctgtttatgggacgggtcatgcacccggagaccatgaacaccagcgggcatgattttgaagaactatag

SEQ ID NO: 134027 - DNA, 738 bp, synthetic construct
  misc_feature 1..738: note = Description of Artificial Sequence: Synthetic coding sequence
  source 1..738: mol_type = other DNA
atggccttcctgggacttttttcgctgctcgtgctgcagagtatggccacaggtgcaacattccctgaggaagcaatcgcagatctgagtgtcaatatgtacaacaggcttcgagctacaggtgaggacgaaaatattttatttagtccgctctccatcgctctggcaatgggcatgatggagctgggagcccaggggtccacccagaaagaaatccggcattctatggggtatgattcgctcaaaaacggagaagaattttctttcttgaaagaattttctaacatggtcacggctaaagagtctcagtatgtgatgaagatagcaaacagtctgtttgtgcaaaatgggtttcatgtgaacgaagaattcctccagatgatgaaaaagtatttcaatgctgccgtgaaccatgtggatttctcacagaatgtcgccgtggccaattacataaacaagtgggtagaaaacaatactaacaacttagttaaagacctcgtgtcacccagagattttgacgccgctacgtacctggctttgattaatgctgtctattttaagggaaattggaaatcccaattccgccccgaaaacacaagaaccttttcttttaccaaggacgatgaatcagaggtgcaaatcccaatgatgtaccagcagggcgagttttactatggggagtttagcgacggctcgaatgaagccggggggatttatcaagtgttagagataccatag

SEQ ID NO: 134028 - DNA, 483 bp, synthetic construct
  misc_feature 1..483: note = Description of Artificial Sequence: Synthetic coding sequence
  source 1..483: mol_type = other DNA
atggcctttctcgggctatttagtctattggtgctgcagtcaatggccaccggtgcaacatttcctgaagaggccattgcagatttaagcgttaatatgtataatcgccttcgcgctacaggggaagatgaaaatatccttttttctcccctgtcaattgccctggctatgggtatgatggagctgggggcccagggaagcacacagaaagaaattcggcatagcatggggtacgatagtctgaaaaatggcgaggaattctcctttctgaaggagtttagcaacatggtgactgccaaggagtcccagtacgtcatgaagatcgcaaactcgctctttgtacagaacgggtttcacgtgaacgaggagtttcttcagatgatgaaaaaatacttcaacgccgctgttaaccacgtagatttcagtcaaaatgtggctgtagctaactacatcaataaatgggtcgaaaacaacacaaattag

SEQ ID NO: 134029 - DNA, 591 bp, synthetic construct
  misc_feature 1..591: note = Description of Artificial Sequence: Synthetic coding sequence
  source 1..591: mol_type = other DNA
atggtcggagggctgaaaagaaagcactcagatcttgaggaggaggaggagaggtgggagtggtcaccagccggactgcagagctatcagcaagccctgcttaggatatctttggataaagttcagcgaagccttggtccccgtgctcctagtctgagacggcacgtgctaatccataacaccctccaacaactgcaggccgcgctaagattggctcctgccccggccctgcccccggaaccgctgttcctgggcgaagaagacttcagcctctcagccactattggctctatccttagagagttggataccagcatggacgggaccgaacccccacagaaccctgtgactccactaggattgcagaacgaggtgcctcctcagcccgatcccgtgttcctggaggctctttcttcgagatatttaggcgactccggactcgacgacttcttcctggacatcgacacttccgccgtcgaaaaagagcccgctagggcgcccccagagcccccgcataatttgttctgcgctcctggaagttgggagtggaacgagcttgatcacatcatggaaataattctgggctcatag

SEQ ID NO: 134030 - DNA, 591 bp, synthetic construct
  misc_feature 1..591: note = Description of Artificial Sequence: Synthetic coding sequence
  source 1..591: mol_type = other DNA
atggtaggtgggcttaagagaaagcactcagatctggaggaggaggaggagcgctgggaatggtcacccgctggcctccaaagctaccagcaggcacttctaaggatctctttagacaaggttcagagaagcctgggcccgagggcccccagtctgcgacggcacgtgttaatacacaatactctgcagcagctgcaggctgctctaaggctcgctcccgcacccgccttgccccctgaacccctttttttgggggaggaggacttcagcctgagcgcaactataggtagcatcctccgggaactcgacaccagcatggacggaacggaacctccacagaatcctgttacgccgctcgggctgcagaacgaagtacctcctcaaccggatcccgtgttcctcgaggccttgagttctcgctaccttggagattctgggctggatgacttcttcctcgacatcgacacatctgctgtggagaaggagcccgcccgggcccctcctgagcccccacacaatctgttttgcgcacctgggtcatgggagtggaacgagctggatcacatcatggaaattattctgggtagctag

SEQ ID NO: 134031 - DNA, 369 bp, synthetic construct
  misc_feature 1..369: note = Description of Artificial Sequence: Synthetic coding sequence
  source 1..369: mol_type = other DNA
atgaagctcctgactggtctggtgttctgcagtcttgtgctgggggtgtcctccaggagttttttttcatttctgggggaagcttttgacggcgctcgcgacatgtggagggcatactccgatatgagggaggctaattatatcggctcagacaagtatttccacgctcgaggcaactacgatgcagctaaacgaggcccaggcggcgcctgggccgccgaagttatcacagacgctcgtgaaaacattcagcggttcttcggccatggcgccgaggattccttagctgaccaggctgccaacgagtggggacgttctgggaaggacccaaaccattttcgacctgctggacttccagagaaatattag

SEQ ID NO: 134032 - DNA, 369 bp, synthetic construct
  misc_feature 1..369: note = Description of Artificial Sequence: Synthetic coding sequence
  source 1..369: mol_type = other DNA
atgaagctattaacaggtcttgtcttttgtagcctagtattaggcgtgtctagcagatctttttttagctttcttggagaggctttcgatggtgcccgagacatgtggagagcgtactcagacatgagagaggccaattatatcggctcggacaagtactttcacgcacgtggcaactacgacgctgctaagagaggccctggaggcgcctgggccgcagaagtgatcacagacgctcgcgagaacatccagcggttttttgggcacggtgctgaagatagtctagcagatcaggcagcaaacgaatggggcaggtcaggcaaggaccccaatcactttagaccagcaggcctacccgaaaaatattag

SEQ ID NO: 134033 - DNA, 369 bp, synthetic construct
  misc_feature 1..369: note = Description of Artificial Sequence: Synthetic coding sequence
  source 1..369: mol_type = other DNA
atgaagctactaactggcctggtcttttgcagcctagtgctaggtgttagttctcgatctttcttttccttcctgggtgaagcctttgacggagcaagagacatgtggcgcgcatacagcgacatgcgcgaggccaactatattggttcagacaaatacttccacgctcgggggaattacgatgccgccaagagagggccagggggcgcctgggccgctgaggtgatcactgatgcccgggaaaacatacagaggtttttcggacatggcgctgaggacagcctggccgaccaggcagcaaatgaatggggacgctcgggtaaagatcccaatcactttagaccagcaggactcccagaaaaatactag

SEQ ID NO: 134034 - DNA, 369 bp, synthetic construct
  misc_feature 1..369: note = Description of Artificial Sequence: Synthetic coding sequence
  source 1..369: mol_type = other DNA
atgaaactgcttacaggtttggtgttctgcagccttgtgttgtccgtgagcagtcgatcgttcttctccttccttggggaagcttttgacggtgctagggacatgtggagggcatatagcgatatgagggaggccaactatatagggagcgacaaatacttccacgcaaggggcaattatgacgccgcgaaaagaggcccagggggggcatgggcagctgaagtaatttcaaacgcccgagaaaatatccagcgtctgactggccgcggcgcagaggactcccttgccgatcaagccgccaacaaatggggaagaagcggccgagacccgaatcatttccgacctgcaggtctgcctgagaagtattag

SEQ ID NO: 134035 - DNA, 252 bp, synthetic construct
  misc_feature 1..252: note = Description of Artificial Sequence: Synthetic coding sequence
  source 1..252: mol_type = other DNA
atgaaactgctcaccgggctggtgttttgctcgctcgtcttgtctgtgagctcacgctcctttttcagcttccttggcgaggcgtttgacggtgcccgtgatatgtggcgggcctactctgatatgagggaagctaattatatcggctccgacaagtatttccatgcaaggggaaattatgatgcggcaaagagaggcccaggaggcgcttgggccgccgaggtcatcagtctgttttcagctgaactttag

SEQ ID NO: 134036 - DNA, 369 bp, synthetic construct
  misc_feature 1..369: note = Description of Artificial Sequence: Synthetic coding sequence
  source 1..369: mol_type = other DNA
atgaaactcctgactggtctggtcttttgcagcctggtgctcagtgtcagctctaggagtttctttagcttcctgggcgaggcctttgatggcgcacgtgatatgtggagagcctacagcgacatgcgcgaggccaactacattggtagcgataaatattttcacgcaagaggaaattacgacgcagcaaaacgagggcctggcggagcgtgggcggctgaggtgatctcgaatgcaagagaaaacatacaacgtcttacgggccgcggggctgaggacagcctcgctgaccaggcagcaaacaagtgggggagatcaggtcgagatcctaatcacttcagacccgcaggattgccagagaaatattag

SEQ ID NO: 134037 - DNA, 369 bp, synthetic construct
  misc_feature 1..369: note = Description of Artificial Sequence: Synthetic coding sequence
  source 1..369: mol_type = other DNA
atgaaactgctcacagggctggtcttttgcagccttgttttatcagtcagctctcgcagtttcttttcattccttggtgaggcttttgatggagcgagagatatgtggcgcgcttacagcgatatgcgagaggccaattatatcgggtctgataaatattttcacgcacgtggaaattatgacgcagcaaagcggggcccgggtggggcctgggccgcagaggtcatatcaaacgcgcgcgagaacatacagcgcctgaccggtaggggggcggaagactccttggctgaccaggcggccaataaatggggaagaagtggacgggaccctaatcactttcgtcctgctggactccctgaaaaatattag

SEQ ID NO: 134038 - DNA, 393 bp, synthetic construct
  misc_feature 1..393: note = Description of Artificial Sequence: Synthetic coding sequence
  source 1..393: mol_type = other DNA
atgcgactgtttacaggaatcgtgttttgtagcctggtgatgggcgtgactagtgagtcatggcgttcttttttcaaggaggccctccagggagtgggcgatatgggccgcgcctactgggacattatgatatcaaatcatcaaaattctaatcggtacctgtatgctcggggcaattatgacgctgctcagcggggacccgggggggtttgggcagctaagctgatatccaggtccagggtgtacttgcaaggcctcattgattgctatctcttcggcaactcctcaacagtcctggaggactcaaagtctaatgaaaaagcagaggagtggggcaggagcggtaaggacccagaccgatttcgtcccgatgggcttcctaagaaatactag

SEQ ID NO: 134039 - DNA, 1278 bp, synthetic construct
  misc_feature 1..1278: note = Description of Artificial Sequence: Synthetic coding sequence
  source 1..1278: mol_type = other DNA
atgggagaagacgccgcccaggcggagaaatttcagcatcccggttccgacatgcgccaggaaaagccttcctccccttctccgatgccctcatctacacctagcccaagtctgaatcttggtaataccgaggaagccatccgggacaattcccaagtcaacgccgtgacagtgttgaccctgctcgataagctggtgaacatgttggatgctgtgcaagagaaccagcataaaatggaacagagacagatttctttagaaggttctgtaaaagggattcagaacgacctgactaaactgtctaagtaccaggccagcacttccaataccgtcagtaaactccttgaaaagagtcgcaaagtgtctgcccacacccgggccgtgaaagagaggatggacagacaatgcgcacaagtgaagcgacttgaaaacaatcacgcacagctattgagacgaaaccatttcaaggtgttaatttttcaggaagagaacgagatccctgcaagtgttttcgtgaaacagcctgtctccggtgccgtggagggaaaggaagagcttcccgatgaaaacaagagccttgaggagactttacataccgtagatctgtcatcggacgacgacttgcctcacgatgaggaggccctcgaagacagtgccgaagagaaagtggaggagtcacgcgcagaaaagataaagaggtcatcactgaagaaagtagatagtttgaaaaaagccttcagcagacagaatatagaaaaaaagatgaataagttggggacaaagatcgtgtccgttgagcgtcgagagaaaattaaaaagtccttgacctcaaatcaccaaaaaatatcttccggaaagtcttcaccgttcaaggtttcacccctgacttttgggaggaaaaaagttagagagggcgagtctcacgctgaaaatgaaacaaaaagtgaggacctgccaagctcggaacaaatgccaaatgaccaggaggaggagtccttcgcggaaggccatagtgaggcaagcctggctagtgccctggtcgaaggggagattgccgaggaggctgccgaaaaagcgacgtcccgaggatccaattcggggatggattcaaatatcgatctgacaatcgtggaggacgaagaggaagagtctgtcgctctagaacaggctcagaaggtgcgctatgagggatcatatgcactgacatcagaggaggccgaaagaagtgacggagacccagtgcaacccgccgtcctgcaagtgcatcagacttcctag

SEQ ID NO: 134040 - DNA, 1290 bp, synthetic construct
  misc_feature 1..1290: note = Description of Artificial Sequence: Synthetic coding sequence
  source 1..1290: mol_type = other DNA
atggcacagccgggtaccttgaatttaaacaacgaggtggtgaagatgaggaaagaggtaaagcgaatccgggttctggtcatcagaaagctcgttagatctgtcgggcgacttaagtctaagaagggaactgaggacgctctgctgaagaatcagaggcgggctcaacgtctcttggaagagatccatgcaatgaaagagctcaaaccagatattgtaactaaatctgcgctcggcgacgatattaactttgaaaagatcttcaaaaagcctgacagtaccgccacagagcgagctatagctcgtcttgccgtgcacccactacttaagaagaagattgacgttctgaaggctgcagtgcaggcgtttaaggaggcccggcaaaacgtggcagaagtcgagagtagcaagaacgccagcgaagacaaccactcagagaatacactgtattctaatgacaatgggtccaacctgcagagggaggccacagtcataagtgaacagaaggtcaaggaaactaaaatcctcgccaagaagccaatccataatagcaaagagaaaattgctaagatggaacacgggccaaaagccgtcacgatcgccaacagcccttctaagccttctgagaaggacagcgtggtgtcactcgagagccagaagacacctgctgaccctaagttgaaaaccctttctcaaaccaaaaagaacaaagggagcgactcctccctgtctggtaattcagacggtggtgaggaattctgcgaagaagagaaggagtattttgatgactcaaccgaagaacgtttttataagcagtcaagcatgtctgaagacagcgactccggtgacgatttcttcatcggcaaagtcaggcgaactcgcaagaaggagagtagctgccactccagcgtcaaagagcagaagccattagagaaggtttttttgaaagaggacacaggagagacacacggcgatacacgaaatgataaaattaaaccctcaaccgagacgcgaaaattggagagtgtattcttccacagcctttccgggagcaagtccagcagaagaaactttaaggaacaggcacccaaaacgcgtagtcttgacttcccgcagaatgaacctcagatcaagaaccaattcaataagaagttatctgggaggttggaaaataccaaacagcaattgcagctgcctcttcatccctcatgggaagcttcccggagaagaaaagaacagcagtcaaacattgccgtgttccaggggaagaagattacgtttgacgactag

SEQ ID NO: 134041 - DNA, 1296 bp, synthetic construct
  misc_feature 1..1296: note = Description of Artificial Sequence: Synthetic coding sequence
  source 1..1296: mol_type = other DNA
atgacagtgaaaactgaagcggccaagggcacactgacttacagccgcatgcggggtatggtggcgatcctcattgcattcatgaaacagagacgcatggggctgaacgactttattcagaaaattgcgaacaatagttacgcctgcaagcaccccgaagtccagagcattctcaagattagccagccacaagagcctgagctcatgaacgcaaacccttcgccccctcctagtccaagtcagcagattaacttgggcccatcctcaaatccccatgccaaaccttcagattttcacttcttaaaagtgatcgggaaaggcagctttggaaaagtgctgctagcacgacacaaagccgaggaggtgttctatgcggtgaaggtccttcagaagaaagcaatcttgaagaaaaaggaagagaagcacattatgtcagaacgcaatgtactcctcaaaaacgtgaagcacccttttctagtgggcctgcattttagttttcagaccgccgacaaactttactttgtactcgactatatcaacggcggggagctgttttatcacctccagagagaacggtgcttcctggagccgcgggctcggttctacgccgctgagatcgcgtcggccctaggctaccttcactccttaaacatagtgtatagggatctgaagccggagaatatccttctggactcccaagggcacatcgtgctgacagattttggcctctgcaaagaaaacatcgagcataattcaactacctcgacattttgcggaactcctgaatacctggcacctgaggtgctccacaagcagccttatgacaggaccgtggattggtggtgcctcggtgccgtgctgtatgaaatgctgtacggactgccccccttctacagtcgcaacacagccgagatgtacgacaatattctcaataagccactgcagctgaagccaaacatcacaaatagcgctagacatctgctcgaaggactgcttcaaaaagaccgaacaaagcgactgggcgccaaggacgacttcatggagatcaaatctcatgtctttttttccctgataaactgggacgacttgataaataaaaagatcacgccacccttcaatccaaatgttagcggtcccaacgacttgcggcattttgatcctgagttcaccgaggaacccgtaccaaacagtattggaaaatcacccgacagtgtgctggtgactgcctcagttaaagaagctgccgaggcattcctgggcttctcttacgccccacccactgactcctttctgtag

SEQ ID NO: 134042 - DNA, 1266 bp, synthetic construct
  misc_feature 1..1266: note = Description of Artificial Sequence: Synthetic coding sequence
  source 1..1266: mol_type = other DNA
atgaaacccagcaaaagattttttatctcaccccccagcagcacggcctttatgaaacagagaaggatgggactgaatgattttatccagaagatagctaataacagctatgcttgcaagcacccagaggtccaaagcatcctcaaaatatctcagcctcaagagcccgagctgatgaacgccaacccatcacctccacctagtccatcccagcagatcaatctcggaccttctagcaaccctcacgctaagccttccgattttcatttcttgaaggtcataggtaagggttcatttggaaaagtgctccttgcacgccacaaggccgaggaggtgttctacgccgtgaaagttctgcagaaaaaggcgattttaaagaagaaggaagagaagcacatcatgtcagaacgcaatgtcttgctaaagaacgtgaagcatccttttcttgtcggcctgcacttcagctttcagacagcagacaaattgtacttcgtactggattacatcaatggtggcgaattgttctaccacttacagcgggagcggtgtttcctggagccaagggccagattttacgcagcggaaatcgccagcgccttggggtacctccacagcctaaatatcgtatatcgcgatcttaagcctgagaatatcctcctggattcacagggacacatcgtgctgacggacttcggactatgtaaggaaaacatagaacacaattcgaccacatccacattctgtggcacacctgagtacctggcgcctgaagtcttacacaagcagccatatgatcggacagtggattggtggtgcttgggggcggtcctgtatgagatgttatatggattgcccccgttctactcccgtaacacagccgagatgtatgacaatattctgaataagcctctccaactcaagcccaatatcacaaacagcgctaggcatttacttgagggcctgttgcagaaagatagaactaaacggctcggagcgaaggacgactttatggagatcaagagtcacgtgtttttctctctcatcaactgggatgatttgataaataagaagattacccccccattcaacccaaacgtaagcgggcccaatgatctgaggcacttcgatcccgaattcacagaggagccagtgcctaactcgatcggtaaaagcccagacagcgtgctggtcactgcaagtgtgaaggaggccgctgaggcatttcttggattcagctacgcacccccaactgactcctttctttag

SEQ ID NO: 134043 - DNA, 1581 bp, synthetic construct
  misc_feature 1..1581: note = Description of Artificial Sequence: Synthetic coding sequence
  source 1..1581: mol_type = other DNA
atggttaacaaggacatgaacggttttcccgtcaaaaagtgttctgcatttcagtttttcaagaagcgggtgaggaggtggatcaagtcgcccatggtgagcgtggacaaacatcaatctccaagcctgaaatacaccgggagctccatggtgcacattccgccaggcgaacctgacttcgagagttccttatgccagacctgtctgggcgaacatgctttccagagaggggttctgccccaggagaacgagtcttgttcttgggagacacagtccggctgtgaggtgagggaaccgtgtaatcacgccaatatcctaactaagccagatccaaggaccttttggacaaacgacgatcccgcctttatgaagcaaagacgcatgggtttgaatgattttattcagaagatcgcgaacaattcatatgcttgtaagcaccccgaagtgcagagcattcttaaaatcagtcagccgcaggagccggagctgatgaacgccaatccatcacccccgcctagtccttcccagcagatcaatttgggcccgtctagcaatcctcacgctaagccttcggactttcacttcctgaaagttatcggcaagggcagctttggcaaggttctcttagcacggcacaaagccgaggaggtcttctacgccgtgaaagtcctacagaagaaggctatactcaagaagaaagaggaaaagcatattatgagtgagagaaacgtgctcctcaaaaacgtgaagcaccccttcctggtagggctgcacttttccttccagacagcggacaagctctactttgtgcttgactatatcaacgggggagagcttttttaccacctacagagagagagatgctttctcgagccccgcgcccggttttacgctgccgagatcgccagtgctttgggctatctccactccctcaatattgtataccgggatctgaaaccagagaatatcctgctggattcccaaggccatatcgtactcactgatttcggattgtgcaaggagaacattgagcataacagcacaaccagcaccttttgcgggacgcctgaatatctcgctcctgaagtgctccataagcagccctatgacagaacggtggactggtggtgtctcggagccgttttgtatgaaatgctctatggactgcccccgttctatagccgcaacacagccgaaatgtacgacaacatcctgaataaaccgcttcaactgaagcctaatattactaactctgcccgacacttgctcgaaggtctcctccaaaaggaccggactaagcgactgggcgctaaagacgatttcatggagattaagagtcatgtcttcttctccctaattaattgggacgatctgatcaataagaaaattacccccccctttaaccccaacgtctccggccccaacgatctccgtcactttgatcctgaattcactgaggagcctgtacctaatagcatcggcaaaagcccagatagcgtcctggtcaccgcctccgtcaaggaggcagcagaagccttcctcggtttctcttacgcgccacccacggactccttcctttag

SEQ ID NO: 134044 - DNA, 1338 bp, synthetic construct
  misc_feature 1..1338: note = Description of Artificial Sequence: Synthetic coding sequence
  source 1..1338: mol_type = other DNA
atgggcgagatgcagggtgcattggcaagagctcggcttgaaagcttgctccggcctagacacaagaaaagagctgaggcccaaaaacgttctgagtcatttctgctatctggactcgcgtttatgaagcagagacggatggggctcaacgactttatccagaaaattgctaacaattcttatgcctgcaaacatcccgaggtgcagagcatcctgaaaatttcacagccccaggagcctgagctgatgaacgcgaacccctcaccacccccttcgccctcacaacagatcaatctggggccctcctcaaatcctcacgctaagccctccgattttcattttctaaaggtgatcggaaaggggagtttcggaaaggtgcttctcgcgagacacaaggccgaggaggtcttctacgctgtgaaagtgctgcagaagaaagccatactaaagaagaaggaggagaaacatattatgtctgagcgcaacgttctcctgaaaaatgtgaaacacccatttctcgttggcctgcacttcagtttccagacagcggacaagctgtattttgtgcttgattacatcaacggaggcgagctgttctaccacttgcaacgtgagcggtgttttctggagccaagggcaaggttttacgccgccgagatcgccagtgccctcggctacctgcactctctcaatattgtgtaccgcgacctgaaacccgaaaatattttgctggatagccaggggcatattgtactgactgatttcgggctctgcaaggaaaatatcgaacacaattccacgacatcaaccttctgtggtacgcctgaatacttggctcccgaggtgctgcacaagcagccttacgatcgaaccgtagattggtggtgtctcggtgccgtgctgtacgaaatgctgtatggtctgccccccttttacagtcgcaatactgctgaaatgtatgacaacattctaaataagccccttcagttaaaacctaatattactaatagcgcaaggcatcttctggaaggcctgctgcaaaaggatagaaccaagagactgggcgcaaaggatgactttatggaaattaaatcccatgtctttttttccctcattaattgggacgacttgataaacaaaaagataactcccccatttaaccccaacgtctctggccctaatgacctgcggcatttcgatcctgaatttactgaggaaccagtccccaattctattgggaagtccccagatagcgtgctcgtaaccgctagcgtcaaggaggccgccgaggccttcttaggattttcgtacgctccaccaacggactccttcctgtag

SEQ ID NO: 134045 - DNA, 435 bp, synthetic construct
  misc_feature 1..435: note = Description of Artificial Sequence: Synthetic coding sequence
  source 1..435: mol_type = other DNA
atggtgtccgtggacaagcatcagtccccctctctcaaatacacaggatcaagtatggttcatattccccccggggaacccgatttcgaatccagcctatgtcagacttgcttgggagaacacgcctttcagcggggcgtactcccacaagagaacgaatcatgttcgtgggaaactcagtcggggtgcgaggtccgggagccttgtaaccacgcaaatattcttactaaacccgacccacgaacattctggacaaacgacgaccctgcttttatgaaacaaagaagaatgggactaaacgactttatccaaaaaattgccaataactcctacgcctgtaagcacccggaggtccagtccatcttaaagatcagccagcctcaagaacccgagcttatgaatgctaatccttcgcccccccccagcccgagttag

SEQ ID NO: 134046 - DNA, 1380 bp, synthetic construct
  misc_feature 1..1380: note = Description of Artificial Sequence: Synthetic coding sequence
  source 1..1380: mol_type = other DNA
atgtcctctcagtcaagttcgctgtctgaggcttgctcccgcgaggcctacagttcccataactgggctttgcccccagctagccgctcgaatccacaacccgcctacccatgggccacaaggagaatgaaagaggaagcgataaagccacccctcaaggcgtttatgaaacagagacgaatggggctgaatgattttattcagaaaatcgccaacaatagttacgcttgtaagcaccccgaggtgcagtcgattttgaagattagccagccccaggagcctgagctcatgaacgcaaacccttcgccccctccttcgccttctcagcagatcaacctaggaccatctagtaacccgcatgcaaaacccagtgacttccatttcctcaaagtgattgggaagggaagcttcggcaaagtgctactggctagacataaggccgaggaggtcttttacgccgtcaaagttctgcagaagaaagccatcctaaagaaaaaggaggagaagcacatcatgagcgagaggaacgttctcctgaagaacgtgaaacacccgtttttggtgggcttgcacttttcattccagactgctgacaaactgtattttgtccttgattacattaatggcggcgaattgttctatcatttacaacgagagagatgtttcctggaaccacgagctcggttctacgcggctgagatcgcctctgcgctaggataccttcatagtttgaacatcgtatatagggatctgaagcccgagaatatcttgctggattctcagggtcacatcgtgctgacagactttggtctttgtaaggaaaatatcgaacataactctactaccagcaccttctgcggtacccctgaatatttggcccccgaggtgcttcacaagcagccctatgacaggacggtcgactggtggtgcctgggagccgtgctttacgaaatgctctacggtctgccccccttttacagcagaaacaccgccgagatgtatgacaacatccttaacaaacccctgcagctaaagcccaacattaccaattccgcaaggcacctgttagaaggacttctccaaaaagacagaacaaaaaggctgggggctaaagatgactttatggaaatcaaatcacacgtgtttttttcgctaattaactgggacgacctgattaataagaagatcacacctccttttaacccgaatgtctcggggcctaatgatcttcgacactttgaccccgagttcactgaggagccagtgcccaattccattggaaaatctcccgatagcgtgctggtgacagcttctgttaaagaggcagctgaggcatttcttggtttctcttacgcgcctcctacagattcatttctttag

SEQ ID NO: 134047 - DNA, 183 bp, synthetic construct
  misc_feature 1..183: note = Description of Artificial Sequence: Synthetic coding sequence
  source 1..183: mol_type = other DNA
atggtgaataaggatatgaacggcttcccagtcaagaagtgcagcgcctttcagttcttcaaaaagcgggtaagacgctggatcaagtcccctatggtatcagttgataagcaccagagtccttcactgaagtacaccgggtcatctatggtccacatcccacctggggagccagatttctag

SEQ ID NO: 134048 - DNA, 1284 bp, synthetic construct
  misc_feature 1..1284: note = Description of Artificial Sequence: Synthetic coding sequence
  source 1..1284: mol_type = other DNA
atgcaaggcctacttacctccgggcgcaagccctcagggggagggagatgcacagggcgaggcggctggcgcggacagtggtgtctcaagccctggatgggaggcgcagacccacccaccccaaccctcagctgcctgctgctgcctgtcccccctgagcttccagaccactgttaccgcatgaacagtagccccgccggcactccctctccacagccatctagggccaacgggaacattaacttggggccaagtgccaaccccaatgctcagccaaccgatttcgatttcttgaaagtcattggaaagggcaattatggcaaagttctgctggcgaagcgaaagagcgatggggccttctatgcggtgaaagtcctgcagaaaaagagcatactgaagaaaaaagagcagtctcatatcatggccgagcggagtgtgctgctaaaaaacgtgagacacccttttctcgttggactcagatactcatttcaaacccccgagaagctgtattttgtgctggattacgtcaatgggggagagttgttctttcacttacagcgagagcgtcggttcttagaaccacgcgctcgattttacgcggcagaagttgcatcagcgattggctacttgcactccctgaatattatctatagggacctgaaacctgagaacatcctgctggattgccagggtcacgtggtcttaaccgacttcggcctctgtaaagagggcgttgaacctgaggatacaacctctacgttttgtggaactccggagtatcttgcgccagaggttttgaggaaagagccttacgaccgcgccgtggattggtggtgcctgggcgcagtgctgtatgagatgctgcatggtctaccaccgttctacagccaagacgtgagtcaaatgtacgaaaatatcctccatcagcccttacaaatccctggggggcgaactgtggccgcgtgcgatttgcttcagtctttactgcacaaagaccagcgccagcggctcgggtccaaagctgacttcctggaaatcaagaatcatgttttctttagccccattaactgggatgatctgtatcataagagattgacaccacccttcaaccccaatgtcacaggccctgccgatctgaaacacttcgaccctgagttcacacaggaagccgtctccaaatctataggttgcactcccgacaccgtcgcatcttctagcggagcctcctccgcttttcttgggttcagctatgcaccagaggacgatgatatactggactgctag

SEQ ID NO: 134049 - DNA, 1101 bp, synthetic construct
  misc_feature 1..1101: note = Description of Artificial Sequence: Synthetic coding sequence
  source 1..1101: mol_type = other DNA
atgaattcatctcccgctggtacacccagtccacaaccttctcgggctaatggcaatataaacctggggccaagtgccaatccgaacgcgcagcctactgactttgacttcctgaaggttatcggtaaagggaactatggcaaagtgctgcttgctaagagaaagtcagacggcgcattctacgcagtgaaggtgttacagaaaaagagcatcctcaagaagaaagagagtcatatcatggctgagagatccgttctccttaagaatgtgcgacacccattcttagttggactgcgttactcatttcagacacctgagaagctatattttgtactagattatgtcaatggtggggagctgttttttcatctgcagagggagagacgatttctcgagcctagggccagattctacgctgccgaggtggcatctgctataggctatctgcatagcttaaatatcatctacagagatctgaagccagagaacatactgctggattgtcaggggcatgtggttttgactgacttcggcttatgcaaggagggagtagaaccagaagatacaacatccacattttgcgggactcccgagtatctggccccagaggtccttaggaaggagccatacgacagggctgtggactggtggtgcctgggggctgtgctttacgagatgttgcacggcctgcccccattttattcacaggatgtctcacaaatgtacgaaaatatcctgcatcagcctctgcagatacctggagggcggacagtggcggcctgcgatctcctacagagcctcctccacaaggatcagaggcaaaggttaggctcaaaagccgactttctcgagatcaagaatcacgtctttttttcacctatcaactgggacgacctataccacaaacgattaaccccccctttcaaccccaatgtgaccggacccgccgaccttaaacattttgatccggaatttactcaggaggcagtcagcaaaagcataggttgcacgccggacacagtggcatccagctcaggtgcctcttctgcgttcctcggcttctcttacgcccccgaggacgatgacattctggactgctag

SEQ ID NO: 134050 - DNA, 1104 bp, synthetic construct
  misc_feature 1..1104: note = Description of Artificial Sequence: Synthetic coding sequence
  source 1..1104: mol_type = other DNA
atgaacagttctccggctgggacaccaagccctcagccaagccgggccaatggcaacattaacctcgggccctccgctaaccctaatgcacagccaacagatttcgactttctgaaggtcatcggaaaggggaactacggcaaggtcctcctcgccaagcgaaaatctgatggcgctttctacgccgtcaaagtgttacagaaaaaatctattctgaaaaagaaggaacaatctcacatcatggccgagagatccgtcctgctgaaaaacgtcaggcaccccttcctcgttggactcagatattcttttcagacaccagaaaaactgtactttgtgctggattacgtgaacggtggagaattgttttttcacctccagagggagcgcaggttccttgagcctcgtgcaagattctacgcggccgaggtagcatctgccattggatatctgcacagcctaaatattatctacagagatttgaagccggagaacattctcctcgattgccagggacatgtcgtgctgacagattttggtctgtgtaaagagggagtggagcctgaagacactacaagtaccttctgcggtaccccggagtacctggcaccggaagtcctgcgcaaagagccatacgaccgcgctgtggactggtggtgcttgggggccgtcctgtatgaaatgctgcatggattgcctcccttttacagccaggacgtctcacagatgtacgagaatattttgcaccaacctctacagatcccagggggccgaaccgtcgctgcatgcgacctgttgcagagtttgctgcataaggaccaacgacagcgcttgggatctaaagctgattttcttgagattaagaaccacgttttctttagcccgattaattgggatgacctgtaccataagaggctgacacccccattcaatcccaacgtcacaggccctgcagacttgaagcacttcgacccggagttcacacaagaagccgtgtctaaaagcatcggatgcacgcctgatactgtggcctctagttcaggggcctcttcggcctttctgggttttagctatgccccagaggacgacgatatccttgattgttag

SEQ ID NO: 134051 - DNA, 1104 bp, synthetic construct
  misc_feature 1..1104: note = Description of Artificial Sequence: Synthetic coding sequence
  source 1..1104: mol_type = other DNA
atgaactcctcccccgctgggacgcctagcccccaacctagcagggccaacggaaacatcaacctaggccccagcgctaacccaaatgcccagccaactgacttcgatttcttaaaggtaattggaaagggtaactacggaaaggtgctcctcgccaaaagaaaatcagacggcgctttctatgctgtaaaagtgttacaaaaaaagtctatcctcaaaaaaaaagagcagtcccacatcatggctgagcggtcagtattactcaaaaacgtgaggcatccctttctcgtcgggttaaggtactcattccaaacccctgagaaactctattttgtgttggactatgtcaacggaggcgagttattcttccaccttcagcgggagaggaggtttttagaaccaagggctcgattctacgcggcagaggtggccagtgctatcggatacctgcattcgcttaacattatataccgggaccttaagcccgagaacatcctcctagactgccagggccacgtggtgctgaccgactttgggctgtgcaaagaaggcgtggaacccgaggatactacctccactttctgtggcacaccagagtatctcgcccccgaggtgttgagaaaagagccgtatgatcgtgctgtcgattggtggtgcctaggggctgtcctgtatgagatgttacacggtttaccaccgttctattctcaggacgtatcgcagatgtatgaaaacatcctgcatcagccgttgcaaatcccaggcgggcgaacggtggcagcatgcgacctgttgcagtcactactacacaaggatcaaagacagaggctcggaagcaaggcggattttctggaaataaagaatcatgtctttttcagccccataaactgggacgatttataccacaaaaggcttacgccaccttttaaccccaacgtgaccggccccgcagatctgaaacacttcgatccagagtttacccaggaggcggtcagtaaatctattgggtgcacgcctgacaccgttgcatcctccagcggggctagttctgcattcttggggttctcttatgcccctgaagatgatgacattttggattgttag

SEQ ID NO: 134052 - DNA, 597 bp, synthetic construct
  misc_feature 1..597: note = Description of Artificial Sequence: Synthetic coding sequence
  source 1..597: mol_type = other DNA
atgaatagttctccagcgggcacaccctccccccagcctagtcgggctaacggcaacatcaatctggggccaagcgccaatccaaacgctcaacctactgacttcgacttcctcaaggttatcgggaagggcaactatggtaaagtcctgctcgccaaaaggaagagtgacggcgctttctacgccgtcaaagtgttacagaagaagagcattctgaagaaaaaagagtctcacatcatggccgaacggagtgtgctacttaaaaacgtgcggcaccccttcctggtcggtctcaggtactcctttcaaacgccagaaaagctttatttcgtcctcgattatgtgaatggcggagagctattctttcaccttcaacgcgaacgtaggttcctggaaccccgcgcccgcttttacgccgccgaagtagcgtccgccatcgggtaccttcacagtcttaacatcatctatagggacttgaaacctgagaatatcttgctggattgtcaggggcacgtcgtgctgacagattttggcctgtgcaaggaaggcgtggaacctgaggataccacctccacattttgtggaaccccggagtag

SEQ ID NO: 134053 - DNA, 1104 bp, synthetic construct
  misc_feature 1..1104: note = Description of Artificial Sequence: Synthetic coding sequence
  source 1..1104: mol_type = other DNA
atgaattcatcccccgccggaacaccaagtcctcagcctagtagagccaacggcaacatcaatctgggcccgtcagcgaatccgaacgcccagcctacagattttgacttccttaaagtcattggcaaaggaaattatggtaaggtgttgctggcaaagagaaagagcgacggcgcattctacgctgtgaaagtcctgcagaagaagagtatcctgaagaagaaagagcagagccacatcatggccgagcggagcgttctgctaaagaacgttcggcaccctttcttggtgggccttcgctatagttttcaaactccggagaaattgtactttgtacttgactatgttaacggaggggagctcttcttccatctgcagcgcgaaagacgcttcctggaacccagggcccggttttatgccgctgaggttgcttccgctatcgggtacctgcacagtctcaatataatttaccgggatctgaaaccagaaaacatattactggattgccaaggccatgtggtcctgaccgactttgggctgtgtaaagaaggagtggaacccgaggacacaacctctactttttgtggcactcccgaatacctggcccccgaggtactgaggaaggagccttatgaccgagccgtcgattggtggtgcttgggggcagtcctgtatgagatgctacacggactgcccccattctattcacaagatgtcagtcaaatgtatgaaaacatccttcatcaacccttgcagatccccggtggcaggacagtggcagcatgtgatttgctgcagtcactgttacacaaagatcaaagacagagactgggcagcaaggccgattttctggagattaaaaaccatgtatttttctctcctattaactgggacgatctctatcataagcgactgaccccgcctttcaatccgaatgtgacgggcccggccgatctcaagcacttcgatcccgaattcacacaggaggcagtctccaaatcaatcggatgcacacccgacaccgtcgcgtctagttcaggtgcaagctccgcttttctgggattctcatatgcacctgaggatgacgatatcctggattgttag

SEQ ID NO: 134054 - DNA, 1182 bp, synthetic construct
  misc_feature 1..1182: note = Description of Artificial Sequence: Synthetic coding sequence
  source 1..1182: mol_type = other DNA
atgcaggggcttctaacttccggcaggaaaccctccgggggtgggaggtgtacagagctccccgatcattgctatcgcatgaatagctcaccagctggaactccttccccacagccgtccagagcaaatggcaatattaatttgggcccaagtgccaacccaaatgcacaaccaaccgacttcgattttctaaaggtgataggcaagggaaactatggcaaagtactcctcgctaagagaaaaagcgatggcgctttctatgcagtgaaggtgttgcagaagaagtctatcttgaaaaaaaaggagcagagccatatcatggcagaacgcagcgtcctgttgaaaaacgtgcgtcacccctttttggtgggacttcggtattctttccagacacctgagaaactgtatttcgttctcgactacgtgaacggcggggagctgtttttccacttgcagagggagagaagatttctggagccccgtgccagattctatgctgctgaggttgccagcgcaataggataccttcattcactcaacatcatttacagagacttgaaaccagagaatatactgctggattgtcaggggcacgtcgtgctgaccgactttggactgtgtaaggagggcgtggagcctgaggatactacaagcacattttgcggtacgcccgaatatctggcccctgaagtactgcggaaagaaccatacgaccgggcagtagattggtggtgtctaggagccgttctctacgagatgctgcatgggctgccacctttttactcccaggacgttagccagatgtacgagaacatcctgcatcaaccccttcaaatccccggaggacgtaccgtggccgcctgcgacttgctgcagagtctgctacataaggaccagaggcagcggctcggtagcaaagccgacttccttgagatcaaaaatcacgtgtttttctccccaatcaattgggacgacctttaccataagcgattgacccccccattcaatccaaacgtgacagggcccgcggatttaaaacacttcgaccctgagttcacccaggaggcagtcagcaagagtattggttgcactcccgatacggtggcttcgtcaagtggagcatcatcggctttcctgggattttcttatgcgcctgaggatgacgatatccttgattgctag

SEQ ID NO: 134055 - DNA, 1491 bp, synthetic construct
  misc_feature 1..1491: note = Description of Artificial Sequence: Synthetic coding sequence
  source 1..1491: mol_type = other DNA
atgcagagggatcatacgatggactataaagaatcctgtccctcagtgagtatcccgagcagtgatgaacaccgggaaaaaaagaaacggttcaccgtgtataaggtgctcgtcagcgtgggccgctcggagtggtttgtcttcaggaggtacgctgaattcgataagctgtacaacacactgaagaagcagtttcctgcaatggccctgaagatccctgcaaaacgcatattcggggataatttcgatcctgatttcattaagcaacgccgggcaggcctgaatgagttcatacagaaccttgtaagatatcctgaactctataaccatcctgacgttagagccttcctgcagatggacagtcctaagcatcaatctgacccttcagaggatgaggatgagaggtccagtcagaaactgcattctacatcgcagaatattaacctaggtccatccggtaatcctcatgcaaaacctaccgactttgatttcctcaaagtgatcggtaaggggtcctttggcaaggtcttactggctaagagaaaattggatggaaaattctacgcggtgaaggtgctgcagaaaaaaattgtgcttaacaggaaggaacagaaacatattatggccgagaggaatgtgttgctgaagaatgtgaaacaccctttccttgtgggcctgcattattccttccagactactgaaaagttatacttcgttctagactttgttaatgggggagaactctttttccatctccagagagagagaagtttccccgaacaccgcgcgaggttttacgctgccgagatcgcctctgccctcggatacttgcactcaattaaaatcgtgtatcgagatctgaaaccagaaaatattctgctggactcggtggggcacgtagttctaaccgattttggcttatgcaaggagggcatcgccatcagcgacaccactactaccttctgcggaaccccagagtatctcgctccagaggtgatccgcaagcaaccttacgataacacggtggattggtggtgtctcggtgctgtgctgtacgaaatgttatatggtctgccccctttttattgccgtgatgtggcagagatgtatgataatatactccacaaacctctgtccttacgacccggggtctccttaacggcgtggtcgattctggaggagctgttggagaaggataggcaaaatcgtttgggcgccaaggaggatttcctcgagattcagaaccaccctttttttgagtccctgtcttgggcggatctcgtccagaaaaaaattccgcctccttttaaccccaacgtcgcgggcccggacgacatcagaaattttgacaccgcattcaccgaggaaaccgtaccgtacagtgtctgcgtgagtagcgattacagcatcgtcaatgcctccgtgctggaggctgatgatgcttttgtggggttttcatacgcccccccttcggaagatcttttcctctag

SEQ ID NO: 134056 - DNA, 1491 bp, synthetic construct
  misc_feature 1..1491: note = Description of Artificial Sequence: Synthetic coding sequence
  source 1..1491: mol_type = other DNA
atgcagagggatcacacaatggattataaggaatcatgtccttcagtcagcatcccgtcttcagacgaacatagggagaagaagaagcgcttcactgtttataaggttctggtttccgtcggaaggtcagagtggttcgttttccggaggtacgctgagttcgataagttatacaacacactgaaaaagcaatttcccgccatggccctgaaaattcctgcaaaacgtatctttggcgacaacttcgacccagatttcatcaagcagagacgggcaggtctaaacgaattcatccagaacttagtacggtatcctgagttgtacaaccacccggacgtcagggccttcctgcagatggactccccgaaacaccaatctgatccgagcgaagacgaagacgagagatcatctcagaaactccacagcacttcgcagaacattaaccttggaccttctggaaacccacacgctaagccgacagacttcgattttctgaaagttatcgggaaaggctcctttggaaaagtgctgctcgctaaacggaaactcgatgggaagttctacgctgtcaaggtcctccagaagaagatcgtgttaaatcggaaggagcagaaacatataatggccgagaggaacgttcttctgaaaaacgtgaaacatccctttttggtgggcctgcactattcatttcagacgaccgaaaaactctacttcgttctggactttgttaacggtggtgagcttttcttccacctgcagagggaaagaagcttccccgaacaccgcgctaggttctatgcggcagaaattgcttctgccttgggataccttcattccattaaaatcgtctatcgggacctgaagccagagaatatcctgttagactcagttgggcacgtcgtgcttacagatttcggtctgtgcaaggagggtatcgcaatctccgacacaaccaccacattttgcggcacccctgagtacctggcacctgaggtaatcaggaaacagccctatgacaacacggtcgactggtggtgtctgggggcagtcctgtatgagatgctttacggcttaccaccattctactgcagagacgtggccgagatgtacgataacatcttgcacaaaccactgagtctgaggcctggtgtgtcgctcacagcctggtccatcctagaagagctgcttgagaaggatcggcaaaaccggctgggagctaaagaagattttctagagatccagaaccatcccttttttgagtcattgtcatgggccgaccttgttcagaagaagatccctccgcctttcaatcctaatgtagcaggccctgacgatatccgcaacttcgacaccgcctttacggaagaaacggtgccctacagcgtctgcgtttcttcagactatagcatagtgaacgccagcgtactcgaggctgatgatgccttcgttggattttcctatgctccaccttccgaagatctgttcctttag

SEQ ID NO: 134057 - DNA, 1491 bp, synthetic construct
  misc_feature 1..1491: note = Description of Artificial Sequence: Synthetic coding sequence
  source 1..1491: mol_type = other DNA
atgcaaagggatcatacaatggactacaaagagtcgtgccccagtgtctcaattccaagcagcgatgagcacagagagaagaagaaacgtttcactgtatacaaagtgctcgtatcagttggcagaagtgagtggtttgtgtttaggcgctacgcggagttcgataaattatacaacacactcaaaaagcagttccccgcgatggccctgaaaatccctgccaagagaattttcggagacaattttgatcccgacttcatcaagcagaggagggctgggctgaatgaatttatccagaacctggtcagatatcctgagttatacaaccatccagacgtgagagccttccttcagatggactcaccaaagcatcaaagcgacccttccgaggatgaagatgaacgcagcagccagaagctccacagtaccagccagaatattaatctcggcccgagcggaaatcctcacgctaagcccacagacttcgatttcctcaaggttatcggcaaggggagcttcggcaaggtattgttagcgaagagaaagctggacgggaagttttacgcagtcaaggtgctacagaagaagattgtcctgaacaggaaggaacagaagcacattatggccgaaagaaacgtgctgctgaaaaacgtgaagcatcctttcctggtaggccttcattatagtttccaaacaacggagaagttgtatttcgtactggattttgtaaatgggggagagttattctttcacttacagagagaacggtctttccccgagcatcgcgcccgtttttatgctgcggagattgcaagtgctcttgggtacctgcattccatcaaaattgtatacagggacctaaaaccagagaatattctgctggactcagttggccacgtggtgttgacagacttcgggctgtgtaaagagggcatcgccatatccgacaccaccaccacattttgtggcacgccagagtacctagctccggaggtgatacggaagcagccatatgataacacagtagattggtggtgcttaggcgctgtgctgtatgaaatgctctacggcctcccccctttctactgtcgggatgtggctgaaatgtatgacaatatcctgcataaacctctgtccctcagaccaggggtgagccttactgcttggtcaatactcgaggagctactggagaaagaccgacaaaatagattgggggccaaggaggattttctggaaatccaaaaccacccattcttcgaaagtctctcatgggctgatttggtgcagaagaagattccaccccctttcaatcccaatgtcgccggcccagacgacatcagaaacttcgacaccgcatttaccgaggagacagtgccgtacagtgtgtgtgtgtcctccgactactcaatagtgaacgcctcggtactggaagccgatgatgctttcgtcggattctcttatgcccctccaagtgaggatctctttctttag

SEQ ID NO: 134058 - DNA, 1491 bp, synthetic construct
  misc_feature 1..1491: note = Description of Artificial Sequence: Synthetic coding sequence
  source 1..1491: mol_type = other DNA
atgcagcgggatcacacaatggactataaggagtcctgccctagcgtgtccatcccctccagcgacgagcaccgggaaaaaaagaagcgctttacggtatataaggtcctagtgtctgtcgggcgcagtgagtggttcgttttcagaagatatgctgaattcgacaagctgtacaacactctgaagaaacaatttcccgcaatggctcttaaaatccccgctaagagaatctttggcgataacttcgatcccgacttcatcaaacaacggcgcgccggtcttaacgagtttattcaaaatttagttaggtatcccgagctgtacaatcacccagatgttagggctttcctccagatggattcccccaagcatcaaagtgaccctagtgaggatgaggatgagcgaagctcgcagaaactgcactccacgagccaaaacatcaacctgggcccctcaggaaacccacatgccaaacctaccgacttcgactttcttaaggtgataggaaaaggctcctttgggaaggtactcctggctaagcgcaagctcgatggcaagttctatgccgttaaggtgctccagaagaagatcgttttgaacaggaaggagcagaagcatatcatggcggagcgtaatgtcctgctgaagaatgtaaagcacccctttctcgtgggcttgcactactcattccaaaccaccgagaaactctatttcgtactggattttgtgaatgggggggagttattctttcacttgcagcgggagcgttcttttccggaacaccgggctagattttatgctgccgagatcgcttcggctctgggctacctgcactcaatcaagattgtctaccgcgatctgaaaccagaaaatatactattagatagcgtagggcacgttgttctcacagatttcggcctctgcaaagaaggaatcgctatctccgacaccaccaccacgttctgcgggaccccggagtatctggcccccgaggtgatccgtaaacagccttacgacaacacagttgattggtggtgcttgggtgcggtgctgtacgagatgctgtatgggcttccgccattctattgcagggatgtagcggaaatgtacgacaacattctgcataaaccactttcactcaggcctggcgtctccttgacagcctggtcgatcctggaggaactgttggaaaaagatcggcagaatcgactgggtgctaaagaagattttctggagatccaaaaccaccccttcttcgaatcattaagctgggcagacctcgtgcaaaagaagataccaccgccattcaatccaaatgttgccggccccgatgacatacggaatttcgataccgcattcacagaagagaccgtgccttacagtgtgtgcgtgtcttctgattactctatagtgaatgcttccgtcttggaggccgacgacgcttttgtgggattttcatacgccccgccaagcgaggacctcttcctctag

SEQ ID NO: 134059 - DNA, 1395 bp, synthetic construct
  misc_feature 1..1395: note = Description of Artificial Sequence: Synthetic coding sequence
  source 1..1395: mol_type = other DNA
atgcagagagaccacaccatggattacaaagagtcctgcccctcagtgagcattcccagtagcgacgaacatagagaaaagaagaagaggtttacagtgtataaggtcttggtgtccgtcggtagatccgagtggttcgtgttcaggcggtatgccgaatttgataagctgtacaacactctgaagaaacagtttccagcgatggctctcaaaatacccgcgaagcgcatctttggcgataatttcgaccccgactttatcaagcaacggcgggcaggcctgaatgagttcatacagaatttggtgcgctatcctgagctttataatcatcctgacgtccgcgctttcctgcagatggactcaccaaagcaccagtctgatcctagcgaggatgaggatgagaggtcctcccaaaagctgcattctacatctcaaaacattaacttgggaccttccgggaatcctcacgccaagccaaccgattttgacttcctcaaagtgataggaaaagggtccttcgggaaggtgcttctggccaagcggaagttagacgggaagttctacgccgtgaaggtgttgcagaagaaaatcgttctcaaccggaaggagcagaagcacatcatggccgagagaaacgtgctgctgaagaatgtaaaacacccgtttctagtgggtctgcattattcattccagactacagaaaagctctacttcgtgttggattttgtgaacggcggcgagctgttctttcacctccaaagggagaggagtttccccgaacacagggcgaggttctatgctgccgagattgccagtgcgctgggttacctgcattctataaagattgtgtaccgcgatcttaagcctgagaacatcctgctggacagcgttggtcacgtagtgcttacagattttggactgtgtaaggaaggcatagcaatttcggatacaacaacaacattttgcggcacacccgagcctcctttctactgtagagacgtcgccgaaatgtacgataacattctgcacaaacccctgtccctcaggccaggagtctctttaaccgcttggtccatcctggaggagctgctggaaaaggatagacagaaccggctcggcgcgaaggaagacttcctagagatccagaatcatcccttttttgaatcactctcgtgggccgacctggtacagaagaaaatcccgccgccctttaaccctaacgtggcaggccccgacgacatccgcaatttcgataccgccttcacagaagaaacagtgccttattctgtgtgcgtgtcatctgactattctatcgtaaatgcatcggtgctagaggccgacgacgccttcgtgggcttcagctacgcccctccatcggaagacctgttcctgtag

SEQ ID NO: 134060 - DNA, 1491 bp, synthetic construct
  misc_feature 1..1491: note = Description of Artificial Sequence: Synthetic coding sequence
  source 1..1491: mol_type = other DNA
atgcagagagaccacaccatggactataaggaatcttgccccagcgtctccatcccttcgtctgatgagcatagagaaaagaaaaagcgcttcactgtttacaaagtgctggtaagcgtgggccgctctgagtggttcgtatttaggagatatgccgaatttgataaactttataacactctgaagaaacagtttcctgccatggccctcaaaattccagcaaagcggatctttggcgataacttcgaccctgacttcattaagcagcgaagggctggcctgaacgagtttattcagaacttggtgcgctaccctgaactgtacaaccacccggatgtgcgcgcatttctccagatggactcccccaagcatcagagtgatccttccgaggatgaagatgagcgatctagccagaagctgcactcgacatcacagaacattaacctgggtccaagcgggaaccctcacgccaaacccaccgattttgatttcctgaaggttatcggcaaagggagtttcggcaaagtgttgctcgcgaaaagaaaactggacggtaaattctacgccgtgaaagtattgcagaaaaagatcgtcctgaaccgtaaggagcagaaacacattatggccgaaagaaacgtgttgcttaagaatgtgaaacatcccttcctggttggtctccactactcattccaaacaaccgagaagctatattttgtcttagactttgtcaacggcggtgagctctttttccatttgcagcgcgagcggtccttccctgagcacagggcccggttctacgccgcagaaatcgcaagtgcactgggctatttgcacagcatcaagatcgtctacagagacttgaagcctgaaaacatcttgttggatagcgtcgggcacgttgttctaaccgatttcggcctgtgcaaggaagggattgcaatctctgacaccaccacaaccttctgcgggactccggagtatttagcacctgaggtgatcagaaagcagccctacgacaatacagtggactggtggtgtcttggggccgtgctatacgagatgctgtatggcttaccccctttctactgccgggacgtcgcggagatgtacgataacatcctgcacaagcctctctcacttcgccccggagtctctctcaccgcgtggtcaatcctggaggagctgctggaaaaggacagacagaaccggctgggagccaaggaagacttcctggagatccaaaaccacccattctttgagtctcttagctgggctgatctggtgcaaaagaagataccaccgccctttaatcccaacgtagccgggccggacgatatcaggaactttgacaccgccttcacagaggaaacagtgccttatagtgtgtgtgtctcatcagactatagcatcgttaacgcgtccgtgctggaagccgatgacgcctttgtggggttttcatatgcacccccctccgaagatctctttctgtag

SEQ ID NO: 134061 - DNA, 1491 bp, synthetic construct
  misc_feature 1..1491: note = Description of Artificial Sequence: Synthetic coding sequence
  source 1..1491: mol_type = other DNA
atgcagcgggatcatacaatggactataaagaaagctgtccaagcgtgtcaataccgtcctcagatgagcaccgggagaagaagaagcgatttaccgtgtataaggttttagtctccgtcgggagatcggaatggttcgtgttcaggcggtatgccgagtttgacaaattgtataacacacttaagaaacagtttcccgctatggcattaaaaattccagccaagaggatctttggagataatttcgatcctgattttataaaacaacgcagggcagggctgaacgagtttattcagaatctggttaggtatccggaactctacaatcatccggatgtcagggcctttctccagatggacagccccaaacaccagtctgatcctagcgaagatgaggacgaaagatcctcccagaaactacacagcacaagccagaacattaatcttggccccagcggaaatccacacgccaagccaaccgattttgattttctgaaggttataggtaaaggctctttcggaaaggtgttgcttgctaaacgcaagcttgatggcaagttttatgctgtcaaggtgctccaaaagaagattgtattaaatcgcaaggagcagaaacatattatggcagaaaggaatgttctattaaagaacgtaaagcacccattcctcgtgggactgcactactccttccagaccaccgaaaaactttacttcgtactcgacttcgtcaacggtggtgagctgtttttccacttgcaaagagagcggagctttcccgaacaccgagcccggttctacgccgctgaaatcgcaagtgccctggggtacctgcactcaatcaagattgtctacagagacttgaagcccgagaatatcctgctggatagcgtggggcacgtcgtcctgactgactttggtctctgcaaagagggcatcgccatctccgacactaccacgaccttttgtgggaccccagagtatcttgcgccagaggtgattcgaaagcaaccctacgacaacacagtcgattggtggtgtctcggagccgtactgtatgagatgctgtatggtctgcctcctttctactgcagggacgtggcagagatgtatgataacatcctgcataagcctctgagtctgagaccaggggtttccctgaccgcgtggtccatactggaggagctattggaaaaagacaggcagaacagacttggagccaaggaggactttctcgaaatccagaatcacccattcttcgagtccctgtcatgggcagacctcgtgcagaagaaaattccccccccttttaatccgaatgtcgctggtcctgacgatattcggaacttcgacacagcattcacggaggaaacagttccctactccgtctgcgtgtcgtccgactacagcattgtcaatgcttccgtactggaagccgatgacgcgtttgtcggattcagctatgcgcccccgagcgaggatcttttcctgtag

SEQ ID NO: 134062 - DNA, 1725 bp, synthetic construct
  misc_feature 1..1725: note = Description of Artificial Sequence: Synthetic coding sequence
  source 1..1725: mol_type = other DNA
atggaggccagtctggggatacagatggacgaacctatggccttctccccacaacgcgatagattccaagccgaagggtctctgaaaaagaatgagcagaacttcaaattagccggcgtgaaaaaagatattgagaagctatatgaggcggtcccacagctctccaacgtgttcaaaatagaggataaaatcggcgaggggacattctcaagtgtctatctggccacagcacagcttcaggtcggtcccgaggagaagatcgccctgaagcacctgatccctacatcgcatccgatccgtatagcagcggagttgcagtgcctgaccgtggccggcggtcaagataatgtcatgggtgtgaagtactgctttcgcaagaatgaccacgtggtcatagcaatgccttatttggagcatgaatcttttctggacattttaaactctctgagcttccaggaggtcagagaatacatgttaaacctttttaaagcactgaagaggatccaccagttcggaatagtgcaccgggacgtgaagccctcgaacttcttgtataaccgccgactgaagaaatacgccctggtagactttggcttggcccagggaacccatgatactaaaatcgaactcctgaaatttgtgcagtctgaagcccagcaggaacgatgctcccagaacaagagccacatcattactggtaataaaatccccttgagtggccccgtgccaaaagagctcgatcaacaaagcactactaaagccagtgtgaagcggccgtataccaatgcccagattcagatcaagcagggtaaagacggaaaagagggatctgtagggttatcagtgcaacgatccgtgttcggtgagcgtaatttcaatatccatagcagtatctcccacgagtccccagctgtgaagctgatgaagcagtctaagactgtagacgtgctgtccagaaagctggcgaccaagaaaaaagctatctctacaaaagtaatgaactctgccgtgatgcggaaaacagcctcctcttgccccgcgtcacttacatgcgactgttacgccacggataaggtttgctctatttgcttgtctcgacgtcagcaggtggcgcctcgggcagggacaccgggttttcgggccccagaagtcctgactaagtgtccaaatcagacgaccgcaatcgatatgtggtctgccggggtaatctttctgagcctgctgtctgggcggtaccctttctataaggcaagtgatgacctgactgcccttgcccaaatcatgactatccgcggctctcgtgaaaccatccaggcagccaagacttttggtaagtcgatcctctgcagcaaggaggtgccagcccaagacctccgcaaactgtgcgagcgcctgcgaggcatggacagcagtactcccaaactgacctctgatattcaaggacacgcctcacatcagccagcgatttctgagaaaactgatcacaaagcgagttgtctggtgcaaaccccgcctggtcagtattcaggaaatagcttcaagaaaggagatagcaattcttgtgaacattgctttgatgaatacaatactaacctcgaaggatggaacgaagtacccgacgaagcgtatgacttgcttgataagctgctggatctgaaccctgcttctcgcatcaccgccgaggaagccctgctgcatccgttttttaaggatatgagcttatag

SEQ ID NO: 134063 - DNA, 1611 bp, synthetic construct
  misc_feature 1..1611: note = Description of Artificial Sequence: Synthetic coding sequence
  source 1..1611: mol_type = other DNA
atggtactggacctcgatctgttccgagtagataagggcggagatcctgccctgatccgtgaaacacaggaaaagaggtttaaggacccggggctcgtcgatcagctggtgaaggcagactccgaatggagacgttgtcggtttcgcgcagataatctgaataagctgaaaaatctttgttccaaaacaattggggagaagatgaagaaaaaggagccagtcggagatgacgagagtgtgcctgaaaatgtactctcatttgacgacctgactgccgatgcactcgccaacctgaaggtttcccagataaaaaaggtccggctgctcattgacgaggctatactgaaatgtgacgcggaacggatcaagctagaggctgaacgctttgagaacctcagagaaatcgggaaccttctgcacccatcagttcctatcagtaatgacgaagacgtagacaataaggtcgagcgtatctggggggactgcaccgtccggaagaagtacagtcacgtggacctcgtggtgatggtagatgggtttgaaggcgaaaagggcgccgtcgtagcgggatcaagaggctattttctgaagggagtacttgtgttcctggagcaggccctgattcagtatgccctaagaacactggggagccgcggctatattcccatttacactccattttttatgcggaaagaggtgatgcaagaggttgctcagctgagccagtttgacgaagaattatacaaggttattggcaaagggagcgaaaagtcggacgataactcatacgacgagaaatatctaattgctacttccgagcagccgatcgcggccctgcacagagatgagtggctcagaccggaggacctgccaattaaatacgcaggtctgagcacctgcttccgtcaggaggtcggctctcatgggagggatactcgggggatcttccgcgtacaccagttcgaaaagatcgaacaatttgtttactctagcccccacgataacaaaagttgggagatgttcgaagaaatgatcaccactgcggaggagttttatcagagcctcggaatcccctatcatatcgtcaatatcgtgtctgggagcctgaatcacgcagcatctaaaaaattggacctcgaggcctggttcccggggagcggcgcgttccgagaactcgtttcttgttccaattgcaccgattatcaggcccgccgcctgcgtatccgctacggacagactaaaaaaatgatggataaacgcaaaaacaacctccacctgagcacacagaacaagctcgaggcctccctgttcagtccaaagaaagtggagttcgtgcatatgcttaacgcaacaatgtgtgctacaactagaaccatttgtgcgattctggagaactatcaaaccgaaaagggaataaccgtgccagagaagctaaaggaatttatgccgccaggcctccaggagctcattcccttcgttaaacctgcccccatcgagcaggagccatcgaagaagcaaaagaagcaacacgaaggatctaaaaagaaggctgccgccagggatgtgactctggagaatcgccttcaaaatatggaagttaccgatgcctag

SEQ ID NO: 134064 - DNA, 1563 bp, synthetic construct
  misc_feature 1..1563: note = Description of Artificial Sequence: Synthetic coding sequence
  source 1..1563: mol_type = other DNA
atggctgctagcatggccagacgtctctggcccctgctcacgagaaggggtttccgacctaggggcggctgtatctcgaatgactcccctcgccggtcctttacaaccgaaaaacgaaaccgaaacctgctgtacgagtatgctcgagagggatattctgccttgcctcaattagatatcgaacggttctgtgcctgccctgaagaagccgcccacgccttggagttgaggaagggtgagctgcggagtgccgacttgcccgccataatctcgacctggcaagagctcagacagctccaggaacagatccgttcgctcgaagaggagaaagctgcagtgacggaagccgttcgggcacttctagcaaatcaagacagtggggaagtgcaacaggtgcggctggatcccggtgctggctccattttcggcccaaccttcctcccatttcccgggcagctatcccttctggtggaggcccagctggaagagcagttctacctgcaggccctgaaactacccaaccaaacacacccggatgtgccagtgggggatgagtcacaggcccgggtgctgcacatggtaggcgacaagcccgtctttagcttccaaccgagaggccacttggaaatcggcgaaaagctcgacatcatcaggcagaagaggctgtctcacgtctccggccatcgtagctactacctcaggggggcaggcgctctcctccagcatggactcgttaatttcacgtttaacaagctcctgagaaggggattcacccctatgactgtgcccgaccttctgaggggggcggtcttcgaaggttgcggaatgactcctaacgctaaccccagtcagatttataacatcgaccccgctcgatttaaggatctgaacctggcaggtacagctgaggtgggactagccgggtacttcatggaccataccgtggcatttcgggacctgccggttcgcatggtgtgtagcagcacctgctatagagctgagaccaatacaggtcaggaaccccggggactgtatcgagttcaccatttcacaaaggtcgaaatgttcggcgttacaggacctggcttggaacagtcctcacagcttctcgaggaattcctatccctacaaatggaaatcctgaccgagctggggctgcacttccgggtgctcgacatgccaactcaggagttaggcttgcccgcatatcgtaagtttgatatcgaggcctggatgcctggccgcggtaggttcggcgaggtgacctccgcgtcaaactgtactgattttcaaagcagaagactccatatcatgttccagactgaggcaggggagctccagtttgcccatacagtgaatgctacagcatgtgccgtccctaggctgcttatcgctctgctggaatctaatcagcagaaagacggatctgtgcttgtgcccccagcactgcagagctacctgggcaccgaccggatcactgccccaacccatgtcccattacagtacattggtccgaaccagcccagaaagcccgggctacccggccagcctgccgtgtcttag

SEQ ID NO: 134065 - DNA, 426 bp, synthetic construct
  misc_feature 1..426: note = Description of Artificial Sequence: Synthetic coding sequence
  source 1..426: mol_type = other DNA
atggagatgctacagggcctgctcctcttgttgttactctctatgggtggggcgtgggcatctagagagccactgcgtccttggtgtcatcccatcaacgcaattctggcagtggaaaaagaaggatgcccggtgtgtattacagtgaacactaccatttgcgctggctactgccctaccatgatgagagtgttacaggccgttctgccacctttgcctcaggtggtgtgtacctatagggacgtaaggttcgaatccatccgcctgcctggctgcccccgaggggtggaccctgtggtgagtttccccgtggctctctcatgtaggtgcggaccctgtagacggtcaactagcgactgtggcggtcccaaggatcatcctctcacgtgtgaccacccccagctttccggactgctgtttctttag

SEQ ID NO: 134066 - DNA, 837 bp, synthetic construct
  misc_feature 1..837: note = Description of Artificial Sequence: Synthetic coding sequence
  source 1..837: mol_type = other DNA
atgggggcccggctctcaagacggcgactgcctgccgatccttctctggcattagacgcacttccccctgagttacttgttcaggtcctctcccacgtacctccgagatctctcgtgactcggtgccgtccagtgtgcagagcatggcgcgatatagtggacggtcccacagtatggctgctgcagctggcacgcgaccgcagtgcagagggtagagctctttacgcggtcgcacagcggtgtctgccatctaacgaagataaggaggaattcccactgtgtgccctggccaggtattgtttgcgggctccattcggcagaaacctaatttttaattcttgcggggaacaaggctttcgaggttgggaggtagagcacggggggaacggctgggccattgagaagaacttgacacccgttcctggcgccccctctcagacgtgctttgtcacctctttcgagtggtgctcgaaaaggcagttagtggatctcgtaatggagggggtttggcaggaacttcttgatagtgctcagattgagatctgcgtcgcggattggtggggcgcgcgcgagaactgcggatgtgtgtatcaactgagagtgcggctgctggacgtctatgaaaaggaagtcgtcaaattctcagccagtccagaccctgtgttacaatggacggaaagaggatgccgtcaggttagccacgtgtttaccaattttggaaaggggatacgttatgttagttttgaacaatatgggcgcgatgtctcttcctgggttgggcactatggcgcgttggtcacccattcgtcagtgagagtgcggattcggctgagttag

SEQ ID NO: 134067 - DNA, 864 bp, synthetic construct
  misc_feature 1..864: note = Description of Artificial Sequence: Synthetic coding sequence
  source 1..864: mol_type = other DNA
ttcaagcaaggcctgtggctgctcgaaatgggagcccgactttctagaaggcgccttcctgccgacccaagccttgctctcgacgcacttcccccagagctgctagtccaggtcttgtctcatgtgccacctcggtcactggtgacaaggtgcaggcccgtctgccgagcctggcgggatattgtcgacggaccaaccgtatggctgctccaactggcccgcgatcgttcggcggaaggccgagcgttgtacgccgtggcacaaagatgtctgcctagcaatgaggacaaagaggaattccccttgtgcgctctggctcgttattgtctgagagcgcccttcggcaggaacctgatcttcaactcttgcggagaacagggttttaggggatgggaagtagagcacggaggcaatgggtgggccattgaaaagaatctcacccctgtgccaggcgccccttcccagacctgttttgtgacctcctttgaatggtgtagtaaacgccagctggtagacctcgtgatggagggcgtgtggcaggaactgctggatagcgctcagatcgaaatttgtgtggccgactggtggggagccagggagaactgcggatgtgtctatcagcttcgtgtgaggcttcttgacgtctacgaaaaagaggtggtgaagttctccgcatcacctgatccggtgttgcagtggacagagcgcggttgtaggcaggtgagccatgtgtttacaaactttgggaagggcatccggtacgtgagcttcgagcaatacggtcgagacgtctcttcttgggttgggcattacggcgccctggtgacccattcatccgtaagagtacgtatcagactgagctag

SEQ ID NO: 134068 - DNA, 1563 bp, synthetic construct
  misc_feature 1..1563: note = Description of Artificial Sequence: Synthetic coding sequence
  source 1..1563: mol_type = other DNA
atggccgcatctatggcaaggcggctttggccactgctgacccggcgaggttttagacccaggggcggatgtatatccaacgatagcccacggagatccttcaccaccgagaagcgaaacaggaatctcctgtatgagtatgcgcgggaggggtactctgctctgccgcagctggacatcgagcgattctgtgcttgccccgaggaggccgcgcacgcattggagcttcgtaagggagagttacggagtgcagaccttcctgcaatcatcagcacgtggcaggagctaaggcagctccaagagcaaattcgcagtttagaggaagagaaagcagccgtgactgaggcagtgagggccctgctggctaatcaggattctggtgaagtgcaacaggtgaggctagaccctggtgcgggcagtatcttcggccctacttttctcccttttcccggacagctttccttgctggtcgaagcacagcttgaggagcagttctatctccaggcccttaaacttcctaatcaaacacacccagatgtccctgtgggagatgagtctcaggcccgagtgctgcacatggtgggcgataagcctgtgttctcctttcagccacgtggccatttagaaattggggaaaagctcgacattatccggcagaagcgactatctcatgttagtggacacagaagttattacctgcggggagccggcgctctgcttcagcacggcctcgtgaattttaccttcaacaagttgctgagaaggggattcaccccaatgactgtcccagacctgctgcgcggcgccgttttcgaagggtgcgggatgacgcctaacgctaaccccagccagatttataatatagatccagctcgtttcaaggacctcaatctagcaggtacagctgaggtgggtctcgccggctactttatggaccacacagtggcctttagggatttaccggtgcggatggtgtgttctagcacttgctaccgggccgagacgaatacaggccaggagccacggggcctctatcgggtgcaccattttactaaggtcgaaatgtttggtgtaacggggcccgggttagaacaatctagtcagctcctagaagagtttctgagtctgcagatggagattctgaccgaactgggtttgcattttcgcgtgttggacatgcctacccaggaattaggcctacccgcctataggaaattcgacatcgaagcttggatgccaggtagagggcgatttggagaagtgacctccgcatctaactgtaccgatttccaatccaggcgtctacacataatgtttcagacagaagcaggggaactgcagttcgctcatacagtgaatgctaccgcctgtgctgttcctcgtctccttatcgctctactggagtccaatcagcagaaggatggctctgtgctggtcccgcctgccttgcagtcctacttgggcacagaccgcattacagcccccactcacgtgccactgcagtacatcggtcctaaccaacccagaaagcccggcctccctggtcaacccgctgtgtcttag

SEQ ID NO: 134069 - DNA, 1557 bp, synthetic construct
  misc_feature 1..1557: note = Description of Artificial Sequence: Synthetic coding sequence
  source 1..1557: mol_type = other DNA
atggaaggcgtctggcaggagttgctggactctgcccagatcgagatatgtgttgccgactggtggggtgctagggagaattgcggttgtgtctaccaactcagggtgcggcttctggatgtgtacgaaaaagaggtcgtcaaattcagtgcctctccagaccctgtgctccaatggactgaacgtggatgtaggcaggttagccatgtcttcacaaacttcggtaagggcatacgctacgtttccttcgaacaatatgggcgcgacatcagtacctggcaagagctgcgccagctccaggaacagattcggagcttggaggaggaaaaggcggccgtcaccgaggccgtgcgggcgttgctggcaaaccaagattctggggaagtgcagcaggaccccaagtatcagggtctgcgagcccgggggcgggagatccgcaaggagctggtgcacctctaccctagagaggcccagctcgaagagcagttctatctccaggctttgaaactccccaatcaaactcacccagacgtgcctgtgggagatgaatctcaggcgcgggtgctccatatggtcggcgacaaacccgtcttctccttccaaccgcgcggacacttggagatcggcgagaagttagacatcattcgccagaagcggctgtcccacgtgtcaggccatcgatcttattatcttcgtggggcaggcgcgctgctgcagcacggactggtgaacttcacgtttaataaattgctgcgccgcggtttcactccaatgacggtgccagacctgctaagaggagccgtatttgagggatgcggtatgacccccaacgctaatcctagccaaatttataatatcgaccctgcccgatttaaagacttaaacctagcaggcaccgcagaggtgggactcgcgggctattttatggaccacacggtggcattcagggatctcccagtgcgaatggtttgctcctccacctgttacagggcggaaactaacacggggcaggagccaaggggcctgtatcgagtacatcacttcacaaaggtggaaatgttcggagtcaccgggcccgggttagaacagagtagccagctactcgaagaattcctgtctcttcagatggagatcctcacggagctcggacttcactttagagtcctggatatgccgacccaagagctgggcctgcccgcgtacaggaaatttgacattgaggcctggatgccaggacgtggccgcttcggtgaggtgacatctgctagtaattgtaccgacttccagtcacgtcgactccacatcatgtttcagacggaggctggcgaacttcagtttgcacataccgtgaacgctactgcatgcgcagtgcccaggctcttgatcgcactactcgagagcaaccaacagaaagacgggtcagtcctcgtacccccggcgctgcagagctacttgggaacagataggatcacggccccaacacacgttccgctgcaatatattggcccaaaccaaccacggaagcccgggctacccgggcagccagccgtatcctag

SEQ ID NO: 134070 - DNA, 711 bp, synthetic construct
  misc_feature 1..711: note = Description of Artificial Sequence: Synthetic coding sequence
  source 1..711: mol_type = other DNA
atggccgcatccatggcccggcggctgtggcccctgctgacacggcgtggatttcgccctaggggaggatgtatcagtaatgattcaccgaggaggtcattcaccaccgagaaacgaaacagaaacctgctatacgagtacgctagagaaggctatagcgcgctgccgcagttagacatcgaaagattttgcgcctgtcctgaggaggctgctcacgcacttgaactgcggaagggcgagttgagatcggctgaccttcctgctattatctcaacatggcaagagctccgtcaattgcaggagcagatccgcagccttgaagaggaaaaggctgcagttacagaagcggttagggccctcctggctaatcaggatagtggtgaggtccagcaggatccaaagtaccagggtcttagagcccggggccgggagattcgtaaggagctggtccatctttaccctcgcgaggctcagctggaagaacagttctaccttcaagccctcaagctgccaaaccagacccacccagatgtgcccgtgggagacgaatctcaagcgagagtcttgcatatggtaggtgacaagcctggggcgtgtcctacctgtctcgccaccggaccaataacctgcgccgggctggagccgagctgttctactgcctggtctacctctcactccacctcattcagtgccggggccagccctccatag

SEQ ID NO: 134071 - DNA, 1281 bp, synthetic construct
  misc_feature 1..1281: note = Description of Artificial Sequence: Synthetic coding sequence
  source 1..1281: mol_type = other DNA
atgcatgctctcttcgcagactcatttgcagcgttaggcagattggataatatcacgttagtgatggtctttcacccacagtatctggaatcgttcctcaagacgcagcactacttgttacagatggatgggcccctccctctgcactacaggcattatatcggtatcatggctgcagcacgtcaccaatgttcctatctggtcaatctacacgtgaacgactttctacacgtgggcggagaccccaaatggcttaacgggctggagaatgcaccgcagaaactccagaatctcggggagttaaacaaggtgctggcccatcggccttggcttatcacaaaggagcatatcgaaggattgcttaaggcagaagaacacagctggtcactggccgagctagtccacgctgtcgtgttgctaacacattatcacagcttggcctccttcacctttggctgtggcatctccccagagatccattgcgatggggggcacacttttcggccacccagtgtttctaactactgcatttgtgacattacaaatgggaaccacagtgtcgacgaaatgcccgttaactctgccgagaatgtttctgtgagcgattctttcttcgaggttgaagccctgatggagaaaatgagacagttgcaagagtgccgcgatgaggaagaagccagccaagaagaaatggcctcccgatttgaaattgaaaaacgggagagcatgttcgtgttcagctcagacgacgaagaggtcacccccgcacgcgcggtcagccggcatttcgaggatactagttacggatacaaggacttttctagacacggaatgcatgtgccaaccttccgggttcaggactactgctgggaagatcatggctactctcttgtgaaccgcctgtaccccgacgtgggccaacttatcgacgagaagttccacatcgcctataacctgacctacaacacaatggcaatgcacaaggacgtcgacacatcaatgctcagacgcgccatatggaattacatacactgtatgtttggtattcggtatgatgactatgactatggggaaatcaaccagcttctggaccggtcttttaaagtgtacattaagacagtggtgtgcacccccgaaaaggtgactaaaaggatgtacgacagcttttggaggcagtttaagcactcagagaaggttcacgtcaatcttcttcttattgaagcgaggatgcaggccgagttgctttatgccctgcgggctattacaaggtacatgacctag

SEQ ID NO: 134072 - DNA, 1479 bp, synthetic construct
  misc_feature 1..1479: note = Description of Artificial Sequence: Synthetic coding sequence
  source 1..1479: mol_type = other DNA
atgcgactggctgcagcagccaacgaggcttatacagcacctctcgctgtttccggattgctgggttgcaaacagtgcgggggaggtcgggatcaggacgaggagcttggaattcgaatccccagacccttgggccagggcccttcgagatttatccccgagaaggagatactccaggtaggctctgaagatgcacagatgcacgctctgtttgccgacagcttcgccgccttagggcggctggacaacatcacgttggttatggtgtttcatcctcaataccttgagagctttcttaagacacagcactatctgctccagatggacggacccctgcccctccactatcgccactatatcggcattatggctgctgcgagacaccagtgtagttatctcgtgaatttgcacgtgaacgacttcctgcacgtgggaggcgaccctaaatggctgaacggactggagaacgccccacagaaacttcaaaacctgggagagctgaataaagtcttggctcatcgcccctggctgattaccaaggagcatatcgagggcctgttaaaggcagaggaacactcatggtccctggccgaactcgttcatgccgtagtgctattgacccactatcacagcctcgcttctttcaccttcgggtgcggtattagccctgagatccattgcgatggcggccacacattccgaccaccctctgtctccaactactgtatttgtgacataaccaacggaaaccatagcgtagatgagatgcctgtgaactccgctgaaaatgtctccgtgagcgactctttcttcgaagtggaagccctgatggagaagatgcggcagctacaggaatgcagagatgaggaggaagccagccaggaagagatggcttcccggtttgagatagagaaaagagaaagtatgtttgtgtttagcagtgacgatgaagaggtgacaccagcccgggctgtctctaggcactttgaagatacatcctatggatacaaagacttttctcgccatggcatgcacgtgccaacttttagagtgcaggattattgctgggaagatcacgggtactctttggtcaatcgcttgtatcccgatgtaggccagcttattgacgagaagtttcacatcgcctacaacctaacttataataccatggcgatgcacaaagatgtggatacttctatgctacgaagagccatctggaactacatccattgtatgtttgggattcggtatgatgattatgactatggcgagatcaatcagctgcttgacaggtctttcaaagtctacattaaaacagtggtctgtactccagaaaaagtgacgaaacgcatgtacgattccttttggagacagtttaaacattccgaaaaggtacatgttaatcttctgttaatagaagctcggatgcaggcagagctcctctacgccttgcgggccataacacggtatatgacttag

SEQ ID NO: 134073 - DNA, 1656 bp, synthetic construct
  misc_feature 1..1656: note = Description of Artificial Sequence: Synthetic coding sequence
  source 1..1656: mol_type = other DNA
atggcggagggagaaaatgaagtgagatgggatggtctgtgtagtcgggattccacaacccgggagactgcgctggagaatattaggcagacgatcttacgcaaaacagaatatttgcggtcggtgaaagagacacctcaccggcctagtgacgggctctccaatacggaaagctctgatggactgaataaactccttgctcatctgttgatgctctccaagagatgcccattcaaggacgttcgggaaaagagcgaatttatcctgaaatctattcaggaactggggattcgcatccctcgacccctgggccaggggccctctcgtttcatcccagagaaggaaatcttgcaagtgggcagtgaggacgcccagatgcatgctttatttgccgacagcttcgccgccctggggcgactggataatattacactggtgatggttttccatccacagtatctagagagtttcctcaaaactcaacactacctcttgcagatggatgggccactgcccttgcactacaggcattacattgggattatggccgcggccaggcaccagtgtagctacctagtcaacctccatgtaaatgactttctgcacgtcgggggagacccgaaatggctaaacggtttagaaaacgcacctcagaagttgcagaacttgggggagcttaataaggtcctggctcatcgcccttggctgattacgaaagaacatattgagggactgctaaaagcagaagaacactcttggtcacttgctgaattagtccacgccgtggtgctcctaacacattatcactcgttggcttccttcacattcggctgtggaatcagccctgaaatccactgcgacggaggccacactttccgaccccctagcgtgagcaattactgcatttgcgacatcactaacggcaatcattccgttgatgaaatgccagtgaattccgctgaaaatgtgtctgttagtgacagtttcttcgaggtagaggctctgatggagaaaatgcggcagcttcaagagtgtcgggatgaggaagaagcatcccaggaggagatggcatctcgatttgagatcgagaagcgggaatcaatgtttgtgttcagctccgacgacgaggaagtgacgccagccagggcggtctcaaggcactttgaagatactagctatgggtacaaggatttttctcggcatgggatgcatgtgccgacgttccgggtgcaggactactgttgggaggatcacggatactcactagtaaacaggctctaccccgatgtagggcagttgatagatgagaagttccacatcgcctataatttaacctacaacacaatggcaatgcataaagatgtagatacctcaatgctcagacgcgccatctggaattacatccactgtatgttcggaatcaggtacgacgactatgactacggcgagataaatcaattactggaccgatcgttcaaggtgtatatcaagaccgtggtttgcacccccgagaaggtcaccaagaggatgtatgatagcttctggagacagttcaaacactcagaaaaggttcacgtgaatctgctgcttatagaagcaagaatgcaagcggagcttctgtacgctttacgcgccattactaggtacatgacatag

SEQ ID NO: 134074 - DNA, 1302 bp, synthetic construct
  misc_feature 1..1302: note = Description of Artificial Sequence: Synthetic coding sequence
  source 1..1302: mol_type = other DNA
atgagggcagagggccttgggggccttgagcgtttctgcagcccaggaaagggccgtggactgagggcgctccagccttttcaggtcggggacctgctgttctcttgtccagcatacgcctacgtgcttacagtcaacgagcgggggaatcactgtgaatattgctttacacggaaagaaggcttatctaaatgtgggcgatgtaaacaagccttttactgcaacgtcgagtgtcagaaggaagactggcccatgcataagctggagtgcagtccgatggtggtgtttggggagaattggaaccctagcgagaccgttcggctcactgctaggattctggcaaagcagaagatccacccagagagaaccccttctgaaaagctcctggccgtaaaagaatttgaatcccatctggacaaactggacaacgaaaagaaggatctgatccagtccgacatagccgctcttcaccatttctattcaaaacacctgggattcccggacaacgattcgctggtggtgttgtttgctcaggtgaattgcaacggatttaccatcgaggacgaggagctgtcacatctgggctccgctatcttccctgatgtagcccttatgaaccactcctgctgtccgaatgtgatcgtgacttataaaggtacgctcgccgaagtgcgtgctgtacaggaaattaaacctggagaggaagttttcaccagctacatcgaccttttgtatcctacagaggatcgcaatgatagactgcgcgactcttatttctttacctgtgagtgtcaagaatgcacgactaaagataaggacaaggccaaagtggagattcgcaaactgagcgacccgcctaaggccgaggccatccgagacatggtgcgctatgctcgcaatgtgatcgaagaatttcgacgtgccaagcactataaaagtccctccgaattgctggagatttgtgaactgtcccaggagaagatgagttcggtttttgaagattcgaacgtctacatgcttcacatgatgtatcaggccatgggagtctgtctgtatatgcaggactgggaaggggccctccaatacggccagaaaatcattaaaccgtactcgaaacattaccctttgtactccctcaacgtcgcgtctatgtggctgaagttgggcaggctgtacatgggccttgagcacaaagctgctggggaaaaggcactcaagaaagccatcgcgattatggaggtggcccacggaaaggaccatccatacattagcgaaattaagcaagagatcgagagccattag

SEQ ID NO: 134075 - DNA, 819 bp, synthetic construct
  misc_feature 1..819: note = Description of Artificial Sequence: Synthetic coding sequence
  source 1..819: mol_type = other DNA
atgagggccgaagggctggggggcctggaaaggttttgtagccctgggaaggggcggggcctgcgcgctctgcagccctttcaagttggggatctgctgttctcctgtcctgcttacgcctatgttctgacagttaacgagcgcgggaatcactgtgagtactgcttcacccgcaaggaaggtctctctaagtgcggcagatgtaagcaggccttttactgtaacgtagaatgtcaaaaggaagattggccgatgcacaagcttgaatgtagcccaatggtcgtatttggagaaaactggaatccctcggaaacagtgagactgacagcccgtattctcgctaagcaaaaaattcatcccgaacgcacacctagtgaaaaactcctggcggttaaggagtttgagtctcatctggacaaactggacaacgagaaaaaggacctcattcaatctgatatcgcagccctgcaccatttctatagcaagcatctggggttccccgacaatgactcccttgttgtgctattcgctcaggtgaactgcaacggatttacaatagaagatgaagagctgtctcatctggggtccgcaattttccctgatgtggcacttatgaaccactcatgctgtcccaacgtcatcgtaacatataagggaacgttggccgaagtccgcgcggtgcaagagatcaaacccggtgaagaagtgttcacttcctacatagacctactgtaccctaccgaggataggaatgataggctcagagattcctatttttttacgtgtgaatgtcaggaatgtacaaccaaggacaaatag

SEQ ID NO: 134076 - DNA, 5712 bp, synthetic construct
  misc_feature 1..5712: note = Description of Artificial Sequence: Synthetic coding sequence
  source 1..5712: mol_type = other DNA
atggccgccgggacctgggcagcagcagccgccgccgccgcggccgattatttcgtcttggttgcgtttggaccacatcctcgtgggtctggcgagggccaaggccagatccttcagaggtttccagagaaagactgggaagataatccctttcctcagggaattgagcttttctgccagccatccggctggcagctctgtccagaaaggaaccccccgactttttttgtggcggtgttaaccgacatcaattcagaaagacattactgcgcctgtctaaccttctgggagccagcagagccaagtcaagaaaccacccgagtggaggacgcgaccgaacgcgaagaggagggcgatgagggtggacaaactcacctgagtccgaccgcacctgctccttccgcccagctgtttgcccctaagactcttgttctggtatcccggctcgatcatacagaggtgttccggaatagcctgggactgatctacgccatccacgttgagggtctcaatgtgtgcctggagaacgtcataggaaatctccttacctgcactgtgcccctggccggggggtctcagcgtacaatcagcttgggggctggggatcgtcaggtcatccaaacacccctggccgattcactgccagtttcacgctgctcagtcgcgttactgttcagacaattgggcatcaccaacgtgctgagcctgttctgtgccgcgctgacagagcacaaagtgctctttttgtcaaggtcctaccagcggctggcagatgcatgccggggtctcctagccctcttgtttcctcttagatactctttcacttacgttcccatactgcccgctcagctgctcgaagtgctgagcacacctactcctttcatcataggggtgaacgccgcctttcaggctgagacacaggagttacttgacgtcatcgttgccgatttggacggaggaacagtgactattcctgagtgtgtgcatatccccccacttcccgaacctctccagtctcagacacatagtgtcctcagtatggtgttggatcccgagctcgagctcgcggacctcgcattcccacctccaaccacttccacaagttctctaaaaatgcaggataaggagctgcgtgctgttttcctacggctgtttgctcagctccttcagggctaccgttggtgccttcacgtcgtacgcattcatccggaacctgttattaggttccacaaagccgcatttctgggacagaggggtctggtagaggatgacttcctgatgaaagtactcgaaggaatggcctttgcaggcttcgtcagcgaaagaggcgtgccatatcgacctaccgaccttttcgatgagttggttgctcacgaggtcgcccgtatgagagccgatgaaaaccacccccagagagtcctgcgccatgttcaggagctagctgaacaattgtataagaacgagaacccataccccgcagttgcaatgcacaaggtccagcggcccggcgagagttctcacctgcgaagagttcctaggccctttccgcgactggatgagggcaccgtgcagtggatcgtggatcaggcagcagccaaaatgcaaggagccccccctgcagtaaaagccgagaggcgcaccactgtgcccagcggaccccccatgaccgcgatcttggagcgctgtagcggactgcatgttaatagtgcaaggagactcgaagttgtgcgcaattgcatttcctacgtgttcgagggcaagatgctggaggctaagaaattgctccctgcagttctccgcgcgctgaagggacgcgctgccagacggtgtctggcacaggaactgcacctgcacgtccagcagaatcgcgcagtcctcgatcatcagcaattcgactttgtggtccggatgatgaattgttgcctacaggattgcacgtcactggacgaacatggaatcgctgccgcactgctccccttagtgacagcgttttgtaggaagctctcgcccggagttacccagtttgcctattcatgcgttcaggagcatgtcgtctggagcactccacaattttgggaggcaatgttttatggggatgtgcagacacatataagggccctttacctggagcccacggaggatttagctcccgcgcaagaggttggagaggcgcccagccaggaggacgaaagaagtgcactggacgtcgcatctgagcaacgtaggctgtggcctacactcagtagggagaagcagcaggagctggtgcagaaggaggaatctaccgtgttctcgcaggcaatacattacgcaaaccgaatgagctatctcctgctcccccttgattcttccaagagcaggttactgcgcgaaagggccgggctaggtgacttagagagtgcttccaattctctggtaaccaattctatggccgggtccgttgccgagagttacgacacagagtcaggatttgaagacgcagaaacttgcgatgtggccggagctgtcgtgagattcatcaataggtttgtagataaggtatgcacagaatccggggtgacatcagatcatctaaaaggtcttcacgtgatggtcccagatatcgtgcagatgcatatcgagacactggaagccgtccagcgcgagtctaggcgtctgcctcccatccagaaacctaaattgttgcgtccaaggctattacccggagaagaatgtgtgctcgacggtctccgcgtatacctgctgccggacggccgggaggagggcgcggggggctctgctgggggcccagcactgctgcccgccgagggtgcggtcttcctgaccacttacagggtaatcttcaccggaatgcctaccgaccctctcgtcggggagcaggtcgtggttagaagcttccctgttgctgctctcacaaaagaaaaacggatctctgtacagacccccgtggatcagttactgcaggacggtctgcaactacggagttgtacattccaactgctgaaaatggcgtttgacgaagaggtggggtctgactcagccgagctgttccgtaagcaactacacaaactgagataccctcccgatatcagggccacattcgcctttactctgggcagcgctcatactccaggccgaccacctcgggtgaccaaggataagggtccctcgctgaggaccctgagcagaaacttagtgaaaaacgcaaaaaagacaataggacgtcagcacgtgacgcgcaaaaaatacaatccacctagctgggagcatagaggccagcctccacccgaggaccaagaggacgagatttcagtgtccgaggaactggaaccttcaacactcacgccatcctctgctcttaagcctagtgatcgtatgaccatgtcttctcttgttgaacgcgcgtgttgtcgagactaccaaaggctcggcctgggaactttgtcttcaagtttaagtagggcaaaatcagaacccttcagaattagccccgtcaaccgaatgtacgctatctgccgatcctacccagggcttctgatcgtgcctcagagcgtgcaagacaatgcactacagagggttagtaggtgctaccgccaaaaccgcttccccgtagtgtgctggcgctccggcaggagcaaagcagtcctcctcagaagcgggggccttcatggtaagggtgttgtcggactgtttaaggcacaaaatgccccatcgccgggacaatcccaggctgacagctcaagcctggagcaagaaaagtacctgcaggcagtggtctccagcatgcctaggtatgctgacgcgtccgggcgaaacaccctgagcggtttctctagtgcccacatgggaagccatgtgcccagcccaagagcacgggttaccaccctcagcaaccctatggcagcctcggcgagccgtcgaaccgcaccccggggaaaatggggtagtgtcaggacgtctggcagaagctctggactgggaaccgatgtgggctctaggttggctggacgagacgccttggcgccgcctcaagcgaacggagggcctcccgaccctggcttccttaggccccagagagcagccctgtacattctgggtgataaggcccagctcaaaggcgtgagatccgatccactccaacaatgggagctggtcccaatagaggttttcgaagcacgccaggtcaaagcctcattcaagaagctccttaaggcatgcgtccctggttgcccagcagcagagcctagtcccgctagcttcctgagatctctggaagattctgaatggctcattcaaatccataaactgcttcaggttagcgtgttagtggtggaattactggattcggggtcttccgtgttggtaggcttggaggatggctgggatattaccacccaggtcgtgtccctggtacagctcttgtcggatcctttttaccggactttggagggctttaggttgttagtggagaaagaatggctgtccttcggtcaccgcttttcacacagaggcgcccacactctcgccggccagtcttctggattcacccctgtgttcctccagtttttggattgtgtccaccaggtccacttgcagttccccatggagtttgaattctctcagttttatctgaaatttctggggtaccaccatgttagtcggcgtttccgtaccttcttgctggactctgactatgagcgcatcgaattaggcctgctgtatgaagagaaaggagagcgcagagggcaggtgccttgcaggtccgtgtgggagtacgtagatagattgagcaagcgaacccccgtgttccacaattacatgtatgcaccagaggatgccgaagtcctgcgaccgtattcaaatgtgagcaacctgaaggtgtgggatttttatacagaggagaccttggcagaaggacccccttacgactgggagctcgcacaagggcctccagagcctcccgaggaggagcgcagcgatggtggggcaccacagtccaggcgaagggtggtctggccttgttatgacagctgtccacgggctcagcccgacgctatatccagactgctggaagagcttcagcggctggagaccgaactgggacaacccgctgaaagatggaaggacacatgggaccgggtgaaggcagcccagaggcttgaagggcggcctgacggcaggggcaccccgtctagcctgctggtgtctacagcccctcaccatcgcaggtcattgggcgtatacctgcaggaggggcccgtcggtagtacactgtctttatcgctggacagtgaccagtccagtgggtccaccacaagcggatcaagacaggctgcgagacggagtacctccaccctctattctcagtttcagaccgccgaatctgaaaacagatcttatgaaggcacattatacaaaaaaggtgccttcatgaagccgtggaaggccagatggtttgtgttggacaagacaaaacaccagctcaggtactatgatcaccgagtcgataccgagtgcaaaggagtcatcgatctcgcagaggtggaagccgttgcacccggcaccccgactatgggggctccaaagaccgttgacgaaaaagccttttttgatgtgaagaccactaggcgcgtgtacaacttctgtgcccaagatgtgcctagcgcccagcaatgggtggacagaattcagagctgcctgagtgacgcctag

SEQ ID NO: 134077 - DNA, 2697 bp, synthetic construct
  misc_feature 1..2697: note = Description of Artificial Sequence: Synthetic coding sequence
  source 1..2697: mol_type = other DNA
atggccgccggaacttgggctgcagccgctgcagctgcagctgccgactatttcgtcctggtggcctttgggccgcatccccgagggtccggtgagggacaaggacaaatcctgcagcgttttcccgagaaggactgggaggacaatcctttcccccagggcatcgagctgttctgccagccctcaggttggcagttgtgcccggaacgtaatccaccgaccttcttcgttgccgtactcaccgacattaatagcgagcggcactactgcgcgtgcctgaccttttgggaacccgcagagccctcacagcaggaaaccactcgcgtcgaggatgcgactgagcgcgaggaagaaggagacgagggcgggcaaactcacctttcccccacagctcctgcacccagtgcgcagttgttcgccccgaaaacgttggtccttgtgagccggctggaccacacggaggtgttcagaaacagtctgggcctcatctacgctatccacgtggaaggccttaatgtttgcctggaaaacgtcatcggaaacctcctgacctgtacagttcctctcgctggtggcagccagcgtaccattagtttgggcgccggagacaggcaggtaattcagacccccttggcagacagcctgccggtatcacgttgctctgtggccctcctcttccggcagctcggtatcactaatgtgctctctcttttctgcgctgccctgactgaacataaggtgctgttcctgtcacggtcttatcagcgcttggccgacgcttgcagaggactgctagccctcctgttccctctgagatacagtttcacttacgtgcctatactccccgcgcagctgttggaggtactctcaacgcccactccattcataattggagtgaacgcggcttttcaggcggagacacaggagttattagacgtgatcgttgccgacttagatggaggtacagttactattccagagtgtgtgcacatccctccccttccggagccattgcagagccagactcatagcgttctgtctatggtgctggatcccgagctggagcttgctgacctcgccttcccccctccaaccacgtctacttccagcctaaaaatgcaagacaaagaacttagggccgtgttcctgaggctgttcgcccaacttctgcagggttatcgctggtgtttgcacgttgttcggatccatcccgagccagttatccggttccacaaagccgccttcctgggtcaacgggggctcgtcgaggatgattttctgatgaaggtgttagagggaatggcctttgccggctttgttagcgagaggggtgttccttatcgccctacagacctgttcgacgagttggttgctcatgaggtggcacgcatgagggccgatgaaaatcacccacaacgggtcttacgacatgtgcaagaactagcagagcagttgtataagaacgagaacccgtatcctgctgttgccatgcataaggtgcaacgcccgggcgagtcttcccatctacgccgggttcctcgaccgtttcctagactcgacgaaggtacagtgcagtggatcgtggatcaagctgccgcaaagatgcagggtgcgcctcccgcagtgaaggctgagagaaggaccacggtgccatccggcccacccatgaccgctattctggaacgttgtagcggcttacacgtaaactccgcccgcaggctcgaagtggtcagaaattgtatctcatatgtatttgaaggaaagatgctcgaagctaaaaagttgctgcctgcagttttgcgagcccttaagggtcgagcagcgagacgctgtttagcccaggagctccatttacacgtgcagcagaaccgtgctgttctcgatcaccagcagttcgacttcgtcgtgaggatgatgaattgctgcctacaggattgcacctccctggacgagcacggcattgctgcagcactactacctctggtcacagcattctgccggaaactgagtccaggtgtcacacaattcgcctactcttgcgtgcaagaacacgtcgtctggtcaacgccacaattttgggaggccatgttttacggcgacgtgcaaacgcacatccgggccctgtacttagaacccaccgaagatttggctcctgctcaggaggtgggcgaagcccctagtcaagaggatgagcggagcgctctggacgtggcctcggagcagcggcgtctctggccaactctcagtcgggaaaagcaacaggagttggttcagaaagaagaaagtacggtcttcagccaggcgatacactatgcgaaccgcatgtcctacttgctgcttcccctcgactccagcaaatcacgcctgctcagggaacgcgctggtcttggggacttggagagcgcgtctaatagcctggtcaccaattcgatggcggggagcgtcgctgagtcatacgataccgaaagcggcttcgaggacgcagaaacttgcgacgtggcaggagcagtggtgaggtttataaataggttcgtggataaagtatgcacagagagcggggtcacctcagatcacctgaaggggcttcacgttatggtgcctgatatcgtccagatgcacatagaaaccttagaggctgttcagcgagagtctagacggctccctcctatccagaaacctaaactactccggccttag

SEQ ID NO: 134078 - DNA, 5682 bp, synthetic construct
  misc_feature 1..5682: note = Description of Artificial Sequence: Synthetic coding sequence
  source 1..5682: mol_type = other DNA
atggctaggttggctgactattttgttctggtggccttcggtccccacccgagggggagcggggagggccaggggcagatcctgcaacgcttccctgagaaagactgggaggacaatcccttccctcagggaattgaattgttttgtcagccaagtggttggcaactttgtccggaacggaaccctccaaccttcttcgtcgctgtcctcacagacataaattcagagcgccactattgtgcgtgtctgacattttgggagccggcagagcctagccaagagaccacgcgtgtcgaggacgcgaccgaacgtgaggaggagggggatgaagggggtcagacacatctttccccaaccgcgccggcaccatccgcccagctgttcgctcctaagaccctggtgttggtctctagactggaccacaccgaagtcttccggaacagcctgggccttatttacgctatacacgtagaggggctcaacgtttgtctagaaaacgttattgggaacctgcttacgtgcaccgtccccttagctggcgggtcacagcgcaccatatcactcggtgccggggatcggcaggttatccaaactcctttggctgattcgctccccgtatctcgttgcagcgttgccctactcttcaggcagcttggtatcaccaacgtgctgagcctcttctgtgccgcccttacagaacacaaggtattatttctcagcaggtcctaccagagactggcggatgcctgtagagggcttctcgctctgctgtttccactgcgctattccttcacctatgtgcccattcttcctgcccagctgctggaggtactgagtacccctacacctttcatcatcggggtgaacgccgcctttcaggccgaaactcaagaactgttagatgtaattgtggcggatctggatggtgggaccgtgacgattcccgaatgcgtccacatcccaccactgccagagccacttcagtcacagacacactccgtgttatctatggtgctcgaccccgagcttgaactggcggaccttgcattccctccccccacaacttcaacgagcagcctgaagatgcaggataaggaactccgggccgtgtttcttaggctgttcgcccagctcctgcagggctaccggtggtgccttcatgtagtcaggatccaccctgaacccgttattaggttccacaaggccgcattcctaggccagcggggactggtcgaagacgattttctaatgaaagtgcttgagggtatggcattcgctgggtttgtgagtgagcgcggggttccttacaggcctactgacctgttcgacgaactcgtcgcccacgaagtagccagaatgcgagccgatgagaatcatcctcagagagtactcaggcacgtgcaagaactagccgagcaactttacaaaaacgaaaacccatatcccgctgtggctatgcacaaagttcagcggccgggagaatcaagtcacctgagacgggttcctaggccgttcccccggttggatgaagggactgtccagtggatcgtggaccaggccgccgctaaaatgcagggagctccccctgctgtcaaggcagagaggcgcactaccgtcccttccggtcctcccatgaccgctatcctggaacgatgctcagggctgcacgttaattctgcgcggcggttagaagttgtgcgaaattgcatttcttacgtctttgaggggaagatgctcgaggcgaaaaagctgctaccagccgtcctgcgagctctcaaaggacgtgctgcccggcgatgcctggcgcaggaactccatcttcatgtacagcagaacagagcagtgctagatcaccagcaattcgacttcgtcgtccgcatgatgaactgttgtctccaggattgcacgtcattggacgagcatgggattgctgccgctctccttccgctcgtaaccgccttctgcagaaagttgagccctggagtcacacaattcgcctacagttgtgtccaggagcatgtggtgtggagtacaccccaattctgggaggctatgttctatggcgatgtccaaacccacatccgagcactgtatctggaacccaccgaggatttggctcctgcacaggaggttggcgaggccccttctcaggaagatgagcggtctgccttggacgttgcttccgaacagagacgtctctggcccaccctttcaagggaaaaacaacaagaattagttcaaaaagaagaatctacagtgttttctcaggcaattcactacgccaacagaatgtcatacctcctgttaccccttgactcaagcaaatcgcgtctattgagggagagggcaggactcggcgaccttgagagtgcgtcaaattctctagtgacaaatagtatggcaggctctgttgccgagtcctacgatactgaaagcggcttcgaagatgctgagacatgtgacgtagccggagccgtcgtgcggtttataaatcgctttgtagacaaggtctgtacggaaagcggggtgacctccgaccacttgaagggcttacacgtcatggtcccagatatcgtccagatgcatatcgaaactctcgaggcagtccagcgcgaaagccggcgtctaccacccattcagaaaccgaagttgttgagaccgaggctcctgcctggggaggaatgcgtactggacggccttcgtgtctatctgctcccagacggacgggaagagggagcaggcgggtctgccggcggtcccgcccttcttcctgctgaaggcgcggtcttcttgacaacgtacagagtgatatttaccggtatgccaactgatccactggtgggagagcaggtggtcgtgaggagcttcccggttgccgcactaaccaaagagaaaagaatctccgtgcagacacctgtggatcagctgctgcaggatggcctgcaactgcgttcttgcacctttcaactcttgaagatggctttcgacgaggaagtagggagtgatagtgccgagctgtttcgcaaacagctgcataagctgcgctatcctcctgacatccgggccacatttgcttttacattaggcagcgcgcataccccaggcagaccccctcgcgtgacaaaagacaaagggccttcactccgcaccctgagccgcaaccttgttaaaaacgctaagaaaaccattggacggcagcacgtgacaagaaagaaatataatccgccctcatgggagcacaggggccaacctcccccagaagaccaggaagacgagatatctgtgtctgaagaactggagccttcaaccttgaccccttcctctgccctaaagcctagtgatcggatgactatgagctcattagtggagcgagcatgttgtcgtgactatcagcggctgggactggggactttaagctcttccctttccagagctaagtctgaaccgtttcgaatttctcctgtaaatcgcatgtacgccatatgcaggtcgtatccaggcctgctgattgtcccccaatcggtgcaggacaacgccctgcagcgggtatccaggtgctaccgccagaacaggtttccggtcgtctgctggcgcagcggccggagcaaagccgtactcctacggtctggtggccttcatggaaaaggcgttgtaggcctttttaaggctcagaatgcgccgtctcccggccagagtcaggccgactccagttctttggagcaggaaaagtatttgcaagccgtggtgtctagcatgccacgatacgctgacgcgagcggccgaaatactctgtcaggcttctcaagtgctcatatggggtcacatgtgcctagcccaagagccagagtgaccacgctaagtaatcccatggccgcaagtgcaagccgtcgcacggcacccaggggtaagtggggtagtgtgcgcacctccgggaggtctagcggtttaggtacggatgtggggtctaggttagccgggagggacgccctggctcccccacaggccaacggaggaccacccgatcctggatttctcagacctcagcgcgccgcactctacatcctgggagataaagcccagctcaagggagtccggagcgaccctttgcagcagtgggaactagtacctattgaggttttcgaagcccgacaggtgaaagcctcgtttaaaaagcttttaaaggcctgtgttccaggatgtccagcagccgagccatctccagcaagttttttgcgcagccttgaggacagcgaatggcttatacaaattcacaaacttctccaggtttctgttctagtcgtggaactgcttgactcgggaagctcagtgcttgttggactcgaggacggatgggacatcactactcaggtggtaagcttggtccaacttttaagcgatcccttctaccggaccctggaggggttccgcctgctggtggaaaaggaatggctctccttcggacacagattcagccatcggggcgcacatacccttgcaggtcaatcttcaggcttcacgcctgtatttctccagtttcttgactgcgttcaccaggttcaccttcagttccccatggaatttgaatttagtcagttctatttgaaattcctgggttatcatcacgtgtcacgcagattcaggaccttcttattagacagcgactacgaacgcattgaacttggattactgtatgaagagaaaggcgaacggcgcggtcaggttccatgccgctccgtctgggaatatgttgacagattaagcaagcggacccccgtgtttcataattatatgtacgcaccggaggacgcggaggtgcttcgtccctattccaacgtgtcgaatctgaaagtgtgggacttctataccgaagaaacattggcggaagggcctccatatgactgggaactggcccagggaccccccgaaccaccagaagaagagagaagcgatggaggggccccccagtcccgacgccgcgtcgtttggccttgctacgactcatgtcctcgcgcacagcccgatgcaattagccgcctcctcgaagagctgcagaggctcgaaactgagctcggccagcctgccgaaagatggaaggatacctgggaccgagtgaaggcagcccagagactggagggacgtcctgacggccggggaacaccatcaagcctactcgtgtctacagccccccaccacagacgatctctgggtgtgtacctgcaggagggtccagttggctccaccctgtctctgtcattggattcagatcagagttcagggagtacgacctctgggtcccgtcaggctgcccggcgatcaacttccaccctgtacagccagtttcagacggctgagagcgagaaccggagttatgaaggtactttatataagaaaggggctttcatgaaaccatggaaagcccggtggttcgttctcgacaagacgaaacatcaactgcgttactacgaccacagggtagacacggagtgtaaaggtgttatcgacctggctgaagtggaagctgtggccccgggcacccccacaatgggggcgcccaagaccgtcgacgaaaaagcgttttttgacgtcaagacaaccagaagggtttacaatttctgtgctcaggacgtgcccagcgctcagcaatgggtcgatagaatccaatcgtgcctctcagatgcttag

SEQ ID NO: 134079 - DNA, 5604 bp, synthetic construct
  misc_feature 1..5604: note = Description of Artificial Sequence: Synthetic coding sequence
  source 1..5604: mol_type = other DNA
atggcccgactggccgattactttgttctggtagccttcggcccacaccctcgggggagtggggagggacaaggccagatactgcagcggttcccagagaaggactgggaagataacccatttcctcaggggatagaactcttctgccagccatccgggtggcaactttgtccggagaggaatccacctacattctttgtcgcagtgctcacagatatcaacagtgagagacattactgcgcgtgtctgaccttctgggagccggctgaaccttcacaggagacaacccgagtagaggatgcaaccgagagagaggaggaaggagatgaaggtggccaaactcatctcagccccactgcccccgcccccagcgcccagctgtttgctcccaagacattggtgttggtctccaggctggaccacactgaggtcttcaggaacagcctgggacttatttatgccatccacgtggagggtctaaatgtatgccttgagaacgtgatcggcaatcttctcacctgcacagtaccacttgccggaggctcacaaaggaccatatctctaggtgcaggagatcggcaggtgatccaaacacccctggctgactccctgcctgtgagtcgttgtagtgttgctctgcttttccgtcagttagggatcaccaatgtccttagtttgttctgtgcagcactcactgaacacaaagtgctgtttttgtcaagaagctaccagcggctggcggatgcctgtaggggcctgctggccttgctgtttccattaaggtacagctttacgtatgtaccaatactacccgcccagctattggaagtactgagcacccctaccccattcatcataggcgtcaatgcagcttttcaggccgagacacaggaactgctagatgtaatcgtggccgacctggatgggggaactgtcaccatacctgagtgtgtacatatcccccctctgccagagccgctgcagagtcagacccactcggttctgtccatggtattggacccagagttggaactggcagacctggcttttcctccacctactacctccactagttctctgaaaatgcaggacaaggaactgcgggccgtttttctccggctttttgcccagttactgcagggctatcgatggtgcctgcatgttgtcagaattcaccccgagcctgtcattcgatttcacaaagctgcttttttggggcagagaggtctggtagaagacgattttctcatgaaggtcctggaagggatggcctttgctgggtttgtgtccgagcgtggggtgccctaccgccccactgatctgttcgacgaacttgtcgctcatgaagtggctcggatgcgtgctgacgagaatcatccccagagagtactcaggcacgtgcaggaacttgctgagcagctgtataagaatgagaacccataccctgctgttgcgatgcataaggtgcagcggcccggggaatcgtcccatctgcgcagagtgcctcggccctttcctcgcttggacgaagggacagtgcagtggattgtggatcaagctgccgcgaagatgcagggggctccccctgccgtcaaagcagagagacggactactgtgcctagcggccctcctatgaccgctatcttggaacggtgctctggcctgcacgtgaatagcgcgaggcgcctggaggttgtaagaaactgcatctcctacgtgttcgaaggcaaaatgctggaagcaaagaagttacttcctgccgtgcttcgcgctctgaaaggtcgcgcagctcgccgatgtctggctcaggagttacatctacatgtccagcagaacagggcagtgctcgatcatcagcaatttgacttcgtggtcaggatgatgaattgctgcctacaagattgtacatcattagatgaacatggcatcgcagcagctttactgcccctggtgactgccttctgtcggaagctcagccccggagtgactcagttcgcgtactcctgcgttcaggagcacgtcgtttggtctaccccacagttctgggaggccatgttctatggcgatgtccagactcatatccgcgctctgtacctcgagccaactgaagacctggctccagcgcaggaagtgggtgaagctccaagccaggaagacgagagaagtgccctggacgtagctagtgagcaaagacggctatggcccactctctcgcgggagaagcagcaggagctggttcagaaagaagagtccaccgtcttctctcaggcgattcattacgcgaaccgcatgagttatctgctgctgcctctggactcctctaagagccggctcctaagggaacgagctgggctgggtgatcttgaatccgcatcaaatagtttagtgaccaactcaatggcgggctctgtggccgagagttacgatacagaaagtgggttcgaggatgcggaaacttgcgatgtggccggagcggtggtccgtttcatcaaccggttcgtggataaggtgtgcactgaatccggcgtgactagcgaccatctcaaggggctgcacgtcatggtgcccgacattgttcagatgcacattgaaactctggaagcagtgcagagggagtcgcggcgactgccgcctatacaaaaacccaagctgctccggcctaggttacttcctggagaggagtgcgtccttgacgggctcagagtgtacctgttgccagacggtagagaggaaggggccggcggcagcgccggcggacctgcgctactgcctgccgagggggccgtgttcttgacaacttatcgggtgatcttcaccggtatgccaacagatcccttggtgggagagcaggtcgtcgtgcgcagcttccctgtggcggcacttacaaaagagaagcggatctccgtacagactcctgtggaccaactactccaggatgggctccagttgcggtcttgtacttttcagctgctgaagatggcctttgacgaggaggtgggaagcgattctgcggaattgtttcgcaagcagctgcataagcttaggtaccctccagacataagggcgacctttgctttcacattaggaagtgcccacacccctggcagacccccaagggtaaccaaggataaaggcccgtctctgcgcacactctccaggaatctggttaagaatgccaagaaaaccattggcagacagcacgtcaccaggaaaaaatacaaccctccttcttgggagcaccgaggccagcccccacctgaagaccaggaagacgagatatcagtctccgaggagttagagccttcaaccctcaccccatcatccgccctcaaacccagtgatcgtatgactatgtcaagcttggtggagagagcctgttgcagagactatcaacgccttgggctgggaactttaagtagcagcctttcacgagcaaaaagcgaacccttccggatatctcccgttaaccgcatgtacgccatatgcagatcttacccaggattactgatagtgccacagagcgttcaggacaatgccctgcagcgggtttctagatgttaccggcagaataggtttcctgtcgtgtgttggcgcagcggacgcagcaaagcagtgctgctcaggtccggaggattacacggcaagggggttgtgggactgtttaaagcacagaacgctccatcacccggtcagagccaagccgactcatccagcttagaacaggagaaatacttgcaggcggtggtttcctccatgcccaggtacgctgacgcctcagggcgcaataccctgtccggattttcatccgctcacatgggctctcacggaaaatggggatctgtgcgcacgtccggtaggagcagcggccttggcacggatgttgggagccgcctggccggacgcgatgccctcgcacccccccaggccaatgggggtccgccagaccctggattcctgcggccacagcgagcggcactctacattctcggagataaggctcaactcaagggagttaggagtgaccctctccagcagtgggagctcgtgccaattgaggtgtttgaagccagacaggtgaaagccagctttaaaaagcttctaaaggcgtgtgtgccaggttgtccagcggccgaaccatcccctgcctctttcctgcggagtctggaagactctgaatggctcatccagattcacaaactgctgcaagtttccgtactggttgtggagctacttgacagtggatcgagtgtgctggttggccttgaggatggatgggatatcactacccaggtggtgagtctggtgcaactcctctcagaccctttctaccgcacactcgagggctttaggctgctcgtggagaaagagtggctgagttttggtcacaggtttagccaccgtggcgcccataccctagctggacaatcctccgggtttaccccagtcttccttcagtttctggattgcgtccatcaagttcacttacagttcccaatggaatttgaatttagccagttctacctgaagtttctcggctatcaccacgtgagtaggaggttccggaccttccttcttgattccgattatgagagaattgaactcggactgctctatgaggaaaagggtgagcgccgaggccaggtcccctgccgatcggtctgggagtacgttgaccgactcagtaaacgaacgcctgttttccacaattacatgtatgcccctgaggacgccgaggtgttacggccctactcaaatgtttccaacctgaaggtctgggacttttacactgaggaaaccctggctgaaggacctccttacgactgggagctcgcccaaggccccccggagccaccggaagaggaaagatctgatgggggagcaccgcagtcccggcggcgagtggtgtggccttgttatgactcctgtccacgggcccaacctgacgcgatttcacggctgctggaggagctacagcgattagagacagagctcggccagcctgctgagagatggaaggatacatgggatcgagtcaaagctgcgcagcgactcgagggtcgcccggatgggcggggcaccccgtcctctctccttgtcagcacggctccccaccacaggaggtcactgggcgtctaccttcaggagggacccgtgggttcaaccctctccctgtccctggattctgatcagtcgtccggatccaccactagcggttcccggcaggctgcccgacgctccacttcaactctgtattcacagtttcaaaccgcggagagcgaaaatagatcctacgaagggactctgtacaagaagggcgcttttatgaagccatggaaggctcggtggttcgtgctggacaagacaaaacaccagctgcgatactacgatcatcgcgtggacaccgaatgtaaaggagtgatcgacctcgccgaagtggaggccgtagcgcctggcacccccacgatgggagccccgaagacggtcgatgagaaggccttttttgacgtgaaaacgactaggcgggtgtacaatttctgtgcgcaagacgtgcctagcgcccagcagtgggtggatagaatacagagctgtctctccgacgcctag

SEQ ID NO: 134080 - DNA, 5550 bp, synthetic construct
  misc_feature 1..5550: note = Description of Artificial Sequence: Synthetic coding sequence
  source 1..5550: mol_type = other DNA
atggcccgcctggcagactatttcatcgtggtcggctacgaccacgagaagccagggtcaggagaaggactcgggaagatcattcagagattccctcagaaagactgggacgatacccccttcccgcagggaatcgaattgttctgtcagccggggggatggcagctgagccgcgagcggaaacagccgaccttctttgtggttgtgttgacagacattgacagtgatcgccactattgtagctgtttaaccttttatgaagcagagattaacctccagggtactaaaaaagaagagatcgaaggggaggccaaagtatctggcctgatccagcccgccgaggtgtttgcacccaagtccctcgtccttgtgagccgcctgtactacccagagatcttcagagcttgcttgggcctgatttatacggtgtatgtagactcactcaatgtgagcctggagtccttgatcgctaacctgtgcgcatgtcttgtccctgccgctgggggaagtcagaaattattttctttgggcgcaggcgatcgacaacttattcagacccctctccatgacagcctgccaattacgggcaccagcgtggccctgctattccagcagttgggtatccagaacgttctgtccctgttttgcgcagtcctcactgagaacaaagtactgttccactcagctagtttccaaaggttatcggacgcctgtcgggcacttgagagtctaatgtttcccttgaagtactcctatccctacatccccatcctgccggcacagctgctcgaagtcctaagcagtccaacgccatttattataggggtgcattccgtgttcaagaccgacgttcacgagctgttggatgtcatcatagccgacttggacggcggaaccatcaagataccagaatgcattcacctctccagcctgcctgagcccctcctgcaccagacgcagtccgcattgtccctcatccttcacccggacctggaggtggctgaccatgcctttcctccaccgagaacggctttgagtcactcgaagatgctcgataaagaggtgcgggccgtgtttttgcgtctgtttgcacaactgttccagggctatcgctcgtgtttgcagcttatcagaatacacgccgagcccgtgattcactttcacaagaccgccttcttagggcaacgtggactagtggagaacgactttctgaccaaagttctgtctggcatggcgttcgccggcttcgtgtccgaaaggggaccaccttaccgatcttgtgatctgttcgacgaactcgtggcatttgaagtggaaaggataaaggtagaagagaacaaccccgtcaagatgataaaacatgtgagagagctggctgagcaactgttcaaaaacgagaaccctaacccacatatggccttccagaaggtgccaaggcccaccgagggcagccacttacgcgtgcacatcctcccattccccgagattaacgaggccagggtccaggagctgattcaggagaatgtcgccaagaatcaaaacgccccacccgcgacacgaattgaaaaaaagtgcgtcgtccccgcgggcccacccgtcgtgtccattatggataaggtgacaaccgtgttcaacagcgcacagcgtttggaggttgttagaaactgcatttccttcatttttgagaataaaatcctggagaccgaaaagaccctcccagccgcactgagagctcttaagggcaaagcagctcgacagtgcctgacagacgagttaggacttcacgtgcagcagaaccgtgcaatcttggatcatcaacagtttgactacatcattcgcatgatgaattgtacgctacaggactgttcatccttagaggaatacaatatcgcagcagctctgctccctctgactagtgccttctatcgcaagttggcccccggggtgtcgcagtttgcctacacttgcgtccaggatcatccaatttggacaaaccagcagttctgggaaactactttttacaatgcagtccaggagcaagtgcggtctctatatctatcggccaaggaggacaatcatgcgccccacctgaagcaaaaggataagctccctgatgatcactaccaggagaagactgctatggatctggccgccgagcagctgagactgtggcccaccctgagcaagtcaactcagcaggagcttgtccagcatgaggaaagtaccgtctttagtcaggcaatccattttgccaatctcatggttaatctactagtgccccttgatacaagtaagaataaactgcttagaacaagcgctccaggagactgggagagcggttcaaacagcattgtgacaaactcgattgctggcagcgtggccgagagctacgatactgaaagtgggttcgaggatagtgagaacactgacatcgcaaacagtgtggtgcggttcattacacgattcatcgacaaagtgtgcaccgagtctggagttacccaggaccacataaagagtctgcattgcatgatccccggtatcgtcgctatgcatatcgagactctggaggctgtccatagagaaagccgacggttacctccgattcagaaacccaagattttgagaccggctcttctacccggggaagagatcgtgtgtgaaggcctccgtgtgctgctggatccagacggcagagaggaggctaccggcggactgctgggcggccctcagctgcttcctgccgaaggagctctgttcttgacaacatatcgaatcctcttccgcggcacgcctcatgatcagctcgtgggagagcagaccgtggttaggagtttccctatcgcctcaataacgaaagaaaaaaaaattacaatgcagaatcaactgcaacagaacatgcaggaaggccttcagataacttccgccagcttccagctgataaaagtcgcgtttgatgaggaggtctctccagaggtcgttgaaatattcaagaagcagttgatgaagtttcggtacccacagtccattttttctacatttgccttcgcggccgggcagaccactccacagattatattacctaaacagaaagagaaaaatacatcatttcggaccttcagtaagactattgtgaaaggcgccaaaagggccggaaaaatgacaattgggagacagtacctgctgaagaagaagactggaaccatcgttgaagagagggttaacagacccggttggaatgaggacgacgacgtgtctgtgagtgatgagagcgagctccccacatcaaccacattgaaggcttcagaaaaatcaaccatggagcagctggtggagaaggcatgctttcgcgattatcaacgcctgggactgggtactatctcaggctccagcagtcgatccagaccagaatacttccggatcactgcctcgaaccgcatgtacagcctgtgtcgatcctatcccggtctgcttgtggtacctcaggctgtccaggacagttccctgccccgcgtcgctagatgttaccgccataaccgactgcctgtggtgtgctggaagaattcaaggtccggcacgctgctgctccgaagtggcggcttccacggaaaaggtgtggtgggactttttaaaagccaaaactcccctcaggccgctcctactagctcattagaaagcagtagctccattgagcaggagaaatacctccaggccttattgaacgcggtgtcagttcaccagaagctgcggggaaatagcacgttgaccgtgaggcccgccttcgccctgtcgccgggcgtgtgggcttctcttcgctccagcactcgcctcatttcctctcccacgtcattcattgacgtgggtgcccgcctggctggcaaagatcattccgcaagtttctccaatagctcctatctccagaaccagttgttaaaacgccaagccgccctctatatttttggagaaaaatcacagctgaggaactttaaagtagagtttgcccttaactgcgagttcgtcccagtcgaattccatgaaattcgacaagtgaaagcctcgtttaagaaactgatgcgagcctgcatcccgagtacaatcccgacggattcggaggttacatttctcaaagctctgggggatagcgaatggttcccgcagctgcacaggatcatgcaactagcagttgtggtctccgaggttcttgagaacggttccagtgtactggtgtgcctggaagaagggtgggacataactgctcaagtaacatcgctagtgcagttgctttccgatcctttctatcgcactttggaaggtttccagatgctggtagagaaagagtggctatcgttcggacacaaattctcccagcgctcttcccttacactaaactgccaggggagcggctttgcaccggtgttccttcaatttctggactgcgtccatcaggttcacaaccagtaccccactgaatttgagttcaacttgtattatctaaagttcttggcttttcactatgtctccaaccggtttaagacatttttgctcgactccgattacgaacgcttagagcacggcaccctgttcgatgacaaaggcgagaagcatgccaaaaagggcgtctgcatctgggaatgcattgataggatgcacaaacgcagtccaatcttcttcaattatctctacagtccactcgaaatcgaggcactgaaacctaatgtgaacgtcagtagcctaaagaagtgggactactacattgaagagactctatctaccgggccaagctatgactggatgatgttgacccccaaacacttccccagcgaggacagtgatttggccggcgaagccggaccaagaagccagcgccggaccgtgtggccttgctacgatgacgtgagttgcactcagcctgatgccttaactagcctgttttctgagatcgagaagcttgaacataagctgaaccaggcccctgagaaatggcagcagctgtgggagcgggtcacggtcgacttaaaggaggagcccaggacagatcgcagccaacgtcatttaagtcgtagtcctggaattgtgagtacgaatctcccgtcctaccaaaagagatcactcttacacctgcctgactcctccatgggcgaggaacagaacagctcaatatccccaagcaacggcgttgagagacgagcagcaaccctatattcccagtataccagcaagaatgacgaaaatcgctcctttgaaggaaccctatacaagcggggcgcactgctgaaggggtggaagccccgatggttcgtgctagatgtgaccaaacaccagctgcgctactatgattctggtgaagataccagctgtaaagggcatatcgatttggctgaagtcgaaatggtcattcctgccggaccatcaatgggggccccaaagcacacttcagacaaagccttcttcgatctgaaaacatctaaacgcgtgtataacttctgcgcacaggacggtcagagcgcccagcagtggatggacaagatccagagctgcatctccgatgcgtag

SEQ ID NO: 134081 - DNA, 4791 bp, synthetic construct
  misc_feature 1..4791: note = Description of Artificial Sequence: Synthetic coding sequence
  source 1..4791: mol_type = other DNA
atggagtctagggaaaccctcagttcctcacgtcagcgcggcggcgagagtgactttctgccggtttcgtccgcaaagcctcctgccgcccctggctgcgccggcgaacccctgctatctacccctggcccggggaagggaattccagtcgggggcgaacgcatggaaccagaggaggaagacgaactgggttcaggtcgggacgttgattctaatagtaatgccgactccgagaaatgggttgccggcgatgggcttgaggagcaggagttctccatcaaggaagcgaacttcaccgagggcagccttaaattgaaaatacagacaacaaagagagcgaaaaaaccgcctaaaaatttagagaattacatctgtcctcccgagataaagattacaattaagcagagtggcgatcagaaggtgagtcgtgcaggtaagaacagtaaggctaccaaggaagaggaaagatctcacagcaagaagaaactgctcactgcgtctgaccttgccgcctcagacttgaaaggtttccaaccccaagcgtatgagcgtcctcagaaacacagcaccctacattatgatacaggcctcccccaggatttcacaggtgataccttgaagcctaagcatcagcagaaatcctccagccagaatcatatggattggtcaacgaactctgactctggtccagtgacccagaactgcttcatttcaccagaatcagggagagagacagcttcaacaagcaagatccctgcacttgagccagtagcaagcttcgcgaaagcccagggcaagaaagggagcgctggaaatacctggtctcagctatccaacaacaataaagacttgctcctggggggcgtcgccccttctccttcctcacattcttcgcccgctccgccgagctcatctgctgaatgtaatggactccagcccttagtcgaccaggacggcggaggcacaaaagaaccaccggaaccccccacagtgggctcaaagaaaaagagcagcaagaaggatgtcatctcacagacaatccctaatcccgatctcgattgggtgaaaaacgcccagaaggcctttgataacaccgagggaaagagggaggggtacagtgcagattctgcccaagaagcttcacccgcccggcaaaacgtatctagtgcctctaatcctgaaaacgattcttcccacgtgaggataactatccctattaaggccccctcgctagaccctacaaaccacaaacggaagaagcgtcagtccatcaaggcagtggtcgagaagatcatgcctgaaaaggcacttgcaagtggtatcacgatgtcatcagaggtagtaaacaggatcctctctaattctgagggcaataagaaagatccacgagtgcctaagttatctaaaatgatagagaacgaatcgcctagcgtcggactggaaaccggaggaaatgcggagaaagtgatcccaggcggcgtttctaagcccagaaaacctcctatggttatgacgcccccgacatgtaccgaccatagtccttccagaaagcttccagagatccaacaccccaagttcgccgccaagcggagatggacttgttccaaaccaaagccgtccaccatgctgagagaagccgtcatggcaaccagtgacaaactgatgctcgagcccccaagtgcctaccctatcacccccagctcacccctgtatactaacaccgactctctgaccgtcattacccccgtgaaaaaaaaacgggggcgcccgaaaaaacagcctctgctaactgtggagaccattcatgagggaacatccacatctccagtcagtcccattagcagagagtttcctgggactaaaaaaaggaagagacgcagaaacctcgcaaagcttgcacaattggtacccggggaggataagccaatgtctgagatgaaatttcataagaaagtcggaaagctaggagtgctcgataagaagaccataaaaactattaataagatgaagactcttaaacgaaagaatattcttaatcaaatccttagctgtagctcatcggtcgctctgaaagctaaggccccaccagaaacttcccccggggccgccgccatagaatctaagctgggaaagcagatcaacgtgagcaagaggggcaccatatacattggcaaaaagcgaggaaggaaaccccgtgcagaactgccccctccatccgaggagcccaagaccgcaattaaacacccgcggcccgtgagttcccagcctgacgtaccagctgtgccaagtaacttccagtcgcttgtggcctcctcacccgccgctatgcacccactaagcacacaacttggggggtcgaacggtaatttatcaccggccagtaccgaaaccaacttctccgagctcaagaccatgcccaatctgcagcccatctcggccctgccaacaaagacgcagaaagggatccattccggcacttggaagctgtcgccacccagactcatggcgaattctcccagccatctctgcgaaatagggagtcttaaggagatcacgctgtctcccgttagtgaaagccattccgaagagaccattcctagtgattcaggaataggcacagacaacaattccacatccgaccaggcagagaagagtagtgaatcacggaggagatactcctttgatttttgctccctggacaatcccgaggcaatcccatctgacaccagcaccaaaaatcgacacgggcacagacagaagcacctcatcgtagataacttcctggctcacgaatcgcttaagaagcctaaacacaagcgaaaaaggaagtcgctccagaatagagacgatttacaatttctggcagacctggaggaactcatcacgaagttccaggtttttaggatcagccaccgctcatacaccttttaccatgaaaatccctacccaagcatctttagaatcaatttcgatcattactatcccgtcccctacattcagtacgacccattactctatctaagacggacgtccgacctcaagtcaaaaaaaaaaagggggagacctgccaaaacaaatgatactatgactaaggttcccttcctacagggcttttcctatccgattcccagcgggtcctactacgcaccgtacgggatgccgtatacctcaatgccaatgatgaacctgggttactatggccagtaccccgcacctttatacttatcccatactctaggagctgcttccccctttatgcgacccactgtgcctcctccccaattccacacaaactctcatgtaaagatgtctggcgcagccaagcacaaagccaaacacggcgtgcatttgcaagggcctgtcagtatgggcctgggggacatgcagccaagtctcaatccgcccaaagttggctcggcctcactgagctcgggccggcttcataaacgaaaacacaagcacaaacataaacacaaggaggatcggatcttaggaactcatgataatctgagtgggctctttgctgggaaagctaccgggttttcaagtcacatcctgagcgagcgattgagcagtgcagataaagagctacctctagtgtctgagaagaacaagcataaagagaagcagaagcatcaacattccgaagccggacataaagctagcaagaacaattttgaggtcgatacactttcaaccttgtccctttccgatgcccagcattggacgcaggccaaagagaagggggacctgtcctctgaacctgtggactcatgcaccaagagatactctggctcaggcggggacggtggaagtacacggtcggagaacctcgacgtgtttagtgagatgaatcctagtaatgataaatgggattccgatgtgtcaggatctaagagaaggtcatacgaggggttcggcacataccgcgaaaaagacattcaggccttcaagatgaataggaaggagcggtcttcctatgacagcagtatgtctccgggcatgccgtctccacacctgaaggtcgaccaaaccgcagtacacagtaaaaatgaagggagcgtcccaactatgatgaccagaaaaaagcctgcagcggtggatagcgttaccatcccgcccgcccccgtcctatctctgctcgccgcgtccgccgctacaagtgacgcagttgggagcagcctaaagaagagatttaagcgacgagaaatcgaagcgattcagtgcgaagtgaggaagatgtgcaattatacaaagattttgtcgactaagaagaacttggatcacgtcaacaagatcttgaaagcaaaaaggctgcagcgccagtccaaaacaggtaataattttgtcaaaaagcggagaggccggccccgcaagcagcccacccagtttgacgaagattcccgggaccagatgcccgtccttgaaaaatgcattgacttaccgagcaaaagaggccagaaaccaagcctcagcccactggtgcttgaacctgccgcctcccaagataccatcatggcaaccatcgaagcggtaatccacatggcacgtgaggcccctccactgcctcccccccccccccctccgctcccgccgcctcccccgccacccttaccaccaccgccgccccttcctaagactcccagagggggaaagaggaaacacaaacctcaggcccctgctcaacctccccagcagtcccctccgcagcagcctctccctcaggaagaggaggtcaaagcgaagagacagcggaaatcccggggctctgagtcagaggtgctcccctag

SEQ ID NO: 134082 - DNA, 729 bp, synthetic construct
  misc_feature 1..729: note = Description of Artificial Sequence: Synthetic coding sequence
  source 1..729: mol_type = other DNA
atggagagtagggaaactctgtcaagctcaaggcagagaggaggcgagtccgatttcctaccagtgtcttccgctaaacctccagccgctcccggctgcgcaggcgaaccgcttctgagtacaccaggccctgggaaaggcattcctgtgggcggcgaacgaatggaaccagaagaggaagatgagctgggctctgggagggatgtggattctaattccaatgcagatagtgaaaagtgggttgctggcgatggattggaggaacaagaattcagcattaaggaagcaaacttcaccgaaggttcacttaagctgaaaattcaaaccactaagagggccaagaagccgccaaaaaacctggagaattatatttgccctccagagatcaaaattacaatcaagcagagtggtgaccaaaaggtgtccagagccggcaaaaacagtaaggccaccaaggaggaagaaaggagccactccaagaagaaactcttgactgccagtgacctcgcggcttccgatctgaagggctttcagcctcagataaaggacagctccaaggaagaggtgtggaagaggcggggaggccagggaatcccgtttaaaaaacagttcttgagtcaggagcgtgcaatgtgcttctcctgtccacggaatccgttccccgcaaagcctgggtcactgaccctgccattccattccgagccagccgtatgggcacaagaagtgtag

SEQ ID NO: 134083 - DNA, 414 bp, synthetic construct
  misc_feature 1..414: note = Description of Artificial Sequence: Synthetic coding sequence
  source 1..414: mol_type = other DNA
atggagagcagggaaaccctgtcctcttctcgccagagaggaggcgagtccgatttcctccctgtgtcaagcgcgaaacctccagcggctcctgggtgtgctggggagcccctcctcagtacgcctggccctggtaaggggattcccgtgggaggagaacgcatggaacctgaggaagaggacgaattaggctcgggccgggacgtcgactctaattcaaacgccgactccgagaaatgggtggccggagacggcttggaagaacaggaattctccatcaaggaggcgaatttcaccgaaggctcattgaagctgaagatccagactaccaaaagagctaaaaaaccccccaaaaacctggagaactacatctgccccccagagatcaaaattactattaaacagtctggatag
